United States Patent Application Publication US 2024/0327476 A1 - sequence listing, part 21

SEQ ID NO: 23309 - DNA, 4273 bp, Homo sapiens
  source 1..4273: mol_type = unassigned DNA
gaaatgcaaagcaggggctgtggggaaatctcaccaacccctcctcccctgggaggtggcaaaggtggtggactgggctgctgggaccctggggaggaatgaaacagaggctgtgttgatggcctgcagttccttgtaatgtggtcatcaaacggtgtacagttcccgtctgtggctgcaggctggagagctgactgctggcacagatacagcctgacctcgggtcaacacttctcggagtccagaggggttgggagtgggacaggtggcctcccagggacgcctccctgagtggccagtggtgccgcttgtccctgcacctgtagctgccctgagcacccccactggacacagtgggcattgcaccctccggagaaagctgcccttgttccacgtgcgagccctgtccccagcgccatgggctgtgctacctgcagtaacgcagactgcgagccccggctgcctctccagtgctctctctcctctggccttcagcaggctgggtcacagagaattttcccactgtaaaaaaccgagcaagtctggataagtgaggctggctccatgtatccagaatcaacgacgggctccccggctcggctctcgctgcggcagacgggctcccccgggatgatctacagtactcggtatgggagtcccaaaagacagctccagttttacaggaacctgggcaagtctggcctgcgggtctcctgcctgggacttggaacatgggtgaccttcggaggccagatcaccgatgagatggcagagcagctcatgaccttggcctatgataatggcatcaacctcttcgatacagcagaagtctacgcagccggcaaggctgaagtggtactgggaaacatcattaagaagaaaggatggaggcggtccagcctcgtcatcaccaccaagatcttctggggcggaaaggcggagacggagcggggcctgtccaggaagcacataatcgaaggtctgaaagcttccctggagcgactgcagctggagtacgtggatgtggtgtttgccaaccgcccggaccccaacaccccgatggaagagaccgtccgcgccatgacccacgtcatcaaccaggggatggccatgtactggggcacgtcacgctggagctccatggagatcatggaggcctactccgtggcccggcagttcaacctgaccccgcccatctgcgagcaggctgagtaccacatgttccagcgtgagaaagtggaggtgcagctgccggagctgttccacaagataggagtgggcgccatgacctggtcccctctggcctgtggcattgtttctggcaagtacgacagtggcatcccaccctactcaagagcctccttgaagggctaccagtggctgaaggacaagatcctcagtgaggagggccggcgccagcaagccaagctgaaggagctgcaggccatcgccgagcgcctgggctgcaccctgccccagctggccatagcctggtgcctgaggaatgagggagtcagctccgtgctcctgggggcctccaatgcggaccagctcatggagaacattggggcaatacaggtccttccgaaactgtcatcttccattatccacgagattgatagtattttgggcaataaaccctacagcaaaaaggactacagatcctaagccgcccccgcccgcctgctcggacagtttccgttccctcctagtctctgttcgctcgcttaagctgttttgaagccaagtgaagagtgtggtttgcatccaagagaaaacaccacactgtgatgtcatcgggaaatgatctcccaagtcgctgccagacaccacccactgcttcgccggacaatgtcgaagtccagtctgtgccggggaaggcactggttaggaaggatgttcaaacggtcccacccaagcctgtcacctctgctcatcctccaagaccacccagctttctcccagccacagccaagattcccaaagtcaaggcccaaagatttccaaggttcccaaagtcaaggccaggccaaggcctggttgggtccttggggcgggcagggccagcctctcctctgctgagaatccccacttggtgtagggggagaggggaaaggggtctggcccatcgaggggccccttctgccagggccttggttgctggggcagggcctccccactgggggtcttcctccacctcccactttccaagggctccaggaatctggggcctgaccacagattcctctcccatccttttctgctccaacctgccccactgggtcccggcaggggccatgcctaccaagctcgagctggcccttgacccccacccacccccacccttgctggcaggggcagggaccccagggggattgactctgcagtttgggagccacaaaaagcgtagcggtgtgatttctagctcagcctcccaccgtcttcctcctacacaccaatgatgagcctcatgccagtgaggcccggagcgcttgggaggggtcccagtggggcaggcccctctgtctggccacccctctgtcctggccccggaaggccctgtggtcatgtgctcctagctgcacggtggctgctggccacaccacggcaagtggcagcaggggccggccctgtgcacaaggatgcactcctctcggcccctgtagactttctctaaagccgcccgccagcccaggccgctgctctgcaccgagctggtgggcttgggttttgtggagcgcatgcttggaccctttcagtaaggaagggtctttggggttttctgtgcccatgacttgggggctgcacccccacagcacccccacaatgtaggaaaagacctcagggaacctctccctggaaagacgggcagggctggttagcccctcccactgcctgacacctgggacaggctgggcagaggggagagagggcaggacaggccagagtgacgcccccgtgcagcttgggccggagggcaagggatgccagtaagtctgcaggtgcggggtgccacctacaggcccaggcctgtgtcccaagcagtacccaggctttgcagaccacgcggggcagggctccactgaagccacccccacccctcgccagctagctccatagggaagcctgtgtctcctgcccccagggcgcaccctcagtgcaggcacctctgttcccgctttgcccctggaggagccactattccagaaggctccaccctgccgtcctgcgggagcctgctgtccagtcctggccgggccaaggcctgggaaactgtgaaagtcagaaaggccagcggggagaggctggggcgaggggaggagggggatcagcttctgctattaccgaccccccttcatgctgcccctggcgcctagaacccttgcccctcctcatagaccaagtcccgggggtctccactcagtcctgctgcctgcttcaccagaagcagccctgtgagtgtggggtggggaagtcccttcccaacggaggtcccagcctatggccctgggcccaggtgggggtcgcctgcttccttcccggacagggtcctgcagtggccaatggtgccagagggcaggtggcccaccctcgccatcagggagggtggctggccccatccccactgccacccagccccacccactgttggaagagggaccagcgcgaggtggtgcccagggtgggcactgctgcttaatgcgaggcacacctggggcagctgagcccccaaaggctgcgggtttgccaaacacagagaggccaggccccagtgtcaggatgcagtcagcctctggcgcagctctttccacgacctggttcctggatgtcctgcttgctccacacccatctacagggaggatgtgagggggctctgcctcctagggccaggtcccccctctcgggaggaggtattgggtaggaccatccaagaaagggcagaagaccaagggcagtcggggtctagaaaggagggcgctggccctgctggacgcttcggagcccccactgtttcccactcagctttgtgctcagatcccaggtcccaaggagtgacaggggcttcctcccaccttctgtccttgtccagtcatgtaaataatgtgctttttctctccccgagtctttttttttaaacctaccgtggttcctcagctaactgcattccctacccaggcagagactgtcctatgcctcgagcttccaaacgagactcagaccgcgacacagccaccgtatttatggaatgacaaaataaataaagcccaaaccc

SEQ ID NO: 23310 - DNA, 3171 bp, Homo sapiens
  source 1..3171: mol_type = unassigned DNA
gctgcaccaacttcctgttgggtgctgtggtcccaaggcgcgtgctttgcagcagatgtgtgacctggcgttcccctgagtgctcggaaaatggccttgtctccggtcgttcccgttcaggagcagaattttcccactgtaaaaaaccgagcaagtctggataagtgaggctggctccatgtatccagaatcaacgacgggctccccggctcggctctcgctgcggcagacgggctcccccgggatgatctacagtactcggtatgggagtcccaaaagacagctccagttttacaggaacctgggcaagtctggcctgcgggtctcctgcctgggacttggaacatgggtgaccttcggaggccagatcaccgatgagatggcagagcagctcatgaccttggcctatgataatggcatcaacctcttcgatacagcagaagtctacgcagccggcaaggctgaagtggtactgggaaacatcattaagaagaaaggatggaggcggtccagcctcgtcatcaccaccaagatcttctggggcggaaaggcggagacggagcggggcctgtccaggaagcacataatcgaaggtctgaaagcttccctggagcgactgcagctggagtacgtggatgtggtgtttgccaaccgcccggaccccaacaccccgatggaagagaccgtccgcgccatgacccacgtcatcaaccaggggatggccatgtactggggcacgtcacgctggagctccatggagatcatggaggcctactccgtggcccggcagttcaacctgaccccgcccatctgcgagcaggctgagtaccacatgttccagcgtgagaaagtggaggtgcagctgccggagctgttccacaagataggagtgggcgccatgacctggtcccctctggcctgtggcattgtttctggcaagtacgacagtggcatcccaccctactcaagagcctccttgaagggctaccagtggctgaaggacaagatcctcagtgaggagggccggcgccagcaagccaagctgaaggagctgcaggccatcgccgagcgcctgggctgcaccctgccccagctggccatagcctggtgcctgaggaatgagggagtcagctccgtgctcctgggggcctccaatgcggaccagctcatggagaacattggggcaatacaggtccttccgaaactgtcatcttccattatccacgagattgatagtattttgggcaataaaccctacagcaaaaaggactacagatcctaagccgcccccgcccgcctgctcggacagtttccgttccctcctagtctctgttcgctcgcttaagctgttttgaagccaagtgaagagtgtggtttgcatccaagagaaaacaccacactgtgatgtcatcgggaaatgatctcccaagtcgctgccagacaccacccactgcttcgccggacaatgtcgaagtccagtctgtgccggggaaggcactggttaggaaggatgttcaaacggtcccacccaagcctgtcacctctgctcatcctccaagaccacccagctttctcccagccacagccaagattcccaaagtcaaggcccaaagatttccaaggttcccaaagtcaaggccaggccaaggcctggttgggtccttggggcgggcagggccagcctctcctctgctgagaatccccacttggtgtagggggagaggggaaaggggtctggcccatcgaggggccccttctgccagggccttggttgctggggcagggcctccccactgggggtcttcctccacctcccactttccaagggctccaggaatctggggcctgaccacagattcctctcccatccttttctgctccaacctgccccactgggtcccggcaggggccatgcctaccaagctcgagctggcccttgacccccacccacccccacccttgctggcaggggcagggaccccagggggattgactctgcagtttgggagccacaaaaagcgtagcggtgtgatttctagctcagcctcccaccgtcttcctcctacacaccaatgatgagcctcatgccagtgaggcccggagcgcttgggaggggtcccagtggggcaggcccctctgtctggccacccctctgtcctggccccggaaggccctgtggtcatgtgctcctagctgcacggtggctgctggccacaccacggcaagtggcagcaggggccggccctgtgcacaaggatgcactcctctcggcccctgtagactttctctaaagccgcccgccagcccaggccgctgctctgcaccgagctggtgggcttgggttttgtggagcgcatgcttggaccctttcagtaaggaagggtctttggggttttctgtgcccatgacttgggggctgcacccccacagcacccccacaatgtaggaaaagacctcagggaacctctccctggaaagacgggcagggctggttagcccctcccactgcctgacacctgggacaggctgggcagaggggagagagggcaggacaggccagagtgacgcccccgtgcagcttgggccggagggcaagggatgccagtaagtctgcaggtgcggggtgccacctacaggcccaggcctgtgtcccaagcagtacccaggctttgcagaccacgcggggcagggctccactgaagccacccccacccctcgccagctagctccatagggaagcctgtgtctcctgcccccagggcgcaccctcagtgcaggcacctctgttcccgctttgcccctggaggagccactattccagaaggctccaccctgccgtcctgcgggagcctgctgtccagtcctggccgggccaaggcctgggaaactgtgaaagtcagaaaggccagcggggagaggctggggcgaggggaggagggggatcagcttctgctattaccgaccccccttcatgctgcccctggcgcctagaacccttgcccctcctcatagaccaagtcccgggggtctccactcagtcctgctgcctgcttcaccagaagcagccctgtgagtgtggggtggggaagtcccttcccaacggaggtcccagcctatggccctgggcccaggtgggggtcgcctgcttccttcccggacagggtcctgcag

SEQ ID NO: 23311 - DNA, 3129 bp, Homo sapiens
  source 1..3129: mol_type = unassigned DNA
gctgcaccaacttcctgttgggtgctgtggtcccaaggcgcgtgctttgcagcagatgtgtgacctggcgttcccctgagtgctcggaaaatggccttgtctccggtcgttcccgttcaggagcagaattttcccactgtaaaaaaccgagcaagtctggataagtgaggctggctccatgtatccagaatcaacgacgggctccccggctcggctctcgctgcggcagacgggctcccccgggatgatctacaggaacctgggcaagtctggcctgcgggtctcctgcctgggacttggaacatgggtgaccttcggaggccagatcaccgatgagatggcagagcagctcatgaccttggcctatgataatggcatcaacctcttcgatacagcagaagtctacgcagccggcaaggctgaagtggtactgggaaacatcattaagaagaaaggatggaggcggtccagcctcgtcatcaccaccaagatcttctggggcggaaaggcggagacggagcggggcctgtccaggaagcacataatcgaaggtctgaaagcttccctggagcgactgcagctggagtacgtggatgtggtgtttgccaaccgcccggaccccaacaccccgatggaagagaccgtccgcgccatgacccacgtcatcaaccaggggatggccatgtactggggcacgtcacgctggagctccatggagatcatggaggcctactccgtggcccggcagttcaacctgaccccgcccatctgcgagcaggctgagtaccacatgttccagcgtgagaaagtggaggtgcagctgccggagctgttccacaagataggagtgggcgccatgacctggtcccctctggcctgtggcattgtttctggcaagtacgacagtggcatcccaccctactcaagagcctccttgaagggctaccagtggctgaaggacaagatcctcagtgaggagggccggcgccagcaagccaagctgaaggagctgcaggccatcgccgagcgcctgggctgcaccctgccccagctggccatagcctggtgcctgaggaatgagggagtcagctccgtgctcctgggggcctccaatgcggaccagctcatggagaacattggggcaatacaggtccttccgaaactgtcatcttccattatccacgagattgatagtattttgggcaataaaccctacagcaaaaaggactacagatcctaagccgcccccgcccgcctgctcggacagtttccgttccctcctagtctctgttcgctcgcttaagctgttttgaagccaagtgaagagtgtggtttgcatccaagagaaaacaccacactgtgatgtcatcgggaaatgatctcccaagtcgctgccagacaccacccactgcttcgccggacaatgtcgaagtccagtctgtgccggggaaggcactggttaggaaggatgttcaaacggtcccacccaagcctgtcacctctgctcatcctccaagaccacccagctttctcccagccacagccaagattcccaaagtcaaggcccaaagatttccaaggttcccaaagtcaaggccaggccaaggcctggttgggtccttggggcgggcagggccagcctctcctctgctgagaatccccacttggtgtagggggagaggggaaaggggtctggcccatcgaggggccccttctgccagggccttggttgctggggcagggcctccccactgggggtcttcctccacctcccactttccaagggctccaggaatctggggcctgaccacagattcctctcccatccttttctgctccaacctgccccactgggtcccggcaggggccatgcctaccaagctcgagctggcccttgacccccacccacccccacccttgctggcaggggcagggaccccagggggattgactctgcagtttgggagccacaaaaagcgtagcggtgtgatttctagctcagcctcccaccgtcttcctcctacacaccaatgatgagcctcatgccagtgaggcccggagcgcttgggaggggtcccagtggggcaggcccctctgtctggccacccctctgtcctggccccggaaggccctgtggtcatgtgctcctagctgcacggtggctgctggccacaccacggcaagtggcagcaggggccggccctgtgcacaaggatgcactcctctcggcccctgtagactttctctaaagccgcccgccagcccaggccgctgctctgcaccgagctggtgggcttgggttttgtggagcgcatgcttggaccctttcagtaaggaagggtctttggggttttctgtgcccatgacttgggggctgcacccccacagcacccccacaatgtaggaaaagacctcagggaacctctccctggaaagacgggcagggctggttagcccctcccactgcctgacacctgggacaggctgggcagaggggagagagggcaggacaggccagagtgacgcccccgtgcagcttgggccggagggcaagggatgccagtaagtctgcaggtgcggggtgccacctacaggcccaggcctgtgtcccaagcagtacccaggctttgcagaccacgcggggcagggctccactgaagccacccccacccctcgccagctagctccatagggaagcctgtgtctcctgcccccagggcgcaccctcagtgcaggcacctctgttcccgctttgcccctggaggagccactattccagaaggctccaccctgccgtcctgcgggagcctgctgtccagtcctggccgggccaaggcctgggaaactgtgaaagtcagaaaggccagcggggagaggctggggcgaggggaggagggggatcagcttctgctattaccgaccccccttcatgctgcccctggcgcctagaacccttgcccctcctcatagaccaagtcccgggggtctccactcagtcctgctgcctgcttcaccagaagcagccctgtgagtgtggggtggggaagtcccttcccaacggaggtcccagcctatggccctgggcccaggtgggggtcgcctgcttccttcccggacagggtcctgcag

SEQ ID NO: 23312 - DNA, 4142 bp, Homo sapiens
  source 1..4142: mol_type = unassigned DNA
acttcccgagcttttaggggaagaggcactcgtgaataattcagcctctttcactgagatgaaaacgccctaatagaactaatggactcgctgcctcaaaactcgactctggtgggactcatctcattcaccaattgcttctgacgtcctgcagtgacactccctaatgaaaaagccgctgtgccagatccttagagtgtctggtgatccctaataaaccagactgtggcctttttaacgagcagacgcccccacgaaggcagtggcagctcccaagccaggcggcaccatgctgtccatgacgtacagcgagagtctgcggagcgtgagcagcaggtgccactctgaatgggccctgcaccccgtccgccagacggacacgctggaactgcagcggctgcgggaggtgcgggcggctgcccaggccaggaacatggagagcttcctccgcatgcacggcctttccctggacggctgcaccgcccagcgcacaggcatgaagtatcggaacctgggcaagtctggcctgcgggtctcctgcctgggacttggaacatgggtgaccttcggaggccagatcaccgatgagatggcagagcagctcatgaccttggcctatgataatggcatcaacctcttcgatacagcagaagtctacgcagccggcaaggctgaagtggtactgggaaacatcattaagaagaaaggatggaggcggtccagcctcgtcatcaccaccaagatcttctggggcggaaaggcggagacggagcggggcctgtccaggaagcacataatcgaaggtctgaaagcttccctggagcgactgcagctggagtacgtggatgtggtgtttgccaaccgcccggaccccaacaccccgatggaaggggacccatttagttcctccaagtcaaggacattcatcatagaagagaccgtccgcgccatgacccacgtcatcaaccaggggatggccatgtactggggcacgtcacgctggagctccatggagatcatggaggcctactccgtggcccggcagttcaacctgaccccgcccatctgcgagcaggctgagtaccacatgttccagcgtgagaaagtggaggtgcagctgccggagctgttccacaagataggagtgggcgccatgacctggtcccctctggcctgtggcattgtttctggcaagtacgacagtggcatcccaccctactcaagagcctccttgaagggctaccagtggctgaaggacaagatcctcagtgaggagggccggcgccagcaagccaagctgaaggagctgcaggccatcgccgagcgcctgggctgcaccctgccccagctggccatagcctggtgcctgaggaatgagggagtcagctccgtgctcctgggggcctccaatgcggaccagctcatggagaacattggggcaatacaggtccttccgaaactgtcatcttccattatccacgagattgatagtattttgggcaataaaccctacagcaaaaaggactacagatcctaagccgcccccgcccgcctgctcggacagtttccgttccctcctagtctctgttcgctcgcttaagctgttttgaagccaagtgaagagtgtggtttgcatccaagagaaaacaccacactgtgatgtcatcgggaaatgatctcccaagtcgctgccagacaccacccactgcttcgccggacaatgtcgaagtccagtctgtgccggggaaggcactggttaggaaggatgttcaaacggtcccacccaagcctgtcacctctgctcatcctccaagaccacccagctttctcccagccacagccaagattcccaaagtcaaggcccaaagatttccaaggttcccaaagtcaaggccaggccaaggcctggttgggtccttggggcgggcagggccagcctctcctctgctgagaatccccacttggtgtagggggagaggggaaaggggtctggcccatcgaggggccccttctgccagggccttggttgctggggcagggcctccccactgggggtcttcctccacctcccactttccaagggctccaggaatctggggcctgaccacagattcctctcccatccttttctgctccaacctgccccactgggtcccggcaggggccatgcctaccaagctcgagctggcccttgacccccacccacccccacccttgctggcaggggcagggaccccagggggattgactctgcagtttgggagccacaaaaagcgtagcggtgtgatttctagctcagcctcccaccgtcttcctcctacacaccaatgatgagcctcatgccagtgaggcccggagcgcttgggaggggtcccagtggggcaggcccctctgtctggccacccctctgtcctggccccggaaggccctgtggtcatgtgctcctagctgcacggtggctgctggccacaccacggcaagtggcagcaggggccggccctgtgcacaaggatgcactcctctcggcccctgtagactttctctaaagccgcccgccagcccaggccgctgctctgcaccgagctggtgggcttgggttttgtggagcgcatgcttggaccctttcagtaaggaagggtctttggggttttctgtgcccatgacttgggggctgcacccccacagcacccccacaatgtaggaaaagacctcagggaacctctccctggaaagacgggcagggctggttagcccctcccactgcctgacacctgggacaggctgggcagaggggagagagggcaggacaggccagagtgacgcccccgtgcagcttgggccggagggcaagggatgccagtaagtctgcaggtgcggggtgccacctacaggcccaggcctgtgtcccaagcagtacccaggctttgcagaccacgcggggcagggctccactgaagccacccccacccctcgccagctagctccatagggaagcctgtgtctcctgcccccagggcgcaccctcagtgcaggcacctctgttcccgctttgcccctggaggagccactattccagaaggctccaccctgccgtcctgcgggagcctgctgtccagtcctggccgggccaaggcctgggaaactgtgaaagtcagaaaggccagcggggagaggctggggcgaggggaggagggggatcagcttctgctattaccgaccccccttcatgctgcccctggcgcctagaacccttgcccctcctcatagaccaagtcccgggggtctccactcagtcctgctgcctgcttcaccagaagcagccctgtgagtgtggggtggggaagtcccttcccaacggaggtcccagcctatggccctgggcccaggtgggggtcgcctgcttccttcccggacagggtcctgcagtggccaatggtgccagagggcaggtggcccaccctcgccatcagggagggtggctggccccatccccactgccacccagccccacccactgttggaagagggaccagcgcgaggtggtgcccagggtgggcactgctgcttaatgcgaggcacacctggggcagctgagcccccaaaggctgcgggtttgccaaacacagagaggccaggccccagtgtcaggatgcagtcagcctctggcgcagctctttccacgacctggttcctggatgtcctgcttgctccacacccatctacagggaggatgtgagggggctctgcctcctagggccaggtcccccctctcgggaggaggtattgggtaggaccatccaagaaagggcagaagaccaagggcagtcggggtctagaaaggagggcgctggccctgctggacgcttcggagcccccactgtttcccactcagctttgtgctcagatcccaggtcccaaggagtgacaggggcttcctcccaccttctgtccttgtccagtcatgtaaataatgtgctttttctctccccgagtctttttttttaaacctaccgtggttcctcagctaactgcattccctacccaggcagagactgtcctatgcctcgagcttccaaacgagactcagaccgcgacacagccaccgtatttatggaatgacaaaataaataaagcccaaaccc

SEQ ID NO: 23313 - DNA, 700 bp, Homo sapiens
  source 1..700: mol_type = unassigned DNA
gctgcaccaacttcctgttgggtgctgtggtcccaaggcgcgtgctttgcagcagatgtgtgacctggcgttcccctgagtgctcggaaaatggccttgtctccggtcgttcccgttcaggagcagaattttcccactgtaaaaaaccgagcaagtctggataagtgaggctggctccatgtatccagaatcaacgacgggctccccggctcggctctcgctgcggcagacgggctcccccgggatgatctacagtactcggtatgggagtcccaaaagacagctccagttttacaggaacctgggcaagtctggcctgcgggtctcctgcctgggacttggaacatgggtgaccttcggaggccagatcaccgatgagatggcagagcagctcatgaccttggcctatgataatggcatcaacctcttcgatacagcagaagtctacgcagccggcaaggctgaagtggtactgggaaacatcattaagaagaaaggatggagccagcagggagagagggcaggacaggccagagtgacgcccccgtgcagcttgggccggagggcaagggatgccagtaagtctgcaggtgcggggtgccacctacaggcccaggcctgtgtcccaagcagtacccaggctttgcagaccacgcggggcagggctccactgaagccacccccacccctcgccagctag

SEQ ID NO: 23314 - DNA, 1202 bp, Homo sapiens
  source 1..1202: mol_type = unassigned DNA
agcgggattcgggggcgctaaagtcgcaggggcagggcgggaaggaagatccggcgcggggcacaggatccggagctggagcccccagaattttcccactgtaaaaaaccgagcaagtctggataagtgaggctggctccatgtatccagaatcaacgacgggctccccggctcggctctcgctgcggcagacgggctcccccgggatgatctacaggaacctgggcaagtctggcctgcgggtctcctgcctgggacttggaacatgggtgaccttcggaggccagatcaccgatgagatggcagagcagctcatgaccttggcctatgataatggcatcaacctcttcgatacagcagaagtctacgcagccggcaaggctgaagtggtactgggaaacatcattaagaagaaaggatggaggcggtccagcctcgtcatcaccaccaagatcttctggggcggaaaggcggagacggagcggggcctgtccaggaagcacataatcgaaggtctgaaagcttccctggagcgactgcagctggagtacgtggatgtggtgtttgccaaccgcccggaccccaacaccccgatggaagagaccgtccgcgccatgacccacgtcatcaaccaggggatggccatgtactggggcacgtcacgctggagctccatggagatcatggaggcctactccgtggcccggcagttcaacctgaccccgcccatctgcgagcaggctgagtaccacatgttccagcgtgagaaagtggaggtgcagctgccggagctgttccacaagataggagtgggcgccatgacctggtcccctctggcctgtggcattgtttctggcaagtacgacagtggcatcccaccctactcaagagcctccttgaagggctaccagtggctgaaggacaagatcctcagtgaggagggccggcgccagcaagccaagctgaaggagctgcaggccatcgccgagcgcctgggctgcaccctgccccagctggccatagcctggtgcctgaggaatgagggagtcagctccgtgctcctgggggcctccaatgcggaccagctcatggagaacattggggcaatacaggtccttccgaaactgtcatcttccattatccacgagattgatagtattttgggcaataaaccctacagcaaaaaggactacagatcctaa

SEQ ID NO: 23315 - DNA, 4201 bp, Homo sapiens
  source 1..4201: mol_type = unassigned DNA
ggaccgaggactggccgaggggcgcgccccgtccgctgccacccgcgggaggagcctcggaaggcggcgcaccgcgccgcacactcagtccaagaacccgcctcgcgtcactgtcgccgtcagggccgcggagccaatcagagcccaagtcgagggctgcgctttgcgagcgccagccaatcggtgcggcggcgggcccatcctgatttgcatgtccgacgacccctcaaccaatggtaatgtgactggcgtgaacaatagccaatcagaagctggaagaggcgtggccccgggcgtcccacgaggtgaagatgctgctggcggaacctgcaggagctagcgggattcgggggcgctaaagtcgcaggggcagggcgggaaggaagatccggcgcggggcacaggatccggagctggagcccccagaattttcccactgtaaaaaaccgagcaagtctggataagtgaggctggctccatgtatccagaatcaacgacgggctccccggctcggctctcgctgcggcagacgggctcccccgggatgatctacagtactcggtatgggagtcccaaaagacagctccagttttacaggaacctgggcaagtctggcctgcgggtctcctgcctgggacttggaacatgggtgaccttcggaggccagatcaccgatgagatggcagagcagctcatgaccttggcctatgataatggcatcaacctcttcgatacagcagaagtctacgcagccggcaaggctgaagtggtactgggaaacatcattaagaagaaaggatggaggcggtccagcctcgtcatcaccaccaagatcttctggggcggaaaggcggagacggagcggggcctgtccaggaagcacataatcgaaggtctgaaagcttccctggagcgactgcagctggagtacgtggatgtggtgtttgccaaccgcccggaccccaacaccccgatggaagagaccgtccgcgccatgacccacgtcatcaaccaggggatggccatgtactggggcacgtcacgctggagctccatggagatcatggaggcctactccgtggcccggcagttcaacctgaccccgcccatctgcgagcaggctgagtaccacatgttccagcgtgagaaagtggaggtgcagctgccggagctgttccacaagataggagtgggcgccatgacctggtcccctctggcctgtggcattgtttctggcaagtacgacagtggcatcccaccctactcaagagcctccttgaagggctaccagtggctgaaggacaagatcctcagtgaggagggccggcgccagcaagccaagctgaaggagctgcaggccatcgccgagcgcctgggctgcaccctgccccagctggccatagcctggtgcctgaggaatgagggagtcagctccgtgctcctgggggcctccaatgcggaccagctcatggagaacattggggcaatacaggtccttccgaaactgtcatcttccattatccacgagattgatagtattttgggcaataaaccctacagcaaaaaggactacagatcctaagccgcccccgcccgcctgctcggacagtttccgttccctcctagtctctgttcgctcgcttaagctgttttgaagccaagtgaagagtgtggtttgcatccaagagaaaacaccacactgtgatgtcatcgggaaatgatctcccaagtcgctgccagacaccacccactgcttcgccggacaatgtcgaagtccagtctgtgccggggaaggcactggttaggaaggatgttcaaacggtcccacccaagcctgtcacctctgctcatcctccaagaccacccagctttctcccagccacagccaagattcccaaagtcaaggcccaaagatttccaaggttcccaaagtcaaggccaggccaaggcctggttgggtccttggggcgggcagggccagcctctcctctgctgagaatccccacttggtgtagggggagaggggaaaggggtctggcccatcgaggggccccttctgccagggccttggttgctggggcagggcctccccactgggggtcttcctccacctcccactttccaagggctccaggaatctggggcctgaccacagattcctctcccatccttttctgctccaacctgccccactgggtcccggcaggggccatgcctaccaagctcgagctggcccttgacccccacccacccccacccttgctggcaggggcagggaccccagggggattgactctgcagtttgggagccacaaaaagcgtagcggtgtgatttctagctcagcctcccaccgtcttcctcctacacaccaatgatgagcctcatgccagtgaggcccggagcgcttgggaggggtcccagtggggcaggcccctctgtctggccacccctctgtcctggccccggaaggccctgtggtcatgtgctcctagctgcacggtggctgctggccacaccacggcaagtggcagcaggggccggccctgtgcacaaggatgcactcctctcggcccctgtagactttctctaaagccgcccgccagcccaggccgctgctctgcaccgagctggtgggcttgggttttgtggagcgcatgcttggaccctttcagtaaggaagggtctttggggttttctgtgcccatgacttgggggctgcacccccacagcacccccacaatgtaggaaaagacctcagggaacctctccctggaaagacgggcagggctggttagcccctcccactgcctgacacctgggacaggctgggcagaggggagagagggcaggacaggccagagtgacgcccccgtgcagcttgggccggagggcaagggatgccagtaagtctgcaggtgcggggtgccacctacaggcccaggcctgtgtcccaagcagtacccaggctttgcagaccacgcggggcagggctccactgaagccacccccacccctcgccagctagctccatagggaagcctgtgtctcctgcccccagggcgcaccctcagtgcaggcacctctgttcccgctttgcccctggaggagccactattccagaaggctccaccctgccgtcctgcgggagcctgctgtccagtcctggccgggccaaggcctgggaaactgtgaaagtcagaaaggccagcggggagaggctggggcgaggggaggagggggatcagcttctgctattaccgaccccccttcatgctgcccctggcgcctagaacccttgcccctcctcatagaccaagtcccgggggtctccactcagtcctgctgcctgcttcaccagaagcagccctgtgagtgtggggtggggaagtcccttcccaacggaggtcccagcctatggccctgggcccaggtgggggtcgcctgcttccttcccggacagggtcctgcagtggccaatggtgccagagggcaggtggcccaccctcgccatcagggagggtggctggccccatccccactgccacccagccccacccactgttggaagagggaccagcgcgaggtggtgcccagggtgggcactgctgcttaatgcgaggcacacctggggcagctgagcccccaaaggctgcgggtttgccaaacacagagaggccaggccccagtgtcaggatgcagtcagcctctggcgcagctctttccacgacctggttcctggatgtcctgcttgctccacacccatctacagggaggatgtgagggggctctgcctcctagggccaggtcccccctctcgggaggaggtattgggtaggaccatccaagaaagggcagaagaccaagggcagtcggggtctagaaaggagggcgctggccctgctggacgcttcggagcccccactgtttcccactcagctttgtgctcagatcccaggtcccaaggagtgacaggggcttcctcccaccttctgtccttgtccagtcatgtaaataatgtgctttttctctccccgagtctttttttttaaacctaccgtggttcctcagctaactgcattccctacccaggcagagactgtcctatgcctcgagcttccaaacgagactcagaccgcgacacagccaccgtatttatggaatgacaaaataaataaagcccaaacccatcggtctctgtga

SEQ ID NO: 23316 - DNA, 822 bp, Homo sapiens
  source 1..822: mol_type = unassigned DNA
agacgtccaccaaagccacacatcgcgacacacggaggcagaaagcagcggtctcctaagaagttagacacgaggaatctcgggcagcgagaattttcccactgtaaaaaaccgagcaagtctggataagtgaggctggctccatgtatccagaatcaacgacgggctccccggctcggctctcgctgcggcagacgggctcccccgggatgatctacagtactcggtatgggagtcccaaaagacagctccagttttacaggaacctgggcaagtctggcctgcgggtctcctgcctgggacttggaacatgggtgaccttcggaggccagatcaccgatgagatggcagagcagctcatgaccttggcctatgataatggcatcaacctcttcgatacagcagaagtctacgcagccggcaaggctgaagtggtactgggaaacatcattaagaagaaaggatggaggcagaggggagagagggcaggacaggccagagtgacgcccccgtgcagcttgggccggagggcaagggatgccagtaagtctgcaggtgcggggtgccacctacaggcccaggcctgtgtcccaagcagtacccaggctttgcagaccacgcggggcagggctccactgaagccacccccacccctcgccagctagctccatagggaagcctgtgtctcctgcccccagggcgcaccctcagtgcaggcacctctgttcccgctttgcccctggaggagccactattccagaaggctccaccctgccgtcctgcgggagcctgctgtccagtcctggccgggccaaggcctgg

SEQ ID NO: 23317 - DNA, 959 bp, Homo sapiens
  source 1..959: mol_type = unassigned DNA
agtgcatagctctggcacgcgctgcaccaacttcctgttgggtgctgtggtcccaaggcgcgtgctttgcagcagatgtgtgacctggcgttcccctgagtgctcggaaaatggccttgtctccggtcgttcccgttcaggagcagaattttcccactgtaaaaaaccgagcaagtctggataagtgaggctggctccatgtatccagaatcaacgacgggctccccggctcggctctcgctgcggcagacgggctcccccgggatgatctacagtactcggtatgggagtcccaaaagacagctccagttttacaggaacctgggcaagtctggcctgcgggtctcctgcctgggacttggaacatgggtgaccttcggaggccagatcaccgatgagatggcagagcagctcatgaccttggcctatgataatggcatcaacctcttcgatacagcagaagtctacgcagccggcaaggctgaagtggtactgggaaacatcattaagaagaaaggatggaggcggtccagcctcgtcatcaccaccaagatcttctggggcggaaaggcggagacggagcggggcctgtccaggaagcacataatcgaaggtctgaaagcttccctggagcgactgcagctggagtacgtggatgtggtgtttgccaaccgcccggaccccaacaccccgatggaagagaccgtccgcgccatgacccacgtcatcaaccaggggatggccatgtactggggcacgtcacgctggagctccatggagatcatggaggcctactccgtggcccggcagttcaacctgaccccgcccatctgcgagcaggctgagtaccacatgttccagcgtgagaaagtggaggtgcagctgccggagctgttccacaagataggagtgggcgccatgacctggtcccctctggcctgtggcattgtttctggcaa

SEQ ID NO: 23318 - DNA, 961 bp, Homo sapiens
  source 1..961: mol_type = unassigned DNA
agtgcatagctctggcacgcgctgcaccaacttcctgttgggtgctgtggtcccaaggcgcgtgctttgcagcagatgtgtgacctggcgttcccctgagtgctcggaaaatggccttgtctccggtcgttcccgttcaggagcagaattttcccactgtaaaaaaccgagcaagtctggataagtgaggctggctccatgtatccagaatcaacgacgggctccccggctcggctctcgctgcggcagacgggctcccccgggatgatctacaggaacctgggcaagtctggcctgcgggtctcctgcctgggacttggaacatgggtgaccttcggaggccagatcaccgatgagatggcagagcagctcatgaccttggcctatgataatggcatcaacctcttcgatacagcagaagtctacgcagccggcaaggctgaagtggtactgggaaacatcattaagaagaaaggatggaggcggtccagcctcgtcatcaccaccaagatcttctggggcggaaaggcggagacggagcggggcctgtccaggaagcacataatcgaaggtctgaaagcttccctggagcgactgcagctggagtacgtggatgtggtgtttgccaaccgcccggaccccaacaccccgatggaagagaccgtccgcgccatgacccacgtcatcaaccaggggatggccatgtactggggcacgtcacgctggagctccatggagatcatggaggcctactccgtggcccggcagttcaacctgaccccgcccatctgcgagcaggctgagtaccacatgttccagcgtgagaaagtggaggtgcagctgccggagctgttccacaagataggagtgggcgccatgacctggtcccctctggcctgtggcattgtttctggcaagtacgacagtggcatcccaccctactcaagagcctccttgaagg

SEQ ID NO: 23319 - DNA, 500 bp, Homo sapiens
  source 1..500: mol_type = unassigned DNA
ggggcctgggtgtgcggctatggggactgaactgtcgagggctcctgctgcctctgcaggggacaggccctgccagctactgagtgagcagcctgcggcagccctgactcactgcgggtcgtgccgtctgtgcagcactggggtacccaccacccagtgccagaattttcccactgtaaaaaaccgagcaagtctggataagtgaggctggctccatgtatccagaatcaacgacgggctccccggctcggctctcgctgcggcagacgggctcccccgggatgatctacaggaacctgggcaagtctggcctgcgggtctcctgcctgggacttggaacatgggtgaccttcggaggccagatcaccgatgagatggcagagcagctcatgaccttggcctatgataatggcatcaacctcttcgatacagcagaagtctacgcagccggcaaggctgaagtggtactgggaaacatcattaagaagaaaggatggagg

SEQ ID NO: 23320 - DNA, 486 bp, Homo sapiens
  source 1..486: mol_type = unassigned DNA
gggggcgctaaagtcgcaggggcagggcgggaaggaagatccggcgcggggcacaggatccggagctggagcccccagaggcctcacgacaggactagtgccttggtaagaagaggaaaaggccagagctccctccctaccctgtgtggacccagcaggaaggaattctgtctgcaagagagagccctcacctggaaccaaatcagccaggaccctgatgttggatttaccagcctccagcaccgtgagacagaaacgtctgctgtttcagccacccagaattttcccactgtaaaaaaccgagcaagtctggataagtgaggctggctccatgtatccagaatcaacgacgggctccccggctcggctctcgctgcggcagacgggctcccccgggatgatctacagtactcggtatgggagtcccaaaagacagctccagttttacaggaacctgggcaagtctggcctgcgggtctcctgcct

SEQ ID NO: 23321 - DNA, 1336 bp, Homo sapiens
  source 1..1336: mol_type = unassigned DNA
agagtgtctggtgatccctaataaaccagactgtggcctttttaacgagcagacgcccccacgaaggcaggaacctgggcaagtctggcctgcgggtctcctgcctgggacttggaacatgggtgaccttcggaggccagatcaccgatgagatggcagagcagctcatgaccttggcctatgataatggcatcaacctcttcgatacagcagaagtctacgcagccggcaaggctgaagtggtactgggaaacatcattaagaagaaaggatggaggcggtccagcctcgtcatcaccaccaagatcttctggggcggaaaggcggagacggagcggggcctgtccaggaagcacataatcgaaggtctgaaagcttccctggagcgactgcagctggagtacgtggatgtggtgtttgccaaccgcccggaccccaacaccccgatggaagagaccgtccgcgccatgacccacgtcatcaaccaggggatggccatgtactggggcacgtcacgctggagctccatggagatcatggaggcctactccgtggcccggcagttcaacctgaccccgcccatctgcgagcaggctgagtaccacatgttccagcgtgagaaagtggaggtgcagctgccggagctgttccacaagataggagtgggcgccatgacctggtcccctctggcctgtggcattgtttctggcaagtacgacagtggcatcccaccctactcaagagcctccttgaagggctaccagtggctgaaggacaagatcctcagtgaggagggccggcgccagcaagccaagctgaaggagctgcaggccatcgccgagcgcctgggctgcaccctgccccagctggccatagcctggtgcctgaggaatgagggagtcagctccgtgctcctgggggcctccaatgcggaccagctcatggagaacattggggcaatacaggtccttccgaaactgtcatcttccattatccacgagattgatagtattttgggcaataaaccctacagcaaaaaggactacagatcctaagccgcccccgcccgcctgctcggacagtttccgttccctcctagtctctgttcgctcgcttaagctgttttgaagccaagtgaagagtgtggtttgcatccaagagaaaacaccacactgtgatgtcatcgggaaatgatctcccaagtcgctgccagacaccacccactgcttcgccggacaatgtcgaagtccagtctgtgccggggaaggcactggttaggaaggatgttcaaacggtcccacccaagcctgtcacctctgctcatcctccaagacca

SEQ ID NO: 23322 - DNA, 2458 bp, Homo sapiens
  source 1..2458: mol_type = unassigned DNA
atgcaggtgtctatcgcgtgtaccgagcagaaccttcgcagccggagcagtgaggaccgtctgtgtggaccccggccgggccccgggggcggtaatggtgggccggccggcggggggcacgggaatcctccggggggtggagggtctggccccaaggcccgagctgcactggttccccgacccccagcgcccgctggggccctccgagagagcaccggccgaggcactggcatgaaatacaggaacctagggaagtctggtcttcgggtatcctgtcttggcctaggtacctgggtcacatttggttctcagatctcagatgagacagcagaggatgtgctgactgtagcctatgagcatggtgtaaacctgtttgacaccgccgaagtgtacgcagcaggaaaggctgaaagaaccctagggaacatcctcaagagcaaaggttggaggagatcaagctatgtcatcactaccaagattttttggggaggacaggcagaaaccgagcgaggtttaagccgaaagcacatcattgagggcttgcgaggatccctggaacgcctccagctgggatacgtggacattgtctttgccaatcgctcagaccccaactgtcctatggaggagattgtgcgagccatgacctatgtcatcaaccagggcctggccctatactgggggacatcccgatggggggctgcagaaatcatggaggcctactccatggccagacagttcaatctgattcctccagtgtgtgaacaagcggagcaccatctgtttcagagggagaaggtggagatgcagctgccagagctctaccacaagattggagttggatcagtcacttggtaccctctagcctgtggtctcattactagcaagtatgatgggcgagtcccagatacttgcagggcctccatcaagggctaccagtggctcaaggacaaagtgcagagtgaagatggcaagaagcaacaagccaaagtcatggaccttcttcctgtcgctcaccagctgggctgcaccgtggcccagcttgctattgcgtggtgtctccgcagtgagggtgtcagctctgtcttgctgggggtgtcgagtgcggagcagttgatagaacacctgggcgcgctacaggtgctgagccagctgaccccgcagacagtgatggaaatagacgggctcctgggaaacaagccgcattccaagaagtagtctgtcgcgggcgcagggacccaacccggtgtcgctgcacccgcccgagccccgctcctcgcagccgcctctcccgctccggatccctccacgcagcggccggagccagactagccccgcccaccaacgagtcccggcttcgagtagtgatacgcatgaacaaagccatatccttttgcagtggggtcgagagagaaagtagcacgcccgccccctgctgcgtctttctaggcccttcttgcaaatcccgggcatgagctactcgccgtcggctctctgccacttcgtctcgctccctactctcctccccttattcccgaggcccagaaaagaaaacaaaaacaaaaacccagcacatacaagaaacatacagtgtacctcaaaaggggcccttgaaatgtcatcaaagggtaataacctagtgagtgagttgtgatgtcatctggaacataggaaatggggctcttagcgtattcggtacgaaggaagccaggctggtcctggcaggaagtaaatgataatctttgggaaaccaggaccctgcctcccagcccagaggtggaggagggcggtcagggtggggtctacagtggcacagcactgacaaaggtagagggaaatgtaatagcacatctacgctgcagtctggtgaaagtggccggggtggtccttggaaaacagttgggctgttcttggcaggaattagtgacagcctttccgtcacgggcagggacgccttgatttaaaaaaaataaataaataaaacgtctgggtatagacttttgagccttgagcagggcctcctacctggcagtggggaactgcagtcttcctcctggcaataaacctaaagcaataatgatggccccttctctgtaagacttcccaggtaactgtaaataaacctcagcttgatcctcacagtgtctaaagttgcaggggcttgggaggttagggtcacagtctcacttgtctggccctctcgccccctaacattagaaatctgctagcattagctttctctccattgctcattcaccttggtgacccaggcatcgggctcctagtcactgttctcatcaaggaccaagacaccagataccccaggccccagttttcttccttcagctaccacattccttagaacccagaaatctggcttcataattttgttcctcctctttctatgaaagacttagctatctgcctttatttgtttgtatttaaagtaatattagccata

SEQ ID NO: 23323 - DNA, 1488 bp, Homo sapiens
  source 1..1488: mol_type = unassigned DNA
atgacggtgatgtctggggagaacgtggacgaggcttcggccgccccgggccacccccaggatggcagctacccccggcaggccgaccacgacgaccacgagtgctgcgagcgcgtggtgatcaacatctccgggctgcgcttcgagacgcagctcaagaccctggcgcagttccccaacacgctgctgggcaaccctaagaaacgcatgcgctacttcgaccccctgaggaacgagtacttcttcgaccgcaaccggcccagcttcgacgccatcctctactactaccagtccggcggccgcctgcggaggccggtcaacgtgcccctggacatgttctccgaggagatcaagttttacgagttgggcgaggaggccatggagaagttccgggaggacgagggcttcatcaaggaggaggagcgccctctgcccgagaaggagtaccagcgccaggtgtggctgctcttcgagtaccccgagagctcggggcccgccagggtcatcgccatcgtctccgtcatggtcatcctcatctccatcgtcatcttttgcctggagacgctccccgagctgaaggatgacaaggacttcacgggcaccgtccaccgcatcgacaacaccacggtcatctacaattccaacatcttcacagaccccttcttcatcgtggaaacgctgtgtatcatctggttctccttcgagctggtggtgcgcttcttcgcctgccccagcaagacggacttcttcaaaaacatcatgaacttcatagacattgtggccatcattccttatttcatcacgctgggcaccgagatagctgagcaggaaggaaaccagaagggcgagcaggccacctccctggccatcctcagggtcatccgcttggtaagggtttttagaatcttcaagctctcccgccactctaagggcctccagatcctgggccagaccctcaaagctagtatgagagagctagggctgctcatctttttcctcttcatcggggtcatcctgttttctagtgcagtgtactttgccgaggcggaagaagctgagtcgcacttctccagtatccccgatgctttctggtgggcggtggtgtccatgaccactgtaggatacggtgacatgtaccctgtgacaattggaggcaagatcgtgggctccttgtgtgccatcgctggtgtgctaacaattgccctgcccgtacctgtcattgtgtccaatttcaactatttctaccaccgagaaactgagggggaagagcaggctcagttgctccacgtcagttcccctaacttagcctctgacagtgacctcagtcgccgcagttcctctactatgagcaagtctgagtacatggagatcgaagaggatatgaataatagcatagcccattatagacaggtcaatatcagaactgccaattgcaccactgctaaccaaaactgcgttaataagagcaagctactgaccgatgtttaa

SEQ ID NO: 23324 - DNA, 7983 bp, Homo sapiens
  source 1..7983: mol_type = unassigned DNA
aaatggaccgagcggacccgccgccgcacgcaccctgctccactccaagctcctaagggctcctggcgcgccgcgtagccttggcgaggtccgcgctggggtgcggagagcgaagggaactggagagccatgtagatccaggctctcgcccgcccgcctccttcgggatcgaatcaagggctcccatagtgttaggagggggcgagagtgctgtttatcgtcatttgcctcggagcttcgagagagggtggtattttgcttttccgccccgcatcctccggaactccctgcaccggagagaggacggcgtctccaggttgctggcaaccggtgagaatgggggtagggaaggaacattttcgccgtagctgctccgtaaagcgattgtccaactgagaggggcgtcggacgagtggaccagggcggcgagtttgcccggcgcgtctcggatgctgctgcggcggccgccgcggctcccgccagggcactgcaaagacgacctgccgcattcccactcgggctctccgctgactcagcaccgcccctgcgccaagccagccggccagcgtgcatcgatcgccctggtgggagcttagaaggcggcaggcgaagaggggtaggaggggggagagccgaggagaagcagagagggtggcaggcgtggggatctgccgagccggcactgcaccgggtcctaggaaggctctcggaggggaggggaggccagggcgacccccgaagcaatggcccagtccgctagaacggcactgcgttaaggcacctgggatcaggaagaaatatctaaacaacaacaacagaaaaccaacaaacccccaaacccaaacccaaccctctgcaaaaagctgcacccggcccgcaggcgagggggattccaaactgagtgaaaggcagggtggaggggaaggcagcgagaggcaaagtcgcagatctcccgacctgctcgtgttgaagcacctccccctgggcgtgagggagacgcgcgctccggtgggggggccgcttgggtcccccccacccctggtccctggctgcttcccaccccgggctctctcctggcctcccacccccgcgcccggcttccaccatgacggtgatgtctggggagaacgtggacgaggcttcggccgccccgggccacccccaggatggcagctacccccggcaggccgaccacgacgaccacgagtgctgcgagcgcgtggtgatcaacatctccgggctgcgcttcgagacgcagctcaagaccctggcgcagttccccaacacgctgctgggcaaccctaagaaacgcatgcgctacttcgaccccctgaggaacgagtacttcttcgaccgcaaccggcccagcttcgacgccatcctctactactaccagtccggcggccgcctgcggaggccggtcaacgtgcccctggacatgttctccgaggagatcaagttttacgagttgggcgaggaggccatggagaagttccgggaggacgagggcttcatcaaggaggaggagcgccctctgcccgagaaggagtaccagcgccaggtgtggctgctcttcgagtaccccgagagctcggggcccgccagggtcatcgccatcgtctccgtcatggtcatcctcatctccatcgtcatcttttgcctggagacgctccccgagctgaaggatgacaaggacttcacgggcaccgtccaccgcatcgacaacaccacggtcatctacaattccaacatcttcacagaccccttcttcatcgtggaaacgctgtgtatcatctggttctccttcgagctggtggtgcgcttcttcgcctgccccagcaagacggacttcttcaaaaacatcatgaacttcatagacattgtggccatcattccttatttcatcacgctgggcaccgagatagctgagcaggaaggaaaccagaagggcgagcaggccacctccctggccatcctcagggtcatccgcttggtaagggtttttagaatcttcaagctctcccgccactctaagggcctccagatcctgggccagaccctcaaagctagtatgagagagctagggctgctcatctttttcctcttcatcggggtcatcctgttttctagtgcagtgtactttgccgaggcggaagaagctgagtcgcacttctccagtatccccgatgctttctggtgggcggtggtgtccatgaccactgtaggatacggtgacatgtaccctgtgacaattggaggcaagatcgtgggctccttgtgtgccatcgctggtgtgctaacaattgccctgcccgtacctgtcattgtgtccaatttcaactatttctaccaccgagaaactgagggggaagagcaggctcagttgctccacgtcagttcccctaacttagcctctgacagtgacctcagtcgccgcagttcctctactatgagcaagtctgagtacatggagatcgaagaggatatgaataatagcatagcccattatagacaggtcaatatcagaactgccaattgcaccactgctaaccaaaactgcgttaataagagcaagctactgaccgatgtttaaaaaacaaaggcaagcaaacaaaaaagccccacttagcagctcaaaagacttaaaaaacaaaacagaaaacctagtgactcatgtcacgctttgtagatactttactaagtagacttggaatgctctatttaactgtcaatgcgttgttgcattgaggattttgggggtggtgaaccagaagctttcaagatccatgacaaaataaactattttccttttattaaaaaatgggaaaagagagagtattttctaaaactggcttaaaaagattcagtccacgaactagtctaggtaaaataataatcatatgcttccccaaactgaaacatttttaatgctttggtttctttaacttttttaaaaactcagaacaagatgatcacttagaaatatgaaattgaaattcgcatgggactccagtaaaacatctttgcaaactgcgtagcacattgaagacagtgcatcagatgtattatatgtaacatgatagaccagccaaaatggacaatgaatagatatttttatttcgatcaactgaactgcatattacaaggtgaaaaaagaaaactccgattacttaagactggttcacaaagcaccttataaattggatactggtcctgatctgtagggatttccccctgggcccattctctttctaatccagattattctctaagaaaaagttaactgaattaaattaattgattcttctgcagtgccgctaaatggtctcaactgcagatgagccaaatacaggtcttttctcaccaggcctgcactccgacccctggctttcagaactggatgtaaaaccttagcctccttattgcaagagagcacaaatgaagttaaatgtaagcatgtttgaatctgatacaatttattttataatcgcatgctgagaagttaacccagacaataggggataagcttaagttgaaatcgattcttctaaaaatagatcctttttcatttgcattcaccaaaagtgcactcctccatttattaactattttattagtaaataaagtactgtatttaagtgcatatgttagtcagatgggaacaataactttttggagctcaaagcatgttctcttattcagcattatggcctatttgactaagatgtaccttgaattaattaatgcatgatttcagtaataaaaattttaaaagtaataaaaattacaagtctgtggggtgaaaggcccaatagaaattatggggggtgggggtgggggcactcagtcaattttcctgcctttgctcagggaaataccaggtttttgtgcaggtataggcggagagaggaccaatatgcccatcccttaaagggaagccatgtgaaaaactcaataagtcatcaaagtacatatagcaacacctaagaacaagtattctttctagctgaagacaaacacaagcaacacaaacaagcaaacaaacaaacaaacaaaaaggtgcaatactgcatgttttttggtgcattcttaggatgtaaatgaaaatgtttctctattatatgcatccgaagcagagctgatttttttttctttgcagtcattctttgaagtctgtagagacttcagccctccccttgaggctccctgaagaaactaaaccaattgatttaatagttgcttagtgcctttatcctgtacccacagtgaactgtagaaagtgcctccttaacacagctgagaagttaggtagcaaaagtggggaagggttggggcacagaccttttgctttttctttttccattctcgctctctcatttcaccactgtgagaagaccacaccaccctaaaccctggagaggagagacccaggagggtgctgtctctctggccatctactagcattggtccctttgacagcctgacgctggatgtgaactgagacccatctttgaactggacatgaactgtgaacttgttttttcctctctccaccaaagccaagataaactttttgggaatttgtttcctatcgagggccactttggacacacaaggcttcctcaggtccagtgtagtgctcctggcacctttccttatttttttctctgtcggtaacagcactttgcaaatctctctgacggtccagtcttttcaggcattgttgtggatgtgggaacactcagttcataataacctttcctaggccttccctcctggtctacccctttcagatatttcctgatgcccctatgatcttcccacctggcagtcacttcacaggttgaacatctaacttctgctgcccccccgttacccagcccagagaatggtggggaccctgttcctggctgaaagagagccacggaacacaggcctctggagctcggcagctgcccaccggtggagaggtactcacagcctttcaaaggaccctgaggtggggaatcttcattctgcacttagcatgtggctgcctgttacctgacattctggcccagcttcttctgaaaatctgtcctgcttctcccacccctttcccccatcctgtcctagaactagcagtgaggcaatcaccctagaaactcgagttacacccattctggctaactcgattaaaagaaagaacatggatatcttattttcctatgtgacttttgtgaatctgtgagatgaacacaacacacatcgtggaagatgaggggccaagaactgcgcagcatccgactacagggcattaaaccctcccatgtgatgtctccttctcgtctgaaccttaactcattctggcgattcctttcctacttgcttaaaaatccccaattaggaaaaaaatgccaacctcctcccaggcttggggttatcttgatctttcatttcaacgttgaggtctagtgcacacagaacttgaaacaccgcactctgtcaacagcaataatccactcagtactgtgggatggatgggttaatggatgagaaaacggcaccaagactgactttgggtatttggtatatttaccgtggttacactctggactggttgattcttctgcatgtgatatagaaaaaagtgctgcatgcggtgaacctgtcagtctgggactgggggtgagttgttgttatgagtttggggtggtgtgaggaaagtgaatgctgcttagctcatctgtagctcattgcaatgaattcagtaagaatggagtacagggattatctgtgtagcataggcatgcaatgtttgaccaagctcttaccctcgcactgtaatgtgttgaaatgtctttgtagacctgaaggtgcacttaacaaaactgcctattaagggatgactattttttggtttacttattcatatttattttagcagcctttttaccttttcttccccttcctaggcatggagctgtaacagctcatgtcctgactatgtgttttctccagaaggagaagacttctgatgtgctgatagctataattcctctcttccagtctattggggccctagttcaatagggtggcaatagaagagttggtcacaccagggctgttagccatcccagaatctctgaagtggttaactcacctgaagtgatctgaatcagagagaccaaagacattcatttcctctgtcctcagatttctagaagacaaattctagccaggaaaactttctgtttttgcatctcccttttcccatttgtgcccaactccccttgcactccctggagacttgagttctgattttcagttatatcagctcattgggagtgtgttcgtgggtgagccttgcagaatcagataaaccaatagcaagtccttctccaggattctggccagtgggcagtcatttccctgaaatgaattgtagggcaggtttagattccactatggtggacgtgaagcacaggtggtgtcacaatcttgatttgcttgagaattaaaaaaatacatgtaaatggtaaatgaggaatacatttttttaaagtagaaatttggtttagcctataaaaggccttcttcacattgtgtatagttacacgtttttcaaattaggtaccatctaaaagtcaataaaaatagtttcctagccctctcatttaatataggagacctcaaaacacatgctttttaacaattttacattttaattcttagtttggtagattggattgaaagaaaggagaaagaacattagcagaaggcactttcccattttcttccaggaatgacttattcctggggtggtgagaattggtgggtggtaaccatccatagtataaaattgttagaaagaatataaactgccaaacaagcatgttatcttcaggcttttccaagcaagaatgaagtcttttgatgtttatgttcattttaagaagacaaacaaactaaaattttaagaccagacacaacccaagttgaattgtgatctcaggaggtgaactctcattcaccatgtggcatattactacctgtatttatatcatggaatttcagggtatatgtgaacatgtctagtatgactcaggtaaacctttaaagaatgtatgttacttaccatttttgtaaagaagcaaacaggagctgaattgttaaccaaaactgttccattaccttgggtcactgtgcaaactaattcagggtacagatataaagtttagaagccttgggattaaatgccagcctctttgctcaggcaaaatgaccctgggctttcttgggaagtccagcatgtatgtaaggggtgaggccctgctgacctcagggcttttcgctttaaggagattaaccctagtcacagtgattttcatttaggagctaactaggagtttactctttatgacgtgaaacttcaaagagtatagaaaacttttgtaccacaatcaaagaagaagaaatggtgtatggaaagaaaacaaaacaaaacaagaaatctcttgtaaaatattccaggtcaaagttgtctcctctccaaaccttgcagaagcacctttcttctcttcagcgcactgttttgggactgtttatgcagcagatgtaagtagacaacatggactccatgtgacatgcctctaatagtaaagataaagtattactgaggttaaaaataaaaattgagtagtattaatttaaagtgcaccatcaggacaacaaaccatttaagctgaaaaaacgctattttatttcttgagtttgccagttgcttccaccttgagttaaggacgtgtctcatcttcacctactgcgcattctcccttctctaactgtgtaatatgtcaggtcaaggacattgaatgttatgaattgagaacctaattgatgcgcatagttttcatctatgcaattttacttgcttctgtcactttacgatctgttcatatttggcatcaattaaagatactttttaaggatcttatcaaggaa

SEQ ID NO: 23325 - DNA, 1959 bp, Homo sapiens
  source 1..1959: mol_type = unassigned DNA
acaagatcatgctttttattattaaggaatgttaacttcctcttttagtatggcccctctgccatcacatatggagaccatcctttgctggggagaatctccccttctttgccaggatcctttttttgcaatttctcctagttattagtttatgcaaactcaggggtacaaaatgattttaagggaagcatgctgccaaaataaccatgacgttccttcccaagctacaaataagtcattgattagcccattggtgtaccttacctcaataaacaagggccagttgtattctgccctggatcttgtataatgaacttcttcttctccatagctcacagcaggcagtgaaggctgaggatcttcatgcttcttccctggctcccctagaatggatgtgtgtggctggaaagaaatggaggttgcgctggtcaattttgataattcagatgaaatccaagaagagccaggctatgccacagacttcgactcaaccagcccaaaaggccggcctgggggcagctccttctccaacgggaagatcctcatcagcgaaagcaccaaccatgagacggccttctccaagcttccgggagactatgctgaccccccagggcctgagccagtggtcctaaatgaaggaaaccagcgggtgatcatcaacattgctgggctgagatttgagacccagctcagaacccttagtcagttcccagagactctcctgggagaccgggaaaaaaggatgcagttctttgactccatgagaaatgagtatttctttgatcggaaccggcccagttttgatggaatcctatattattaccaatctggtgggaaaattcggcgcccagccaatgttcccattgatatctttgctgatgaaatctccttctatgagctgggtagtgaggccatggaccagttccgggaggatgaaggcttcatcaaagaccctgaaacactgctacccaccaatgacatccaccgtcagttctggctcctctttgagtaccctgaaagttccagcgctgcccgtgctgtggccgtggtctcggtgttggttgtggtcatctccatcaccatcttctgcctggagacactgccagagttccgggaggatagggagctaaaggtggtcagagaccccaatctcaacatgagcaagacagtcctctcccagaccatgttcaccgaccctttcttcatggtggagtctacctgcatcgtgtggttcaccttcgagctggtgctccggttcgtggtctgccccagcaagactgacttcttcaggaacatcatgaacatcattgacatcatctccattatcccctactttgcaactctcatcacagagctagtccaggagacagagccgagtgcccaacagaacatgtccctggccatcctgaggatcatccgcctggtgagggtcttccgcatcttcaagctctcgcgccactccaaggggctgcagatcctcgggcaaacactgaaggcgtccatgcgggagttggggttgctcatcttctttctcttcattggagtcatcctcttctccagtgcagtctactttgctgaggtggatgagccagagtcccatttctctagcattcctgatggcttctggtgggcagtggtcaccatgacaactgtaggctatggggacatgtgcccgaccaccccaggggggaagattgtgggcactctgtgtgccattgcaggggtcctcaccattgccctccctgtgcctgtcattgtctccaacttcaattacttctaccaccgggagactgagaatgaagaaaagcagaacatcccaggagaaattgaaagaatcctcaacagtgtaggctcaagaatgggcagcacagactctcttaataagaccaatggtggctgttccacagagaagtctaggaaatgatcagtccagggcttcttgggtccatcctgtctctc

SEQ ID NO: 23326 - DNA, 3346 bp, Homo sapiens
  source 1..3346: mol_type = unassigned DNA
gcggaggcgggcgcgcgccccgcaggggagggggcggagagcgcgagaaggagggaggaggcgtccccgtgcgggagcccggctgaccgcgccagacccagacagagcatcgcggctttggctgcaacaggcggtgggctcggctcgggggcggaggcggcgaaagggcggggagcgcgaggaggagcgacctggcctcaccgctgccgcctcttccccgccgcatggacgagcgcctcagccttctgcgctcgccgccgccgccctcagcccgccaccgcgcccaccctcctcagcgcccagcgagcagcggcggtgcccacacgctggtgaaccacggctacgcggagcccgccgcaggccgcgagctgccgcccgacatgaccgtggtgcccggggaccacctgctggagccggaggtggccgatggtggaggggccccgcctcaaggcggctgtggcggcggcggctgcgaccgctacgagccgctgccgccctcactgccggccgcgggcgagcaggactgctgcggggagcgcgtggtcatcaacatctccgggctgcgcttcgagacgcagctgaagaccctttgccagttccccgagacgctgctgggcgaccccaagcggcgcatgaggtacttcgacccgctccgcaacgagtacttcttcgaccgcaaccggcccagcttcgacgccatcctctactactatcagtccgggggccgcatccgccggccggtcaacgtgcccatcgacattttctccgaggagatccgcttctaccagctgggcgaggaggccatggagaagttccgcgaggacgagggcttcctgcgggaggaggagcggcccttgccccgccgcgacttccagcgccaggtgtggctgctcttcgagtaccccgagagctccgggccggcccggggcatcgccatcgtgtccgtgctggtcatcctcatctccattgtcatcttctgcctggagacgctgccggagttccgcgacgagaaggactaccccgcctcgacgtcgcaggactcattcgaagcagccggcaacagcacgtcggggtcccgcgcaggagcctccagcttctccgatcccttcttcgtggtggagacgctgtgcatcatctggttctccttcgaactgctggtgcggttcttcgcttgtcctagcaaagccaccttctcgcgaaacatcatgaacctgatcgacattgtggccatcattccttattttatcactctgggtaccgagctggccgaacgacagggcaatggacagcaggccatgtctctggccatcctgagggtcatccgcctggtaagggtcttccgcatcttcaagctgtcgcgccactccaaggggctgcagatcctcgggcaaacgctgaaggcgtccatgcgggagctgggattgctcatcttcttcctctttattggggtcatccttttctccagcgcggtctactttgccgaggcagacgaccccacttcaggtttcagcagcatcccggatgccttctggtgggcagtggtaaccatgacaacagtgggttacggcgatatgcacccagtgaccatagggggcaagattgtgggatctctctgtgccatcgccggtgtcttgaccatcgcattgccagttcccgtgattgtttccaacttcaattacttctaccaccgggagacagaaggggaagagcaatcccagtacatgcacgtgggaagttgccagcacctctcctcttcagccgaggagctccgaaaagcaaggagtaactcgactctgagtaagtcggagtatatggtgatcgaagaggggggtatgaaccatagcgctttcccccagacccctttcaaaacgggcaattccactgccacctgcaccacgaacaataatcccaactcttgtgtcaacatcaaaaagatattcaccgatgtttaatatgtgatacaagtgacatgctgtgctcagtattgtgtggaacgtgcccccttggtctgcctatgcccttgttttatacatttccagaccattcatcaaggaaaggacctgaagaagtggaaagcacacttcattctccctctccctgctgcttcatactgaaacaggtgcctgttttgcaagtgggctgcattctctcagctctccttttccctcttaccctctctctcttaacattgtaaacaacagacttacgttaaacttcatttctagtacacgccctatttaaaaaagagcagtacatcctgggaggaaatgaaactaaagaacagttagagtaactgtttaacctcagaattttaaaggcagttgtttctttcctaagcacatcaattcgtagtaaatgatgcttcggtttgatggacctttcaacgttatttattgaatatgtatttcggttgcctaccctgtagatatgtggatgaagagtctaactagaataatgacttgtaaacccaccatgagttatttggtttttgacttaaattcctatttgaatcccctttcccggaattttaagtgtctctacaactttgaataaagggaaatgcccaagatgtcctgatctgactaattagtttaattctttcgggcttgctaagcatttctaaagcattagactaacagattcctgtgaagttctgtgcatatgtcccagccccaacaactatcaaagtctagaaacagatgttttcagtgttgctgagagaaacaaaaaatttcctaatgcatctgagagataagcttcggcagtatcacaagaagattaaagtggcagacaccccttccagcggaagttactaattcggacctgactgatgcagtttccatagcaacccatgtttcctgggaaacccgaaaaaggttgtcatggcatctcttgctctctagccccacctcccagcccctgccgtttccacagtaacctttccagatggttcctacttaaatgatttcataaggaaaaccactgtttgaataagccgcacaaaaaataaagttaagtctgagactctaaggaggtgaaatgaatcccaaatgcattttttaactatgaaaatcattatgtcattccataatgactgaatcaaggaggaaaatatggtgtttggaatgttagatattaaccacaataaggcatgatctggattaaatgccatttattaggcaataatttttaaagatgcttctctacagttttctttctccaagaactttcaagccaacaaatgaaatttaaaagcaaatgtaaaagtgttctgtacataagcaaatgagagattcgatcagtgtgcctgaaaccttactacaagggaccttcaggctttctcttt

SEQ ID NO: 23327 - DNA, 4172 bp, Homo sapiens
  source 1..4172: mol_type = unassigned DNA
gttcgcggccaggggaggcgtgtgctgctcccgcagccagcgagagcgagagagggatggatgttggaggaggaattcgggcttaacaagtgatcgctgctgtctaggattttgtttcttttcgggggaaccttgacttcctttcccaggcaatccctcctgtgctgaactccagaggaaccaggagtcttggggtcttctctggggcagccccaacccccacccccaggctccagccgcgaggactctgtgcacccctcgggccaggcaacagaacttgttccgtggatatttggagcctccacctgccaaacccgagtgattccttttaccaccccccgccccccacccaggatcattcttcccctcctccagctgttgcagcttgagggggaaaaacaagccagccggtggattttctttatttttatttttcgccccgccggggaacggtgaagtgcttcttctgcatgattttggctgaagaatgctctgcatttccttgatttctatggagacctcagagctggttttgcttctgctgacacctcatctagcaccttctctacctcccagggtctttgcctctatctgtggtttggcattgtacctgggtacaggaagcctttgatgaacttaaaaggagagcctggagaatcatcctgatagactttgagtagaaatggctggacatacttcaaaccacatcttaacatggttcgagccatcactagaaggcaagtgctaacagtaaaggcttatttgcattttatttacatttaatggactgagcattggccaatttccatggcagaaaaatatatttcattttctaggcacaacttctggctgtcagacacttgctgcctttgaatcttgcagcaacatcactaaccacatcccagacatatttccaaatttcaacatctacccccaaaacataggtgtctgagagactccagcattttcggacttcttagtcttgagagtgccaggctatttatctcgaccagccaagctctggagagcaatgttgaatccctgagaagagagagcatggggcgtgctgatttaaaaacagaaaatgcaaagttggactgaaaatatccttagtcttccaagcaatctgcttaagggttccaaacttaccttaatttggtgagaaaagaagctgccctatttttctttcttcttcttctacaactggaaccagccatttccgaaaaccaccaccatggaggttgcaatggtgagtgcggagagctcagggtgcaacagtcacatgccttatggttatgctgcccaggcccgggcccgggagcgggagaggcttgctcactccagggcagctgcagcagctgctgttgcagcggccacagctgctgtcgaaggtagcgggggttctggtgggggctcccaccaccaccaccagtcacgcggggcctgtacctcccatgaccctcagagcagccggggtagtcggaggaggaggcgacagcggtctgagaagaagaaagcccactaccggcagagcagcttccctcattgctctgacctgatgcccagtggctctgaggagaagatcctgagggagctgagtgaggaggaggaagatgaggaggaggaggaagaggaggaagaggagggaaggttttactatagtgaagatgaccatggtgatgagtgttcctacacggatctgctgcctcaggatgagggcggtggcggctacagttcagtccgctacagtgactgttgtgaacgtgtggtgataaatgtgtcaggcctacgctttgagacccaaatgaaaactctggcccagtttccagagactttgttgggagaccctgaaaagaggactcagtactttgaccctttgcgcaatgagtatttttttgacaggaaccgccccagctttgatgccatcttgtattattatcaatcaggaggccgcctgaagaggccagtcaatgtcccctttgatatcttcactgaggaggtgaagttctatcagttgggggaggaggccctgttgaagtttcgggaggacgagggctttgtgagagaagaggaagacagggccctccccgagaatgaatttaaaaagcagatttggctcctctttgaatatccagagagctccagtcctgcaaggggcatagccattgtgtccgtcctggtcatcttaatctccattgtcatcttttgcctggaaaccttgcctgagtttagggacgacagggatctcgtcatggcactgagtgctggcgggcatggtgggttgttgaatgatacttcagcaccccatctggagaactcagggcacacaatattcaatgaccccttcttcatcgtggaaacagtctgtattgtatggttttcctttgagtttgtggttcgctgctttgcttgtcccagccaagcactcttcttcaaaaacatcatgaacatcattgacattgtctccattttgccttacttcatcacactgggcactgacctggcccagcaacaggggggtggcaatggtcagcagcagcaggccatgtcctttgccatcctcagaatcattcgtctggtccgagtattccggatcttcaaactctccaggcactccaaaggcctgcagatcctgggccacaccctcagagccagcatgcgggaactgggccttctgatcttcttcctcttcattggggtcatcctcttttctagtgctgtgtattttgcagaggcggatgaacctactacccatttccaaagcatcccagatgcattttggtgggctgtggtgaccatgacaactgtgggctatggggacatgaagcccatcactgtagggggcaagattgtcgggtccctgtgtgccattgcgggtgtcttaaccattgctttgccagtgccagtgattgtctctaactttaactatttctaccacagagagactgaaaatgaggaacagacacagctaacgcagaatgcagtcagttgtccatacctcccctctaatttgctcaagaaatttcggagctctacttcttcttccctgggggacaagtcagagtatctagagatggaagaaggagttaaggaatctctgtgtgcaaaggaggagaagtgtcagggaaagggggatgacagtgagacagataaaaacaactgttctaatgcaaaggctgtggagactgatgtgtgaatctttttccacctgccactgctcccccctcagcatctccaaatatatttatgcatagagagtgcagttatgaaaatgaaatatgcaaatgatccaatgcatacagtagtacactatttaatggttatacatggcataattgttactaaacttgtattacatatcaaataaatgatacatcttggagaagagggaggaataggagcaaatctatctttatatttttattagaatgcaagaattttgcacattaactggaaaagatgttaacagtaaagatggagagagagagtgtgtgcgtgtgtgtgtatatgtgtgtgtgtgtgaagtaaattgtcaatgttagtaattgtgcagtgaagggaaaagttggcattttgaagtatttactatgtaagaactaatgaatctgagcagtcatttatcagtgctttaacagcatatcgtatgtctttggattctgtagttgttttttaaaaattgtaagaaatactgtgtagagaaaaaagaaagtaaattatttaatagactataggtcacaattttatcttggatttaattaaaatttatttttaactggaaattaacttttaaaaaggctgcaagggcctttagaaattgattatattttgttattaattttgggaagacttaacagcaaatgtctaacattatagaataagtgaaattggagaatatgtaataagttttgtttgcaggtaacaggactggatttttttttctttgcactactttatatgctggagattgagagagacttcaaactgtgaatgtttactaatgtaacagttcaatgacaatcattggaagaatgatttctttagtcttattttattgttttcttttcattgtgtgagactaatgatcatgcagataacatcacaggattctctcctcttttaaaatctaaataactgattgacaaaggaattatgaagtaaaatttagcaactga

SEQ ID NO: 23328 - DNA, 2865 bp, Homo sapiens
  source 1..2865: mol_type = unassigned DNA
ttttcggctgcttggtaacgggctgccagaagagagagaggcagagagcagggcagcggcttcttgacgtcagggccaagcgaggggatcgcgccagcaaccccagctctccccagagaggggccggccgaccgctggagcggagcctgacgccaggcgcccgcggagcgtgagtagggggcgcgggagccggtcagctggggcgcagcatgccctctgctcccgcgccatggagatcgccctggtgcccctggagaacggcggtgccatgaccgtcagaggaggcgatgaggcccgggcaggctgcggccaggccacagggggagagctccagtgtcccccgacggctgggctcagcgatgggcccaaggagccggcgccaaaggggcgcggcgcgcagagagacgcggactcgggagtgcggcccttgcctccgctgccggacccgggagtgcggcccttgcctccgctgccagaggagctgccacggcctcgacggccgcctcccgaggacgaggaggaagaaggcgatcccggcctgggcacggtggaggaccaggctctgggcacggcgtccctgcaccaccagcgcgtccacatcaacatctccgggctgcgctttgagacgcagctgggcaccctggcgcagttccccaacacactcctgggggaccccgccaagcgcctgcgctacttcgaccccctgaggaacgagtacttcttcgaccgcaaccggcccagcttcgacggtatcctctactactaccagtccgggggccgcctgcggaggccggtcaacgtctccctggacgtgttcgcggacgagatacgcttctaccagctgggggacgaggccatggagcgcttccgcgaggatgagggcttcattaaagaagaggagaagcccctgccccgcaacgagttccagcgccaggtgtggcttatcttcgagtatccggagagctctgggtccgcgcgggccatcgccatcgtctcggtcttggttatcctcatctccatcatcaccttctgcttggagaccctgcctgagttcagggatgaacgtgagctgctccgccaccctccggcgccccaccagcctcccgcgcccgcccctggggccaacggcagcggggtcatggccccgccctctggccctacggtggcaccgctcctgcccaggaccctggccgaccccttcttcatcgtggagaccacgtgcgtcatctggttcaccttcgagctgctcgtgcgcttcttcgcctgccccagcaaggcagggttctcccggaacatcatgaacatcatcgatgtggtggccatcttcccctacttcatcaccctgggcaccgaactggcagagcagcagccagggggtggaggaggcggccagaatgggcagcaggccatgtccctggccatcctccgagtcatccgcctggtccgggtgttccgcatcttcaagctctcccgccactccaaggggctgcagatcctgggcaagaccttgcaggcctccatgagggagctggggctgctcatcttcttcctcttcatcggggtcatcctcttctccagtgccgtctacttcgcagaggctgacaaccagggaacccatttctctagcatccctgacgccttctggtgggcagtggtcaccatgaccactgtgggctacggggacatgaggcccatcactgttgggggcaagatcgtgggctcgctgtgtgccatcgccggggtcctcaccattgccctgcctgtgcccgtcatcgtctccaacttcaactacttctaccaccgggaaacggatcacgaggagccggcagtccttaaggaagagcagggcactcagagccaggggccggggctggacagaggagtccagcggaaggtcagcgggagcaggggatccttctgcaaggctggggggaccctggagaatgcagacagtgcccgaaggggcagctgccccctagagaagtgtaacgtcaaggccaagagcaacgtggacttgcggaggtccctttatgccctctgcctggacaccagccgggaaacagatttgtgaaaggagattcaggcagactggtggcagtggagtagggaatgggaggcttgctgaacatggatatctacattataccgcagagtatttgaagtcacactgtaacctcagtctacccctctcctttcactcctttcctccctccctcgatccccccattttctctattctttccatgacacccaagggtcgcctatttttaaaaagtaccacattccatgacgcaggagctgtggaaatggtgagcgctgtgagatggatgtatttgtagccagtctcctatacccagcagagggataacccaaacaaaaatgactctaaatagcccagatcccaagagattatgtaactcctccatccatgtgttccaaatttgctttacatatgattgtatttgtgtataggggaaaatattatttttatgcctggtaagtggctttttgtactgtagttcagatagagatattttgggtatattttcaagatacatgttgtatttatggaagaaagagttgtcctgatgtttttctgtgttacttatattagagtcagagatcttggtatgggctgttctgtttcctgtgtctccaagcctctgtcttttctgggatgtggtattggtgctttgtgtctagggcagagtatgttcttgaagaaaggcaaatctgactttttctgtgcgccttaaacaattcttgtaactttcttcaaaaagcattttaatgatattggaggaatacttctgataatttattgtctttatttttatcccaggaaataaaaggttaccttgttga

SEQ ID NO: 23329 - DNA, 4372 bp, Homo sapiens
  source 1..4372: mol_type = unassigned DNA
aaacttggagagacgcaggacaggatcccggcggcagaaggacggagagaaaggggaccccgggacgggaaaggcgcagagcaggcgcgggcggcggcggcggcggggcagggcagggcgggcgtcccggcagagggcgcgcggtcgccctgtcgccctccgccccgccggggtcacagtgccccctccctcgcgccctagccgccctgccgggctatttttacgcgcggacaccggacaccggacaccgggctggggcggcggcggcggcggccgaggcggccgaggcggggccgcaccggggccgggcgtcggggccacacgtcggttcgcgggtcgccggggctgcgcgcgccatggagccgcggtgcccgccgccgtgcggctgctgcgagcggctggtgctcaacgtggccgggctgcgcttcgagacgcgggcgcgcacgctgggccgcttcccggacactctgctaggggacccagcgcgccgcggccgcttctacgacgacgcgcgccgcgagtatttcttcgaccggcaccggcccagcttcgacgccgtgctctactactaccagtccggtgggcggctgcggcggccggcgcacgtgccgctcgacgtcttcctggaagaggtggccttctacgggctgggcgcggcggccctggcacgcctgcgcgaggacgagggctgcccggtgccgcccgagcgccccctgccccgccgcgccttcgcccgccagctgtggctgcttttcgagtttcccgagagctctcaggccgcgcgcgtgctcgccgtagtctccgtgctggtcatcctcgtctccatcgtcgtcttctgcctcgagacgctgcctgacttccgcgacgaccgcgacggcacggggcttgctgctgcagccgcagccggcccgttccccgctccgctgaatggctccagccaaatgcctggaaatccaccccgcctgcccttcaatgacccgttcttcgtggtggagacgctgtgtatttgttggttctcctttgagctgctggtacgcctcctggtctgtccaagcaaggctatcttcttcaagaacgtgatgaacctcatcgattttgtggctatccttccctactttgtggcactgggcaccgagctggcccggcagcgaggggtgggccagcaggccatgtcactggccatcctgagagtcatccgattggtgcgtgtcttccgcatcttcaagctgtcccggcactcaaagggcctgcaaatcttgggccagacgcttcgggcctccatgcgtgagctgggcctcctcatctttttcctcttcatcggtgtggtcctcttttccagcgccgtctactttgccgaagttgaccgggtggactcccatttcactagcatccctgagtccttctggtgggcggtagtcaccatgactacagttggctatggagacatggcacccgtcactgtgggtggcaagatagtgggctctctgtgtgccattgcgggcgtgctgactatttccctgccagtgcccgtcattgtctccaatttcagctacttttatcaccgggagacagagggcgaagaggctgggatgttcagccatgtggacatgcagccttgtggcccactggagggcaaggccaatggggggctggtggacggggaggtacctgagctaccacctccactctgggcacccccagggaaacacctggtcaccgaagtgtgaggaacagttgaggtctgcaggacctcacacctccctagagggagggagggagggcagggtggagggcaaggctggggggaggggattgggtttaggaagagctaggttaagtcgtaacgagtggggaaacactgagtcttgttgggtcttgggttgtgtggtttggtagctcctgtgggtacctcctgaagcagcagcgaatggcaatgggttgtgttgtgttaatgaagactcaattggttcatattactctgagttgtgcaaagctcatggagccttttggggtagtgttgagataggtttggtcgtatcattttgtgagtttcctaggtcagtgttgggtttggttgggttgtgagtctgggatagtgtggtccagctgcattgtgtaggattctgtggtttggtgggtcccctagggccatgttgggtcaagttagatggtcccccatggcattgttgagatcgaatgtgtgtggtgttaagtttcgttgagacatggtggaaattgtgtagctctgtgattcttccaggggcatgttattttaggttctgtgaacttgcgagtcatgtagaaatgtgaagagtccagtggtagaatttgagctttctaggtcacattgggttaagtttgtatgaccaaatgaatcttgtagggttctgttgggcttaactgtgtagaggtgtgtggctggacatttttcgtggccacagcgagttgagttgtgttgaattgtacaaccatatgagccttgtaaggccagttcagttgggtcatgccactgtttgagtctcatagggccatgctgaattgagttccattgagttgtgtcactatgtgagtcctacaggaagttgggttgagttggactgtgcgaacgagttccatagggccacatcgggctgttttgcatttagtggtagcaccaggacccaaaggaaatagcagtggggaagcatcatgtatctgggagcatgcagtggcgagggctctgggaggtgtgccgagctggctccccagctcgctgtagggggcgggactggattctgtatccatgggattgggtgttcatccagaggcgactgggtaaattaggaagaggtggatgctcctcctgtttaccccacatccacttcattgtgctgttcactcccattctcccctacagttttatgctcagacatggaggtcagagccacaagggaaaggggagagggggagaaaactgtactctgtccagacatgatagagggacagagccaaaaggatagagaaagagacccagaaaaaggaagaggtggaaacccagagagacagagacccaaagggagagaaacagagactcagggagagggagacaatgacctggagggtggggtatggcagagacgcagaagagaggaacagaaatccagagtggggagacagagaccaagagcaggggatagaagccgggcgaagtggcccatgcctgtaatctcagcactctgggagaccgaggaagggggattgattgaggccaggagttcaagaccagcctgggcaacatggtgagaccccatctctacaaaaaatacaaaaattagctgagtgtggtggcacatgcctgtgatcccagctactcaggaagctgaggcagaaagatcccttgaccctgagaggtagaggctgcattgagccatgattgcaccactgcactccagcctgggcaacagagggagcccccgtctcaacaaacaaacaaaaagagccagtgggggagggagggacagagacccagagggcagcgtcagacacccagagttggagacagaacaacagagtctcagggaaagagaaccacaatagaaaaaggcagaaaaggccgggcgcggtggctcatgcctgtaaccccagcactttgggaggccgaggtgggcaaattacgaggtcaggagatccagaccatcctggctaacacggtgaaaccccgtctctactaaaaatacaaaaaaattagccgggtgcggtggcgggcacctgtagtcccagctactcgggaggctgaggcaggagaatggcatgaacctgggaggcggagcttgcagtgagccgagattgcgccactgcactccagcctgggcagcagagcaacactctgtctcaaaaaaaaaaagaaaagaaaagaaaaagccagaaaaagttggtgcccctgaacccaagagtgatgtacagtctattccatagaatcacagaacaatcctgaaccaggcctgtcacctaccctccctgcagctcaggaaggctgtcagacaggctgggggcctcactctgttttccaggggagaaacctgagtctcagagcaggggagtggcttcccaaggtctcacagcttgtccccaggggccaggcaggctgtctgtctgcttcacatgtccccatcagcctgctgggacacacgggtcctcctgagtcccgtagcctcatttcttacagacggggaaactgaggctcagagcagcaggtgttacccaaggtcacaaggccgaacattttcagaaatctttcagaactcaaagggcatttagaggaagaaggctgaaatcactaacacatatagggcttcctttggtatcaaagtactttacttgggttaatttatta

SEQ ID NO: 23330 - DNA, 5331 bp, Homo sapiens
  source 1..5331: mol_type = unassigned DNA
cggctgctcgcgagctgctttctctcctcttccctttccgggtgcacggcgaggagaaagtctctatgcaactaagccccggcgcgcacttggccaggtatgtaccgcgggagcggcgcgttctgcgcggaagcagatgctgctgccgccacggcggcggcggctgccagctcctgagctctgtaactgtcacactgcacctgagctgaacttgaaaagagagtgaaggggcgattgggcgaacgcttttggcagacacagagggtgtttgtagacgtgggggaggagaatctctattaacgccccccaccgtaaccactgcacatcacctccatctctgcaaatacagcccgaggagtagaggcagcagcagctggacccccaaagagagacgtggggcagcggctgtgaccgcatctcctgagctacaacaacaggtcgcctttttgagactcctttggcgggaagggctacttggaaaggaaggtttgaaagagtgagaagggtaggtgtaagggttccctaattcgtcgaaagaattctattgggtgactctcgttcgtcttctctatcctacactccacatactgaccctatattatccagactgtgccggggagaaatcaaaaacacctgtttgaagaaacggctgcacctgtgtgcttatttgtgccagagggtggcctagcccacctgcaggaagagatttggctgggttctgttgagggtgattgttaggacgttgtattttgttgccattattccaaatacctgtcttggagggaaagttgcccttctgagaactgtgactttaccaggagccctatcttggaataagagttacacctctggaccacgtttctcactagtactttgcttgactggaggaagtgggtgacttttggctgcttcggtgacccattgtagacgcctcgttacccttcttccttccgcttcaagtaatcatggcggcgggggtggcagcgtggctgccttttgcaagggcagcggctatcgggtggatgcctgtggcctcggggcctatgccggctcccccgaggcaggagaggaaaaggacccaagatgctctcattgtgctgaatgtgagtggcacccgcttccagacgtggcaggacaccctggaacgttacccagacactctactgggcagttctgagagggactttttctaccacccagaaactcagcagtatttctttgaccgtgacccagacatcttccgccacatcctgaatttctaccgcactgggaagctccactatcctcgccacgagtgcatctctgcttacgatgaagaactggccttctttggcctcatcccggaaatcatcggcgactgctgttatgaggagtacaaggatcgcaggcgagagaacgccgagcgcctgcaggacgacgcggataccgacaccgctggggagagcgccttgcccaccatgactgcaaggcagagggtctggagggccttcgagaacccccacaccagcacgatggccctggtgttctactatgtcacggggtttttcattgccgtctctgtcatcgcgaatgtggtggaaacagtgccgtgcggatcaagcccaggtcacattaaagaactgccctgtggagagcggtatgctgtggccttcttctgcttggacacggcctgcgtcatgatcttcacagttgagtatttgcttcgcctggctgcagcgcctagtcgttaccgttttgtgcgtagtgtcatgagtatcatcgacgtggtggccatcctgccttattacattgggctggtgatgacagacaatgaggacgtcagcggagcctttgtcacactccgagtcttccgggtcttcaggatctttaagttttcccgccactctcaaggcctgcgcatcctggggtacacactgaagagttgtgcctcagaattgggcttcttgcttttctcgctcaccatggctatcatcatcttcgctacagttatgttctacgcagagaaggggtcttcggctagcaagttcaccagcatccctgcagccttctggtataccatcgtcaccatgacaacactagggtatggtgacatggtgccaaaaaccatagcagggaagatttttggttctatctgttcgctgagtggggtcttggtcattgctctacctgttccggtgattgtatccaacttcagtcgcatctaccaccagaatcaacgagcagacaaacgaagggcacaaaagaaagctagactggccaggatccgggcagccaaaagcggaagcgcaaatgcttacatgcagagcaaacggaatggtttactcagtaatcagctgcagtcctcagaggatgagcaggcttttgttagcaaatccggctccagctttgaaacccagcaccaccacctgcttcactgcctggaaaaaaccacgaatcacgagtttgtggacgaacaagtctttgaagaaagctgcatggaagttgcaactgttaatcgtccttcaagtcacagtccttcactgtcttcacaacaaggagtcaccagcacctgctgttcacgacgacacaaaaaaacttttcgcatcccaaatgccaatgtatcaggaagccatcaaggtagtatacaagaactcagcacgattcagatcagatgtgtggagagaacacctctgtctaacagccgatccagtttaaatgccaaaatggaagagtgtgttaaactaaactgtgaacaaccttatgtgactacagcaataataagcatcccaacacctccagtaaccacaccagaaggagacgataggccagaatcccctgagtactcaggaggaaatattgtcagagtttctgctttgtaagacaattggaataaggtctaagagaattcgagccctggctgtgaaaagaatctcaacatagaagaaagaagaaacaataaatattctgcagattaatgcagcaaagaaagaaggttggtagtgaaacacaaagcttccaatcttaaggatgtgaataaaaccaccaaatggcatttctagacagtttgacctgttatacagagtaatattctgtggccctttgactttgtgaatgagcacaatgaaatgccgcctactgatgcttcttatgatcagaactcttttttaataaaataaataacataaatcgttgaacataatgttccagttgaatgcaaaacaaaaaaaatatggaaaacattttgataaaattttttcctgttaaaaccatgaacattggctatgatgaagattattacatatgaaaaaaaaactcacacaacatatttgtattgactgaaggaaaccatcataatgcatgctagaattctttgaagcagtgatctcagtttccttatgttgtcttcagaataggcatgataaactataattgtagaaaggggtaatttctgtgcacttacaacaagctgagtgttcatgttccatggtgggctgtgcaaataaactccttttagacctgcagtatttctcatggggatgctcattagtaaatctaaagtgttcagatagttcagtattcattatcgtttaactttgcacctagatactgttacaactgcaataatttgttgtacaactgttgtatcaggaatcaggatttttttgttgttgtactttccagatccttatagatacggtaagagccacattcgtagaaaaacttctggtgtggccaggttttaggtaactttttaatccaaaactattgtgccataaatgtttttcagtaatattttttggtccactgtattcctgtgacacagtgcattatctgttcttgtatttctatagcacctctctattgggtttatcatcatcaacaagactactgtttactgtagttcaagtgactttcctacttttgtatttccaaaaaaaattatcttgtaagtagcttgtcatcaatccccttgtcgaaaactagaaaaaaaggagttgacccatataaattatctctaacgtctttgttgtttatggaaaagcccagatactggatatatcactatgtattttatgaacagaattgactgggactaatatcacaggatcaatcatctcagaatcttacttgatgcattatttattttgctttagatcttgaatacattttgagaataactaatgtggattgaaatgtagagatacactggagtgctttatttagcaatatttgatgaaagcatgctttctacgccattcaggaaggcagcacaaatttatctcagaaaggttcctgtgtattgcaaggtacaattttctccaataaatcaggagaacaggagtttgatgatgcaaagttgatctctgtacatttaagtgaaaagtctttataacttttcacccttaaaatatttcagcagacatgtctgcacatgacagtgtaaaaaagtttaatgtcaaatgcaaagtttttattcattccaagccaccactgtaaggaataaagcttagcttctgtacatggaaagagctaataattatccctctgtcagagatgagatttttaaatgcttatgatatttaatcataaaaagggattaatccaaccattttctagtaaagccagaaattcttgcttcccatttctagaatagtttctagaacagtgctatgcacatattagatcttaataaacatttgctgagtgaaagtaagataaactcaactatctcttgggaagaactggcttcattcctagtacatcttttaaaaagttactaattttccagcagtacaaatattaacaattatattaacacctgcctcatgtcagtttatgcttctagagcaatgtctagtgaaacttatctgatggcatttattgaaaaccttctaaaaagtagactaaggaaaccataatcagaattactatgtcttttgattcccaatgagaagttctattttcatgttcttaatattacatacaagaaaatgcagttaggttatttcaattgacaattctgcctcctcttttgatttatcacttacccaaaattattaattttattaggcttttggaaaagaaaaaaaactttttgatgttttaggtgatttaaaaatataccgtgttggtggtgaatgactattgatgactgtgttaagtgcatctgtattgtaagtgaaatgtaattatttctgtgtaccatatggagtaactaaggtcattgtttttgacaattttgtttgaaattcatatatcttatttcaaaggatagcataatatctgcattatgctggaaaaaaatagacctttggagaatacttaaataaaacatgtgcatgcttgaacagg

SEQ ID NO: 23331 - DNA, 2659 bp, Homo sapiens
  source 1..2659: mol_type = unassigned DNA
ggagagaaatggctgaaagtggaaacccggagcggtttggggcgcttcgcaaagttctccagctcggcgagccggcggtgtgtctaccagaggctgggggccagtccatctggtcctgcccgacgccacttccaccccgcgagctctgggaaaggtctctacgtgacgccaagggccgtcgcggccccggggagagggatcgaaagactcactctgcgaggtgtttacactggaggtgggggacgggaagggactgggcaaagttacctggactcaactaaattcctgcgcttgcttagtgttgacatttgaataggatccgagatgttctgcttttatcccgggcagccctgatatgtcagcaacaggctgaggttccagacctgaaatcgcactgcaagaaaaaggggtttgctgaactaactccaagctggtgtgcctagcgtccgcgcggctgccggcccaagagctggagtcaccatggcggccggagttgcggcctggctgccttttgcccgggctgcggccatcgggtggatgccggtggccaactgccccatgcccctggccccggccgacaagaacaagcggcaggatgagctgattgtcctcaacgtgagtgggcggaggttccagacctggaggaccacgctggagcgctacccggacaccctgctgggcagcacggagaaggagttcttcttcaacgaggacaccaaggagtacttcttcgaccgggaccccgaggtgttccgctgcgtgctcaacttctaccgcacggggaagctgcactacccgcgctacgagtgcatctctgcctacgacgacgagctggccttctacggcatcctcccggagatcatcggggactgctgctacgaggagtacaaggaccgcaagagggagaacgccgagcggctcatggacgacaacgactcggagaacaaccaggagtccatgccctcgctcagcttccgccagaccatgtggcgggccttcgagaacccccacaccagcacgctggccctggtcttctactacgtgactggcttcttcatcgctgtctcggtcatcaccaacgtggtggagacggtgccgtgcggcacggtcccgggcagcaaggagctgccgtgcggggagcgctactcggtggccttcttctgcctggacacggcgtgcgtcatgatcttcaccgtggagtacctcctgcggctcttcgcggctcccagccgctaccgcttcatccgcagcgtcatgagcatcatcgacgtggtggccatcatgccctactacatcggtctggtcatgaccaacaacgaggacgtgtccggcgccttcgtcacgctccgggtcttccgcgtcttcaggatcttcaagttttcccgccactcccagggcctgcggatcctgggctacacactgaagagctgtgcctccgaactgggctttcttctcttctccctcaccatggccatcatcatctttgccactgtgatgttttatgccgagaagggctcctcggccagcaagttcacaagcatccctgcctcgttttggtacaccattgtcaccatgaccacactgggatacggagacatggtgcctaagacgattgcagggaagatcttcggctccatctgctccttgagtggcgtcctggtcattgccctgccagtccctgtgattgtttccaactttagccggatttaccaccagaatcagagagctgataaacgcagggcacaaaagaaggcccgccttgccaggatccgtgtggccaaaacaggcagttcgaatgcatacctgcacagcaagcgcaacgggctcctcaacgaggcgctggagctgacgggcaccccagaagaggagcacatgggcaagaccacctcactcatcgagagccagcatcatcacctgctgcactgcctggaaaaaaccactaaccacgagtttattgatgagcagatgtttgagcagaactgcatggagagttcaatgcagaactacccatccacaagaagtccctcactgtccagccacccaggcctcactaccacctgctgctcccgtcgtagtaagaagaccacacacctgcccaattctaacctgccagctactcgcctgcgcagcatgcaagagctcagcacgatccacatccagggcagtgagcagccctccctcacaaccagtcgctccagccttaatttgaaagcagacgacggactgagaccaaactgcaaaacatcccagatcaccacagccatcatcagcatccccactcccccagcgctaaccccagagggggaaagtcggccaccccctgccagcccaggccccaacacgaacattccttccatagccagcaatgttgtcaaggtctccgccttgtaaaaccactggacagagggccagagtgggtagtggggaatgaaggggactggcatgttggtgggtggtcactgagaccactccctcccccctttccccactatttctgcctgccccattgtacccctagcactgagacttgtgcctggaaggaaaaagaggtagcaaaggggcacctgaggttcacgctgctagcgtggacatagccctgtgatactgcatctcactggggccagaggaagggagggagggtgggggggtcggggatagg

SEQ ID NO: 23332 - DNA, 2716 bp, Homo sapiens
  source 1..2716: mol_type = unassigned DNA
ggagagaaatggctgaaagtggaaacccggagcggtttggggcgcttcgcaaagttctccagctcggcgagccggcggtgtgtctaccagaggctgggggccagtccatctggtcctgcccgacgccacttccaccccgcgagctctgggaaaggtctctacgtgacgccaagggccgtcgcggccccggggagagggatcgaaagactcactctgcgaggtgtttacactggaggtgggggacgggaagggactgggcaaagttacctggactcaactaaattcctgcgcttgcttagtgttgacatttgaataggatccgagatgttctgcttttatcccgggcagccctgatatgtcagcaacaggctgaggttccagacctgaaatcgcactgcaagaaaaaggggtttgctgaactaactccaagctggtgtgcctagcgtccgcgcggctgccggcccaagagctggagtcaccatggcggccggagttgcggcctggctgccttttgcccgggctgcggccatcgggtggatgccggtggccaactgccccatgcccctggccccggccgacaagaacaagcggcaggatgagctgattgtcctcaacgtgagtgggcggaggttccagacctggaggaccacgctggagcgctacccggacaccctgctgggcagcacggagaaggagttcttcttcaacgaggacaccaaggagtacttcttcgaccgggaccccgaggtgttccgctgcgtgctcaacttctaccgcacggggaagctgcactacccgcgctacgagtgcatctctgcctacgacgacgagctggccttctacggcatcctcccggagatcatcggggactgctgctacgaggagtacaaggaccgcaagagggagaacgccgagcggctcatggacgacaacgactcggagaacaaccaggagtccatgccctcgctcagcttccgccagaccatgtggcgggccttcgagaacccccacaccagcacgctggccctggtcttctactacgtgactggcttcttcatcgctgtctcggtcatcaccaacgtggtggagacggtgccgtgcggcacggtcccgggcagcaaggagctgccgtgcggggagcgctactcggtggccttcttctgcctggacacggcgtgcgtcatgatcttcaccgtggagtacctcctgcggctcttcgcggctcccagccgctaccgcttcatccgcagcgtcatgagcatcatcgacgtggtggccatcatgccctactacatcggtctggtcatgaccaacaacgaggacgtgtccggcgccttcgtcacgctccgggtcttccgcgtcttcaggatcttcaagttttcccgccactcccagggcctgcggatcctgggctacacactgaagagctgtgcctccgaactgggctttcttctcttctccctcaccatggccatcatcatctttgccactgtgatgttttatgccgagaagggctcctcggccagcaagttcacaagcatccctgcctcgttttggtacaccattgtcaccatgaccacactgggatacggagacatggtgcctaagacgattgcagggaagatcttcggctccatctgctccttgagtggcgtcctggtcattgccctgccagtccctgtgattgtttccaactttagccggatttaccaccagaatcagagagctgataaacgcagggcacaaaagaaggcccgccttgccaggatccgtgtggccaaaacaggcagttcgaatgcatacctgcacagcaagcgcaacgggctcctcaacgaggcgctggagctgacgggcaccccagaagaggagcacatgggcaagaccacctcactcatcgagagccagcatcatcacctgctgcactgcctggaaaaaaccactgggttgtcctatcttgtggatgatcccctgttatctgtacgaacctccaccatcaagaaccacgagtttattgatgagcagatgtttgagcagaactgcatggagagttcaatgcagaactacccatccacaagaagtccctcactgtccagccacccaggcctcactaccacctgctgctcccgtcgtagtaagaagaccacacacctgcccaattctaacctgccagctactcgcctgcgcagcatgcaagagctcagcacgatccacatccagggcagtgagcagccctccctcacaaccagtcgctccagccttaatttgaaagcagacgacggactgagaccaaactgcaaaacatcccagatcaccacagccatcatcagcatccccactcccccagcgctaaccccagagggggaaagtcggccaccccctgccagcccaggccccaacacgaacattccttccatagccagcaatgttgtcaaggtctccgccttgtaaaaccactggacagagggccagagtgggtagtggggaatgaaggggactggcatgttggtgggtggtcactgagaccactccctcccccctttccccactatttctgcctgccccattgtacccctagcactgagacttgtgcctggaaggaaaaagaggtagcaaaggggcacctgaggttcacgctgctagcgtggacatagccctgtgatactgcatctcactggggccagaggaagggagggagggtgggggggtcggggatagg

SEQ ID NO: 23333 - DNA, 7396 bp, Homo sapiens
  source 1..7396: mol_type = unassigned DNA
tttgctgaactaactccaagctggtgtgcctagcgtccgcgcggctgccggcccaagagctggagtcaccatggcggccggagttgcggcctggctgccttttgcccgggctgcggccatcgggtggatgccggtggccaactgccccatgcccctggccccggccgacaagaacaagcggcaggatgagctgattgtcctcaacgtgagtgggcggaggttccagacctggaggaccacgctggagcgctacccggacaccctgctgggcagcacggagaaggagttcttcttcaacgaggacaccaaggagtacttcttcgaccgggaccccgaggtgttccgctgcgtgctcaacttctaccgcacggggaagctgcactacccgcgctacgagtgcatctctgcctacgacgacgagctggccttctacggcatcctcccggagatcatcggggactgctgctacgaggagtacaaggaccgcaagagggagaacgccgagcggctcatggacgacaacgactcggagaacaaccaggagtccatgccctcgctcagcttccgccagaccatgtggcgggccttcgagaacccccacaccagcacgctggccctggtcttctactacgtgactggcttcttcatcgctgtctcggtcatcaccaacgtggtggagacggtgccgtgcggcacggtcccgggcagcaaggagctgccgtgcggggagcgctactcggtggccttcttctgcctggacacggcgtgcgtcatgatcttcaccgtggagtacctcctgcggctcttcgcggctcccagccgctaccgcttcatccgcagcgtcatgagcatcatcgacgtggtggccatcatgccctactacatcggtctggtcatgaccaacaacgaggacgtgtccggcgccttcgtcacgctccgggtcttccgcgtcttcaggatcttcaagttttcccgccactcccagggcctgcggatcctgggctacacactgaagagctgtgcctccgaactgggctttcttctcttctccctcaccatggccatcatcatctttgccactgtgatgttttatgccgagaagggctcctcggccagcaagttcacaagcatccctgcctcgttttggtacaccattgtcaccatgaccacactgggatacggagacatggtgcctaagacgattgcagggaagatcttcggctccatctgctccttgagtggcgtcctggtcattgccctgccagtccctgtgattgtttccaactttagccggatttaccaccagaatcagagagctgataaacgcagggcacaaaagaaggcccgccttgccaggatccgtgtggccaaaacaggcagttcgaatgcatacctgcacagcaagcgcaacgggctcctcaacgaggcgctggagctgacgggcaccccagaagaggagcacatgggcaagaccacctcactcatcgagagccagcatcatcacctgctgcactgcctggaaaaaaccactaaccacgagtttattgatgagcagatgtttgagcagaactgcatggagagttcaatgcagaactacccatccacaagaagtccctcactgtccagccacccaggcctcactaccacctgctgctcccgtcgtagtaagaagaccacacacctgcccaattctaacctgccagctactcgcctgcgcagcatgcaagagctcagcacgatccacatccagggcagtgagcagccctccctcacaaccagtcgctccagccttaatttgaaagcagacgacggactgagaccaaactgcaaaacatcccagatcaccacagccatcatcagcatccccactcccccagcgctaaccccagagggggaaagtcggccaccccctgccagcccaggccccaacacgaacattccttccatagccagcaatgttgtcaaggtctccgccttgtaaaaccactggacagagggccagagtgggtagtggggaatgaaggggactggcatgttggtgggtggtcactgagaccactccctcccccctttccccactatttctgcctgccccattgtacccctagcactgagacttgtgcctggaaggaaaaagaggtagcaaaggggcacctgaggttcacgctgctagcgtggacatagccctgtgatactgcatctcactggggccagaggaagggagggagggtgggggggtcggggataggccgggggatataggctatgtgccaggacagggcctggatggaggagcctcagactcagaccaaataacagtcgtttctggagaccccagtgaggaaaatacaagaccaagagcagcaaagaggccaagttgtcacaagcaaaacaggaagaaaatataacactgtgtatttaagcacctttttcaaggctcttaatggataatatttattcatgggaaaaggtggaaaacaaaaacaccaacggatttttgtgaaatgtttttctccatggacccaacacctttgaaccaaaacaatgcattttgtgagggatttttttttctccttttatagcaaaagcttttaggctaagaagtcagttattgctgagttctctctccattcccccaggtgggtgaggtcaactgagcctgggcccccactgcccagctgacctgtgcagagctgccaagtgaccacacggcaatccttaccctttgtctgtccctgtctcccttgtctctgtacctctctgcttacccctagctgtttctgtgtccagccatctgtctctacctggatcccaatgatcctgaaacacatcagtaaagccttcttcatcactgccacgcacaacagacttgtgcctgggagttctatctgtgtgaatgcaactgcagaggaggaaagagtgaagcaaaaattgggagagtttaggggtaagggaagtctacctcacagaacagaggtacttcccttggggttggaaccactcgtgtttgcagtttcagtttctgggaaagaaagggaatgaacagatttatcacactggaatcttgaaaaggcaaatcgccaacacctgagacgcggtcaactctggtatgtgccagtgaggggagaacggaaggacccagggctcgcagcctcagccggtcattagggcaccttgctatggacccttccttcaagacccaccataaagcccatccagagcccttccaagaggccccgggagtagttttctccagagagggcagtggtacggggaccaagattcctctgacttatatcaaaccagaggcaactcccacacagaggctgtggaagggtaagcctgtgtgcctcaagaaaaatgcttcaaagcaaaagcaagtaagagattctagatgattcttacctgctatgaaagatgccttgatgtctgaagaggcttcggcctgatctccctgaagatgctgaaatgggggagaagcctcatcacctctgtgcaagcaaaggagtgaagattatttcttgaacacctggacaacatatctattcaactagcttgcaccctggtggagctgggggcagcatttctggaatcctcctaaccattgttcactgcttgtagcagagtaggtgggcctcagggttagtgacaagtcctttcctgcccttcccaacacccagccaccttgctgcagtctctgtagcctgggctctgaaatacatgagctcctcgggagctgcctatccatcctacagcttagtggttagctgtttaattgtaggccaagaatttctctccccaccacagccatctaaatgagttttactagccaggaacctaaaaacacccttcgtgggcttccctatgaccccagctcgattgaccctgtaggttcaaaaggtttcgaggtggcacctaaccagaatgtgggcagaaggcagaggagagggagccttctttctgtctttatctctttatgcttatcctcattgaccatgggctgagttctttctctgggtcccctaatgtgggaatggagtggttcttgccctctgagcttacagactaagaaggcagaaaagctttacaactacagagtacatgtgtatacacacaaccaacctaaacacatcagagaatacatacttaaatcaattcacttcatatacacatctcattagaagaccaagctaaacttcacttagagggcgggcaaaggactagaaaagaatttttctcttaaaaaaaatgagtactagagcaaaattatgagtgtctaagtatcttagttatgcttcataagatctgactggggtaagagataaagaggtaaatagggctgggcgcggtggctcacatctgtaatcccagcactttgggaagccgaggtgaacagatcacctgaagtcaggagttgaagaccaacttggccaacatggtgaaaccccatctctactaaaaatacaaaaattagccaggcatggtggtggacccctgtaatcccagctacttggaaggctgagggggaggattgcttaaacccaggaggcagaggttgcagtgagccgtgattgcaccactgcactccagcccaggtgacacagcaagactccgtctcaaaaaaaaaaaaaagaaaagaaaaaaaaaaaggaggtaaattagaactggttgcacacacatacaaacttcctgtgatgaatttaagaacagatcattacagggttagaatagtgacagattcaacaaaggatctgtttgatagggcaccaagggaacattttactggttcccacaaaaattaataaatgttaaatatcatgtcccaagcaatttcccatgtttttttattggtcctaatcaacagaatgttttgtgttccttccacttcacgttcagagcccacgtcatgccacttcctaaaagaccattagaccatccccttttcctccatcctccactgtagccttagccagagaaaagatccagctcacttctggtccaaaaaatgtcaacgtttggaaaatggctcatctacactacagaacacagccagatgacactgctaaagggtactgtaagaaaacacaaggtccaaagtatgctgaattggtttcataagtctaactcattggccagtgactgaaaaaccaggatatcaggattttctgggggccaatagccatgacccttgagctttcatagttcatgaaccactttgacataataaaatattcccaaaaccacctattccattcagtcccactcagcattaagagggggagggaaaaacaaaccaaccaaccaacctaacagttacattcaaatgtcaaatgaatgtgaacctagaaaatgtagtattaagagcatatcagaactagaaaagatttaagaatatctaattcattttacagtatagaaaactgagacccagagaaattaaatgacttgttcaaggtcatgcagttatttaatgacagatctgagaccagaacacgagtcttttggctattagtctaatgcattttctaccacacccactgcctctgagagcagtgatgctttggagaagatccatcaaagaatccatactgtaattggagacatagtcttatatgtcaatacgtatatgtcaatactacttggacacagcccttggaaatcacctgactgtaccaatacaaaccatactttggaaaccaccattctctgggtagaaacatctatggactatcaattttgtcagaaatcagtgaacaagtgaagagtcaattttttttagtcaaatattttctcttctcaatgaagagaagactaggacagtgacattttgaagcataccttttatactccttgtggttcttatgacagtctgtgatggtagtaggtaaagtagctaaatccttgattcagagaggggaaaacatgtggaaagaaactgaacgacttatccaagttcacatgacaagttagtggcagaaccattattgcaatccaggacttaagacatcttgtcctaggatttttcctccacattatattgcactgctctgaggcttgcttatatttttcatacctggatttccagggtggtgacgtgggggagggaagtattcaattcagaaccaccgtgaaccaagatctctggaaacaaactctgtactatttctccttcatctcctattttcataactagtgccaagctcaggactaactgcatagactccctttcaaaagaccaatagatattctcagtgacagttgaacacattagtttacaatcacacagaatttgaacagaacttaaagttgacagttaatgccgatctataattaacaaaaatgtcaacttgtggatatgctgatgattttatccagttttcaaaatatgattcctacagttcaggatatcacttattagattgtagacaaggaaaatgtacattgggacattatgtacttaagagtttttccttaagttttgcagaggaagtggttgaaaattgagctaacactagatttcgaggttactaaagaattccagttttccagtctcccacttcaattaccaggtaactataaggcaaaaatatcccaatgctgtgaacttaaggcaatattcatttcctttctacactacttggcatggtaaccatgacaaacttttattttctctttctgatttcctaatgaaatctcattatttgcaaagctttaaaatgactagatgaaggaaaaacattgttatgacccatgaccctcggagcccaaacagcaccatgaagagcatcattaaaactaagagaaagtggctatcagaaaatgaaacagctttaaaggggttccttttaagtcttgttttctattcagaatgttctgtgttttttctcaagtgtgggaatgacatttatcttagcaggttactcaactacactggatgatgtcactctaaccagtgtacggcactgacccaagtcctggggggctccttggaccaatggactattttacaaacctgggaggtgggagggatggtatatttttgataatcagacattccaatgtaatgttttccttagaggtcacacccttccccccattaatgtcatcgtgagatacatcaagtgtgttcttttctattttcgtataataaatgggctttgcttatcaacatcacaatggcaaagaagaaatatactgtacaaaactgcaggaagataaaacatgaaaactttctatgaaaaaaaaaaaacacccttgagtttcctgtcgtcttcttttgaaactgtagtgcatatgttaaaacatgtatatcatttacagtattgagtcgtgtgccactgctgtacctgatgtatccaatctggattaaacaaattatgtgccacaaaccctaaaa

SEQ ID NO: 23334 - DNA, 3887 bp, Homo sapiens
  source 1..3887: mol_type = unassigned DNA
agcaagcggagcagcagcccgggcggcagcagcgtcgcggcggcggcggcagcggccgctccgcgcctcgcctcaccggcctcgctggcctcacctcgccgcgcccggacccgccacccccgcctccccgcccgacctccgcagcccccgtctcggccggcagcgcccaccgcctgcccgaagcgaggagcggagtgcggggcgcagaggcaccggagccagtgcccgccggccccgcaaatcaaacccagccaggagaacccccgcctggccccgtgcagctccgcgaccgccgggagctgtcccttcagcaccgccgcgggagcccaagtccgagcgcagcccagcggaaccccagctcgagcccgggctcacggagagcagcgctcggcgttagccgcacgagcaacaccccgggtgcccctgcccagggggcccgccatctcctccaggaggcggggagaaggaacgaggagggcgggcgggcaggcgggcccgccgccggggggagcaggcagccaagcaaggagagagggagggggccggagcccgccctgcgtcccgagctgcagcccggccacgcagggaggaaggcaggcggcatccatctcccccgcgccgagagcgcgccgcggcgaccacctcacagaggagcgcgaatttcccggccctgtctcctcccctccccctcctgggggctggcctctagtccggccccgggagcggctgacctttcccccaaaagctttgtgccgatttctccattttcccgcggagatggggacgggagcccggccccccaacccattttccccacctcccggggctcgctgctgagcccgcccccctccctctttccccctcactccctccctccctccctttctccctccctttctccctcccttctttcctcctctgcctcctccgctgccggaccagctccctcccacatctggctcctagagacccctgggatcccgcgcacattcccctggaccggcacccgacaaagcgcccggagaggcttggctcgctcgttggggtggccagagccgcaggcctctgttccccccgacggctggggggaggggggaagagggcgcgcgcccccctccccggcgccaactccccctggcggccgctcccatgggtgtcgctgggccgcgccatgcctaagggggcgccgcgatgggccaaggggacgagagcgagcgcatcgtgatcaacgtgggcggcacgcgccaccagacgtaccgctcgaccctgcgcacgctgcccggcacgcggctcgcctggctggcggagcccgacgcccacagccacttcgactatgacccgcgtgctgacgagttcttcttcgaccgccaccccggcgtcttcgcgcacatcctgaactactaccgcacgggcaagctgcactgcccagccgacgtgtgcgggccgctctacgaggaggagctggccttctggggcatcgacgagaccgacgtggagccctgctgctggatgacgtaccgccagcaccgcgacgccgaggaggctctggacagcttcggcggcgctcctctggacaacagcgccgacgacgcggacgccgacggccctggcgactcgggcgacggcgaggacgagctggagatgaccaagcgcctggcgctcagtgactccccggatggccggcctggcggcttttggcgccgctggcagccgcgcatctgggcgctcttcgaggacccgtactcgtcccgctacgcgcggtatgtggccttcgcttccctcttcttcatcctggtctccatcaccaccttctgcctggagacccacgagcgcttcaaccccatcgtgaacaagacggagatcgagaacgttcgcaatggcacgcaagtgcgctactaccgggaggccgagacggaggccttccttacctacatcgagggcgtctgtgtggtctggttcaccttcgagttcctcatgcgtgtcatcttctgccccaacaaggtagagttcatcaagaactcgctcaacatcattgactttgtggccatcctgcccttctacctggaggtggggctgagcggcctgtcctccaaggcagccaaggacgtgctgggcttcctgcgcgtcgtccgcttcgtgcgcatcttgcgcatctttaagctgacccgccactttgtgggcctgcgggtcctgggccacacgctccgagccagcaccaacgagttcctgctgctcatcatcttcctggccttgggcgtgctgatcttcgccaccatgatctactacgccgagaggataggggcacagcccaatgaccccagcgccagtgagcacacgcactttaagaacatccccatcggcttctggtgggccgtggtcaccatgacgaccctgggctatggagacatgtacccgcagacgtggtccggcatgctggtgggggctctgtgtgcgctggcgggcgtgctcaccatcgccatgcccgtgcccgtcatcgtgaacaatttcgggatgtattactccttagccatggctaagcagaaactaccaaagaaaaaaaagaagcatattccgcggccaccgcagctgggatctcccaattattgtaaatctgtcgtaaactctccacaccacagtactcagagtgacacatgtccgctggcccaggaagaaattttagaaattaacagagcagattccaaactgaatggggaggtggcgaaggccgcgctggcgaacgaagactgcccccacatagaccaggccctcactcccgatgagggcctgccctttacgcgctcgggcacccgcgagagatacggaccctgcttcctcttatcaaccggggagtacgcgtgcccacctggtggaggaatgagaaaggatctttgcaaagaaagccctgtcattgctaagtatatgccgacagaggctgtgagagtgacttgaccaggcggcttggccgaggacactggtggctattaagcatctgggtggacctgcagcccctcctcaccctcggacagagtaaattcacgccatgcaggtttgccggacgagtccgagtggcccaggcattgtactaggacggacgtagctttttctacggccaaatggtaactgaccgtagaggatttcttttccttcttttcattttttaaaattttattttatttggggagggggggtggaggggctccttagcatgacttgcatgaagttaaacagaaaacccagcaaaccaaacccaccaaccccctgcaactgtatgattaccctgaacaacaataatgaaaagaaaaacatcaaagccctctattttctttcaaagctcttgactttcacacacgttgttggagccaaactgtaacggcgttcagtagaaacctgtacatttctgggggtgaggggcgaggggaggagggacagagatggggaatggattgcttcctttttgtacacaagatcaagaggaaagcttccaaaaagggcagtcggtcagtcatcggtcatattgacctcaccttcatagttcatctctcacgtggaaactgagaactttgctccaaatagaattgtggaaactcgcacggctgccttcttccccgtttggcatgcttgtgacccagcggatgtctccccaagacccctgacagcagctagtctaggttgattctctcatcttatcggtgtgtagatccagtgtgaccaactttcataacaaattgttcatagtaaataatcaccaccgtatggattttccaagtgttccattaaaaccaggatgtagagcaccaaaagatcaggaccacgggaggagcagcctcctccacctttactaaggcacaacctggcattgtatgcaatttagtacttcagagtaaaaa

SEQ ID NO: 23335 - DNA, 6766 bp, Homo sapiens
  source 1..6766: mol_type = unassigned DNA
gggccgcgccatgcctaagggggcgccgcgatgggccaaggggacgagagcgagcgcatcgtgatcaacgtgggcggcacgcgccaccagacgtaccgctcgaccctgcgcacgctgcccggcacgcggctcgcctggctggcggagcccgacgcccacagccacttcgactatgacccgcgtgctgacgagttcttcttcgaccgccaccccggcgtcttcgcgcacatcctgaactactaccgcacgggcaagctgcactgcccagccgacgtgtgcgggccgctctacgaggaggagctggccttctggggcatcgacgagaccgacgtggagccctgctgctggatgacgtaccgccagcaccgcgacgccgaggaggctctggacagcttcggcggcgctcctctggacaacagcgccgacgacgcggacgccgacggccctggcgactcgggcgacggcgaggacgagctggagatgaccaagcgcctggcgctcagtgactccccggatggccggcctggcggcttttggcgccgctggcagccgcgcatctgggcgctcttcgaggacccgtactcgtcccgctacgcgcggtatgtggccttcgcttccctcttcttcatcctggtctccatcaccaccttctgcctggagacccacgagcgcttcaaccccatcgtgaacaagacggagatcgagaacgttcgcaatggcacgcaagtgcgctactaccgggaggccgagacggaggccttccttacctacatcgagggcgtctgtgtggtctggttcaccttcgagttcctcatgcgtgtcatcttctgccccaacaaggtagagttcatcaagaactcgctcaacatcattgactttgtggccatcctgcccttctacctggaggtggggctgagcggcctgtcctccaaggcagccaaggacgtgctgggcttcctgcgcgtcgtccgcttcgtgcgcatcttgcgcatctttaagctgacccgccactttgtgggcctgcgggtcctgggccacacgctccgagccagcaccaacgagttcctgctgctcatcatcttcctggccttgggcgtgctgatcttcgccaccatgatctactacgccgagaggataggggcacagcccaatgaccccagcgccagtgagcacacgcactttaagaacatccccatcggcttctggtgggccgtggtcaccatgacgaccctgggctatggagacatgtacccgcagacgtggtccggcatgctggtgggggctctgtgtgcgctggcgggcgtgctcaccatcgccatgcccgtgcccgtcatcgtgaacaatttcgggatgtattactccttagccatggctaagcagaaactaccaaagaaaaaaaagaagcatattccgcggccaccgcagctgggatctcccaattattgtaaatctgtcgtaaactctccacaccacagtactcagagtgacacatgtccgctggcccaggaagaaattttagaaattaacagagcaggtaggaaacctcttagaggcatgtcgatctgacctttcacctctgccccctgtagcgatgattccagatccagtcagactgcttccttagttccgtgggtgaccccggaccccgcactcagtctggaggtgtggagcctgggggcccagggagatgctgggcggccaaattcagcaggcaagagcctgctagaggaacctcactggtgcccctgggtaaggaggttgacgcggttggtctcgtgatgttctgaagagacaacgcggcccgccaggttgctgaggactaacttagcaggagccaggggggctctgcttggtggggcaggagtccggtgtgagtctctgactcaggctactgacccggtgttgggacagagtgggggcgggtgtgatttggaaacgctagacagcctttgatctggtccttaccatggctcccttcaggctgtgtagatggcagagatggtgcatgggatctgggcaggagggtcccttgcaaaggcaggtgcaagggttctcacccccggcagagcctgtctccatagctgagtagaattcctgccctgatttcgggctgcccagctcgaggtccttcccaggagacgcctgtagccctccgtgacaagcttacttaccccatagcatgctgaaccaactcatcttctaccaccactctagagtttagcctttatctttaggaacctgttgaagtgactctagctttcacgttgtctgtttgggttgatggtcgagtgggagtttccggtgacccgatggaagcggctgccgagcaaaagactagagggggccaccaccctgggcagcttagatgaaagcgctacagaccagcaacagcctcccaccgagggttctccccgtttccagcggtagggactgcagcagcaatatagacatcccaaccagtgtacaaccactttcccgtgaattcactgggggccgggaggggggaggggggcatgaaacaatactagtcaccgtgggatatattctaatattccatggctagtggtttgttatgggactatctcagttttatgagaacctgcacatagcacataaagttgatcatggggctctggtccgaagatataaagcccatagtctacctctacccatggaataccatcgacttattctgtggacacagggatttcaaaggaacagatgacccagagaagaatgacagcactgagtaagaaggagtgccaggtgagcaggaggttgacgtgacaggtggcatttagtctatgaaggacctccccatgcccaggtctggcaggaggctgctggctagctcagccccaggtggggaagtttccccctggtttgggtggcctcccccagtggatgattgattttcttccctgctatcgcgctctctgacccaccaccccatcccaatcctcttctggctttaccccacagctatgctggcccgagcactaccctcaaggcccatttctttgcccatgggggtttcccggtcctttcaccctgccgcatacccttcccttcctgggatttctgtaggtgcctgagaggaacatggccaggggtctccgaggctgaaacagctccgagctctctgctttggattagctagttacttgatttcaggagctaccaacagggctctgggcctctaggaggaacgcgtgggctggcccaggccccagcttccatgtgggcctggcaagaagagctcagcctgagtggcatcactgtggcactacctggcccttcccctgcatcctccccgacactggatctttcaggagtgttgccccaagcacaggtgccctgggccagccagtcaagaatccccagtgctctccaggcaggcccagattcctctgtactcttggacaatgacagtattatcctgtgcggagtccccctgccccccagggagtgcagatgtgtttgttcagacatgcacaccagctaatcccaggacacaaaacctgtaaaacccatgcactcctgtgggattgcccctgagctccacagtctctccccagccctgcttttgagagccactttgccctggtcccaggtttcaggggcccagacagttctggcttggacagtctctgtggctgaggaagtatttggggccctcacaagcttgccctctggagcttggatgcctggatccctcctgcctcccccgtcaccaactgtgctcccaagcccttcccaagcactcacttcccggtggtgttggtgctgtcctgatatcctgacccccgaggctccagcctcatccctcaccagaacacttctccctccaaaagctggcgtgtgagaccccggctatccgccaccaagaggagttgcggtctttaggggcgttgtccccacctctgcaccccagagttcttcccattcaccttttttcctgcttgcagccatgcacctagatgggcatagggttggggtgagtttgtgggagagtgagggggaggccaggggcaaggaaggtaaatgtggtggccccacaggaattgtgagagatgagatgcagccccccaaggcctttccagtctcactgtacccccaaggcagtctagtggcctcgccaaaacctgagcttctccaattccacttttaaaaccagagttaggggctgtgtgtggcacgctgggttctgagggcatccctcccgcccccccaggccagcccccagtggtgccagcagcacctgcccctcacctccacctcttggtctcgtctgaagcctcagtctgtgtgtctgtcccagggacaatctggtctcctcctgtgtgctgtggctggcatggcctcagtgtctgagggcttgtcctgggaggggtatcaagaatccaattctcacctggttgtaggacctcttgggggatgctaggagggcgccctggcacagccagggattgcctagggctgaggggcccaggagaagctacttctctcccagaaaggggctccctcctgcatctgcagtcggatgcccagaccgcccactctggacagcccacaatgcctcctccgtcctgccatgcccattcgcatgtgtcttgtccatctccgctcctgtgatgtgggtcagtcctttgtggtgccgcgtccagggctgcagggtcccacgtcagtgagcagtgggtggccggtggagggggtggtggtggccgggctcccttcctgcccatggcacctagaacagcagtgaggtctcagagaagcccccgcctgggctccctgggagctaaccttgcagcctctgggttatctttggcaaaggggtctaaagtcccctatccccagcccctctacttcccctgctgggcagcagtggctgcccagtgagtggtgctatccatggaggggggagggagctgggcagcgctgactaggcggcgggtggggctaagagagtttctgcagggacccagctgcagggtcagcagcctgtgggccctgagtggggtctttgttgtcctcaggtgggctgtgggggaagtagcggagaaatgaagtgacgccaggggccaggcatgggtgttcttttccgtgttgttcacattttctctctttctctctctctccactaatcatgtttctctctctctcctcgttttgttgcatgacttgtgccggttctcgtgattgttccctgctcgtgtctcacagactgtccccatttagcctgagacttttttcctgagtccccagctgggcagatccctcagggctaaacccaaggaaatgcccagcaacccccaacccaccccagccccgcgtgcgcccctccggtgcccgcagctggtgtgaacagtaagtactttggcggtgcctggagaccagggcagaaaagccagctgtgctgactgagggcccagcctcgggttctccttgctccaaagtttaaaaaaaaatgaccctctcgcagatgctcatctcagcccatttcaagcctggaaaccatctctgagacgctgcccatgctgccatttcatcactgcaggcctgtgggtctagtgggggcctgggggccctgggctgggggaggcagggcccccagcctctggaaagcaggtgggaatggaggctcctagccactatctcatccaaaggatggggcaggggcgggggctcacacctttgaccctattcatgggttccccagatttatacagttggcccctcgttggtttctctttcttcaagccacccctctggagttggggagggagaatgccccagtttctgaaagcatcttaaaccatagatagacgaacagcccaggggcctgggccccttcacagagcaagacttaagcttccccacccaatcattagtccctcctcaaaggttagggttgagagaagcagtaggccctaggggtgtcccgggaatcccccaggagggaaaggtgccaggctatcatccctccagggatccctgatggatgttccttgtcccctgcccaaaaccatcccgaactttgggccctttagtgattgtgagagctgggagcccccagggcctgggggcttgtggacagaaccagtgggcgggggcccagcattcagagccagagaagggtctcaggcggcaccatctccacagaggcagaggcagagagaaggcacccccctctgacccacccctccccaggcaagaactgcaggctgtggacacctcccctggcagaggatggccaacagagactcagcaagtcctcactcccctcccagaaggagacgctgcctgggaggacccactgttctccccttgaggaaaatccatgcagggtgctatgggcctcaacccccacatcgtcatccgcgtcctctccatactgtttccctcccctctcccaacaccctcctccctcagcccggagacccttggatggaagactgggccagccagagtgggaggcaggaccagcgtgtctgcgagcacacgtgtgtgcctgcagacatgccccaagaccccagagacgccccggccccagtcacatggtgtcagagttaccttggcaactggcctttttggttcagagtaaattgggaagtgaagcccctgggatttgtcgagaaacgcactgtacgtgaaatgctttgccatcttgtacgaaagactttttttttaagttccaaaattatgatgggatttttttggatttgctttacgaataaatctgattggtccatttctcttttga

SEQ ID NO: 23336 - DNA, 3510 bp, Homo sapiens
  source 1..3510: mol_type = unassigned DNA
gtgcttcggatggcggcgggaggttgatggcgagtggtgctgaagggacagctccagcagtggctgatttgggggagaaacaaaatctgcagatggaatccgagcagggcgacttcaccttcaagtggtgagctctcctgacctgcggccagtctccactccattcacggccagccgatctgcccgctcccggaggggtcgggcagtgccggctggacccgccccgagctccatggtttgcccaaccctgcgcgatggtgactctgggcgcggaggttggcgactggcaaatccgcagatcacagaatgaaggcggggagcgcggccggcggccggcgggggctttctcccccaccccagcgcccagggaagcggctcaaccacctgaatccggaaaacgccaacaagtagtttctcgtcggagaagggcggctcacctgggcgccaagactcagtcccgctgcccagagaacctcgtccactcggaaaccaaagcagaaccacttttctctcggtctcgttaagtcatgtctgagtcacagagatgggcaagatcgagaacaacgagagggtgatcctcaatgtcgggggcacccggcacgaaacctaccgcagcaccctcaagaccctgcctggaacacgcctggcccttcttgcctcctccgagcccccaggcgactgcttgaccacggcgggcgacaagctgcagccgtcgccgcctccactgtcgccgccgccgagagcgcccccgctgtcccccgggccaggcggctgcttcgagggcggcgcgggcaactgcagttcccgcggcggcagggccagcgaccatcccggtggcggccgcgagttcttcttcgaccggcacccgggcgtcttcgcctatgtgctcaattactaccgcaccggcaagctgcactgccccgcagacgtgtgcgggccgctcttcgaggaggagctggccttctggggcatcgacgagaccgacgtggagccctgctgctggatgacctaccggcagcaccgcgacgccgaggaggcgctggacatcttcgagacccccgacctcattggcggcgaccccggcgacgacgaggacctggcggccaagaggctgggcatcgaggacgcggcggggctcgggggccccgacggcaaatctggccgctggaggaggctgcagccccgcatgtgggccctcttcgaagacccctactcgtccagagccgccaggtttattgcttttgcttctttattcttcatcctggtttcaattacaactttttgcctggaaacacatgaagctttcaatattgttaaaaacaagacagaaccagtcatcaatggcacaagtgttgttctacagtatgaaattgaaacggatcctgccttgacgtatgtagaaggagtgtgtgtggtgtggtttacttttgaatttttagtccgtattgttttttcacccaataaacttgaattcatcaaaaatctcttgaatatcattgactttgtggccatcctacctttctacttagaggtgggactcagtgggctgtcatccaaagctgctaaagatgtgcttggcttcctcagggtggtaaggtttgtgaggatcctgagaattttcaagctcacccgccattttgtaggtctgagggtgcttggacatactcttcgagctagtactaatgaatttttgctgctgataattttcctggctctaggagttttgatatttgctaccatgatctactatgccgagagagtgggagctcaacctaacgacccttcagctagtgagcacacacagttcaaaaacattcccattgggttctggtgggctgtagtgaccatgactaccctgggttatggggatatgtacccccaaacatggtcaggcatgctggtgggagccctgtgtgctctggctggagtgctgacaatagccatgccagtgcctgtcattgtcaataattttggaatgtactactccttggcaatggcaaagcagaaacttccaaggaaaagaaagaagcacatccctcctgctcctcaggcaagctcacctactttttgcaagacagaattaaatatggcctgcaatagtacacagagtgacacatgtctgggcaaagacaatcgacttctggaacataacagatcagtgttatcaggtgacgacagtacaggaagtgagccgccactatcacccccagaaaggctccccatcagacgctctagtaccagagacaaaaacagaagaggggaaacatgtttcctactgacgacaggtgattacacgtgtgcttctgatggagggatcaggaaagataactgcaaagaggttgtcattactggttacacgcaagccgaggccagatctcttacttaatgacttggggaaggcacaaaacatgagagaaagtgttgtacagaatttatcatggattattgactgctgagaaagggacagtggaatttagccataccaaggactatactggaaacagacttctgctgctgaatgtgccctgatgtgaccaggttgcacttggaagagatcctcgcgtcttcatgaggcacttaaagcttataaaagaactgcggctggaactcatctggtgctccccatgagagtgctctgcttgtagactggccagtgtccatgaaacaactgtaaataccaacatgtgtgcatgggtcaacagtcttggccatttctcatcaaaagaagccaaattcatgatcaacatctctgaagtttcaagtaaggcccacacttctttgaattactcttcatgggcccacattaggttgtgctgtgaattacttaaggcagtgatactgatgtagtatagttttgtcttaatttcccttatttctacttctttggttgaatctatgaacttgattgtataattttcttataaattactgatgtaatcagcttgtcaattatgttgtgaaattgttagtattcatttatcaaaaatgacctatgtttagtcacatatttgtttagttctgggaaattgttatagcttaaatggaactcaccaacattattcatagtttaagtcttttatcattattacctcaattataaatattacaaaaacataattctggcaatgagagtatttttttattcaatgatcaaggagcaatgtcagtatatagtagaatatcaattaaattatatcctaaaatgtatattttgcataaaagagatattctttaatcaattacttttttgtgagttttgtggcaaatgaagcttgtacgtgtctttaaaactgttgtagatgaaactgtataagatttttacatcttgcttaatcaatattttcagagtctattagttcccctgggattctgaatataacatatagcctattataaatccctgtatcgtggaccttttgtgaacatttcaaggcgcatgcacaaccttgatgataaccagtggaaatgtaactaactgaaatgaagaataaaaggcaaatgagctgggga

SEQ ID NO: 23337 - DNA, 3415 bp, Homo sapiens
  source 1..3415: mol_type = unassigned DNA
gtgcttcggatggcggcgggaggttgatggcgagtggtgctgaagggacagctccagcagtggctgatttgggggagaaacaaaatctgcagatggaatccgagcagggcgacttcaccttcaagtggtgagctctcctgacctgcggccagtctccactccattcacggccagccgatctgcccgctcccggaggggtcgggcagtgccggctggacccgccccgagctccatggtttgcccaaccctgcgcgatggtgactctgggcgcggaggttggcgactggcaaatccgcagatcacagaatgaaggcggggagcgcggccggcggccggcgggggctttctcccccaccccagcgcccagggaagcggctcaaccacctgaatccggaaaacgccaacaagtagtttctcgtcggagaagggcggctcacctgggcgccaagactcagtcccgctgcccagagaacctcgtccactcggaaaccaaagcagaaccacttttctctcggtctcgttaagtcatgtctgagtcacagagatgggcaagatcgagaacaacgagagggtgatcctcaatgtcgggggcacccggcacgaaacctaccgcagcaccctcaagaccctgcctggaacacgcctggcccttcttgcctcctccgagcccccaggcgactgcttgaccacggcgggcgacaagctgcagccgtcgccgcctccactgtcgccgccgccgagagcgcccccgctgtcccccgggccaggcggctgcttcgagggcggcgcgggcaactgcagttcccgcggcggcagggccagcgaccatcccggtggcggccgcgagttcttcttcgaccggcacccgggcgtcttcgcctatgtgctcaattactaccgcaccggcaagctgcactgccccgcagacgtgtgcgggccgctcttcgaggaggagctggccttctggggcatcgacgagaccgacgtggagccctgctgctggatgacctaccggcagcaccgcgacgccgaggaggcgctggacatcttcgagacccccgacctcattggcggcgaccccggcgacgacgaggacctggcggccaagaggctgggcatcgaggacgcggcggggctcgggggccccgacggcaaatctggccgctggaggaggctgcagccccgcatgtgggccctcttcgaagacccctactcgtccagagccgccaggtttattgcttttgcttctttattcttcatcctggtttcaattacaactttttgcctggaaacacatgaagctttcaatattgttaaaaacaagacagaaccagtcatcaatggcacaagtgttgttctacagtatgaaattgaaacggatcctgccttgacgtatgtagaaggagtgtgtgtggtgtggtttacttttgaatttttagtccgtattgttttttcacccaataaacttgaattcatcaaaaatctcttgaatatcattgactttgtggccatcctacctttctacttagaggtgggactcagtgggctgtcatccaaagctgctaaagatgtgcttggcttcctcagggtggtaaggtttgtgaggatcctgagaattttcaagctcacccgccattttgtaggtctgagggtgcttggacatactcttcgagctagtactaatgaatttttgctgctgataattttcctggctctaggagttttgatatttgctaccatgatctactatgccgagagagtgggagctcaacctaacgacccttcagctagtgagcacacacagttcaaaaacattcccattgggttctggtgggctgtagtgaccatgactaccctgggttatggggatatgtacccccaaacatggtcaggcatgctggtgggagccctgtgtgctctggctggagtgctgacaatagccatgccagtgcctgtcattgtcaataattttggaatgtactactccttggcaatggcaaagcagaaacttccaaggaaaagaaagaagcacatccctcctgctcctcaggcaagctcacctactttttgcaagacagaattaaatatggcctgcaatagtacacagagtgacacatgtctgggcaaagacaatcgacttctggaacataacagatcagtgttatcaggtgacgacagtacaggaagtgagccgccactatcacccccagaaaggctccccatcagacgctctagtaccagagacaaaaacagaagaggggaaacatgtttcctactgacgacaggtgattacacgtgtgcttctgatggagggatcaggaaagtgttgtacagaatttatcatggattattgactgctgagaaagggacagtggaatttagccataccaaggactatactggaaacagacttctgctgctgaatgtgccctgatgtgaccaggttgcacttggaagagatcctcgcgtcttcatgaggcacttaaagcttataaaagaactgcggctggaactcatctggtgctccccatgagagtgctctgcttgtagactggccagtgtccatgaaacaactgtaaataccaacatgtgtgcatgggtcaacagtcttggccatttctcatcaaaagaagccaaattcatgatcaacatctctgaagtttcaagtaaggcccacacttctttgaattactcttcatgggcccacattaggttgtgctgtgaattacttaaggcagtgatactgatgtagtatagttttgtcttaatttcccttatttctacttctttggttgaatctatgaacttgattgtataattttcttataaattactgatgtaatcagcttgtcaattatgttgtgaaattgttagtattcatttatcaaaaatgacctatgtttagtcacatatttgtttagttctgggaaattgttatagcttaaatggaactcaccaacattattcatagtttaagtcttttatcattattacctcaattataaatattacaaaaacataattctggcaatgagagtatttttttattcaatgatcaaggagcaatgtcagtatatagtagaatatcaattaaattatatcctaaaatgtatattttgcataaaagagatattctttaatcaattacttttttgtgagttttgtggcaaatgaagcttgtacgtgtctttaaaactgttgtagatgaaactgtataagatttttacatcttgcttaatcaatattttcagagtctattagttcccctgggattctgaatataacatatagcctattataaatccctgtatcgtggaccttttgtgaacatttcaaggcgcatgcacaaccttgatgataaccagtggaaatgtaactaactgaaatgaagaataaaaggcaaatgagctgggga

SEQ ID NO: 23338 - DNA, 3344 bp, Homo sapiens
  source 1..3344: mol_type = unassigned DNA
gtgcttcggatggcggcgggaggttgatggcgagtggtgctgaagggacagctccagcagtggctgatttgggggagaaacaaaatctgcagatggaatccgagcagggcgacttcaccttcaagtggtgagctctcctgacctgcggccagtctccactccattcacggccagccgatctgcccgctcccggaggggtcgggcagtgccggctggacccgccccgagctccatggtttgcccaaccctgcgcgatggtgactctgggcgcggaggttggcgactggcaaatccgcagatcacagaatgaaggcggggagcgcggccggcggccggcgggggctttctcccccaccccagcgcccagggaagcggctcaaccacctgaatccggaaaacgccaacaagtagtttctcgtcggagaagggcggctcacctgggcgccaagactcagtcccgctgcccagagaacctcgtccactcggaaaccaaagcagaaccacttttctctcggtctcgttaagtcatgtctgagtcacagagatgggcaagatcgagaacaacgagagggtgatcctcaatgtcgggggcacccggcacgaaacctaccgcagcaccctcaagaccctgcctggaacacgcctggcccttcttgcctcctccgagcccccaggcgactgcttgaccacggcgggcgacaagctgcagccgtcgccgcctccactgtcgccgccgccgagagcgcccccgctgtcccccgggccaggcggctgcttcgagggcggcgcgggcaactgcagttcccgcggcggcagggccagcgaccatcccggtggcggccgcgagttcttcttcgaccggcacccgggcgtcttcgcctatgtgctcaattactaccgcaccggcaagctgcactgccccgcagacgtgtgcgggccgctcttcgaggaggagctggccttctggggcatcgacgagaccgacgtggagccctgctgctggatgacctaccggcagcaccgcgacgccgaggaggcgctggacatcttcgagacccccgacctcattggcggcgaccccggcgacgacgaggacctggcggccaagaggctgggcatcgaggacgcggcggggctcgggggccccgacggcaaatctggccgctggaggaggctgcagccccgcatgtgggccctcttcgaagacccctactcgtccagagccgccaggtttattgcttttgcttctttattcttcatcctggtttcaattacaactttttgcctggaaacacatgaagctttcaatattgttaaaaacaagacagaaccagtcatcaatggcacaagtgttgttctacagtatgaaattgaaacggatcctgccttgacgtatgtagaaggagtgtgtgtggtgtggtttacttttgaatttttagtccgtattgttttttcacccaataaacttgaattcatcaaaaatctcttgaatatcattgactttgtggccatcctacctttctacttagaggtgggactcagtgggctgtcatccaaagctgctaaagatgtgcttggcttcctcagggtggtaaggtttgtgaggatcctgagaattttcaagctcacccgccattttgtaggtctgagggtgcttggacatactcttcgagctagtactaatgaatttttgctgctgataattttcctggctctaggagttttgatatttgctaccatgatctactatgccgagagagtgggagctcaacctaacgacccttcagctagtgagcacacacagttcaaaaacattcccattgggttctggtgggctgtagtgaccatgactaccctgggttatggggatatgtacccccaaacatggtcaggcatgctggtgggagccctgtgtgctctggctggagtgctgacaatagccatgccagtgcctgtcattgtcaataattttggaatgtactactccttggcaatggcaaagcagaaacttccaaggaaaagaaagaagcacatccctcctgctcctcaggcaagctcacctactttttgcaagacagaattaaatatggcctgcaatagtacacagagtgacacatgtctgggcaaagacaatcgacttctggaacataacagatcagataactgcaaagaggttgtcattactggttacacgcaagccgaggccagatctcttacttaatgacttggggaaggcacaaaacatgagagaaagtgttgtacagaatttatcatggattattgactgctgagaaagggacagtggaatttagccataccaaggactatactggaaacagacttctgctgctgaatgtgccctgatgtgaccaggttgcacttggaagagatcctcgcgtcttcatgaggcacttaaagcttataaaagaactgcggctggaactcatctggtgctccccatgagagtgctctgcttgtagactggccagtgtccatgaaacaactgtaaataccaacatgtgtgcatgggtcaacagtcttggccatttctcatcaaaagaagccaaattcatgatcaacatctctgaagtttcaagtaaggcccacacttctttgaattactcttcatgggcccacattaggttgtgctgtgaattacttaaggcagtgatactgatgtagtatagttttgtcttaatttcccttatttctacttctttggttgaatctatgaacttgattgtataattttcttataaattactgatgtaatcagcttgtcaattatgttgtgaaattgttagtattcatttatcaaaaatgacctatgtttagtcacatatttgtttagttctgggaaattgttatagcttaaatggaactcaccaacattattcatagtttaagtcttttatcattattacctcaattataaatattacaaaaacataattctggcaatgagagtatttttttattcaatgatcaaggagcaatgtcagtatatagtagaatatcaattaaattatatcctaaaatgtatattttgcataaaagagatattctttaatcaattacttttttgtgagttttgtggcaaatgaagcttgtacgtgtctttaaaactgttgtagatgaaactgtataagatttttacatcttgcttaatcaatattttcagagtctattagttcccctgggattctgaatataacatatagcctattataaatccctgtatcgtggaccttttgtgaacatttcaaggcgcatgcacaaccttgatgataaccagtggaaatgtaactaactgaaatgaagaataaaaggcaaatgagctgggg

SEQ ID NO: 23339 - DNA, 3026 bp, Homo sapiens
  source 1..3026: mol_type = unassigned DNA
agtcatgtctgagtcacagagatgggcaagatcgagaacaacgagagggtgatcctcaatgtcgggggcacccggcacgaaacctaccgcagcaccctcaagaccctgcctggaacacgcctggcccttcttgcctcctccgagcccccaggcgactgcttgaccacggcgggcgacaagctgcagccgtcgccgcctccactgtcgccgccgccgagagcgcccccgctgtcccccgggccaggcggctgcttcgagggcggcgcgggcaactgcagttcccgcggcggcagggccagcgaccatcccggtggcggccgcgagttcttcttcgaccggcacccgggcgtcttcgcctatgtgctcaattactaccgcaccggcaagctgcactgccccgcagacgtgtgcgggccgctcttcgaggaggagctggccttctggggcatcgacgagaccgacgtggagccctgctgctggatgacctaccggcagcaccgcgacgccgaggaggcgctggacatcttcgagacccccgacctcattggcggcgaccccggcgacgacgaggacctggcggccaagaggctgggcatcgaggacgcggcggggctcgggggccccgacggcaaatctggccgctggaggaggctgcagccccgcatgtgggccctcttcgaagacccctactcgtccagagccgccaggtttattgcttttgcttctttattcttcatcctggtttcaattacaactttttgcctggaaacacatgaagctttcaatattgttaaaaacaagacagaaccagtcatcaatggcacaagtgttgttctacagtatgaaattgaaacggatcctgccttgacgtatgtagaaggagtgtgtgtggtgtggtttacttttgaatttttagtccgtattgttttttcacccaataaacttgaattcatcaaaaatctcttgaatatcattgactttgtggccatcctacctttctacttagaggtgggactcagtgggctgtcatccaaagctgctaaagatgtgcttggcttcctcagggtggtaaggtttgtgaggatcctgagaattttcaagctcacccgccattttgtaggtctgagggtgcttggacatactcttcgagctagtactaatgaatttttgctgctgataattttcctggctctaggagttttgatatttgctaccatgatctactatgccgagagagtgggagctcaacctaacgacccttcagctagtgagcacacacagttcaaaaacattcccattgggttctggtgggctgtagtgaccatgactaccctgggttatggggatatgtacccccaaacatggtcaggcatgctggtgggagccctgtgtgctctggctggagtgctgacaatagccatgccagtgcctgtcattgtcaataattttggaatgtactactccttggcaatggcaaagcagaaacttccaaggaaaagaaagaagcacatccctcctgctcctcaggcaagctcacctactttttgcaagacagaattaaatatggcctgcaatagtacacagagtgacacatgtctgggcaaagacaatcgacttctggaacataacagatcagtgttatcaggtgacgacagtacaggaagtgagccgccactatcacccccagaaaggctccccatcagacgctctagtaccagagacaaaaacagaagaggggaaacatgtttcctactgacgacaggtgattacacgtgtgcttctgatggagggatcaggaaagataactgcaaagaggttgtcattactggttacacgcaagccgaggccagatctcttacttaatgacttggggaaggcacaaaacatgagagaaagtgttgtacagaatttatcatggattattgactgctgagaaagggacagtggaatttagccataccaaggactatactggaaacagacttctgctgctgaatgtgccctgatgtgaccaggttgcacttggaagagatcctcgcgtcttcatgaggcacttaaagcttataaaagaactgcggctggaactcatctggtgctccccatgagagtgctctgcttgtagactggccagtgtccatgaaacaactgtaaataccaacatgtgtgcatgggtcaacagtcttggccatttctcatcaaaagaagccaaattcatgatcaacatctctgaagtttcaagtaaggcccacacttctttgaattactcttcatgggcccacattaggttgtgctgtgaattacttaaggcagtgatactgatgtagtatagttttgtcttaatttcccttatttctacttctttggttgaatctatgaacttgattgtataattttcttataaattactgatgtaatcagcttgtcaattatgttgtgaaattgttagtattcatttatcaaaaatgacctatgtttagtcacatatttgtttagttctgggaaattgttatagcttaaatggaactcaccaacattattcatagtttaagtcttttatcattattacctcaattataaatattacaaaaacataattctggcaatgagagtatttttttattcaatgatcaaggagcaatgtcagtatatagtagaatatcaattaaattatatcctaaaatgtatattttgcataaaagagatattctttaatcaattacttttttgtgagttttgtggcaaatgaagcttgtacgtgtctttaaaactgttgtagatgaaactgtataagatttttacatcttgcttaatcaatattttcagagtctattagttcccctgggattctgaatataacatatagcctattataaatccctgtatcgtggaccttttgtgaacatttcaaggcgcatgcacaaccttgatgataaccagtggaaatgtaactaactgaaatgaagaataaaaggcaaatgagctggggataaacttgaatgttatctgattaaattactcaaattatt

SEQ ID NO: 23340 - DNA, 5625 bp, Homo sapiens
  source 1..5625: mol_type = unassigned DNA
gtggagagtggggtgtaaataaggcaggcagaagctccagagagggtggagacagagcttcacggaagaaaaatatgtgaacctggttggtacacatagcttctccagacccacccacccactctttcctgagccctgtgcttcggatggcggcgggaggttgatggcgagtggtgctgaagggacagctccagcagtggctgatttgggggagaaacaaaatctgcagatggaatccgagcagggcgacttcaccttcaagtggtgagctctcctgacctgcggccagtctccactccattcacggccagccgatctgcccgctcccggaggggtcgggcagtgccggctggacccgccccgagctccatggtttgcccaaccctgcgcgatggtgactctgggcgcggaggttggcgactggcaaatccgcagatcacagaatgaaggcggggagcgcggccggcggccggcgggggctttctcccccaccccagcgcccagggaagcggctcaaccacctgaatccggaaaacgccaacaagtagtttctcgtcggagaagggcggctcacctgggcgccaagactcagtcccgctgcccagagaacctcgtccactcggaaaccaaagcagaaccacttttctctcggtctcgttaagtcatgtctgagtcacagagatgggcaagatcgagaacaacgagagggtgatcctcaatgtcgggggcacccggcacgaaacctaccgcagcaccctcaagaccctgcctggaacacgcctggcccttcttgcctcctccgagcccccaggcgactgcttgaccacggcgggcgacaagctgcagccgtcgccgcctccactgtcgccgccgccgagagcgcccccgctgtcccccgggccaggcggctgcttcgagggcggcgcgggcaactgcagttcccgcggcggcagggccagcgaccatcccggtggcggccgcgagttcttcttcgaccggcacccgggcgtcttcgcctatgtgctcaattactaccgcaccggcaagctgcactgccccgcagacgtgtgcgggccgctcttcgaggaggagctggccttctggggcatcgacgagaccgacgtggagccctgctgctggatgacctaccggcagcaccgcgacgccgaggaggcgctggacatcttcgagacccccgacctcattggcggcgaccccggcgacgacgaggacctggcggccaagaggctgggcatcgaggacgcggcggggctcgggggccccgacggcaaatctggccgctggaggaggctgcagccccgcatgtgggccctcttcgaagacccctactcgtccagagccgccaggtttattgcttttgcttctttattcttcatcctggtttcaattacaactttttgcctggaaacacatgaagctttcaatattgttaaaaacaagacagaaccagtcatcaatggcacaagtgttgttctacagtatgaaattgaaacggatcctgccttgacgtatgtagaaggagtgtgtgtggtgtggtttacttttgaatttttagtccgtattgttttttcacccaataaacttgaattcatcaaaaatctcttgaatatcattgactttgtggccatcctacctttctacttagaggtgggactcagtgggctgtcatccaaagctgctaaagatgtgcttggcttcctcagggtggtaaggtttgtgaggatcctgagaattttcaagctcacccgccattttgtaggtctgagggtgcttggacatactcttcgagctagtactaatgaatttttgctgctgataattttcctggctctaggagttttgatatttgctaccatgatctactatgccgagagagtgggagctcaacctaacgacccttcagctagtgagcacacacagttcaaaaacattcccattgggttctggtgggctgtagtgaccatgactaccctgggttatggggatatgtacccccaaacatggtcaggcatgctggtgggagccctgtgtgctctggctggagtgctgacaatagccatgccagtgcctgtcattgtcaataattttggaatgtactactccttggcaatggcaaagcagaaacttccaaggaaaagaaagaagcacatccctcctgctcctcaggcaagctcacctactttttgcaagacagaattaaatatggcctgcaatagtacacagagtgacacatgtctgggcaaagacaatcgacttctggaacataacagatcagtgttatcaggtgacgacagtacaggaagtgagccgccactatcacccccagaaaggctccccatcagacgctctagtaccagagacaaaaacagaagaggggaaacatgtttcctactgacgacaggtgattacacgtgtgcttctgatggagggatcaggaaaggatatgaaaaatcccgaagcttaaacaacatagcgggcttggcaggcaatgctctgaggctctctccagtaacatcaccctacaactctccttgtcctctgaggcgctctcgatctcccatcccatctatcttgtaaaccaaacaaccaaactgcatcagtcggctaaattgtattaattcaagtgctgtttaccccataatggaaataattaaatgtagagttactccaggctccattaatacagtataaatcttgcatgatactacaatttgaagtcagaaatgccacttgggtagctaatgaatcttacccaggctttaaagattgtctaaagtagtgctaagatccctcctattaattgccctgatatccttttgcaataaaatgacagatagtgtcagatattgaccagtgcactaatatataaacataccttcagggagatatatttaaaacagtgtgcttccaaatgccaaccacttcattggaactttatttcttgtgactgtaaaccattctgaagatgtctgggatcctatcttgattgcacacgacatgacttgtgtcagctcatttgcatggaccatcttgtctctatcacctgaaagcaatgttgcagagttcggggactgtggatagctcaggatatgtgtacttgcatcgaaccatcctgctgatatgaaagcattggtcgactgttctgcatgttgaattgtggggcagggagggcacttttctccttgacatttttttcttattatttgaaagaaatatatgttttaaatagtttaatttcttgattgatttacttttcttcaaaaatgctgtattggagttctgaatgtctctggttgtttgcacacagataactgcaaagaggttgtcattactggttacacgcaagccgaggccagatctcttacttaatgacttggggaaggcacaaaacatgagagaaaggtaactgccagccaggcttgcattgtttagccagaaattgctgcttggttctagactctttaaaaaaaaaaaatacccagggtttgtcatcattttcagaggcagagtgccaaatatcacccaaagctcttgtgtcttttttttacccccttattttatttttatttattaattttttgtgcaaacatcaaatgtcactggtgttcacagaaggcttttttgactagccttaaattcctgagtcaaaagattaatcagattttcaggcagtgtttaatcaggtgctttgtcctgtatgttgttcttgtctgtcttagctccctgtctttcctgtatatgccatctgtctccatgaagcacagaaatgcctctgtaagatgtttatgattttaatatttactccctccaaacccgactccataccattttttgctatttggagcagcctctctgctttgtgtataaattaatgatgctctgtagactacctaagttaatcggcactgtgaatctttttgataagcagggtttaagcagcaatttcaccattgcacttggttgcctgctgcagtgtcagtttctactacctagcaaccagcattcattactacactccaacaaaatccttagggagtcatattcagtctgagtggaagaaagtctatttatgcattcctatgaattcaacagcaatagcgtgtctcatgtattgagcatgtgagggaagaaaaagaccgtaatataaatagagggataaataatatcactaaggcatttgggagccttgagactgctgattaattcctatttctcatgtttattttttgttaggaagacaattgtcacttttattattggccacgaaacatgtattactctatatccccaagtcctagagcatgacctgcatgttggagatgttgtacagcaatgtatttatccagacatacatatatgatatttagagacacagtgattcttttgataacaccacacatagaacattataattacacacaaatttatggtaaaagaattaatatgctgtctggtgctgctgttattgactacagtgttgtacagaatttatcatggattattgactgctgagaaagggacagtggaatttagccataccaaggactatactggaaacagacttctgctgctgaatgtgccctgatgtgaccaggttgcacttggaagagatcctcgcgtcttcatgaggcacttaaagcttataaaagaactgcggctggaactcatctggtgctccccatgagagtgctctgcttgtagactggccagtgtccatgaaacaactgtaaataccaacatgtgtgcatgggtcaacagtcttggccatttctcatcaaaagaagccaaattcatgatcaacatctctgaagtttcaagtaaggcccacacttctttgaattactcttcatgggcccacattaggttgtgctgtgaattacttaaggcagtgatactgatgtagtatagttttgtcttaatttcccttatttctacttctttggttgaatctatgaacttgattgtataattttcttataaattactgatgtaatcagcttgtcaattatgttgtgaaattgttagtattcatttatcaaaaatgacctatgtttagtcacatatttgtttagttctgggaaattgttatagcttaaatggaactcaccaacattattcatagtttaagtcttttatcattattacctcaattataaatattacaaaaacataattctggcaatgagagtatttttttattcaatgatcaaggagcaatgtcagtatatagtagaatatcaattaaattatatcctaaaatgtatattttgcataaaagagatattctttaatcaattacttttttgtgagttttgtggcaaatgaagcttgtacgtgtctttaaaactgttgtagatgaaactgtataagatttttacatcttgcttaatcaatattttcagagtctattagttcccctgggattctgaatataacatatagcctattataaatccctgtatcgtggaccttttgtgaacatttcaaggcgcatgcacaaccttgatgataaccagtggaaatgtaactaactgaaatgaagaataaaaggcaaatgagctggggataaacttgaatgttatctgattaaattactcaaattat

SEQ ID NO: 23341 - DNA, 2931 bp, Homo sapiens
  source 1..2931: mol_type = unassigned DNA
agtcatgtctgagtcacagagatgggcaagatcgagaacaacgagagggtgatcctcaatgtcgggggcacccggcacgaaacctaccgcagcaccctcaagaccctgcctggaacacgcctggcccttcttgcctcctccgagcccccaggcgactgcttgaccacggcgggcgacaagctgcagccgtcgccgcctccactgtcgccgccgccgagagcgcccccgctgtcccccgggccaggcggctgcttcgagggcggcgcgggcaactgcagttcccgcggcggcagggccagcgaccatcccggtggcggccgcgagttcttcttcgaccggcacccgggcgtcttcgcctatgtgctcaattactaccgcaccggcaagctgcactgccccgcagacgtgtgcgggccgctcttcgaggaggagctggccttctggggcatcgacgagaccgacgtggagccctgctgctggatgacctaccggcagcaccgcgacgccgaggaggcgctggacatcttcgagacccccgacctcattggcggcgaccccggcgacgacgaggacctggcggccaagaggctgggcatcgaggacgcggcggggctcgggggccccgacggcaaatctggccgctggaggaggctgcagccccgcatgtgggccctcttcgaagacccctactcgtccagagccgccaggtttattgcttttgcttctttattcttcatcctggtttcaattacaactttttgcctggaaacacatgaagctttcaatattgttaaaaacaagacagaaccagtcatcaatggcacaagtgttgttctacagtatgaaattgaaacggatcctgccttgacgtatgtagaaggagtgtgtgtggtgtggtttacttttgaatttttagtccgtattgttttttcacccaataaacttgaattcatcaaaaatctcttgaatatcattgactttgtggccatcctacctttctacttagaggtgggactcagtgggctgtcatccaaagctgctaaagatgtgcttggcttcctcagggtggtaaggtttgtgaggatcctgagaattttcaagctcacccgccattttgtaggtctgagggtgcttggacatactcttcgagctagtactaatgaatttttgctgctgataattttcctggctctaggagttttgatatttgctaccatgatctactatgccgagagagtgggagctcaacctaacgacccttcagctagtgagcacacacagttcaaaaacattcccattgggttctggtgggctgtagtgaccatgactaccctgggttatggggatatgtacccccaaacatggtcaggcatgctggtgggagccctgtgtgctctggctggagtgctgacaatagccatgccagtgcctgtcattgtcaataattttggaatgtactactccttggcaatggcaaagcagaaacttccaaggaaaagaaagaagcacatccctcctgctcctcaggcaagctcacctactttttgcaagacagaattaaatatggcctgcaatagtacacagagtgacacatgtctgggcaaagacaatcgacttctggaacataacagatcagtgttatcaggtgacgacagtacaggaagtgagccgccactatcacccccagaaaggctccccatcagacgctctagtaccagagacaaaaacagaagaggggaaacatgtttcctactgacgacaggtgattacacgtgtgcttctgatggagggatcaggaaagtgttgtacagaatttatcatggattattgactgctgagaaagggacagtggaatttagccataccaaggactatactggaaacagacttctgctgctgaatgtgccctgatgtgaccaggttgcacttggaagagatcctcgcgtcttcatgaggcacttaaagcttataaaagaactgcggctggaactcatctggtgctccccatgagagtgctctgcttgtagactggccagtgtccatgaaacaactgtaaataccaacatgtgtgcatgggtcaacagtcttggccatttctcatcaaaagaagccaaattcatgatcaacatctctgaagtttcaagtaaggcccacacttctttgaattactcttcatgggcccacattaggttgtgctgtgaattacttaaggcagtgatactgatgtagtatagttttgtcttaatttcccttatttctacttctttggttgaatctatgaacttgattgtataattttcttataaattactgatgtaatcagcttgtcaattatgttgtgaaattgttagtattcatttatcaaaaatgacctatgtttagtcacatatttgtttagttctgggaaattgttatagcttaaatggaactcaccaacattattcatagtttaagtcttttatcattattacctcaattataaatattacaaaaacataattctggcaatgagagtatttttttattcaatgatcaaggagcaatgtcagtatatagtagaatatcaattaaattatatcctaaaatgtatattttgcataaaagagatattctttaatcaattacttttttgtgagttttgtggcaaatgaagcttgtacgtgtctttaaaactgttgtagatgaaactgtataagatttttacatcttgcttaatcaatattttcagagtctattagttcccctgggattctgaatataacatatagcctattataaatccctgtatcgtggaccttttgtgaacatttcaaggcgcatgcacaaccttgatgataaccagtggaaatgtaactaactgaaatgaagaataaaaggcaaatgagctggggataaacttgaatgttatctgattaaattactcaaattatt

SEQ ID NO: 23342 - DNA, 5447 bp, Homo sapiens
  source 1..5447: mol_type = unassigned DNA
cccagccacagccccgccccacctcccccaggccaatcagtttggttcctctcccctaagccacgcccccgctacctcgctcctcctcccacccaatcccgtcggtctctccccccgtgtccccgcccctgcgtccccgcccctcccgccccgccccccgtccaatgctgagctcagtctgcgtctcgtccttccgcgggcgccagggggccagcaagcagcagccggcgccaccgccgcagccgcccgagtccccgccgccgccaccgctgccgccgcagcagcagcagcctgcgcagcccggccccgccgcgtccccggcgggccccccggcaccccgcgggcccggggaccggcgcgccgagccatgccccgggctgccggcggcggccatggggcggcacggcggcggcggtggcgacagcggcaagatcgtgatcaacgtgggcggcgtgcgccatgagacgtaccgctcgacgctgcgcaccctgccggggacgcggctggccggcctgacggagcccgaggcggcggcacgcttcgactacgacccgggcgccgacgagttcttctttgaccggcacccgggagtcttcgcgtacgtgctcaactactaccgcaccggcaagctgcactgcccagccgacgtgtgcgggcccctgtttgaggaggagctcggcttctggggcatcgacgagaccgacgtggaggcctgctgctggatgacctaccggcagcatcgcgacgctgaggaggcgctcgactccttcgaggcgcccgaccccgcgggcgccgccaacgccgccaacgccgcaggcgcccacgacggaggcctggacgacgaggcgggcgcgggcggcggcggcctggacggagcgggcggcgagctcaagcgcctctgcttccaggacgcgggcggcggcgccggggggccgccagggggcgcgggcggcgcgggcggcacatggtggcgccgctggcagccccgcgtgtgggcgctcttcgaggacccctactcgtcgcgggctgccaggtatgtggccttcgcctccctcttcttcatcctcatctccatcaccaccttctgcctggaaacccatgagggcttcatccatattagcaacaagacggtgacccaggcctccccgatccccggggcacctccggagaacatcaccaacgtggaggtggagacggagcccttcctgacctacgtggagggggtgtgcgtggtctggttcaccttcgagttcctcatgcgcatcaccttctgcccagacaaggtggagtttcttaaaagcagcctcaacatcatcgactgtgtggccatcctgcccttctatctcgaggtgggcctctcgggcctcagctccaaggccgccaaagacgtgctgggcttcctgcgggtggtccgcttcgtccgcatcctgcgcatcttcaagctgacccggcacttcgtggggctgcgcgtgctgggacacacgctccgcgccagcaccaacgagttcctgctgctcatcatcttcctggccctgggggtgctcatcttcgccaccatgatttactacgctgagcgcattggcgccgaccccgatgacatcctgggctccaaccacacctacttcaagaacatccccattggcttctggtgggctgtggtcaccatgacgaccctgggctatggagacatgtaccccaagacgtggtcggggatgctggtcggggcgctgtgtgccctggcgggggtgctgaccatcgccatgcctgtgcccgtcattgtcaacaactttggcatgtactattcgctggccatggccaagcagaagctgcccaagaagaagaacaaacacatcccccggcccccgcaaccgggctcgcccaactactgcaagcctgacccacccccgccacccccgccccacccgcaccacggcagcgggggcatcagcccgccgccacccatcaccccaccctccatgggggtgactgtggccggggcctacccagcggggccccacacgcaccccgggctgctcagggggggagcgggtgggctggggatcatggggctgcctcctctgccagcccccggcgagccttgcccgttggctcaggaggaggtgattgagatcaaccgggcagatcctcgccccaatggggatccggcagcagctgcgcttgcccacgaggactgcccagccattgaccagcctgccatgtccccggaagacaagagccccatcacgcctggaagccgtggccgctatagccgggaccgagcctgcttcctcctcaccgactatgccccttcccctgatggctccatccgaaaagctcttgtcaccgcctgagacctcgcgagactttcggtcccccccgccccttccccccaggttacgagaaatcccgcagcctcagcagcatcgcgggcctgagcggggtgtccctgcgcctcgcgccccttgccaccccccctggctctccccgggccgcccgccgcgctcccccgaccctgccctccatcctttagcgctcccctcccccctgtggggggactcgggggtgaccgggaagaaggtcaaaggagctgggggtggggggtggggaaaagggtttttttaaaaaaaatcaaaaagtcattaataatatgcaaccgagatgacgatgccagcagacacccccgggcccctcacccccaacctgggcccccaggatggagagaggggccacagcccgtccccccaactcttccctccccaaaaaaagccttctcaggtctccacgagccataggacatccccctgccatcaacttgtgtaaataagtccaaattatgccagttacatcttggggcacctccccccacacactgcatgccttccctaacctggagcccccactccaagtccacctcagcaataagccgccaggggccgcatgcgcgggtttgaggggcaggcactctgggaagggggtggcacctcccgggggtcgggctggcctttaaggtctccagccttcccatccttcaccccaggaggacaaccaaccctgtgcgttgattaggagaaaacaaaccagaaactagaaacagtgtaggggaaggaggaacagttacccaagccccagatcggagttgagctcaggtggcgggagggcggggccgagttgagctcaggtggtgggagggcggggcgggctttggacctgctccctcagcctttaggagaattcctctggtgaatttcaccctctcatccgccccttcccccagggacctgctcgcctctattcttgctgcatggactcagacctcctatcccagaattcctgggatgatctggccctagcacacgaaattccccgactatctccctccattcccaggacatgagacctgcacccagaattctgagactgaccctggcacgccacatctcccaatccccacacactcctgcgacttaacctctgcacacagaggctccctgaaccaccctccctccccactcctgccaccccaaacacccccaccaaattccctgaactgcgtcccagcacttctcaaacctccaagacttgacccagctcttttcagctcaaattcagcctttgggatgctccaaatccttcccacaactgacatttcttggacacccccaaagcctcaggcctgttccgcacccatatccccaaagccctaacagacttgtccagcccaggttcccttgatgctagaacttccaagataggcgcaacctgtctgcaattccagggaaccagaccctccccaagcaccctctttgtcttacgcctaaccctgagtctcttccctgagatggtgccccaaaggtaccctcttcacagacaccagtgtttcccagagggttgtatttgtacctttggtggtgtgctaaggtttgaggcagtatgaggacaaacacttgttttaaaagttttgtctctaatacgcattttgtacagaagccgataagtgcaggcatcgctgcttggctaggacacggtttatttaggttaagagtgtttccatttaaagtagtccacagatgatcacagaggctgttcccgaagggaggaacactggagtatcagaagattgggaaccgacaacacccagctcggctgggatcccagccccccttccccagcggtcctcaccgcgtcacgctcgcgggtggaaaatcatttcccacctcctatcctggctcaaggatgcgctacctcccccaagcccagagaccacaccggtcccagactctttagcggaccccccttttggagccggggtcccacggaattagccacctccctccctctgctcccacggcctcaggaaccccccacccgagggtggatggggggcgtcactgagcacgattctcgatgcaacgattcctatgcaaggggcattttgagtcccccccatccttccctcggaccctaaaccctggtgaagcaggggtgaggggtggggcgggttttggtgggggcggggcaaagggctaggggctccagacaccagggtacggggtggggactgattatattgccaaagggttcaacttctttaacaagcccccccgtttcccctgaccttcacgaaagccgaaggaggcggggaaagggggtgagggtcttttccaaagggtactgacctcttcccaacgtctccccctgctcgccagtccgccacacgtacccagcttttgagttcagcttttcaaaataaccacaatcatgataaacttctacaaaacgtgattctcctcccctcccaccccatcccccaagtcaatagtgtgggattcggggagggagagagcgagctaaagggactctttccaagtccggctcccccttttccccccggccgccagggtgcctgcacctacacgcatgcgctgcatgacgcgccccccacacgcatgtcgcacccctcctgcgctccgggaacgcacggacacgggccagggggcggggcgattggggaggaatgaatggcggggggtcttcctgagctccgcggctcaccctccccaacacacacacacacacacacagagcaataagtttctctcactcaaatgtgggcggggcgggcctagcctgtcgctggtggggggagtggtgagggggcgctctcagggatgggggcggggttcggagacagtgtggggaggggaggtctgcaaatcgtccaactctggtgctaatggcgggtcttctcagcccacccgcagggcagggagggaggggtcggcgtggccccttccccaagcctcccccacgcccaccctgggtgcatgaaccgcccaatgcagaagctgccgcatgtcacccccctctccccaaagaaaaagtgtcatgcccccttcccacccaccctcactccccaccaaaataaacgtttccttttcatttaaaaa

SEQ ID NO: 23343 - DNA, 3347 bp, Homo sapiens
  source 1..3347: mol_type = unassigned DNA
aggtcgcgacggcagccacaggtggcagtcgggggtggctgtaattgatcctcgccccaatggggatccggcagcagctgcgcttgcccacgaggactgcccagccattgaccagcctgccatgtccccggaagacaagagccccatcacgcctggaagccgtggccgctatagccgggaccgagcctgcttcctcctcaccgactatgccccttcccctgatggctccatccgaaaagctcttgtcaccgcctgagacctcgcgagactttcggtcccccccgccccttccccccaggttacgagaaatcccgcagcctcagcagcatcgcgggcctgagcggggtgtccctgcgcctcgcgccccttgccaccccccctggctctccccgggccgcccgccgcgctcccccgaccctgccctccatcctttagcgctcccctcccccctgtggggggactcgggggtgaccgggaagaaggtcaaaggagctgggggtggggggtggggaaaagggtttttttaaaaaaaatcaaaaagtcattaataatatgcaaccgagatgacgatgccagcagacacccccgggcccctcacccccaacctgggcccccaggatggagagaggggccacagcccgtccccccaactcttccctccccaaaaaaagccttctcaggtctccacgagccataggacatccccctgccatcaacttgtgtaaataagtccaaattatgccagttacatcttggggcacctccccccacacactgcatgccttccctaacctggagcccccactccaagtccacctcagcaataagccgccaggggccgcatgcgcgggtttgaggggcaggcactctgggaagggggtggcacctcccgggggtcgggctggcctttaaggtctccagccttcccatccttcaccccaggaggacaaccaaccctgtgcgttgattaggagaaaacaaaccagaaactagaaacagtgtaggggaaggaggaacagttacccaagccccagatcggagttgagctcaggtggcgggagggcggggccgagttgagctcaggtggtgggagggcggggcgggctttggacctgctccctcagcctttaggagaattcctctggtgaatttcaccctctcatccgccccttcccccagggacctgctcgcctctattcttgctgcatggactcagacctcctatcccagaattcctgggatgatctggccctagcacacgaaattccccgactatctccctccattcccaggacatgagacctgcacccagaattctgagactgaccctggcacgccacatctcccaatccccacacactcctgcgacttaacctctgcacacagaggctccctgaaccaccctccctccccactcctgccaccccaaacacccccaccaaattccctgaactgcgtcccagcacttctcaaacctccaagacttgacccagctcttttcagctcaaattcagcctttgggatgctccaaatccttcccacaactgacatttcttggacacccccaaagcctcaggcctgttccgcacccatatccccaaagccctaacagacttgtccagcccaggttcccttgatgctagaacttccaagataggcgcaacctgtctgcaattccagggaaccagaccctccccaagcaccctctttgtcttacgcctaaccctgagtctcttccctgagatggtgccccaaaggtaccctcttcacagacaccagtgtttcccagagggttgtatttgtacctttggtggtgtgctaaggtttgaggcagtatgaggacaaacacttgttttaaaagttttgtctctaatacgcattttgtacagaagccgataagtgcaggcatcgctgcttggctaggacacggtttatttaggttaagagtgtttccatttaaagtagtccacagatgatcacagaggctgttcccgaagggaggaacactggagtatcagaagattgggaaccgacaacacccagctcggctgggatcccagccccccttccccagcggtcctcaccgcgtcacgctcgcgggtggaaaatcatttcccacctcctatcctggctcaaggatgcgctacctcccccaagcccagagaccacaccggtcccagactctttagcggaccccccttttggagccggggtcccacggaattagccacctccctccctctgctcccacggcctcaggaaccccccacccgagggtggatggggggcgtcactgagcacgattctcgatgcaacgattcctatgcaaggggcattttgagtcccccccatccttccctcggaccctaaaccctggtgaagcaggggtgaggggtggggcgggttttggtgggggcggggcaaagggctaggggctccagacaccagggtacggggtggggactgattatattgccaaagggttcaacttctttaacaagcccccccgtttcccctgaccttcacgaaagccgaaggaggcggggaaagggggtgagggtcttttccaaagggtactgacctcttcccaacgtctccccctgctcgccagtccgccacacgtacccagcttttgagttcagcttttcaaaataaccacaatcatgataaacttctacaaaacgtgattctcctcccctcccaccccatcccccaagtcaatagtgtgggattcggggagggagagagcgagctaaagggactctttccaagtccggctcccccttttccccccggccgccagggtgcctgcacctacacgcatgcgctgcatgacgcgccccccacacgcatgtcgcacccctcctgcgctccgggaacgcacggacacgggccagggggcggggcgattggggaggaatgaatggcggggggtcttcctgagctccgcggctcaccctccccaacacacacacacacacacacagagcaataagtttctctcactcaaatgtgggcggggcgggcctagcctgtcgctggtggggggagtggtgagggggcgctctcagggatgggggcggggttcggagacagtgtggggaggggaggtctgcaaatcgtccaactctggtgctaatggcgggtcttctcagcccacccgcagggcagggagggaggggtcggcgtggccccttccccaagcctcccccacgcccaccctgggtgcatgaaccgcccaatgcagaagctgccgcatgtcacccccctctccccaaagaaaaagtgtcatgcccccttcccacccaccctcactccccaccaaaataaacgtttccttttcattt

SEQ ID NO: 23344 - DNA, 3049 bp, Homo sapiens
  source 1..3049: mol_type = unassigned DNA
accggtcccgcctcccttgacgccccgccccgcccctcctccctgctctcttagaaagagccaatcgctccgtctcattggcggccccgactcgtccagctgggtcgcgttagagtgcccgccccactcctcccagccacagccccgccccacctcccccaggccaatcagtttggttcctctcccctaagccacgcccccgctacctcgctcctcctcccacccaatcccgtcggtctctccccccgtgtccccgcccctgcgtccccgcccctcccgccccgccccccgtccaatgctgagctcagtctgcgtctcgtccttccgcgggcgccagggggccagcaagcagcagccggcgccaccgccgcagccgcccgagtccccgccgccgccaccgctgccgccgcagcagcagcagcctgcgcagcccggccccgccgcgtccccggcgggccccccggcaccccgcgggcccggggaccggcgcgccgagccatgccccgggctgccggcggcggccatggggcggcacggcggcggcggtggcgacagcggcaagatcgtgatcaacgtgggcggcgtgcgccatgagacgtaccgctcgacgctgcgcaccctgccggggacgcggctggccggcctgacggagcccgaggcggcggcacgcttcgactacgacccgggcgccgacgagttcttctttgaccggcacccgggagtcttcgcgtacgtgctcaactactaccgcaccggcaagctgcactgcccagccgacgtgtgcgggcccctgtttgaggaggagctcggcttctggggcatcgacgagaccgacgtggaggcctgctgctggatgacctaccggcagcatcgcgacgctgaggaggcgctcgactccttcgaggcgcccgaccccgcgggcgccgccaacgccgccaacgccgcaggcgcccacgacggaggcctggacgacgaggcgggcgcgggcggcggcggcctggacggagcgggcggcgagctcaagcgcctctgcttccaggacgcgggcggcggcgccggggggccgccagggggcgcgggcggcgcgggcggcacatggtggcgccgctggcagccccgcgtgtgggcgctcttcgaggacccctactcgtcgcgggctgccaggtatgtggccttcgcctccctcttcttcatcctcatctccatcaccaccttctgcctggaaacccatgagggcttcatccatattagcaacaagacggtgacccaggcctccccgatccccggggcacctccggagaacatcaccaacgtggaggtggagacggagcccttcctgacctacgtggagggggtgtgcgtggtctggttcaccttcgagttcctcatgcgcatcaccttctgcccagacaaggtggagtttcttaaaagcagcctcaacatcatcgactgtgtggccatcctgcccttctatctcgaggtgggcctctcgggcctcagctccaaggccgccaaagacgtgctgggcttcctgcgggtggtccgcttcgtccgcatcctgcgcatcttcaagctgacccggcacttcgtggggctgcgcgtgctgggacacacgctccgcgccagcaccaacgagttcctgctgctcatcatcttcctggccctgggggtgctcatcttcgccaccatgatttactacgctgagcgcattggcgccgaccccgatgacatcctgggctccaaccacacctacttcaagaacatccccattggcttctggtgggctgtggtcaccatgacgaccctgggctatggagacatgtaccccaagacgtggtcggggatgctggtcggggcgctgtgtgccctggcgggggtgctgaccatcgccatgcctgtgcccgtcattgtcaacaactttggcatgtactattcgctggccatggccaagcagaagctgcccaagaagaagaacaaacacatcccccggcccccgcaaccgggctcgcccaactactgcaagcctgacccacccccgccacccccgccccacccgcaccacggcagcgggggcatcagcccgccgccacccatcaccccaccctccatgggggtgactgtggccggggcctacccagcggggccccacacgcaccccgggctgctcagggggggagcgggtgggctggggatcatggggctgcctcctctgccagcccccggcgagccttgcccgttggctcaggaggaggtgattgagatcaaccgggcagatcctcgccccaatggggatccggcagcagctgcgcttgcccacgaggactgcccagccattgaccagcctgccatgtccccggaagacaagagccccatcacgcctggaagccgtggccgctatagccgggaccgagcctgcttcctcctcaccgactatgccccttcccctgatggctccatccgaaaagctcttgtcaccgcctgagacctcgcgagactttcggtcccccccgccccttccccccaggttagcaattgggaatggctgggagggggtgtccccaagacactgggcttcaaatctccccccaagccctccctcctacgatcaagacaccttttgtccagacagctcccttagcgttgcctggaaaagccacagagctccctgcgggggtgcagaaccctgcaggcagccccaggctttgcagaaaccacacacactgttgctggatcttgagtcccattagctgtgagatgcctgtgagagccttcccgcacccgtcagaagctcagagccttcttggaccctttaaagatgtccctctccccagccctccgcctcaccgccccccacccccgaccccgtccttagaatcttctggaggagcctccctccccccccacccccccccactgctcctggagttctcatcggattccccaagggcactgccagcttcgctccactcagcccccttgcagaccccaccccctgcctgctctctttccctacaactaggtcagcccccagccccgctacggcggccgc

SEQ ID NO: 23345 - DNA, 3176 bp, Homo sapiens
  source 1..3176: mol_type = unassigned DNA
accggtcccgcctcccttgacgccccgccccgcccctcctccctgctctcttagaaagagccaatcgctccgtctcattggcggccccgactcgtccagctgggtcgcgttagagtgcccgccccactcctcccagccacagccccgccccacctcccccaggccaatcagtttggttcctctcccctaagccacgcccccgctacctcgctcctcctcccacccaatcccgtcggtctctccccccgtgtccccgcccctgcgtccccgcccctcccgccccgccccccgtccaatgctgagctcagtctgcgtctcgtccttccgcgggcgccagggggccagcaagcagcagccggcgccaccgccgcagccgcccgagtccccgccgccgccaccgctgccgccgcagcagcagcagcctgcgcagcccggccccgccgcgtccccggcgggccccccggcaccccgcgggcccggggaccggcgcgccgagccatgccccgggctgccggcggcggccatggggcggcacggcggcggcggtggcgacagcggcaagatcgtgatcaacgtgggcggcgtgcgccatgagacgtaccgctcgacgctgcgcaccctgccggggacgcggctggccggcctgacggagcccgaggcggcggcacgcttcgactacgacccgggcgccgacgagttcttctttgaccggcacccgggagtcttcgcgtacgtgctcaactactaccgcaccggcaagctgcactgcccagccgacgtgtgcgggcccctgtttgaggaggagctcggcttctggggcatcgacgagaccgacgtggaggcctgctgctggatgacctaccggcagcatcgcgacgctgaggaggcgctcgactccttcgaggcgcccgaccccgcgggcgccgccaacgccgccaacgccgcaggcgcccacgacggaggcctggacgacgaggcgggcgcgggcggcggcggcctggacggagcgggcggcgagctcaagcgcctctgcttccaggacgcgggcggcggcgccggggggccgccagggggcgcgggcggcgcgggcggcacatggtggcgccgctggcagccccgcgtgtgggcgctcttcgaggacccctactcgtcgcgggctgccaggtatgtggccttcgcctccctcttcttcatcctcatctccatcaccaccttctgcctggaaacccatgagggcttcatccatattagcaacaagacggtgacccaggcctccccgatccccggggcacctccggagaacatcaccaacgtggaggtggagacggagcccttcctgacctacgtggagggggtgtgcgtggtctggttcaccttcgagttcctcatgcgcatcaccttctgcccagacaaggtggagtttcttaaaagcagcctcaacatcatcgactgtgtggccatcctgcccttctatctcgaggtgggcctctcgggcctcagctccaaggccgccaaagacgtgctgggcttcctgcgggtggtccgcttcgtccgcatcctgcgcatcttcaagctgacccggcacttcgtggggctgcgcgtgctgggacacacgctccgcgccagcaccaacgagttcctgctgctcatcatcttcctggccctgggggtgctcatcttcgccaccatgatttactacgctgagcgcattggcgccgaccccgatgacatcctgggctccaaccacacctacttcaagaacatccccattggcttctggtgggctgtggtcaccatgacgaccctgggctatggagacatgtaccccaagacgtggtcggggatgctggtcggggcgctgtgtgccctggcgggggtgctgaccatcgccatgcctgtgcccgtcattgtcaacaactttggcatgtactattcgctggccatggccaagcagaagctgcccaagaagaagaacaaacacatcccccggcccccgcaaccgggctcgcccaactactgcaagcctgacccacccccgccacccccgccccacccgcaccacggcagcgggggcatcagcccgccgccacccatcaccccaccctccatgggggtgactgtggccggggcctacccagcggggccccacacgcaccccgggctgctcagggggggagcgggtgggctggggatcatggggctgcctcctctgccagcccccggcgagccttgcccgttggctcaggaggaggtgattgagatcaaccgggcagatcctcgccccaatggggatccggcagcagctgcgcttgcccacgaggactgcccagccattgaccagcctgccatgtccccggaagacaagagccccatcacgcctggaagccgtggccgctatagccgggaccgagcctgcttcctcctcaccgactatgccccttcccctgatggctccatccgaaaagccactggtgctcccccactgcccccccaagactggcgtaagccaggccccccaagcttcttgcccgacctcaacgccaacgccgcggcctggatatccccctagtggacgaaccccctccccccgggctcttgtcaccgcctgagacctcgcgagactttcggtcccccccgccccttccccccaggttagcaattgggaatggctgggagggggtgtccccaagacactgggcttcaaatctccccccaagccctccctcctacgatcaagacaccttttgtccagacagctcccttagcgttgcctggaaaagccacagagctccctgcgggggtgcagaaccctgcaggcagccccaggctttgcagaaaccacacacactgttgctggatcttgagtcccattagctgtgagatgcctgtgagagccttcccgcacccgtcagaagctcagagccttcttggaccctttaaagatgtccctctccccagccctccgcctcaccgccccccacccccgaccccgtccttagaatcttctggaggagcctccctccccccccacccccccccactgctcctggagttctcatcggattccccaagggcactgccagcttcgctccactcagcccccttgcagaccccaccccctgcctgctctctttccctacaactaggtcagcccccagccccgctacggcggccgc

SEQ ID NO: 23346 - DNA, 3670 bp, Homo sapiens
  source 1..3670: mol_type = unassigned DNA
ccaagccggagccccgcagcgcttcttatgatcagctcggtgtgtgtctcctcctaccgcgggcgcaagtcggggaacaagcctccgtccaaaacatgtctgaaggaggagatggccaagggcgaggcgtcggagaagatcatcatcaacgtgggcggcacgcgacatgagacctaccgcagcaccctgcgcaccctaccgggaacccgcctcgcctggctggccgaccccgacggcgggggccggcccgagaccgatggcggcggtgtgggtagcagcggcagcagcggcggcgggggctgcgagttcttcttcgacaggcacccgggcgtcttcgcctacgtgctcaactactaccgcaccggcaagctgcactgccccgcggacgtgtgcgggccgctcttcgaagaggagctcaccttctggggcatcgacgagaccgacgtggaaccctgctgctggatgacctaccggcagcaccgcgacgccgaggaggcgctcgacatcttcgagagcccggacggaggcggcagcggcgcggggcccagcgacgaggccggcgacgatgagcgggagctggccctgcagcgactgggcccccacgagggaggcgcgggccatggcgccgggtctgggggctgccgcggctggcagccccgcatgtgggcgctcttcgaggatccctactcctcccgggccgctagggtagtggcctttgcctctctcttcttcatcctggtctccatcaccactttctgcctggagacccatgaggcctttaatatcgaccgcaacgtgacagagatcctccgcgtagggaacatcaccagcgtgcacttccggcgggaggtagagacagagcccatcctgacctacatcgagggcgtatgtgtgctgtggttcacactggagttcctggtgcgcatcgtgtgctgccccgacacgctggacttcgtcaagaacctgctcaacatcatcgactttgtggccatcctgcccttctacctggaggtggggctgagcggcctgtcatccaaggcggcccgcgacgtgctgggcttcctgcgcgtggtgcgcttcgtgcgcatcctgcgtatcttcaagctcacacgccacttcgtggggctacgcgtgctgggccacaccctgagggccagcaccaatgagttcctgctgcttatcatcttcctggccctgggtgtgctcatctttgccaccatgatctactacgctgagcgcattggggccaggccctccgaccctcggggtaatgaccacaccgacttcaagaacatccccattggcttctggtgggctgtggtcaccatgacgacactgggctacggagacatgtaccccaagacgtggtcaggcatgctggtaggggcactgtgtgcactggctggcgtgctcaccatcgccatgccggtgcctgtcatcgtcaacaacttcggcatgtactactccctggccatggccaagcagaagctgcccaagaaacggaagaagcacgtgccacggccggcgcagctggagtcacccatgtactgcaagtctgaggagacttccccccgggacagcacctgcagtgataccagcccccctgcccgggaagagggtatgatcgagaggaaacgggcagactctaagcagaatggcgatgccaacgcagtgctgtctgatgaggagggagctggcctcacccaacccctggcctcctccccgacccccgaggagcgccgggccctgcgacgctccaccactcgagacagaaacaagaaggcagctgcctgcttcctgctcagcactggggactatgcctgcgccgatggtagtgtccggaaaggcacattcgtcctccgtgaccttccccttcagcattcacctgaggctgcatgccctccaactgctgggactctgttcctgccacattgaggaagggggctgggcacgacatggcatcatactcaggagccttcttcaccagctccttgggacaatggaatatcccagggtggtgacagcagatggagctacttgggggagagctcaagttggtcaggcaacagctggggtgatggcctgtgagccacaggccacatcaggaactttccccactgcctccatgcaaggctgcagagctatggtccctttctccactgcactggagctttgaagacctaagaggctagtggttcctggagctagtggttacctgaacaggtatggcgatgagctacaacatcacctgagtcaccagagttgggttggcagaggggtgaagggttcaccccattccctgacccatccatgctcttcctggccttttagccctgggttcctcatgccttccagctctgctcctggtctactccttagcccacaccctgtgggtcagcagctggcttccttctaacgtctcattctttgtttctccctttcttttgctgaactccctgtccccccaaccccagaaggcaatgttgagccgaaagcgtgcgtcccagtgtctcacacctgtgctctttaaacacagagacctgccaagacgccctctcgtccaactatgcccaggctgaagtcctcaccctctcttaaagcggcaccaacgtgagagagacaggcagacagacagaaagccagaggcttagggaaactctggaacccagacaagaatcttttcgctgggaaagactcagatatccttgtttgcacaggactggtggaaaatctcccatgcgaccctcggggcccagagccatctgggtctgatgttctgttccattgtacatcgaagagatatatatgcacatatagtatctatattcatacatattatactcttgtgtgtagtgcacgtgctattggtggtttgtcttctttgttaggctgtgtctccctaagcccttgccccacccagagtttcccgtccccttcactgatttctgttgtttctgctgactgtgtgggtggaatgtcccaagaaaagtgcatctgggaattgccagtccagctgggtagtcccaggctcctgtcttggggatgtttcccctgtcagcaagtaacctggtgaagtctattgaaggccagactgccccctagggtcactgcttcactagccgcaccccaccccagattggggttctacctcccaccccacatcctcgttgtggggggacttccaggggctcctctgcagcctcctccactacttcctccaccccatctatgtccttgacttaggggggcattttgtcttttttagatttgattttgttctctctcctttgtctgtttgttgtcaaagatgctgctgggcagacaggcagggaaaggatctgtctgcccatctggcccagggggtccgagaagggaagccttgggcaagaggagaccagttgcaatactgtacttcctggtcagtggccagaggatgcgtgcaatagcagaggccaggtgaccccttcagccttggcctctgcccctcccttggccctccctccctgctcctccctggtgttggtcagtccttttctaaagctgtcccctcgtgtgtgtctggggcatgcccaggctgggccctgtgccctgtctgcatgcctccaactgtcatgctgtgctcgagccccaataaagacatctggagcatcctgctgctcctgctgtgtga

SEQ ID NO: 23347 - DNA, 2953 bp, Homo sapiens
  source 1..2953: mol_type = unassigned DNA
atgatcagctcggtgtgtgtctcctcctaccgcgggcgcaagtcggggaacaagcctccgtccaaaacatgtctgaaggaggagatggccaagggcgaggcgtcggagaagatcatcatcaacgtgggcggcacgcgacatgagacctaccgcagcaccctgcgcaccctaccgggaacccgcctcgcctggctggccgaccccgacggcgggggccggcccgagaccgatggcggcggtgtgggtagcagcggcagcagcggcggcgggggctgcgagttcttcttcgacaggcacccgggcgtcttcgcctacgtgctcaactactaccgcaccggcaagctgcactgccccgcggacgtgtgcgggccgctcttcgaagaggagctcaccttctggggcatcgacgagaccgacgtggaaccctgctgctggatgacctaccggcagcaccgcgacgccgaggaggcgctcgacatcttcgagagcccggacggaggcggcagcggcgcggggcccagcgacgaggccggcgacgatgagcgggagctggccctgcagcgactgggcccccacgagggaggcgcgggccatggcgccgggtctgggggctgccgcggctggcagccccgcatgtgggcgctcttcgaggatccctactcctcccgggccgctagggtagtggcctttgcctctctcttcttcatcctggtctccatcaccactttctgcctggagacccatgaggcctttaatatcgaccgcaacgtgacagagatcctccgcgtagggaacatcaccagcgtgcacttccggcgggaggtagagacagagcccatcctgacctacatcgagggcgtatgtgtgctgtggttcacactggagttcctggtgcgcatcgtgtgctgccccgacacgctggacttcgtcaagaacctgctcaacatcatcgactttgtggccatcctgcccttctacctggaggtggggctgagcggcctgtcatccaaggcggcccgcgacgtgctgggcttcctgcgcgtggtgcgcttcgtgcgcatcctgcgtatcttcaagctcacacgccacttcgtggggctacgcgtgctgggccacaccctgagggccagcaccaatgagttcctgctgcttatcatcttcctggccctgggtgtgctcatctttgccaccatgatctactacgctgagcgcattggggccaggccctccgaccctcggggtaatgaccacaccgacttcaagaacatccccattggcttctggtgggctgtggtcaccatgacgacactgggctacggagacatgtaccccaagacgtggtcaggcatgctggtaggggcactgtgtgcactggctggcgtgctcaccatcgccatgccggtgcctgtcatcgtcaacaacttcggcatgtactactccctggccatggccaagcagaagctgcccaagaaacggaagaagcacgtgccacggccggcgcagctggagtcacccatgtactgcaagtctgaggagacttccccccgggacagcacctgcagtgataccagcccccctgcccgggaagagggtatgatcgagaggaaacgggcagactctaagcagaatggcgatgccaacgcagtgctgtctgatgaggagggagctggcctcacccaacccctggcctcctccccgacccccgaggagcgccgggccctgcgacgctccaccactcgagacagaaacaagaaggcagctgcctgcttcctgctcagcactggggactatgcctgcgccgatggtagtgtccggaaagagacctgccaagacgccctctcgtccaactatgcccaggctgaagtcctcaccctctcttaaagcggcaccaacgtgagagagacaggcagacagacagaaagccagaggcttagggaaactctggaacccagacaagaatcttttcgctgggaaagactcagatatccttgtttgcacaggactggtggaaaatctcccatgcgaccctcggggcccagagccatctgggtctgatgttctgttccattgtacatcgaagagatatatatgcacatatagtatctatattcatacatattatactcttgtgtgtagtgcacgtgctattggtggtttgtcttctttgttaggctgtgtctccctaagcccttgccccacccagagtttcccgtccccttcactgatttctgttgtttctgctgactgtgtgggtggaatgtcccaagaaaagtgcatctgggaattgccagtccagctgggtagtcccaggctcctgtcttggggatgtttcccctgtcagcaagtaacctggtgaagtctattgaaggccagactgccccctagggtcactgcttcactagccgcaccccaccccagattggggttctacctcccaccccacatcctcgttgtggggggacttccaggggctcctctgcagcctcctccactacttcctccaccccatctatgtccttgacttaggggggcattttgtcttttttagatttgattttgttctctctcctttgtctgtttgttgtcaaagatgctgctgggcagacaggcagggaaaggatctgtctgcccatctggcccagggggtccgagaagggaagccttgggcaagaggagaccagttgcaatactgtacttcctggtcagtggccagaggatgcgtgcaatagcagaggccaggtgaccccttcagccttggcctctgcccctcccttggccctccctccctgctcctccctggtgttggtcagtccttttctaaagctgtcccctcgtgtgtgtctggggcatgcccaggctgggccctgtgccctgtctgcatgcctccaactgtcatgctgtgctcgagccccaataaagacatctggagcatcctgctgctcctgctgtgtga

SEQ ID NO: 23348 - DNA, 3487 bp, Homo sapiens
  source 1..3487: mol_type = unassigned DNA
gggggataggcaggggcaagcccaagccgcagagggggccgccaccgcctcctgcctcctcttcgtctcctccccctcccccgtctgacgctgcctcctcgggaagggtgtttggagggcagcggccgccccaagccggagccccgcagcgcttcttatgatcagctcggtgtgtgtctcctcctaccgcgggcgcaagtcggggaacaagcctccgtccaaaacatgtctgaaggaggagatggccaagggcgaggcgtcggagaagatcatcatcaacgtgggcggcacgcgacatgagacctaccgcagcaccctgcgcaccctaccgggaacccgcctcgcctggctggccgaccccgacggcgggggccggcccgagaccgatggcggcggtgtgggtagcagcggcagcagcggcggcgggggctgcgagttcttcttcgacaggcacccgggcgtcttcgcctacgtgctcaactactaccgcaccggcaagctgcactgccccgcggacgtgtgcgggccgctcttcgaagaggagctcaccttctggggcatcgacgagaccgacgtggaaccctgctgctggatgacctaccggcagcaccgcgacgccgaggaggcgctcgacatcttcgagagcccggacggaggcggcagcggcgcggggcccagcgacgaggccggcgacgatgagcgggagctggccctgcagcgactgggcccccacgagggaggcgcgggccatggcgccgggtctgggggctgccgcggctggcagccccgcatgtgggcgctcttcgaggatccctactcctcccgggccgctagggtagtggcctttgcctctctcttcttcatcctggtctccatcaccactttctgcctggagacccatgaggcctttaatatcgaccgcaacgtgacagagatcctccgcgtagggaacatcaccagcgtgcacttccggcgggaggtagagacagagcccatcctgacctacatcgagggcgtatgtgtgctgtggttcacactggagttcctggtgcgcatcgtgtgctgccccgacacgctggacttcgtcaagaacctgctcaacatcatcgactttgtggccatcctgcccttctacctggaggtggggctgagcggcctgtcatccaaggcggcccgcgacgtgctgggcttcctgcgcgtggtgcgcttcgtgcgcatcctgcgtatcttcaagctcacacgccacttcgtggggctacgcgtgctgggccacaccctgagggccagcaccaatgagttcctgctgcttatcatcttcctggccctgggtgtgctcatctttgccaccatgatctactacgctgagcgcattggggccaggccctccgaccctcggggtaatgaccacaccgacttcaagaacatccccattggcttctggtgggctgtggtcaccatgacgacactgggctacggagacatgtaccccaagacgtggtcaggcatgctggtaggggcactgtgtgcactggctggcgtgctcaccatcgccatgccggtgcctgtcatcgtcaacaacttcggcatgtactactccctggccatggccaagcagaagctgcccaagaaacggaagaagcacgtgccacggccggcgcagctggagtcacccatgtactgcaagtctgaggagacttccccccgggacagcacctgcagtgataccagcccccctgcccgggaagagggtatgatcgagaggaaacgggcagactctaagcagaatggcgatgccaacgcagtgctgtctgatgaggagggagctggcctcacccaacccctggcctcctccccgacccccgaggagcgccgggccctgcgacgctccaccactcgagacagaaacaagaaggcagctgcctgcttcctgctcagcactggggactatgcctgcgccgatggtagtgtccggaaaggcacattcgtcctccgtgaccttccccttcagcattcacctgaggctgcatgccctccaactgctgggactctgttcctgccacattgaggaagggggctgggcacgacatggcatcatactcaggagccttcttcaccagctccttgggacaatggaatatcccagggtggtgacagcagatggagctacttgggggagagctcaagttggtcaggcaacagctggggtgatggcctgtgagccacaggccacatcaggaactttccccactgcctccatgcaaggctgcagagctatggtccctttctccactgcactggagctttgaagacctaagaggctagtggttcctggagctagtggttacctgaacagagacctgccaagacgccctctcgtccaactatgcccaggctgaagtcctcaccctctcttaaagcggcaccaacgtgagagagacaggcagacagacagaaagccagaggcttagggaaactctggaacccagacaagaatcttttcgctgggaaagactcagatatccttgtttgcacaggactggtggaaaatctcccatgcgaccctcggggcccagagccatctgggtctgatgttctgttccattgtacatcgaagagatatatatgcacatatagtatctatattcatacatattatactcttgtgtgtagtgcacgtgctattggtggtttgtcttctttgttaggctgtgtctccctaagcccttgccccacccagagtttcccgtccccttcactgatttctgttgtttctgctgactgtgtgggtggaatgtcccaagaaaagtgcatctgggaattgccagtccagctgggtagtcccaggctcctgtcttggggatgtttcccctgtcagcaagtaacctggtgaagtctattgaaggccagactgccccctagggtcactgcttcactagccgcaccccaccccagattggggttctacctcccaccccacatcctcgttgtggggggacttccaggggctcctctgcagcctcctccactacttcctccaccccatctatgtccttgacttaggggggcattttgtcttttttagatttgattttgttctctctcctttgtctgtttgttgtcaaagatgctgctgggcagacaggcagggaaaggatctgtctgcccatctggcccagggggtccgagaagggaagccttgggcaagaggagaccagttgcaatactgtacttcctggtcagtggccagaggatgcgtgcaatagcagaggccaggtgaccccttcagccttggcctctgcccctcccttggccctccctccctgctcctccctggtgttggtcagtccttttctaaagctgtcccctcgtgtgtgtctggggcatgcccaggctgggccctgtgccctgtctgcatgcctccaactgtcatgctgtgctcgagccccaataaagacatctggagcatcctgctgctcctgctgtgtga

SEQ ID NO: 23349 - DNA, 2288 bp, Homo sapiens
  source 1..2288: mol_type = unassigned DNA
ttgtgtttagaaaaggctcgggcaaagccagcccaagttcgctctctgcacacctcgagcacctcgcggacggcgtgggtccgccagctccgggacctgccgccgctgcctgcgcgccccggggcggaggacggtgccagccgcccacgaggagaccccgctcccgcaggaggccgagctgaagcggcggagcgcgccgccagccagccggggtgagtgccccgggcgaggccggcggccgccaaagcccccgcgggctcgcccgggcgcccggatgccagccccgagccccgccgccgggtgcatgcctcccccgcggcgcgcccccgcaggctgctgcccgctgtgaccgcccttccccgcaggcgggcgccggccaggctctccccgagatcagcgcacgggtggcacccgccggacccccagcggcagcggcggcggcggctgcagggggcgcggggcggaggctgcgagggcgcgcgcggggaggatggacgggtccggggagcgcagcctcccggagccgggcagccagagctccgctgccagcgacgacatagagatagtcgtcaacgtggggggcgtgcggcaggtgctgtacggggacctcctcagtcagtaccctgagacccggctggcggagctcatcaactgcttggctgggggctacgacaccatcttctccctgtgcgacgactacgaccccggcaagcgcgagttctactttgacagggacccggacgccttcaagtgtgtcatcgaggtgtactatttcggggaggtccacatgaagaagggcatctgccccatctgcttcaagaacgagatggacttctggaaggtggacctcaagttcctggacgactgttgcaagagccacctgagcgagaagcgcgaggagctggaggagatcgcgcgccgcgtgcagctcatcctggacgacctgggcgtggacgcagccgagggccgctggcgccgctgccagaagtgcgtctggaagttcctggagaagcccgagtcgtcgtgcccggcgcgggtggtggccgtgctctccttcctgctcatcctcgtctcgtccgtggtcatgtgcatgggcaccatccccgagctgcaggtgctggacgccgagggcaaccgcgtggagcacccgacgctggagaacgtggagacggcgtgcattggctggttcaccctggagtacctgctgcgcctcttctcgtcacccaacaagctgcacttcgcgctgtccttcatgaacattgtggacgtgctggccatcctccccttctacgtgagcctcacgctcacgcacctgggtgcccgcatgatggagctgaccaacgtgcagcaggccgtgcaggcgctgcggatcatgcgcatcgcgcgcatcttcaagctggcccgccactcctcgggcctgcagaccctcacctatgccctcaagcgcagcttcaaggaactggggctgctgctcatgtacctggcagtgggtatcttcgtcttctctgccctgggctacaccatggagcagagccatccagagaccctgtttaagagcatcccccagtccttctggtgggccatcatcaccatgaccaccgtcggctacggcgacatctaccccaagaccacgctgggcaagctcaacgcggccatcagcttcttgtgtggtgtcatcgccatcgccctgcccatccaccccatcatcaacaactttgtcaggtactacaacaagcagcgcgtcctggagaccgcggccaagcacgagctggagctgatggaactcaactccagcagcgggggcgagggcaagaccgggggctcccgcagtgacctggacaacctccctccagagcctgcggggaaggaggcgccgagctgcagcagccggctgaagctctcccacagcgacaccttcatccccctcctgaccgaggagaagcaccacaggacccggctccagagttgcaagtgacaggagggcccctcaggcagagatggaccaggcggtggacagatgggtagatgtggcaggcatgtcatcgacagcacagaagggctgtcctgtgtccccccaaccctcccctggacagactctgaaggccctcccggcacctctgccaaggctgggtaagactcctctatgttgcctgctgtccaggagcccgggagggaggggtgtgcaggagccgcagggccgtgtgggacgagtggaggccgcggcctggctggcacgagagcccacgcccgcttctgtatctccctcaataaagcctcctgctctgtgc

SEQ ID NO: 23350 - DNA, 2211 bp, Homo sapiens
  source 1..2211: mol_type = unassigned DNA
gctgctgcgccgcgctcccggcgcactcggagcccggcggggaccgggaggcagagacggggcggccgtggctccgagggcgggagctgagccgggccccgggaccgaagtttggcggcggctccgggaggcagagcgggctccccgggcgacttccaggcccctctcgcgtcctcgccccggacccgtgggcagccggggggaacggaagccgcggccgggccaactccgaggcggggacgccgcgacgggaacttgaggcccgagagggatgtgaaggcccaaaatgaccctcttaccgggagacaattctgactacgactacagcgcgctgagctgcacctcggacgcctccttccacccggccttcctcccgcagcgccaggccatcaagggcgcgttctaccgccgggcgcagcggctgcggccgcaggatgagccccgccagggctgtcagcccgaggaccgccgccgtcggatcatcatcaacgtaggcggcatcaagtactcgctgccctggaccacgctggacgagttcccgctgacgcgcctgggccagctcaaggcctgcaccaacttcgacgacatcctcaacgtgtgcgatgactacgacgtcacctgcaacgagttcttcttcgaccgcaacccgggggccttcggcactatcctgaccttcctgcgcgcgggcaagctgcggctgctgcgcgagatgtgcgcgctgtccttccaggaggagctgctgtactggggcatcgcggaggaccacctggacggctgctgcaagcgccgctacctgcagaagattgaggagttcgcggagatggtggagcgggaggaagaggacgacgcgctggacagcgagggccgcgacagcgagggcccggccgagggcgagggccgcctggggcgctgcatgcggcgactgcgcgacatggtggagaggccgcactcggggctgcctggcaaggtgttcgcctgcctgtcggtgctcttcgtgaccgtcaccgccgtcaacctctccgtcagcaccttgcccagcctgagggaggaggaggagcagggccactgttcccagatgtgccacaacgtcttcatcgtggagtcggtgtgcgtgggctggttctccctggagttcctcctgcggctcattcaggcgcccagcaagttcgccttcctgcggagcccgctgacgctgatcgacctggtggccatcctgccctactacatcacgctgctggtggacggcgccgccgcaggccgtcgcaagcccggcgcgggcaacagctacctggacaaggtggggctggtgctgcgcgtgctgcgggcgctgcgcatcctgtacgtgatgcgcctggcgcgccactccctggggctgcagacgctggggctcacggcccgccgctgcacccgcgagttcgggctcctgctgctcttcctctgcgtggccatcgccctcttcgcgcccctgctctacgtcatcgagaacgagatggccgacagccccgagttcaccagcatccctgcctgctactggtgggctgtcatcaccatgacgacggtgggctatggcgacatggtccccaggagcaccccgggccaggtagtggccctgagcagcatcctgagcggcatcctgctcatggccttcccagtcacctccatcttccacaccttctcccgctcctacctggagctcaagcaggagcaagagagggtgatgttccggagggcgcagttcctcatcaaaaccaagtcgcagctgagcgtgtcccaggacagtgacatcttgttcggaagtgcctcctcggacaccagagacaataactgagcgcggaggacacgcctgccctgcctgccatctgtggcccgaagccattgccatccactgcagacgcctggagagggacaggccgcttccgagtgcagtcctggcgcagcaccgactcccacgcacccggggaaggacaccctcactcccacaccccgggaagaacactagaacatcagcagaggggccctgcccctccgcctgcagccgtgaaaggaagctgggtcatcagcccagccccgcccaccccagcccctatgtgtgtttccctcaataaggagatgccttgttcttttcaccatgcaaataacatgcccagcaaaaacttgctttatgggtctgcctggagaaaaaaaaaaaaaatacaaacagcagaaacagca

SEQ ID NO: 23351 - DNA, 2168 bp, Homo sapiens
  source 1..2168: mol_type = unassigned DNA
ggcagagacggggcggccgtggctccgagggcgggagctgagccgggccccgggaccgaagtttggcggcggctccgggaggcagagcgggctccccgggcgacttccaggcccctctcgcgtcctcgccccggacccgtgggcagccggggggaacggaagccgcggccgggccaactccgaggcggggacgccgcgacgggaacttgaggtgggaactttgcgcgctgcagcctcgccgggcgccaccaaagcgcgaaccggaccccgagcctgcaaactcgggctcgggggcggctgcacgtggccgtggccctgaactccctgcgggggcctcgaaacccgcctgcggggaggccagggcgacagaggactcgggagtcaccgctggtgcgtggcggcgtggagcgcgcttgttacggccaagggagcaggctgcctaatgaaggagccaggcttgcacacagacaattctagaactggtggcccgagagggatgtgaaggcccaaaatgaccctcttaccgggagacaattctgactacgactacagcgcgctgagctgcacctcggacgcctccttccacccggccttcctcccgcagcgccaggccatcaagggcgcgttctaccgccgggcgcagcggctgcggccgcaggatgagccccgccagggctgtcagcccgaggaccgccgccgtcggatcatcatcaacgtaggcggcatcaagtactcgctgccctggaccacgctggacgagttcccgctgacgcgcctgggccagctcaaggcctgcaccaacttcgacgacatcctcaacgtgtgcgatgactacgacgtcacctgcaacgagttcttcttcgaccgcaacccgggggccttcggcactatcctgaccttcctgcgcgcgggcaagctgcggctgctgcgcgagatgtgcgcgctgtccttccaggaggagctgctgtactggggcatcgcggaggaccacctggacggctgctgcaagcgccgctacctgcagaagattgaggagttcgcggagatggtggagcgggaggaagaggacgacgcgctggacagcgagggccgcgacagcgagggcccggccgagggcgagggccgcctggggcgctgcatgcggcgactgcgcgacatggtggagaggccgcactcggggctgcctggcaaggtgttcgcctgcctgtcggtgctcttcgtgaccgtcaccgccgtcaacctctccgtcagcaccttgcccagcctgagggaggaggaggagcaggtaagagcccacgccccgcggggaaacgcgccaccacgagggaagggactctgagcattgtcacctcctccagaaagcctcctctgattgcacactggctgaatagcatccctggtccctcctgacatcaggaatgtttgtgtgcatggtctgcctccctgttaatatgtgagcatcatgggggtccacgcctgtgcctgtcctggcctccactgtgcccaccactgccctcccccttgccagtgtttagaacagtgtccagcacaaacaggcactcaaccactatttgttgaatgaacaaatgagtgaataaatgggtggtgtgatttttgacgtgcctggccctgagcgaagcacattacatatatcatcaaatttatctcaaccattcggtcctttctcaacgttcctaatcctttgcatcatagtagcccagacacattttctgggtcctgaagataatttttattgataggtatatgtgtgtctacaaatggtgagcatttctttttgttacataagagaatgaatggaaagtttatttactccagggcctgacacggggtgtgtgctacagtctaagggctcccactcatctgggagttcacgggagccggagctgggctgcatgtgccaactacgtcttatctccctagggaatgctccagcaaccctgtgggggaagtgttttcacacccactaggtatttgaggacactgcccaaccccaggtctaagtccagtctgtctttgtaagcatggaaatatggtgtccacgtggcagcttggggacctaatatagccccacaggactatgtgattggcccacacaaggtttcccaaaaatttgacttggttgccaacaataaaagtgaagttttttc

SEQ ID NO: 23352 - DNA, 967 bp, Homo sapiens
  source 1..967: mol_type = unassigned DNA
ggcggggaccgggaggcagagacggggcggccgtggctccgagggcgggagctgagccgggccccgggaccgaagtttggcggcggctccgggaggcagagcgggctccccgggcgacttccaggcccctctcgcgtcctcgccccggacccgtgggcagccggggggaacggaagccgcggccgggccaactccgaggcggggacgccgcgacgggaacttgagatgaaacagcagagctgaaaagagagatcaccaaggaaagtgcctgaaagggattattcccacgcctccaaaggatcctggcaggctgtgcctgaggagatgggttccaattttagggagcaggctgcctaatgaaggagccaggcttgcacacagacaattctagaactggtggcccgagagggatgtgaaggcccaaaatgaccctcttaccgggagacaattctgactacgactacagcgcgctgagctgcacctcggacgcctccttccacccggccttcctcccgcagcgccaggccatcaagggcgcgttctaccgccgggcgcagcggctgcggccgcaggatgagccccgccagggctgtcagcccgaggaccgccgccgtcggatcatcatcaacgtaggcggcatcaagtactcgctgccctggaccacgctggacgagttcccgctgacgcgcctgggccagctcaaggcctgcaccaacttcgacgacatcctcaacgtgtgcgatgactacgacgtcacctgcaacgagttcttcttcgaccgcaacccgggggccttcggcactatcctgaccttcctgcgcgcgggcaagctgcggctgctgcgcgagatgtgcgcgctgtccttccaggaggagctgctgtactggggcatcgcggaggaccacctggacggctgctgcaagcgccgctacctgcagaagattgaggagttcgcggagatggtgga

SEQ ID NO: 23353 - DNA, 802 bp, Homo sapiens
  source 1..802: mol_type = unassigned DNA
aggcagagacggggcggccgtggctccgagggcgggagctgagccgggccccgggaccgaagtttggcggcggctccgggaggcagagcgggctccccgggcgacttccaggcccctctcgcgtcctcgccccggacccgtgggcagccggggggaacggaagccgcggccgggccaactccgaggcggggacgccgcgacgggaacttgaggtgggaactttgcgcgctgcagcctcgccgggcgccaccaaagcgcgaaccggaccccgagcctgcaaactcgggctcgggggcggctgcacgtggccgtggccctgaactccctgcgggggcctcgaaacccgcctgcggggaggccagggcgacagaggactcgggagtcaccgctggtgcgtggcggcgtggagcgcgcttgttacggccaagggagcaggctgcctaatgaaggagccaggcttgcacacagacaattctagaactggtggcccgagagggatgtgaaggcccaaaatgaccctcttaccgggagacaattctgactacgactacagcgcgctgagctgcacctcggacgcctccttccacccggccttcctcccgcagcgccaggccatcaagggcgcgttctaccgccgggcgcagcggctgcggccgcaggatgagccccgccagggctgtcagcccgaggaccgccgccgtcggatcatcatcaacgtaggcggcatcaagtactcgctgccctggaccacgctggacgagttcccgctgacgcgcctgggccagctcaaggcctgcaccaa

SEQ ID NO: 23354 - DNA, 1096 bp, Homo sapiens
  source 1..1096: mol_type = unassigned DNA
gcactcggagcccggcggggaccgggaggcagagacggggcggccgtggctccgagggcgggagctgagccgggccccgggaccgaagtttggcggcggctccgggaggcagagcgggctccccgggcgacttccaggcccctctcgcgtcctcgccccggacccgtgggcagccggggggaacggaagccgcggccgggccaactccgaggcggggacgccgcgacgggaacttgagggagcaggctgcctaatgaaggagccaggcttgcacacagacaattctagaactggtggcccgagagggatgtgaaggcccaaaatgaccctcttaccgggagacaattctgactacgactacagcgcgctgagctgcacctcggacgcctccttccacccggccttcctcccgcagcgccaggccatcaagggcgcgttctaccgccgggcgcagcggctgcggccgcaggatgagccccgccagggctgtcagcccgaggaccgccgccgtcggatcatcatcaacgtaggcggcatcaagtactcgctgccctggaccacgctggacgagttcccgctgacgcgcctgggccagctcaaggcctgcaccaacttcgacgacatcctcaacgtgtgcgatgactacgacgtcacctgcaacgagttcttcttcgaccgcaacccgggggccttcggcactatcctgaccttcctgcgcgcgggcaagctgcggctgctgcgcgagatgtgcgcgctgtccttccaggaggagctgctgtactggggcatcgcggaggaccacctggacggctgctgcaagcgccgctacctgcagaagattgaggagttcgcggagatggtggagcgggaggaagaggacgacgcgctggacagcgagggccgcgacagcgagggcccggccgagggcgagggccgcctggggcgctgcatgcggcgactgcgcgacatggtggagaggccgcactcggggctgcctggcaaggtgttcgcctgcctgtcggtgctcttcgtgaccgtcaccgccgtcaacctctccgtcagcaccttgcccagcctgagggaggaggaggagcag

SEQ ID NO: 23355 - DNA, 608 bp, Homo sapiens
  source 1..608: mol_type = unassigned DNA
ctgctgccgagacaggatcactttccacacaggaaactcacgtgggggcagggcgtgaaggaaataaatcactaattgggggagttttctgctggagggaaagctgggagggttgaaagaagaaattcctaaaaagaagaggtgattacagccatggggattcacaagagccctccagggcttgtgtgaggcattttccgtttacctccatcaccattcttgccaaacagaatgtcactttttctcttttctgtggtagcaaagatgaaacagcagagctgaaaagagagatcaccaaggaaagtgcctgaaagggattattcccacgcctccaaaggatcctggcaggctgtgcctgaggagatgggttccaattttagggagcaggctgcctaatgaaggagccaggcttgcacacagacaattctagaactggtggcccgagagggatgtgaaggcccaaaatgaccctcttaccgggagacaattctgactacgactacagcgcgctgagctgcacctcggacgcctccttccacccggccttcctcccgcagcgccaggccatcaagggcgcgttctaccgccgggcgcagcggctgcggccg

SEQ ID NO: 23356 - DNA, 3824 bp, Homo sapiens
  source 1..3824: mol_type = unassigned DNA
gcggcgcggagggaggtgagcggcgcgcgcggagccggcgggcgaggaggaggactgcacagaggccccgcccccgccgccgcgagccggctcttcgccgcctccgaacccgctcactttgcctctcgcctctggacggcggcggggcggccgccggattcgcggccgcagggagcgccggagacggggagctattccgccccggcggctccattcggcgcccgcagccctcagggggtcggccccgcggcttgggagagggcaccgcggcctcggtgtgcgcagccctcgggcgcgagggtcggcggcgcggacacagccgcgttcccagccggtggggctcagcgctggcgccggcgaggactccccggccacccgcaggtaccgccgggcggagggcgcgctactagcagcgccggagatactcgagcccagggacccccgggccagcggagggcaggagcggagccccgagggagcgcgggccccgacggcgcgctcccccgtcagccacgggcaggcaggccccgcgtggcggcttggggtggggggctgcagcggggccctcgggccgaaagtcccccgggcggccagccatgaccttcgggcgcagcggggcggcctcggtggtgctgaacgtgggcggcgcccggtattcgctgtcccgggagctgctgaaggacttcccgctgcgccgcgtgagccggctgcacggctgccgctccgagcgcgacgtgctcgaggtgtgcgacgactacgaccgcgagcgcaacgagtacttcttcgaccggcactcggaggccttcggcttcatcctgctctacgtgcgcggccacggcaagctgcgcttcgcgccgcggatgtgcgagctctccttctacaacgagatgatctactggggcctggagggcgcgcacctcgagtactgctgccagcgccgcctcgacgaccgcatgtccgacacctacaccttctactcggccgacgagccgggcgtgctgggccgcgacgaggcgcgccccggcggggccgaggcggctccctccaggcgctggctggagcgcatgcggcggaccttcgaggagcccacgtcgtcgctggccgcgcagatcctggctagcgtgtcggtggtgttcgtgatcgtgtccatggtggtgctgtgcgccagcacgttgcccgactggcgcaacgcagccgccgacaaccgcagcctggatgaccggagcaggtactccgccggccctgggagggagccctccgggataattgaagctatctgcataggttggttcactgccgagtgcatcgtgaggttcattgtctccaaaaacaagtgtgagtttgtcaagagacccctgaacatcattgatttactggcaatcacgccgtattacatctctgtgttgatgacagtgtttacaggcgagaactctcaactccagagggctggagtcaccttgagggtacttagaatgatgaggattttttgggtgattaagcttgcccgtcacttcattggtcttcagacactcggtttgactctcaaacgttgctaccgagagatggttatgttacttgtcttcatttgtgttgccatggcaatctttagtgcactttctcagcttcttgaacatgggctggacctggaaacatccaacaaggactttaccagcattcctgctgcctgctggtgggtgattatctctatgactacagttggctatggagatatgtatcctatcacagtgcctggaagaattcttggaggagtttgtgttgtcagtggaattgttctattggcattacctatcacttttatctaccatagctttgtgcagtgttatcatgagctcaagtttagatctgctaggtatagtaggagcctctccactgaattcctgaattaatgcattgcaaatcaattcttgcatacacttcatagaaagactttgatgctgcttcatatttatgtgtttcttgctgggtgagcactgcagtggcattgtcatcatcttggtagggtaaaaattatccttcccagccgaagggataaaacagtttacttgttatggagtaaatagaattgagactgcaaaggaagaataatgactcctagagtaaactttaggacccggttttatttagacttgttttcccgtttccttgaatgattacacatttttaaaaaatacattatttgaacattttaaaacagaaaggtactattttccaaatgtttttccatcttatgaattcagaagaagcttggaacttatagtgttttttgtttgagagtaacattttcatttctaaatgttttataatttctcatatcaatgtcagaagtatcctggaaacatatgtcacatgcgggaactgtttaacaaatactttaaaaatttggccaaaatttaaactgtataatggagctagatacaagcaagaatagtatttgaaagacttttccagcatacttctcaattctttgctttatttttgtgccaattattcaccttatcgtgccgcttcatggaagcttgagtatgttctcccttttccattttggatttatctctttactgtaatgactcaaaaggtatttaagaattgacgagagcttgtgttgtttagcatcttactggataatatttgaattcattgctgttcctaggtgataactgtcctaatatttagatgtccaaacaagaatacttccaacataaaaattataataggaataatttgagatgactcaatattacaacctcttcttctcttaacctcctcccccaaacactagaggtttaataagacttatcagatgaaaggatatttatatagccttttagtagcaaagtcatacttacgtgttgtcactggattatcataaaagggagaaattaaatattactgtactcttagttgctgtgtagctaagtcaattttaagccagtaaaagcgatggatacataatgatttgatctgatctttaactattgtgaatcacagctacaccaaaactcttcttgtaagaatactgactaatatgccatgttaatctggctagattattaggactagataatgtaaaagtgatgattgtttagtaactaaattttagcaacagaaattagaattttgctttttcaaccagttaccataaagaagttagtgtatatataaacacaaataattagtgacagattcataaaaaattgaatgttgtacacagtaattttgtcagaggtagagaagacagggattgggaagtggtgggtgatggaggacctggatatatttatcaaataaagggttaccagaagtgttcattaaaggaattttagccatcatctagttcaaacctcaactattacaggtagaaaatcagggcaggagagaatataattgtgaaggagtcagggctaacacctggatctccagaaacctagcccagcaggttaatcttcacacatctctgggttctgagaaaagcctggaaaaatcacacttctttgtcattgtcatgctgaggtaataatagcaaaactgttttctttcccttaatttcctttcctaagcttatgtaatagtttggccattaaatatcttgccctattttccctattactgctagtatgctacttcttacatacccaaaagaaattcagttatttattgtatatttattgtattctaatataattgaaataaatggcatggatttattttttcttaactatttggattaaagctttgtggttcatgcaaacaatgtgcagatgatagcacctccatattactaataaaaatatgataaccatcaa

SEQ ID NO: 23357 - DNA, 3656 bp, Homo sapiens
  source 1..3656: mol_type = unassigned DNA
gcctctcgcctctggacggcggcggggcggccgccggattcgcggccgcagggagcgccggagacggggagctattccgccccggcggctccattcggcgcccgcagccctcagggggtcggccccgcggcttgggagagggcaccgcggcctcggtgtgcgcagccctcgggcgcgagggtcggcggcgcggacacagccgcgttcccagccggtggggctcagcgctggcgccggcgaggactccccggccacccgcaggtaccgccgggcggagggcgcgctactagcagcgccggagatactcgagcccagggacccccgggccagcggagggcaggagcggagccccgagggagcgcgggccccgacggcgcgctcccccgtcagccacgggcaggcaggccccgcgtggcggcttggggtggggggctgcagcggggccctcgggccgaaagtcccccgggcggccagccatgaccttcgggcgcagcggggcggcctcggtggtgctgaacgtgggcggcgcccggtattcgctgtcccgggagctgctgaaggacttcccgctgcgccgcgtgagccggctgcacggctgccgctccgagcgcgacgtgctcgaggtgtgcgacgactacgaccgcgagcgcaacgagtacttcttcgaccggcactcggaggccttcggcttcatcctgctctacgtgcgcggccacggcaagctgcgcttcgcgccgcggatgtgcgagctctccttctacaacgagatgatctactggggcctggagggcgcgcacctcgagtactgctgccagcgccgcctcgacgaccgcatgtccgacacctacaccttctactcggccgacgagccgggcgtgctgggccgcgacgaggcgcgccccggcggggccgaggcggctccctccaggcgctggctggagcgcatgcggcggaccttcgaggagcccacgtcgtcgctggccgcgcagatcctggctagcgtgtcggtggtgttcgtgatcgtgtccatggtggtgctgtgcgccagcacgttgcccgactggcgcaacgcagccgccgacaaccgcagcctggatgaccggagcaggataattgaagctatctgcataggttggttcactgccgagtgcatcgtgaggttcattgtctccaaaaacaagtgtgagtttgtcaagagacccctgaacatcattgatttactggcaatcacgccgtattacatctctgtgttgatgacagtgtttacaggcgagaactctcaactccagagggctggagtcaccttgagggtacttagaatgatgaggattttttgggtgattaagcttgcccgtcacttcattggtcttcagacactcggtttgactctcaaacgttgctaccgagagatggttatgttacttgtcttcatttgtgttgccatggcaatctttagtgcactttctcagcttcttgaacatgggctggacctggaaacatccaacaaggactttaccagcattcctgctgcctgctggtgggtgattatctctatgactacagttggctatggagatatgtatcctatcacagtgcctggaagaattcttggaggagtttgtgttgtcagtggaattgttctattggcattacctatcacttttatctaccatagctttgtgcagtgttatcatgagctcaagtttagatctgctaggtatagtaggagcctctccactgaattcctgaattaatgcattgcaaatcaattcttgcatacacttcatagaaagactttgatgctgcttcatatttatgtgtttcttgctgggtgagcactgcagtggcattgtcatcatcttggtagggtaaaaattatccttcccagccgaagggataaaacagtttacttgttatggagtaaatagaattgagactgcaaaggaagaataatgactcctagagtaaactttaggacccggttttatttagacttgttttcccgtttccttgaatgattacacatttttaaaaaatacattatttgaacattttaaaacagaaaggtactattttccaaatgtttttccatcttatgaattcagaagaagcttggaacttatagtgttttttgtttgagagtaacattttcatttctaaatgttttataatttctcatatcaatgtcagaagtatcctggaaacatatgtcacatgcgggaactgtttaacaaatactttaaaaatttggccaaaatttaaactgtataatggagctagatacaagcaagaatagtatttgaaagacttttccagcatacttctcaattctttgctttatttttgtgccaattattcaccttatcgtgccgcttcatggaagcttgagtatgttctcccttttccattttggatttatctctttactgtaatgactcaaaaggtatttaagaattgacgagagcttgtgttgtttagcatcttactggataatatttgaattcattgctgttcctaggtgataactgtcctaatatttagatgtccaaacaagaatacttccaacataaaaattataataggaataatttgagatgactcaatattacaacctcttcttctcttaacctcctcccccaaacactagaggtttaataagacttatcagatgaaaggatatttatatagccttttagtagcaaagtcatacttacgtgttgtcactggattatcataaaagggagaaattaaatattactgtactcttagttgctgtgtagctaagtcaattttaagccagtaaaagcgatggatacataatgatttgatctgatctttaactattgtgaatcacagctacaccaaaactcttcttgtaagaatactgactaatatgccatgttaatctggctagattattaggactagataatgtaaaagtgatgattgtttagtaactaaattttagcaacagaaattagaattttgctttttcaaccagttaccataaagaagttagtgtatatataaacacaaataattagtgacagattcataaaaaattgaatgttgtacacagtaattttgtcagaggtagagaagacagggattgggaagtggtgggtgatggaggacctggatatatttatcaaataaagggttaccagaagtgttcattaaaggaattttagccatcatctagttcaaacctcaactattacaggtagaaaatcagggcaggagagaatataattgtgaaggagtcagggctaacacctggatctccagaaacctagcccagcaggttaatcttcacacatctctgggttctgagaaaagcctggaaaaatcacacttctttgtcattgtcatgctgaggtaataatagcaaaactgttttctttcccttaatttcctttcctaagcttatgtaatagtttggccattaaatatcttgccctattttccctattactgctagtatgctacttcttacatacccaaaagaaattcagttatttattgtatatttattgtattctaatataattgaaataaatggcatggatttattttttcttaactatttggattaaagctttgtggttcatgcaaacaatgtgcagatgatagcacctccatattactaataaaaa

SEQ ID NO: 23358 - DNA, 1636 bp, Homo sapiens
  source 1..1636: mol_type = unassigned DNA
gctggaaactggctccctgagacaagaagactggtaaacccagcgcttcctacctggtggtcttcagcaatgcccatgccttccagagacgggggcctgcatcccagacaccaccactatggttcccacagcccttggagtcagctcctgtccagccccatggagacgccgtccatcaagggcctttactaccggagggtgcggaaggtgggtgccctggacgcctccccagtggacctgaagaaggagatcctgatcaacgtggggggcaggaggtatctcctcccctggagcacactggaccggttcccgctgagccgcctgagcaaactcaggctctgtcggagctacgaggagatcgtgcagctctgcgatgattacgacgaggacagccaggagttcttcttcgacaggagccccagcgccttcggggtgatcgtgagcttcctggcggccgggaagctggtgcttctgcaggagatgtgcgcgctgtccttccaggaggagctggcctactggggcatcgaggaggcccacctggagaggtgctgcctgcggaagctgctgaggaagctggaggagctggaggagctggccaagctgcacagggaggacgtactgaggcagcagagggagacccgccgccccgcctcgcactcctcgcgctggggcctgtgcatgaaccggctgcgcgagatggtggaaaacccgcagtccgggctgcccgggaaggtcttcgcttgcctctccatcctcttcgtggccaccacagccgtcagcctgtgtgtcagcaccatgcccgacctcagggcagaggaggaccagggcgaatgctctcggaagtgctactatattttcatcgtggagaccatctgcgtggcctggttctccctggagttctgcctgcggtttgtccaggcccaagacaagtgtcagttcttccaggggcccctgaacatcatcgacatcctggccatctccccatactacgtgtcgctggcggtgtctgaggagcccccggaggacggcgagaggccgagcgggagctcctacctggagaaggtggggctggtcctgcgtgtgctgcgagcgctgcgcatcctctacgtgatgcgcctggctcgccactcgctggggctgcagacgctggggctcaccgtgcgccgttgcacacgtgagttcggcctgctccttctcttcctggccgtggccatcaccctcttctcccctttggtctacgtggccgagaaggagtccgggcgggtgctggagttcaccagcatccccgcctcctattggtgggccatcatctccatgacaacggtgggctacggggacatggtgccccgcagtgtgccaggccagatggtggccctcagcagcatcctgagcgggatcctcatcatggccttcccggccacgtctatcttccacaccttctcccactcctacctggagctcaagaaggagcaggagcagcttcaggcccgcctccgccacctccaaaacaccggtccagccagtgaatgtgaactcctggacccccatgtggccagtgaacatgagctcatgaacgatgtcaatgacctaatcctggagggcccagccttgcctatcatgcacatgtaactcagca

SEQ ID NO: 23359 - DNA, 3066 bp, Homo sapiens
  source 1..3066: mol_type = unassigned DNA
gcccgccggaccccgagctgctgggaggatgaccatggctgggggcaggaggggactagtggcccctcaaaacacgtttctggagaatattgttcggcggtccaatgatactaattttgtgttggggaatgctcagatagtggactggcctattgtgtacagcaatgatggattttgcaagctgtctggctatcacagggcagaagtgatgcaaaaaagcagcacctgcagttttatgtatggggagctgactgataaagacacgattgaaaaagtgcggcaaacatttgagaactatgagatgaattcctttgaaattctgatgtacaagaagaacaggacacctgtgtggttctttgtgaaaattgctccaattcgaaacgaacaggataaagtggttttatttctttgcactttcagtgacataacagctttcaaacagccaattgaggatgattcatgtaaaggctgggggaagtttgctcggctgacaagagcactgacaagcagcaggggtgtcctgcagcagctggctccaagcgtgcaaaaaggcgagaatgtccacaagcactcccgcctggcagaggtcctacagctgggctcagacatccttccccagtacaagcaagaggcaccaaagactccccctcacatcatcttacattattgtgtttttaagaccacgtgggattggatcatcttgatcttgaccttctatacagccatcttggtcccttataatgtctccttcaaaaccaggcagaataatgtggcctggctggttgttgatagcatcgtggatgttatctttttggtggacattgtgctcaattttcataccacctttgttggaccagcaggggaggtgatttctgaccccaaacttatccgcatgaactacctgaagacgtggtttgtgattgaccttctgtcctgtttgccatatgatgtcatcaacgcttttgagaacgtggatgaggttagtgcctttatgggtgatccagggaagattggttttgctgatcagattccaccaccactggaggggagagagagtcagggcatcagcagcctgttcagctctctaaaagttgtccggctgctccgtcttgggcgagtggcccgtaagctggaccactacattgaatatggagctgctgtgctggtcctgctggtgtgtgtgtttgggctggctgcacactggatggcctgcatctggtacagcattggggactatgagatctttgacgaggacaccaagacaatccgcaacaacagctggctgtaccaactagcgatggacattggcaccccttaccagtttaatgggtctggctcagggaagtgggaaggtggtcccagcaagaattctgtctacatctcctcgttgtatttcacaatgaccagcctcaccagtgtgggctttgggaacatcgccccatccacagacattgagaagatctttgcagtggccatcatgatgattggctcacttctctatgccaccatcttcgggaatgtgacgactattttccaacagatgtatgccaacaccaacagataccatgagatgctcaacagtgttcgggacttcctgaagctctaccaggtgccaaaaggattgagtgagcgagtaatggattatattgtgtccacttggtccatgtccagaggcattgacacagagaaggtcctgcagatctgccccaaggacatgagagccgacatctgcgtgcacctgaaccgcaaggtgttcaaggagcacccggccttccggctggccagtgatggctgcctccgggcactggccatggagttccagacggtgcactgtgccccaggggacctcatctaccatgcaggagagagcgttgacagcctctgctttgtggtttctggctccctggaggtgatccaagatgatgaggtggtggccattctaggaaaaggagacgtgtttggagatgtgttctggaaggaagccacccttgcccagtcctgtgccaatgttagggccttgacctactgtgatctgcatgtgatcaagcgggatgccctgcagaaagtgctggaattctacacggccttctcccattccttctcccggaacctgattctgacgtacaacttgaggaagaggattgtgttccggaagatcagcgatgtgaaacgtgaagaggaagaacgcatgaaacgaaagaatgaggcccccctgatcttgcccccggaccaccctgtccggcgcctcttccagagattccgacagcagaaagaggccaggctggcagctgagagagggggccgggacctggatgacctagatgtggagaagggcaatgtccttacagagcatgcctccgccaaccacagcctcgtgaaggccagcgtggtcaccgtgcgtgagagtcctgccacgcccgtatccttccaggcagcctccacctccggggtgccagaccacgcaaagctacaggcgccagggtccgagtgcctgggccccaaggggggcgggggcgattgtgccaagcgcaaaagctgggcccgcttcaaagatgcttgcgggaagagtgaggactggaacaaggtgtccaaggctgagtcgatggagacacttcccgagaggacaaaagcgtcaggcgaggccacactgaagaagacagactcgtgtgacagtggcatcaccaagagcgacttgcgcctggacaacgtgggtgaggccaggagtccccaggatcggagtcccatcctggcagaggtcaagcattcgttctaccccatccctgagcagacgctgcaggccacagtcctggaggtgaggcacgagctgaaggaggacatcaaggccttaaacgccaaaatgaccaatattgagaaacagctctctgagatactcaggatattaacttccagaagatcctctcagtctcctcaggagttgtttgaaatatcgaggccacagtccccagaatcagagagagacatttttggagccagctgagaggtctatttaaaaaaaaagtcagagacagatacctccaaccctgccgtcaccaccacccctaccac

SEQ ID NO: 23360 - DNA, 3102 bp, Homo sapiens
  source 1..3102: mol_type = unassigned DNA
gaagagggcgcgagggtagcagccagagggagccgccagccctgcctgcggatccccgccgggcgcatggggcgcttcgagccgggactgcgtgcgggccccgaggccagtttcctgctgtcgtaagaagccgcgccaggacgcccgccggaccccgagctgctgggaggatgaccatggctgggggcaggaggggactagtggcccctcaaaacacgtttctggagaatattgttcggcggtccaatgatactaattttgtgttggggaatgctcagatagtggactggcctattgtgtacagcaatgatggattttgcaagctgtctggctatcacagggcagaagtgatgcaaaaaagcagcacctgcagttttatgtatggggagctgactgataaagacacgattgaaaaagtgcggcaaacatttgagaactatgagatgaattcctttgaaattctgatgtacaagaagaacaggacacctgtgtggttctttgtgaaaattgctccaattcgaaacgaacaggataaagtggttttatttctttgcactttcagtgacataacagctttcaaacagccaattgaggatgattcatgtaaaggctgggggaagtttgctcggctgacaagagcactgacaagcagcaggggtgtcctgcagcagctggctccaagcgtgcaaaaaggcgagaatgtccacaagcactcccgcctggcagaggtcctacagctgggctcagacatccttccccagtacaagcaagaggcaccaaagactccccctcacatcatcttacattattgtgtttttaagaccacgtgggattggatcatcttgatcttgaccttctatacagccatcttggtcccttataatgtctccttcaaaaccaggcagaataatgtggcctggctggttgttgatagcatcgtggatgttatctttttggtggacattgtgctcaattttcataccacctttgttggaccagcaggggaggtgatttctgaccccaaacttatccgcatgaactacctgaagacgtggtttgtgattgaccttctgtcctgtttgccatatgatgtcatcaacgcttttgagaacgtggatgagggcatcagcagcctgttcagctctctaaaagttgtccggctgctccgtcttgggcgagtggcccgtaagctggaccactacattgaatatggagctgctgtgctggtcctgctggtgtgtgtgtttgggctggctgcacactggatggcctgcatctggtacagcattggggactatgagatctttgacgaggacaccaagacaatccgcaacaacagctggctgtaccaactagcgatggacattggcaccccttaccagtttaatgggtctggctcagggaagtgggaaggtggtcccagcaagaattctgtctacatctcctcgttgtatttcacaatgaccagcctcaccagtgtgggctttgggaacatcgccccatccacagacattgagaagatctttgcagtggccatcatgatgattggctcacttctctatgccaccatcttcgggaatgtgacgactattttccaacagatgtatgccaacaccaacagataccatgagatgctcaacagtgttcgggacttcctgaagctctaccaggtgccaaaaggattgagtgagcgagtaatggattatattgtgtccacttggtccatgtccagaggcattgacacagagaaggtcctgcagatctgccccaaggacatgagagccgacatctgcgtgcacctgaaccgcaaggtgttcaaggagcacccggccttccggctggccagtgatggctgcctccgggcactggccatggagttccagacggtgcactgtgccccaggggacctcatctaccatgcaggagagagcgttgacagcctctgctttgtggtttctggctccctggaggtgatccaagatgatgaggtggtggccattctaggaaaaggagacgtgtttggagatgtgttctggaaggaagccacccttgcccagtcctgtgccaatgttagggccttgacctactgtgatctgcatgtgatcaagcgggatgccctgcagaaagtgctggaattctacacggccttctcccattccttctcccggaacctgattctgacgtacaacttgaggaagaggattgtgttccggaagatcagcgatgtgaaacgtgaagaggaagaacgcatgaaacgaaagaatgaggcccccctgatcttgcccccggaccaccctgtccggcgcctcttccagagattccgacagcagaaagaggccaggctggcagctgagagagggggccgggacctggatgacctagatgtggagaagggcaatgtccttacagagcatgcctccgccaaccacagcctcgtgaaggccagcgtggtcaccgtgcgtgagagtcctgccacgcccgtatccttccaggcagcctccacctccggggtgccagaccacgcaaagctacaggcgccagggtccgagtgcctgggccccaaggggggcgggggcgattgtgccaagcgcaaaagctgggcccgcttcaaagatgcttgcgggaagagtgaggactggaacaaggtgtccaaggctgagtcgatggagacacttcccgagaggacaaaagcgtcaggcgaggccacactgaagaagacagactcgtgtgacagtggcatcaccaagagcgacttgcgcctggacaacgtgggtgaggccaggagtccccaggatcggagtcccatcctggcagaggtcaagcattcgttctaccccatccctgagcagacgctgcaggccacagtcctggaggtgaggcacgagctgaaggaggacatcaaggccttaaacgccaaaatgaccaatattgagaaacagctctctgagatactcaggatattaacttccagaagatcctctcagtctcctcaggagttgtttgaaatatcgaggccacagtccccagaatcagagagagacatttttggagccagctgagaggtctatttaaaaaaaaagtcagagacagatacctccaacc

SEQ ID NO: 23361 - DNA, 4286 bp, Homo sapiens
  source 1..4286: mol_type = unassigned DNA
tccgcggccgggccgagccgcaggcgctgcccgagccgcgggcgctggagcggctgtcggcgcggtggcaggcgggagccaggagtccggggctcgggcgggcggagcgcagcgcggggacgcggcggagcgggccccgcggctcggcgggggccggcagacaggtgtgccggcggcgggcggctcgcgctcaggcggctccaggccgggcccggggtccggagcggggagccgggagccgagcgaggacccggcgcccgcagtccagtcttggccgcgcccgtgctcggcttggccgcggggtgcggggaccacggcccggccgggccacccgaagcctagtgctgggccgggccgggccggggtgggtgggggcccgcccggcccgcccatgggctcaggatgccggtgcggaggggccacgtcgcgccgcagaacaccttcctggacaccatcatccgcaagtttgagggccagagccgtaagttcatcatcgccaacgctcgggtggagaactgcgccgtcatctactgcaacgacggcttctgcgagctgtgcggctactcgcgggccgaggtgatgcagcgaccctgcacctgcgacttcctgcacgggccgcgcacgcagcgccgcgctgccgcgcagatcgcgcaggcactgctgggcgccgaggagcgcaaagtggaaatcgccttctaccggaaagatgggagctgcttcctatgtctggtggatgtggtgcccgtgaagaacgaggatggggctgtcatcatgttcatcctcaatttcgaggtggtgatggagaaggacatggtggggtccccggctcatgacaccaaccaccggggcccccccaccagctggctggccccaggccgcgccaagaccttccgcctgaagctgcccgcgctgctggcgctgacggcccgggagtcgtcggtgcggtcgggcggcgcgggcggcgcgggcgccccgggggccgtggtggtggacgtggacctgacgcccgcggcacccagcagcgagtcgctggccctggacgaagtgacagccatggacaaccacgtggcagggctcgggcccgcggaggagcggcgtgcgctggtgggtcccggctctccgccccgcagcgcgcccggccagctcccatcgccccgggcgcacagcctcaaccccgacgcctcgggctccagctgcagcctggcccggacgcgctcccgagaaagctgcgccagcgtgcgccgcgcctcgtcggccgacgacatcgaggccatgcgcgccggggtgctgcccccgccaccgcgccacgccagcaccggggccatgcacccactgcgcagcggcttgctcaactccacctcggactccgacctcgtgcgctaccgcaccattagcaagattccccaaatcaccctcaactttgtggacctcaagggcgaccccttcttggcttcgcccaccagtgaccgtgagatcatagcacctaagataaaggagcgaacccacaatgtcactgagaaggtcacccaggtcctgtccctgggcgccgacgtgctgcctgagtacaagctgcaggcaccgcgcatccaccgctggaccatcctgcattacagccccttcaaggccgtgtgggactggctcatcctgctgctggtcatctacacggctgtcttcacaccctactcggctgccttcctgctgaaggagacggaagaaggcccgcctgctaccgagtgtggctacgcctgccagccgctggctgtggtggacctcatcgtggacatcatgttcattgtggacatcctcatcaacttccgcaccacctacgtcaatgccaacgaggaggtggtcagccaccccggccgcatcgccgtccactacttcaagggctggttcctcatcgacatggtggccgccatccccttcgacctgctcatcttcggctctggctctgaggagctgatcgggctgctgaagactgcgcggctgctgcggctggtgcgcgtggcgcggaagctggatcgctactcagagtacggcgcggccgtgctgttcttgctcatgtgcacctttgcgctcatcgcgcactggctagcctgcatctggtacgccatcggcaacatggagcagccacacatggactcacgcatcggctggctgcacaacctgggcgaccagataggcaaaccctacaacagcagcggcctgggcggcccctccatcaaggacaagtatgtgacggcgctctacttcaccttcagcagcctcaccagtgtgggcttcggcaacgtctctcccaacaccaactcagagaagatcttctccatctgcgtcatgctcattggctccctcatgtatgctagcatcttcggcaacgtgtcggccatcatccagcggctgtactcgggcacagcccgctaccacacacagatgctgcgggtgcgggagttcatccgcttccaccagatccccaatcccctgcgccagcgcctcgaggagtacttccagcacgcctggtcctacaccaacggcatcgacatgaacgcggtgctgaagggcttccctgagtgcctgcaggctgacatctgcctgcacctgaaccgctcactgctgcagcactgcaaacccttccgaggggccaccaagggctgccttcgggccctggccatgaagttcaagaccacacatgcaccgccaggggacacactggtgcatgctggggacctgctcaccgccctgtacttcatctcccggggctccatcgagatcctgcggggcgacgtcgtcgtggccatcctggggaagaatgacatctttggggagcctctgaacctgtatgcaaggcctggcaagtcgaacggggatgtgcgggccctcacctactgtgacctacacaagatccatcgggacgacctgctggaggtgctggacatgtaccctgagttctccgaccacttctggtccagcctggagatcaccttcaacctgcgagataccaacatgatcccgggctcccccggcagtacggagttagagggtggcttcagtcggcaacgcaagcgcaagttgtccttccgcaggcgcacggacaaggacacggagcagccaggggaggtgtcggccttggggccgggccgggcgggggcagggccgagtagccggggccggccgggggggccgtggggggagagcccgtccagtggcccctccagccctgagagcagtgaggatgagggcccaggccgcagctccagccccctccgcctggtgcccttctccagccccaggccccccggagagccgccgggtggggagcccctgatggaggactgcgagaagagcagcgacacttgcaaccccctgtcaggcgccttctcaggagtgtccaacattttcagcttctggggggacagtcggggccgccagtaccaggagctccctcgatgccccgcccccacccccagcctcctcaacatccccctctccagcccgggtcggcggccccggggcgacgtggagagcaggctggatgccctccagcgccagctcaacaggctggagacccggctgagtgcagacatggccactgtcctgcagctgctacagaggcagatgacgctggtcccgcccgcctacagtgctgtgaccaccccggggcctggccccacttccacatccccgctgttgcccgtcagccccctccccaccctcaccttggactcgctttctcaggtttcccagttcatggcgtgtgaggagctgcccccgggggccccagagcttccccaagaaggccccacacgacgcctctccctaccgggccagctgggggccctcacctcccagcccctgcacagacacggctcggacccgggcagttagtggggctgcccagtgtggacacgtggctcacccagggatcaaggcgctgctgggccgctccccttggaggccctgctcaggaggccctgaccgtggaaggggagaggaactcgaaagcacagctcctcccccagcccttgggaccatcttctcctgcagtcccctgggccccagtgagaggggcaggggcagggccggcagtaggtggggcctgtggtccccccactgccctgagggcattagctggtctaactgcccggaggcacccggccctgggccttaggcacctcaaggacttttctgctatttactgctcttattgttaaggataataattaaggatcatatgaataattaatgaagatgctgatgactatgaataataaataattatcctgaggaga

SEQ ID NO: 23362 - DNA, 3267 bp, Homo sapiens
  source 1..3267: mol_type = unassigned DNA
ggggccgctggctgggcaccggcggggcgggggagcctagtgtggcggggtgggggtggggacctggtagaaggaggggccggctggaggagctgaggttccgagtgcggccgctgctgggctggcgggcgggcagagcacggcaccctggcagcagggcccacgccacggggccatgggcagctcgagccaggcaggctgctgcccacgcttactgccagggtgaccccagccctggggcccagccacaaccaccctggcttcatgccaggggctgctctggttgccagtcggccagcctcgggggtgcagcctgggctgggactgctgctggggtgcaggtgaggcagtggccgggccctcaggccccagggcaggcaggctgcagggagccaagtcctccatggcggccccagccgggaaggcgagcaggacaggggctctgcggcccagggcccagaaaggccgggtgaggcgggccgtgcgcatctccagcctcgtggcccaggaggtcctgtccctgggcgccgacgtgctgcctgagtacaagctgcaggcaccgcgcatccaccgctggaccatcctgcattacagccccttcaaggccgtgtgggactggctcatcctgctgctggtcatctacacggctgtcttcacaccctactcggctgccttcctgctgaaggagacggaagaaggcccgcctgctaccgagtgtggctacgcctgccagccgctggctgtggtggacctcatcgtggacatcatgttcattgtggacatcctcatcaacttccgcaccacctacgtcaatgccaacgaggaggtggtcagccaccccggccgcatcgccgtccactacttcaagggctggttcctcatcgacatggtggccgccatccccttcgacctgctcatcttcggctctggctctgaggagctgatcgggctgctgaagactgcgcggctgctgcggctggtgcgcgtggcgcggaagctggatcgctactcagagtacggcgcggccgtgctgttcttgctcatgtgcacctttgcgctcatcgcgcactggctagcctgcatctggtacgccatcggcaacatggagcagccacacatggactcacgcatcggctggctgcacaacctgggcgaccagataggcaaaccctacaacagcagcggcctgggcggcccctccatcaaggacaagtatgtgacggcgctctacttcaccttcagcagcctcaccagtgtgggcttcggcaacgtctctcccaacaccaactcagagaagatcttctccatctgcgtcatgctcattggctccctcatgtatgctagcatcttcggcaacgtgtcggccatcatccagcggctgtactcgggcacagcccgctaccacacacagatgctgcgggtgcgggagttcatccgcttccaccagatccccaatcccctgcgccagcgcctcgaggagtacttccagcacgcctggtcctacaccaacggcatcgacatgaacgcggtgctgaagggcttccctgagtgcctgcaggctgacatctgcctgcacctgaaccgctcactgctgcagcactgcaaacccttccgaggggccaccaagggctgccttcgggccctggccatgaagttcaagaccacacatgcaccgccaggggacacactggtgcatgctggggacctgctcaccgccctgtacttcatctcccggggctccatcgagatcctgcggggcgacgtcgtcgtggccatcctggggaagaatgacatctttggggagcctctgaacctgtatgcaaggcctggcaagtcgaacggggatgtgcgggccctcacctactgtgacctacacaagatccatcgggacgacctgctggaggtgctggacatgtaccctgagttctccgaccacttctggtccagcctggagatcaccttcaacctgcgagataccaacatgatcccgggctcccccggcagtacggagttagagggtggcttcagtcggcaacgcaagcgcaagttgtccttccgcaggcgcacggacaaggacacggagcagccaggggaggtgtcggccttggggccgggccgggcgggggcagggccgagtagccggggccggccgggggggccgtggggggagagcccgtccagtggcccctccagccctgagagcagtgaggatgagggcccaggccgcagctccagccccctccgcctggtgcccttctccagccccaggccccccggagagccgccgggtggggagcccctgatggaggactgcgagaagagcagcgacacttgcaaccccctgtcaggcgccttctcaggagtgtccaacattttcagcttctggggggacagtcggggccgccagtaccaggagctccctcgatgccccgcccccacccccagcctcctcaacatccccctctccagcccgggtcggcggccccggggcgacgtggagagcaggctggatgccctccagcgccagctcaacaggctggagacccggctgagtgcagacatggccactgtcctgcagctgctacagaggcagatgacgctggtcccgcccgcctacagtgctgtgaccaccccggggcctggccccacttccacatccccgctgttgcccgtcagccccctccccaccctcaccttggactcgctttctcaggtttcccagttcatggcgtgtgaggagctgcccccgggggccccagagcttccccaagaaggccccacacgacgcctctccctaccgggccagctgggggccctcacctcccagcccctgcacagacacggctcggacccgggcagttagtggggctgcccagtgtggacacgtggctcacccagggatcaaggcgctgctgggccgctccccttggaggccctgctcaggaggccctgaccgtggaaggggagaggaactcgaaagcacagctcctcccccagcccttgggaccatcttctcctgcagtcccctgggccccagtgagaggggcaggggcagggccggcagtaggtggggcctgtggtccccccactgccctgagggcattagctggtctaactgcccggaggcacccggccctgggccttaggcacctcaaggacttttctgctatttactgctcttattgttaaggataataattaaggatcatatgaataattaatgaagatgctgatgactatgaataataaataattatcctgaggaga

SEQ ID NO: 23363 - DNA, 1754 bp, Homo sapiens
  source 1..1754: mol_type = unassigned DNA
ggagctgaggttccgagtgcggccgctgctgggctggcgggcgggcagagcacggcaccctggcagcagggcccacgccacggggccatgggcagctcgagccaggcaggctgctgcccacgcttactgccagggtgaccccagccctggggcccagccacaaccaccctggcttcatgccaggggctgctctggttgccagtcggccagcctcgggggtgcagcctgggctgggactgctgctggggtgcaggtgaggcagtggccgggccctcaggccccagggcaggcaggctgcagggagccaagtcctccatggcggccccagccgggaaggcgagcaggacaggggctctgcggcccagggcccagaaaggccgggtgaggcgggccgtgcgcatctccagcctcgtggcccaggaggtcctgtccctgggcgccgacgtgctgcctgagtacaagctgcaggcaccgcgcatccaccgctggaccatcctgcattacagccccttcaaggccgtgtgggactggctcatcctgctgctggtcatctacacggctgtcttcacaccctactcggctgccttcctgctgaaggagacggaagaaggcccgcctgctaccgagtgtggctacgcctgccagccgctggctgtggtggacctcatcgtggacatcatgttcattgtggacatcctcatcaacttccgcaccacctacgtcaatgccaacgaggaggtggtcagccaccccggccgcatcgccgtccactacttcaagggctggttcctcatcgacatggtggccgccatccccttcgacctgctcatcttcggctctggctctgaggagctgatcgggctgctgaagactgcgcggctgctgcggctggtgcgcgtggcgcggaagctggatcgctactcagagtacggcgcggccgtgctgttcttgctcatgtgcacctttgcgctcatcgcgcactggctagcctgcatctggtacgccatcggcaacatggagcagccacacatggactcacgcatcggctggctgcacaacctgggcgaccagataggcaaaccctacaacagcagcggcctgggcggcccctccatcaaggacaagtatgtgacggcgctctacttcaccttcagcagcctcaccagtgtgggcttcggcaacgtctctcccaacaccaactcagagaagatcttctccatctgcgtcatgctcattggctccctcatgtatgctagcatcttcggcaacgtgtcggccatcatccagcggctgtactcgggcacagcccgctaccacacacagatgctgcgggtgcgggagttcatccgcttccaccagatccccaatcccctgcgccagtgctgtgaccaccccggggcctggccccacttccacatccccgctgttgcccgtcagccccctccccaccctcaccttggactcgctttctcaggtttcccagttcatggcgtgtgaggagctgcccccgggggccccagagcttccccaagaaggccccacacgacgcctctccctaccgggccagctgggggccctcacctcccagcccctgcacagacacggctcggacccgggcagttagtggggctgcccagtgtggacacgtggctcacccagggatcaaggcgctgctgggccgctccccttggaggccctgctcaggaggccctgaccgtggaaggggagaggaactcgaaagcacagctcctccc

SEQ ID NO: 23364 - DNA, 4717 bp, Homo sapiens
  source 1..4717: mol_type = unassigned DNA
ggggcggggggcggtggggcagcagggggcccatgtgctcaacagggagctgagggagaccaggggtgcttggcttaggggactgacctcatctggtacagggcctttggtggacagagagagactggaaaagaaaaagtcaaggatcgaggggaacgcgaggcgaggtgaagatgaaagatctagaagcagtgcttcttagactctttggtgaaggatcagtgttttttaatgctaatatgttataggctggtacatctgtgaaatacaagagcacatgcgtggattttgtggtgatgccaaattgctgtaaagtttttgaaattcttgctctcaacgtctgtccttatcttgtgtgctgacacaacggctggtgctaatctagagagaacagagagacagatagtaacagctaaccgtctgtagtgtgcggcatacgccaggcattgcctaagcgctcagcatgtgctgacttggttaatctttataactcatgagaaaagaattatatacattatgtgtatcacaacatcactgtgtaccccataaatatgtacaattattgtgtcaattaaaaagttaaaaaattttaaaaagaaaaaattattattcttcccattttatagatggaaaaaatgaggcacaaggatgttaaataatttaggaaaaaagcataagtgattaagcagcagatccgggctatgaacccagagatcgtaggcctaaagtctgtgggcttaagcactgtgctacagcgcctcgcttgagggaaaggcagaggtgctgggaggatatgaggaaatgagatagggaggaaatgagatcaaagatggcagaagaaaggatcatagccagcgtgagaaaaagtgcagccgggaaagagctagataaatcatataggcagagagaggggtaggggagcctggcagcaacaagctggggtagacagattgaggggagccataagggcggcaggcacatggccgggtgggggatcaggacgggagatcccggagaggaagggccatacggggaggcagaagtggacgggcccacttgggttccagggtccatcctgcgtggctttctgctctgcccactgagtgggtgccaagggggctatgtcctcccactctgcagggagctgcttcctatgtctggtggatgtggtgcccgtgaagaacgaggatggggctgtcatcatgttcatcctcaatttcgaggtggtgatggagaaggacatggtggggtccccggctcatgacaccaaccaccggggcccccccaccagctggctggccccaggccgcgccaagaccttccgcctgaagctgcccgcgctgctggcgctgacggcccgggagtcgtcggtgcggtcgggcggcgcgggcggcgcgggcgccccgggggccgtggtggtggacgtggacctgacgcccgcggcacccagcagcgagtcgctggccctggacgaagtgacagccatggacaaccacgtggcagggctcgggcccgcggaggagcggcgtgcgctggtgggtcccggctctccgccccgcagcgcgcccggccagctcccatcgccccgggcgcacagcctcaaccccgacgcctcgggctccagctgcagcctggcccggacgcgctcccgagaaagctgcgccagcgtgcgccgcgcctcgtcggccgacgacatcgaggccatgcgcgccggggtgctgcccccgccaccgcgccacgccagcaccggggccatgcacccactgcgcagcggcttgctcaactccacctcggactccgacctcgtgcgctaccgcaccattagcaagattccccaaatcaccctcaactttgtggacctcaagggcgaccccttcttggcttcgcccaccagtgaccgtgagatcatagcacctaagataaaggagcgaacccacaatgtcactgagaaggtcacccaggtcctgtccctgggcgccgacgtgctgcctgagtacaagctgcaggcaccgcgcatccaccgctggaccatcctgcattacagccccttcaaggccgtgtgggactggctcatcctgctgctggtcatctacacggctgtcttcacaccctactcggctgccttcctgctgaaggagacggaagaaggcccgcctgctaccgagtgtggctacgcctgccagccgctggctgtggtggacctcatcgtggacatcatgttcattgtggacatcctcatcaacttccgcaccacctacgtcaatgccaacgaggaggtggtcagccaccccggccgcatcgccgtccactacttcaagggctggttcctcatcgacatggtggccgccatccccttcgacctgctcatcttcggctctggctctgaggagctgatcgggctgctgaagactgcgcggctgctgcggctggtgcgcgtggcgcggaagctggatcgctactcagagtacggcgcggccgtgctgttcttgctcatgtgcacctttgcgctcatcgcgcactggctagcctgcatctggtacgccatcggcaacatggagcagccacacatggactcacgcatcggctggctgcacaacctgggcgaccagataggcaaaccctacaacagcagcggcctgggcggcccctccatcaaggacaagtatgtgacggcgctctacttcaccttcagcagcctcaccagtgtgggcttcggcaacgtctctcccaacaccaactcagagaagatcttctccatctgcgtcatgctcattggctccctcatgtatgctagcatcttcggcaacgtgtcggccatcatccagcggctgtactcgggcacagcccgctaccacacacagatgctgcgggtgcgggagttcatccgcttccaccagatccccaatcccctgcgccagcgcctcgaggagtacttccagcacgcctggtcctacaccaacggcatcgacatgaacgcggtgctgaagggcttccctgagtgcctgcaggctgacatctgcctgcacctgaaccgctcactgctgcagcactgcaaacccttccgaggggccaccaagggctgccttcgggccctggccatgaagttcaagaccacacatgcaccgccaggggacacactggtgcatgctggggacctgctcaccgccctgtacttcatctcccggggctccatcgagatcctgcggggcgacgtcgtcgtggccatcctggggaagaatgacatctttggggagcctctgaacctgtatgcaaggcctggcaagtcgaacggggatgtgcgggccctcacctactgtgacctacacaagatccatcgggacgacctgctggaggtgctggacatgtaccctgagttctccgaccacttctggtccagcctggagatcaccttcaacctgcgagataccaacatgatcccgggctcccccggcagtacggagttagagggtggcttcagtcggcaacgcaagcgcaagttgtccttccgcaggcgcacggacaaggacacggagcagccaggggaggtgtcggccttggggccgggccgggcgggggcagggccgagtagccggggccggccgggggggccgtggggggagagcccgtccagtggcccctccagccctgagagcagtgaggatgagggcccaggccgcagctccagccccctccgcctggtgcccttctccagccccaggccccccggagagccgccgggtggggagcccctgatggaggactgcgagaagagcagcgacacttgcaaccccctgtcaggcgccttctcaggagtgtccaacattttcagcttctggggggacagtcggggccgccagtaccaggagctccctcgatgccccgcccccacccccagcctcctcaacatccccctctccagcccgggtcggcggccccggggcgacgtggagagcaggctggatgccctccagcgccagctcaacaggctggagacccggctgagtgcagacatggccactgtcctgcagctgctacagaggcagatgacgctggtcccgcccgcctacagtgctgtgaccaccccggggcctggccccacttccacatccccgctgttgcccgtcagccccctccccaccctcaccttggactcgctttctcaggtttcccagttcatggcgtgtgaggagctgcccccgggggccccagagcttccccaagaaggccccacacgacgcctctccctaccgggccagctgggggccctcacctcccagcccctgcacagacacggctcggacccgggcagttagtggggctgcccagtgtggacacgtggctcacccagggatcaaggcgctgctgggccgctccccttggaggccctgctcaggaggccctgaccgtggaaggggagaggaactcgaaagcacagctcctcccccagcccttgggaccatcttctcctgcagtcccctgggccccagtgagaggggcaggggcagggccggcagtaggtggggcctgtggtccccccactgccctgagggcattagctggtctaactgcccggaggcacccggccctgggccttaggcacctcaaggacttttctgctatttactgctcttattgttaaggataataattaaggatcatatgaataattaatgaagatgctgatgactatgaataataaataattatcctgaggaga

SEQ ID NO: 23365 - DNA, 3145 bp, Homo sapiens
  source 1..3145: mol_type = unassigned DNA
ccatgggctcaggatgccggtgcggaggggccacgtcgcgccgcagaacaccttcctggacaccatcatccgcaagtttgagggccagagccgtaagttcatcatcgccaacgctcgggtggagaactgcgccgtcatctactgcaacgacggcttctgcgagctgtgcggctactcgcgggccgaggtgatgcagcgaccctgcacctgcgacttcctgcacgggccgcgcacgcagcgccgcgctgccgcgcagatcgcgcaggcactgctgggcgccgaggagcgcaaagtggaaatcgccttctaccggaaagatgggagctgcttcctatgtctggtggatgtggtgcccgtgaagaacgaggatggggctgtcatcatgttcatcctcaatttcgaggtggtgatggagaaggacatggtggggtccccggctcatgacaccaaccaccggggcccccccaccagctggctggccccaggccgcgccaagaccttccgcctgaagctgcccgcgctgctggcgctgacggcccgggagtcgtcggtgcggtcgggcggcgcgggcggcgcgggcgccccgggggccgtggtggtggacgtggacctgacgcccgcggcacccagcagcgagtcgctggccctggacgaagtgacagccatggacaaccacgtggcagggctcgggcccgcggaggagcggcgtgcgctggtgggtcccggctctccgccccgcagcgcgcccggccagctcccatcgccccgggcgcacagcctcaaccccgacgcctcgggctccagctgcagcctggcccggacgcgctcccgagaaagctgcgccagcgtgcgccgcgcctcgtcggccgacgacatcgaggccatgcgcgccggggtgctgcccccgccaccgcgccacgccagcaccggggccatgcacccactgcgcagcggcttgctcaactccacctcggactccgacctcgtgcgctaccgcaccattagcaagattccccaaatcaccctcaactttgtggacctcaagggcgaccccttcttggcttcgcccaccagtgaccgtgagatcatagcacctaagataaaggagcgaacccacaatgtcactgagaaggtcacccaggtcctgtccctgggcgccgacgtgctgcctgagtacaagctgcaggcaccgcgcatccaccgctggaccatcctgcattacagccccttcaaggccgtgtgggactggctcatcctgctgctggtcatctacacggctgtcttcacaccctactcggctgccttcctgctgaaggagacggaagaaggcccgcctgctaccgagtgtggctacgcctgccagccgctggctgtggtggacctcatcgtggacatcatgttcattgtggacatcctcatcaacttccgcaccacctacgtcaatgccaacgaggaggtggtcagccaccccggccgcatcgccgtccactacttcaagggctggttcctcatcgacatggtggccgccatccccttcgacctgctcatcttcggctctggctctgaggagctgatcgggctgctgaagactgcgcggctgctgcggctggtgcgcgtggcgcggaagctggatcgctactcagagtacggcgcggccgtgctgttcttgctcatgtgcacctttgcgctcatcgcgcactggctagcctgcatctggtacgccatcggcaacatggagcagccacacatggactcacgcatcggctggctgcacaacctgggcgaccagataggcaaaccctacaacagcagcggcctgggcggcccctccatcaaggacaagtatgtgacggcgctctacttcaccttcagcagcctcaccagtgtgggcttcggcaacgtctctcccaacaccaactcagagaagatcttctccatctgcgtcatgctcattggctccctcatgtatgctagcatcttcggcaacgtgtcggccatcatccagcggctgtactcgggcacagcccgctaccacacacagatgctgcgggtgcgggagttcatccgcttccaccagatccccaatcccctgcgccagcgcctcgaggagtacttccagcacgcctggtcctacaccaacggcatcgacatgaacgcggtgctgaagggcttccctgagtgcctgcaggctgacatctgcctgcacctgaaccgctcactgctgcagcactgcaaacccttccgaggggccaccaagggctgccttcgggccctggccatgaagttcaagaccacacatgcaccgccaggggacacactggtgcatgctggggacctgctcaccgccctgtacttcatctcccggggctccatcgagatcctgcggggcgacgtcgtcgtggccatcctgggtatggggtggggggcgggcactggactggaaatgccctctgcagcctcaagaggtgcgagccttctgaatatgcagtcactggggctgtggacctgggactgcctgcagggtcactgggctcctttaattcacctaaactcaggccctccaagcggggccatggagaggagccccacgtggggtgaggctgctgaactctggggttcccacattctccttcccttcaggatccgccacaaacagacactttttgcttccttaaagtaggatcaaatctagatcctctagcctgggcagtagaggaagaaatgctagcctggaagctcggcatttggtttcactaagggccatgtggttccctgcagcctcatgcctggccccttgacacatccaaagcaaagggagtcctgccccctccccccacttcctttctaccctgcctgtgcacagtgggtgggttggtgtgtctggacactgaggacttcctccccctttgcctgtccttccctcggccctgtgtgcctcagggcagatatagcaagctctttcgaccatagttgatggtaggacattttagactttgtttctcagctctgtacaaacacaaatacacacccccacaaaactaaaatcaaagtttcactacataacactgggccttactgcatgtggttcattctagcatttctgttctgtgctgtgctaagctatactactgtatgttctttcagt

SEQ ID NO: 23366 - DNA, 3853 bp, Homo sapiens
  source 1..3853: mol_type = unassigned DNA
ggccgcggggcctggagcccgggatttgtgggcggcgagggcgcgaggggccgcgcgccatgctccgggccccgacggcgcggacgccccctcgcgcgccagcgtccggcgcgaccccggatcccggtctgcgcattgccccccgacggctgcgctagggagcgcggggcccggcggggggcggccgagctgggcgccctcccccggcgcggagtccccgcaccccggagggatggggcgggcagccgcgggcgcctaagatgccggccatgcggggcctcctggcgccgcagaacaccttcctggacaccatcgctacgcgcttcgacggcacgcacagtaacttcgtgctgggcaacgcccaggtggcggggctcttccccgtggtctactgctctgatggcttctgtgacctcacgggcttctcccgggctgaggtcatgcagcggggctgtgcctgctccttcctttatgggccagacaccagtgagctcgtccgccaacagatccgcaaggccctggacgagcacaaggagttcaaggctgagctgatcctgtaccggaagagcgggctcccgttctggtgtctcctggatgtgatacccataaagaatgagaaaggggaggtggctctcttcctagtctctcacaaggacatcagcgaaaccaagaaccgagggggccccgacagatggaaggagacaggtggtggccggcgccgatatggccgggcacgatccaaaggcttcaatgccaaccggcggcggagccgggccgtgctctaccacctgtccgggcacctgcagaagcagcccaagggcaagcacaagctcaataagggggtgtttggggagaaaccaaacttgcctgagtacaaagtagccgccatccggaagtcgcccttcatcctgttgcactgtggggcactgagagccacctgggatggcttcatcctgctcgccacactctatgtggctgtcactgtgccctacagcgtgtgtgtgagcacagcacgggagcccagtgccgcccgcggcccgcccagcgtctgtgacctggccgtggaggtcctcttcatccttgacattgtgctgaatttccgtaccacattcgtgtccaagtcgggccaggtggtgtttgccccaaagtccatttgcctccactacgtcaccacctggttcctgctggatgtcatcgcagcgctgccctttgacctgctacatgccttcaaggtcaacgtgtacttcggggcccatctgctgaagacggtgcgcctgctgcgcctgctgcgcctgcttccgcggctggaccggtactcgcagtacagcgccgtggtgctgacactgctcatggccgtgttcgccctgctcgcgcactgggtcgcctgcgtctggttttacattggccagcgggagatcgagagcagcgaatccgagctgcctgagattggctggctgcaggagctggcccgccgactggagactccctactacctggtgggccggaggccagctggagggaacagctccggccagagtgacaactgcagcagcagcagcgaggccaacgggacggggctggagctgctgggcggcccgtcgctgcgcagcgcctacatcacctccctctacttcgcactcagcagcctcaccagcgtgggcttcggcaacgtgtccgccaacacggacaccgagaagatcttctccatctgcaccatgctcatcggcgccctgatgcacgcggtggtgtttgggaacgtgacggccatcatccagcgcatgtacgcccgccgctttctgtaccacagccgcacgcgcgacctgcgcgactacatccgcatccaccgtatccccaagcccctcaagcagcgcatgctggagtacttccaggccacctgggcggtgaacaatggcatcgacaccaccgagctgctgcagagcctccctgacgagctgcgcgcagacatcgccatgcacctgcacaaggaggtcctgcagctgccactgtttgaggcggccagccgcggctgcctgcgggcactgtctctggccctgcggcccgccttctgcacgccgggcgagtacctcatccaccaaggcgatgccctgcaggccctctactttgtctgctctggctccatggaggtgctcaagggtggcaccgtgctcgccatcctagggaagggcgacctgatcggctgtgagctgccccggcgggagcaggtggtaaaggccaatgccgacgtgaaggggctgacgtactgcgtcctgcagtgtctgcagctggctggcctgcacgacagccttgcgctgtaccccgagtttgccccgcgcttcagtcgtggcctccgaggggagctcagctacaacctgggtgctgggggaggctctgcagaggtggacaccagctccctgagcggcgacaatacccttatgtccacgctggaggagaaggagacagatggggagcagggccccacggtctccccagccccagctgatgagccctccagccccctgctgtcccctggctgcacctcctcatcctcagctgccaagctgctatccccacgtcgaacagcaccccggcctcgtctaggtggcagagggaggccaggcagggcaggggctttgaaggctgaggctggcccctctgctcccccacgggccctagaggggctacggctgccccccatgccatggaatgtgcccccagatctgagccccagggtagtagatggcattgaagacggctgtggctcggaccagcccaagttctctttccgcgtgggccagtctggcccggaatgtagcagcagcccctcccctggaccagagagcggcctgctcactgttccccatgggcccagcgaggcaaggaacacagacacactggacaagcttcggcaggcggtgacagagctgtcagagcaggtgctgcagatgcgggaaggactgcagtcacttcgccaggctgtgcagcttgtcctggcgccccacagggagggtccgtgccctcgggcatcgggagaggggccgtgcccagccagcacctccgggcttctgcagcctctgtgtgtggacactggggcatcctcctactgcctgcagcccccagctggctctgtcttgagtgggacttggccccaccctcgtccggggcctcctcccctcatggcaccctggccctggggtcccccagcgtctcagagctccccctggcctcgagccacagctttctggacctccacctcagactcagagccccctgcctcaggagacctctgctctgagcccagcacccctgcctcccctcctccttctgaggaaggggctaggactgggcccgcagagcctgtgagccaggctgaggctaccagcactggagagcccccaccagggtcagggggcctggccttgccctgggacccccacagcctggagatggtgcttattggctgccatggctctggcacagtccagtggacccaggaagaaggcacaggggtctgagtaccagccctagaactcagcgttgccaggtgtgctgccatctgctgttcggcccaacctcagagtgaaggcagggtggcagcctccccacggactccatgcggcccgctggctcagggcagggagcctggaagcaaaggaggacctggctcctgactctcagagaggataggctggatccctggggcaggcctctcctcggcctgctcctctgacctcccggtctccctctgcaggctgggggcagaggcctgaggacaaggaagagctttgccatcccctgcatgtgcccctgcctctacctgtccccaaatttttatattaaaaaaaaaaaataaaat

SEQ ID NO: 23367 - DNA, 4175 bp, Homo sapiens
  source 1..4175: mol_type = unassigned DNA
gttcccgagccccgtgtgcggcaccgccacagtctgggcagcggcggccgggggagcgctactaccatgaactgcctggtcctcctccccagagctgctcatccgggtcgggctggagacacagtcaggggaccccgtcgccgccgccgcgccccctcttctttcggctcaatcttctcttccaccttttcctcctcttcctccaccttctttgcctgcatccccccctcccccgccgcggatcctggccgctgctctccagacccaggatgccggggggcaagagagggctggtggcaccgcagaacacatttttggagaacatcgtcaggcgctccagtgaatcaagtttcttactgggaaatgcccagattgtggattggcctgtagtttatagtaatgacggtttttgtaaactctctggatatcatcgagctgacgtcatgcagaaaagcagcacttgcagttttatgtatggggaattgactgacaagaagaccattgagaaagtcaggcaaacttttgacaactacgaatcaaactgctttgaagttcttctgtacaagaaaaacagaacccctgtttggttttatatgcaaattgcaccaataagaaatgaacatgaaaaggtggtcttgttcctgtgtactttcaaggatattacgttgttcaaacagccaatagaggatgattcaacaaaaggttggacgaaatttgcccgattgacacgggctttgacaaatagccgaagtgttttgcagcagctcacgccaatgaataaaacagaggtggtccataaacattcaagactagctgaagttcttcagctgggatcagatatccttcctcagtataaacaagaagcgccaaagacgccaccacacattattttacattattgtgcttttaaaactacttgggattgggtgattttaattcttaccttctacaccgccattatggttccttataatgtttccttcaaaacaaagcagaacaacatagcctggctggtactggatagtgtggtggacgttatttttctggttgacatcgttttaaattttcacacgactttcgtggggcccggtggagaggtcatttctgaccctaagctcataaggatgaactatctgaaaacttggtttgtgatcgatctgctgtcttgtttaccttatgacatcatcaatgcctttgaaaatgtggatgagggaatcagcagtctcttcagttctttaaaagtggtgcgtctcttacgactgggccgtgtggctaggaaactggaccattacctagaatatggagcagcagtcctcgtgctcctggtgtgtgtgtttggactggtggcccactggctggcctgcatatggtatagcatcggagactacgaggtcattgatgaagtcactaacaccatccaaatagacagttggctctaccagctggctttgagcattgggactccatatcgctacaataccagtgctgggatatgggaaggaggacccagcaaggattcattgtacgtgtcctctctctactttaccatgacaagccttacaaccataggatttggaaacatagctcctaccacagatgtggagaagatgttttcggtggctatgatgatggttggctctcttctttatgcaactatttttggaaatgttacaacaattttccagcaaatgtatgccaacaccaaccgataccatgagatgctgaataatgtacgggacttcctaaaactctatcaggtcccaaaaggccttagtgagcgagtcatggattatattgtctcaacatggtccatgtcaaaaggcattgatacagaaaaggtcctctccatctgtcccaaggacatgagagctgatatctgtgttcatctaaaccggaaggtttttaatgaacatcctgcttttcgattggccagcgatgggtgtctgcgcgccttggcggtagagttccaaaccattcactgtgctcccggggacctcatttaccatgctggagaaagtgtggatgccctctgctttgtggtgtcaggatccttggaagtcatccaggatgatgaggtggtggctattttagggaagggtgatgtatttggagacatcttctggaaggaaaccacccttgcccatgcatgtgcgaacgtccgggcactgacgtactgtgacctacacatcatcaagcgggaagccttgctcaaagtcctggacttttatacagcttttgcaaactccttctcaaggaatctcactcttacttgcaatctgaggaaacggatcatctttcgtaagatcagtgatgtgaagaaagaggaggaggagcgcctccggcagaagaatgaggtgaccctcagcattcccgtggaccacccagtcagaaagctcttccagaagttcaagcagcagaaggagctgcggaatcagggctcaacacagggtgaccctgagaggaaccaactccaggtagagagccgctccttacagaatggagcctccatcaccggaaccagcgtggtgactgtgtcacagattactcccattcagacgtctctggcctatgtgaaaaccagtgaatcccttaagcagaacaaccgtgatgccatggaactcaagcccaacggcggtgctgaccaaaaatgtctcaaagtcaacagcccaataagaatgaagaatggaaatggaaaagggtggctgcgactcaagaataatatgggagcccatgaggagaaaaaggaagactggaataatgtcactaaagctgagtcaatggggctattgtctgaggaccccaagagcagtgattcagagaacagtgtgaccaaaaacccactaagaaaaacagattcttgtgacagtggaattacaaaaagtgaccttcgtttggataaggctggggaggcccgaagtccgctagagcacagtcccatccaggctgatgccaagcaccccttttatcccatccccgagcaggccttacagaccacactgcaggaagtcaaacacgaactcaaagaggacatccagctgctcagctgcagaatgactgccctagaaaagcaggtggcagaaattttaaaaatactgtcggaaaaaagcgtaccccaggcctcatctcccaaatcccaaatgccactccaagtacccccccagataccatgtcaggatatttttagtgtctcaaggcctgaatcacctgaatctgacaaagatgaaatccacttttaatatatatacatatatatttgttaatatattaaaacagtatatacatatgtgtgtatatacagtatatacatatatatattttcacttgctttcaagatgatgaccacacatggattttgatatgtaaatattgcatgtccagctggattctggcctgccaaagaagatgatgattaaaaacatagatattgcttgtatattatgcagttgactgcatgcacactttacatttatttataatctctattctataataaaagagtatgatttttgttacccaaggcaatgtaatatttgaagaatcagggtccaacctgccaatgttgccatgacaaatttgatctcaggctgagtatgtatatcgagctatcattttctcactgttctgttaagttaaaagtatagattaatgccaaggaagagttcagtcttttaaactattagtaccatgttatgatctctttccataggatatttttctgtaacttagtgttaggttcttttcccctacaggcagtgtttgctccatttaaatgactgtttagttgcctaagtcagataagagtgtgggatattgaaaacttattgctatgggttttgtgcatgaattacatttttgatcaactatacctctcgttttttaacattatacttagatagtaatcattagctcttatgtaaggaaatccctactccctccttcttggagaacagctgccatcttgtaagctgacattatcaacatcataaatactaaactattaatatagagtatgttattatagaaacactgcaccacagggtataagggccttttgacaattcatgtaagagatgctgaatttccaaagctgataaatgctctaaatttgtatttccaaaacatgttcaagagtgacattgaaaggcttgttagcaaagaaacatacaaaaaataaa

SEQ ID NO: 23368 - DNA, 1849 bp, Homo sapiens
  source 1..1849: mol_type = unassigned DNA
acgtcacgctatttttttttttttttttttttgtatttttagtagagacggagtttcacgtgttagccaggatggtctggatcttctgaccttgtgatctgcccgcctcggcctcccaaagtgctgggattacaggcgtgagccaccgcgcccggccgaagactgaatttttgagcaaatgaaagacaccaacaaaatccaacacataaagattcacacttgaaacagattaatcaggaatcaagtttcttactgggaaatgcccagattgtggattggcctgtagtttatagtaatgacggtttttgtaaactctctggatatcatcgagctgacgtcatgcagaaaagcagcacttgcagttttatgtatggggaattgactgacaagaagaccattgagaaagtcaggcaaacttttgacaactacgaatcaaactgctttgaagttcttctgtacaagaaaaacagaacccctgtttggttttatatgcaaattgcaccaataagaaatgaacatgaaaaggtggtcttgttcctgtgtactttcaaggatattacgttgttcaaacagccaatagaggatgattcaacaaaaggttggacgaaatttgcccgattgacacgggctttgacaaatagccgaagtgttttgcagcagctcacgccaatgaataaaacagaggtggtccataaacattcaagactagctgaagttcttcagctgggatcagatatccttcctcagtataaacaagaagcgccaaagacgccaccacacattattttacattattgtgcttttaaaactacttgggattgggtgattttaattcttaccttctacaccgccattatggttccttataatgtttccttcaaaacaaagcagaacaacatagcctggctggtactggatagtgtggtggacgttatttttctggttgacatcgttttaaattttcacacgactttcgtggggcccggtggagaggtcatttctgaccctaagctcataaggatgaactatctgaaaacttggtttgtgatcgatctgctgtcttgtttaccttatgacatcatcaatgcctttgaaaatgtggatgagggaatcagcagtctcttcagttctttaaaagtggtgcgtctcttacgactgggccgtgtggctaggaaactggaccattacctagaatatggagcagcagtcctcgtgctcctggtgtgtgtgtttggactggtggcccactggctggcctgcatatggtatagcatcggagactacgaggtcattgatgaagtcactaacaccatccaaatagacagttggctctaccagctggctttgagcattgggactccatatcgctacaataccagtgctgggatatgggaaggaggacccagcaaggattcattgtacgtgtcctctctctactttaccatgacaagccttacaaccataggatttggaaacatagctcctaccacagatgtggagaagatgttttcggtggctatgatgatggttggctgtaagtattttaattttttcattgaaaattattgttattggcaattttcctggctacaatctcagataggatgaaaacgaactactttgtttacagaaaggtatttaatccatcttatttgcaattgttttttttaatctaccttagaaaatagaaatgcaaaataatatattttactcttcaggacataataatgtgtgaaaaacatattaatgtgtgtacccagcagtgctctcttgaaggaaccaggaccagcatccagagaggtggcgtttcgcacattccatagattttgttggtaatgtgttaaattcc

SEQ ID NO: 23369 - DNA, 2434 bp, Homo sapiens
  source 1..2434: mol_type = unassigned DNA
ggccccctccggaaggtgaggggaatggattggactccggtggggaaagcgggtgtctagaagtggtgctaatgggaagagaattctggtttcaaaagaggatgctctgccacaaagagcggctcgcgcgctggcctgggctctagccgaggagagatcccgggagaactccagagctccgggggagcgctcctcggaagaccggggccaacatgcctgtgcgcagggggcatgtggcaccacaaaatacatttctggggaccatcattcggaaatttgaagggcaaaataaaaaatttatcattgcaaatgccagagtgcagaactgtgccatcatttattgcaacgatgggttctgtgagatgactggtttctccaggccagatgtcatgcaaaagccatgcacctgcgactttctccatggacccgagaccaagaggcatgatattgcccaaattgcccaggcattgctggggtcagaagagaggaaagtggaggtcacctactatcacaaaaatgggtccacttttatttgtaacactcacataattccagtgaaaaaccaagagggcgtggctatgatgttcatcattaattttgaatatgtgacggataatgaaaacgctgccaccccagagagggtaaacccaatattaccaatcaaaactgtaaaccggaaattttttgggttcaaattccctggtctgagagttctcacttacagaaagcagtccttaccacaagaagaccccgatgtggtggtcatcgattcatctaaacacagtgatgattcagtagccatgaagcattttaagtctcctacaaaagaaagctgcagcccctctgaagcagatgacacaaaagctttgatacagcccagcaaatgttctcccttggtgaatatatccggacctcttgaccattcctctcccaaaaggcaatgggaccgactctaccctgacatgctgcagtcaagttcccagctgtcccattccagatcaagggaaagcttatgtagtatacggagagcatcttcggtccatgatatagaaggattcggcgtccaccccaagaacatatttagagaccgacatgccagcgaagggccttttaatcatatcaagtcaagcctcctgggatccacatcagattcaaacctcaacaaatacagcaccattaacaagattccacagctcactctgaatttttcagaggtcaaaactgagaaaaagaattcatcacctccttcttcagataaaaccattattgcacccaaggttaaagatcgaacacacaatgtgactgagaaagtgacccaggttctctctttaggagcagatgtcctacctgaatacaaactgcagacaccacgcatcaacaagtttacgatattgcactacagccctttcaaggcagtctgggactggcttatcctgctgttggtcatatacactgctatatttactccctactctgcagccttcctcctcaatgacagagaagaacagaaaagacgagaatgtggctattcttgtagccctttgaatgtggtagacttgattgtggatattatgtttatcatagatattttaataaacttcagaacaacatatgtaaatcagaatgaagaagtggtaagtgatcccgccaaaatagcaatacactacttcaaaggctggttcctgattgacatggttgcagcaattccttttgacttgctgatttttggatcaggttctgatgagacaacaacattaattggtcttttgaagactgcccgactcctccgtcttgtgcgcgtggccaggaaactggatcgatattcagaatatggcgctgctgttctaatgctcttaatgtgcatctttgccctgattgctcactggctggcttgcatttggtatgcgattgggaatgtagaaaggccttacctgactgacaaaatcggatggttggattccttaggacagcaaattgggaaacgttacaatgacagtgactcaagttctggaccatccattaaagacaaatacgtcacagcactttattttaccttcagcagtttaaccagtgtaggattcgggaatgtgtctcctaacacgaattcggagaaaatcttttcaatttgtgtcatgttgattggctcactaatgtatgcaagcatttttgggaatgtatctgcaattatccaaagactatactcgggaactgccaggtaccacatgcagatgctgcgagtaaaagagttcattcgctttcaccaaatccccaaccctctgaggcaacgtcttgaagaatatttccagcacgcatggacttacaccaatggcattgacatgaacatggtatgtatgtctgttttccaaaatgaaagtgccgcaggcattatagtgatagccaaaatggaataaaagccggaatcaccagctttgaa

SEQ ID NO: 23370 - DNA, 4113 bp, Homo sapiens
  source 1..4113: mol_type = unassigned DNA
caaagagcggctcgcgcgctggcctgggctctagccgaggagagatcccgggagaactccagagctccgggggagcgctcctcggaagaccggggccaacatgcctgtgcgcagggggcatgtggcaccacaaaatacatttctggggaccatcattcggaaatttgaagggcaaaataaaaaatttatcattgcaaatgccagagtgcagaactgtgccatcatttattgcaacgatgggttctgtgagatgactggtttctccaggccagatgtcatgcaaaagccatgcacctgcgactttctccatggacccgagaccaagaggcatgatattgcccaaattgcccaggcattgctggggtcagaagagaggaaagtggaggtcacctactatcacaaaaatgggtccacttttatttgtaacactcacataattccagtgaaaaaccaagagggcgtggctatgatgttcatcattaattttgaatatgtgacggataatgaaaacgctgccaccccagagagggtaaacccaatattaccaatcaaaactgtaaaccggaaattttttgggttcaaattccctggtctgagagttctcacttacagaaagcagtccttaccacaagaagaccccgatgtggtggtcatcgattcatctaaacacagtgatgattcagtagccatgaagcattttaagtctcctacaaaagaaagctgcagcccctctgaagcagatgacacaaaagctttgatacagcccagcaaatgttctcccttggtgaatatatccggacctcttgaccattcctctcccaaaaggcaatgggaccgactctaccctgacatgctgcagtcaagttcccagctgtcccattccagatcaagggaaagcttatgtagtatacggagagcatcttcggtccatgatatagaaggattcggcgtccaccccaagaacatatttagagaccgacatgccagcgaagacaatggtcgcaatgtcaaagggccttttaatcatatcaagtcaagcctcctgggatccacatcagattcaaacctcaacaaatacagcaccattaacaagattccacagctcactctgaatttttcagaggtcaaaactgagaaaaagaattcatcacctccttcttcagataaaaccattattgcacccaaggttaaagatcgaacacacaatgtgactgagaaagtgacccaggttctctctttaggagcagatgtcctacctgaatacaaactgcagacaccacgcatcaacaagtttacgatattgcactacagccctttcaaggcagtctgggactggcttatcctgctgttggtcatatacactgctatatttactccctactctgcagccttcctcctcaatgacagagaagaacagaaaagacgagaatgtggctattcttgtagccctttgaatgtggtagacttgattgtggatattatgtttatcatagatattttaataaacttcagaacaacatatgtaaatcagaatgaagaagtggtaagtgatcccgccaaaatagcaatacactacttcaaaggctggttcctgattgacatggttgcagcaattccttttgacttgctgatttttggatcaggttctgatgagacaacaacattaattggtcttttgaagactgcccgactcctccgtcttgtgcgcgtggccaggaaactggatcgatattcagaatatggcgctgctgttctaatgctcttaatgtgcatctttgccctgattgctcactggctggcttgcatttggtatgcgattgggaatgtagaaaggccttacctgactgacaaaatcggatggttggattccttaggacagcaaattgggaaacgttacaatgacagtgactcaagttctggaccatccattaaagacaaatacgtcacagcactttattttaccttcagcagtttaaccagtgtaggattcgggaatgtgtctcctaacacgaattcggagaaaatcttttcaatttgtgtcatgttgattggctcactaatgtatgcaagcatttttgggaatgtatctgcaattatccaaagactatactcgggaactgccaggtaccacatgcagatgctgcgagtaaaagagttcattcgctttcaccaaatccccaaccctctgaggcaacgtcttgaagaatatttccagcacgcatggacttacaccaatggcattgacatgaacatggtcctaaagggtttcccagaatgcttacaagcagacatttgtctacatctcaaccagacattgctgcaaaactgcaaagcctttcggggggcaagtaaaggttgccttagagctttggcaatgaagttcaaaaccacccatgcacctccaggagacaccctcgttcactgtggggatgtcctcactgcactttatttcttatccagaggctccattgaaattctcaaagatgacattgtggtggctattctgggaaaaaatgatatatttggagaaatggttcatctttatgccaaacctggaaagtctaatgcagatgtaagagccctcacatactgtgacttgcataagattcagcgagaagacttgttagaggttttggatatgtatcctgagttttctgatcactttctaacaaacctagagttgactttcaacctaaggcatgagagcgcaaaggctgatctcctacgatcacaatccatgaatgattcagaaggagacaactgtaaactaagaagaaggaaattgtcatttgaaagtgaaggagagaaagaaaacagtacaaatgatcctgaagactctgcagataccataagacattatcagagttccaagagacactttgaagagaaaaaaagcagatcctcatctttcatctcctccattgatgatgaacaaaagccgctcttctcaggaatagtagactcttctccaggaatagggaaagcatctgggctcgattttgaagaaacagtgcccacctcaggaagaatgcacatagataaaagaagtcactcttgcaaagatatcactgacatgcgaagctgggaacgagaaaatgcacatccccagcctgaagactccagtccatctgcacttcagcgagctgcctggggtatctctgaaaccgaaagcgacctcacctacggggaagtggaacaaagattagatctgctccaggagcaacttaacaggcttgaatcccaaatgaccactgacatccagaccatcttacagttgctgcagaaacaaaccactgtggtccccccagcctacagtatggtaacagcaggatcagaatatcagagacccatcatccagctgatgagaaccagtcaaccggaagcatccatcaaaactgaccgaagtttcagcccttcctcacaatgtcctgaatttctagaccttgaaaaatctaaacttaaatccaaagaatccctttcaagtggggtgcatctgaacacagcttcagaagacaacttgacttcacttttaaaacaagacagtgatctctctttagagcttcacctgcggcaaagaaaaacttacgttcatccaattaggcatccttctttgccagattcatccctaagcactgtaggaatcgtgggtcttcataggcatgtttctgatcctggtcttccagggaaataatcattttgtactatttactccacatacaatgtaagtgcttttaatggctgttttcctttttctatttaaatcctctctacttgactcaggggctcacaaggtaccattatatgcaaaagtactgtatattttcctaaattgaagcttgtaaggtaaaactgagcagttaggatgtaaatatacataagaacttttggttccaaatgttaaaactgccagcatctcacggcaccttattttttatttttattttttaaatcacatgcatgttaggaaactccaatttctcttgcatggagactcctatttactgcttttactaaaccagtacttcgttatgaaaatgccttccacgcaaataagaaaccaagggataaaactgttcatggatgcaactcaaattcagatgatcctcaactcat

SEQ ID NO: 23371 - DNA, 1826 bp, Homo sapiens
  source 1..1826: mol_type = unassigned DNA
ggtagacgcgatctgttcgctactaccggcctcccctggctgttaaaagcagatggtggctgaggtttgttcaatgcccactgcctctactgtgaagaagccatttgatctcaggagcaagatgggcaagtggtgccaccaccgcttcccctgctgcagggggagcggcaagagcaacatgggcacttctggagaccacgacgactcctttatgaagatgctcaggagcaagatgggcaagtgttgccgccactgcttcccctgctgcagggggagcggcacgagcaacgtgggcacttctggagaccatgaaaactcctttatgaagatgctcaggagcaagatgggcaagtggtgctgtcactgcttcccctgctgcagggggagcggcaagagcaacgtgggcgcttggggagactacgaccacagcgccttcatggagccgaggtaccacatccgtcgagaagatctggacaagctccacagagctgcctggtggggtaaagtccccagaaaggatctcatcgtcatgctcagggacactgacatgaacaagagggacaaggaaaagaggactgctctacatttggcctctgccaatggaaattcagaagtagtacaactcctgctggacagacgatgtcaacttaatgtccttgacaacaaaaaaaggacagctctgataaaggccatacaatgccaggaagatgaatgtgtgttaatgttgctggaacatggcgctgatcgaaatattccagatgagtatggaaataccgctctacactatgctatctacaatgaagataaattaatggccaaagcactgctcttatatggtgctgatattgaatcaaaaaacaagtgtggcctcacaccacttttgcttggcgtacatgaacaaaaacagcaagtggtgaaatttttaatcaagaaaaaagctaatttaaatgtacttgatagatatggaagaactgccctcatacttgctgtatgttgtggatcagcaagtatagtcaatcttctacttgagcaaaatgttgatgtatcttctcaagatctatctggacagacggccagagagtatgctgtttctagtcatcatcatgtaatttgtgaattactttctgactataaagaaaaacagatgctaaaaatctcttctgaaaacagcaatccagaacaagacttaaagctgacatcagaggaagagtcacaaaggcttaaagtcagtgaaaatagccagccagagaaaatgtctcaagaaccagaaataaataaggactgtgatagagaggttgaagaagaaataaagaagcatggaagtaatcctgtgggattaccagaaaacctgactaatggtgccagtgctggcaatggtgatgatggattaattccacaaaggaggagcagaaaacctgaaaatcagcaatttcctgacactgagaatgaagagtatcacagtgatgaacaaaatgatacccggaaacaactttctgaagaacagaacactggaatatcacaagatgagattctgactaataaacaaaagcagatagaagtggctgaacagaaaatgaattctgagctttctcttagtcataagaaagaagaagatctcttgcgtgaaaacagcgtgttgcaggaagaaattgccatgctaagactggaactagatgaaacaaaacatcagaaccagctaagggaaaataaaattttggaggaaattgaaagtgtgaaagaaaagactgataaacttctaagggctatgcaattgaatgaagaagcattaacgaaaaccaatatttaagtacagtggacagcttagg

SEQ ID NO: 23372 - DNA, 1928 bp, Homo sapiens
  source 1..1928: mol_type = unassigned DNA
ggtagacgcgatctgctggctactaccggccttccctggctgttaaaagcagatggtggctgaggctggttcaatgccggctgcctcctctgtgaagaagccatttggtctcagaagcaagatgggcaagtggtgccgccactgcttcgcctggtgcagggggagcggcaagagcaacgtgggcacttctggagaccacgacgattctgctatgaagacactcaggagcaagatgggcaagtggtgctgccactgcttcccctggtgcagggggagcggcaagagcaacgtgggcacttctggagaccacgacgattctgctatgaagacactcaggagcaagatgggcaagtggtgctgccactgcttcccctgctgcagggggagcggcaagagcaacgtgggcacttctggagaccacgacgactctgctatgaagacactcaggagcaagatgggcaagtggtgctgccactgcttcccctgctgcagggggagcggcaagaacaaagtgggcccttggggagactacgacgacagcgctttcatggagccgaggtaccacgtccgtcgagaagatctggacaagctccacagagctgcctggtggggtaaagtccccagaaaggatctcatcgtcatgctcaaggacactgacatgaacaagaaggacaagcaaaagaggactgctctacatctggcctctgccaatggaaattcagaagtagtaaaactcctgctggacagacgatgtcaacttaatatccttgacaacaaaaagaggacagctctgacaaaggccgtacaatgccaggaagatgaatgtgcgttaatgttgctggaacatggcactgatccgaatattccagatgagtatggaaataccgctctacactatgctatctacaatgaagataaattaatggccaaagcactgctcttatacggtgctgatatcgaatcaaaaaacaagcatggcctcacaccactgttacttggtgtacatgagcaaaaacagcaagtggtgaaatttttaatcaagaaaaaagcaaatttaaatgcactggatagatatggaagaactgctctcatacttgctgtatgttgtggatcggcaagtatagtcagccttctacttgagcaaaacattgatgtatcttctcaagatctatctggacagacggccagagagtatgctgtttctagtcgtcataatgtaatttgccagttactttctgactacaaagaaaaacagatactaaaagtctcttctgaaaacagcaatccagaacaagacttaaagctgacatcagaggaagagtcacaaaggcttaaaggaagtgaaaatagccagccagaggaaatgtctcaagaaccagaaataaataagggtggtgatagaaaggttgaagaagaaatgaagaagcacggaagtactcatatgggattcccagaaaacctgactaacggtgccactgctgacaatggtgatgatggattaattccaccaaggaaaagcagaacacctgaaagccagcaatttcctgacactgagaatgaacagtatcacagtgatgaacaaaatgatactcagaagcaactttctgaagaacagaacactggaatattacaagatgagattctgattcatgaagaaaagcagatagaagtggctgaaaatgaattctgagctttctcttagttataagaaagaaaaagacctcttgcatgaaaatagtacgttgcaggaagaaattgtcatgctaagactggaactagacataatgaaacatcagagccagctaagagaaaagaaatatttggaggaaattgaaagtgtggaaaaaaagaatgataatcttttaaagggtctacaactgaatgagctcaccatggatgatgatactgccgtgctcgtcattgacaac

SEQ ID NO: 23373 - DNA, 2124 bp, Homo sapiens
  source 1..2124: mol_type = unassigned DNA
ggtagacgcgatctgctggctactaccggccttccctggctgttaaaagcagatggtggctgaggctggttcaatgccggctgcctcctctgtgaagaagccatttggtctcagaagcaagatgggcaagtggtgccgccactgcttcgcctggtgcagggggagcggcaagagcaacgtgggcacttctggagaccacgacgattctgctatgaagacactcaggagcaagatgggcaagtggtgctgccactgcttcccctggtgcagggggagcggcaagagcaacgtgggcacttctggagaccacgacgattctgctatgaagacactcaggagcaagatgggcaagtggtgctgccactgcttcccctgctgcagggggagcggcaagagcaacgtgggcacttctggagaccacgacgactctgctatgaagacactcaggagcaagatgggcaagtggtgctgccactgcttcccctgctgcagggggagcggcaagaacaaagtgggcccttggggagactacgacgacagcgctttcatggagccgaggtaccacgtccgtcgagaagatctggacaagctccacagagctgcctggtggggtaaagtccccagaaaggatctcatcgtcatgctcaaggacactgacatgaacaagaaggacaagcaaaagaggactgctctacatctggcctctgccaatggaaattcagaagtagtaaaactcctgctggacagacgatgtcaacttaatatccttgacaacaaaaagaggacagctctgacaaaggccgtacaatgccaggaagatgaatgtgcgttaatgttgctggaacatggcactgatccgaatattccagatgagtatggaaataccgctctacactatgctatctacaatgaagattgagtctcactctgtttcccaggctggagtgcagtggtgtgatcacagctcactgcaacctcgacctcccgaagctcagatggtcctccaacctcaacctcagttgtttttttctttctttctttttatttttatttttatttttatttttttttagtagagatttggtttttgccatgtttctcaggctggtcttgaactcctgggctcaagcaattcatccccctcagcctcccaaagtgctaggattacaggtcatggcctcacaccactgttacttggtgtacatgagcaaaaacagcaagtggtgaaatttttaatcaagaaaaaagcaaatttaaatgcactggatagatatggaagaactgctctcatacttgctgtatgttgtggatcggcaagtatagtcagccttctacttgagcaaaacattgatgtatcttctcaagatctatctggacagacggccagagagtatgctgtttctagtcgtcataatgtaatttgccagttactttctgactacaaagaaaaacagatactaaaagtctcttctgaaaacagcaatccagaacaagacttaaagctgacatcagaggaagagtcacaaaggcttaaaggaagtgaaaatagccagccagaggaaatgtctcaagaaccagaaataaataagggtggtgatagaaaggttgaagaagaaatgaagaagcacggaagtactcatatgggattcccagaaaacctgactaacggtgccactgctgacaatggtgatgatggattaattccaccaaggaaaagcagaacacctgaaagccagcaatttcctgacactgagaatgaacagtatcacagtgatgaacaaaatgatactcagaagcaactttctgaagaacagaacactggaatattacaagatgagattctgattcatgaagaaaagcagatagaagtggctgaaaatgaattctgagctttctcttagttataagaaagaaaaagacctcttgcatgaaaatagtacgttgcaggaagaaattgtcatgctaagactggaactagacataatgaaacatcagagccagctaagagaaaagaaatatttggaggaaattgaaagtgtggaaaaaaagaatgataatcttttaaagggtctacaactgaatgagctcaccatggatgatgatactgccgtgctcgtcattgac

SEQ ID NO: 23374 - DNA, 1926 bp, Homo sapiens
  source 1..1926: mol_type = unassigned DNA
ggtagacgcgatctgctggctactaccggccttccctggctgttaaaagcagatggtggctgaggctggttcaatgccggctgcctcctctgtgaagaagccatttggtctcagaagcaagatgggcaagtggtgccgccactgcttcgcctggtgcagggggagcggcaagagcaacgtgggcacttctggagaccacgacgattctgctatgaagacactcaggagcaagatgggcaagtggtgctgccactgcttcccctggtgcagggggagcggcaagagcaacgtgggcacttctggagaccacgacgactctgctatgaagacactcaggagcaagatgggcaagtggtgctgccactgcttcccctgctgcagggggagcggcaagaacaaagtgggcccttggggagactacgacgacagcgctttcatggagccgaggtaccacgtccgtcgagaagatctggacaagctccacagagctgcctggtggggtaaagtccccagaaaggatctcatcgtcatgctcaaggacactgacatgaacaagaaggacaagcaaaagaggactgctctacatctggcctctgccaatggaaattcagaagtagtaaaactcctgctggacagacgatgtcaacttaatatccttgacaacaaaaagaggacagctctgacaaaggccgtacaatgccaggaagatgaatgtgcgttaatgttgctggaacatggcactgatccgaatattccagatgagtatggaaataccgctctacactatgctatctacaatgaagataaattaatggccaaagcactgctcttatacggtgctgatatcgaatcaaaaaacaagcatggcctcacaccactgttacttggtgtacatgagcaaaaacagcaagtggtgaaatttttaatcaagaaaaaagcaaatttaaatgcactggatagatatggaagaactgctctcatacttgctgtatgttgtggatcggcaagtatagtcagccttctacttgagcaaaacattgatgtatcttctcaagatctatctggacagacggccagagagtatgctgtttctagtcgtcataatgtaatttgccagttactttctgactacaaagaaaaacagatactaaaagtctcttctgaaaacagcaatccagaacaagacttaaagctgacatcagaggaagagtcacaaaggcttaaaggaagtgaaaatagccagccagaggaaatgtctcaagaaccagaaataaataagggtggtgatagaaaggttgaagaagaaatgaagaagcacggaagtactcatatgggattcccagaaaacctgactaacggtgccactgctgacaatggtgatgatggattaattccaccaaggaaaagcagaacacctgaaagccagcaatttcctgacactgagaatgaacagtatcacagtgatgaacaaaatgatactcagaagcaactttctgaagaacagaacactggaatattacaagatgagattctgattcatgaagaaaagcagatagaagtggctgaaaatgaattctgagctttctcttagttataagaaagaaaaagacctcttgcatgaaaatagtacgttgcaggaagaaattgtcatgctaagactggaactagacataatgaaacatcagagccagctaagagaaaagaaatatttggaggaaattgaaagtgtggaaaaaaagaatgataatcttttaaagggtctacaactgaatgagctcaccatggatgatgatactgccgtgctcgtcattgacaacggctctggcatgtgcaaggccggctttgcaggtgacgatgccccccgggctgtcttcccttccatcgtggggtgccccaggcaccagaacatgatggggggcatgcgtc

SEQ ID NO: 23375 - DNA, 1149 bp, Homo sapiens
  source 1..1149: mol_type = unassigned DNA
ggggagcagcggttctccttatttttctactctcttgtgggaatgagttgccaagcttttacttcggctgatacctttatacctctgaattctgacgcctctgcaactctgcctctgataatgcatcacagtgctgccgagtgtctaccagtctccaaccatgccaccaatgtgatgtctacagtcccatctattttgtctttgatccaaactcctaaatgtttgtgcacacatttctcggtgacaacgttgggaaacacagcaacaggacttcattattctgttccttcctgtcattatggaaaccagccatcaacctatggagtgatggcaggtagtttaaccccttgtctttataaatttcctgaccacaccttgagtcatggatttcctcctatacaccagcctcttctggcagaggaccccacagctgctgatttcaagcaggaactcaggcggaaaagtaaattggtggaagagccaatagacatggattctccagaaatcagagaacttgaaaagtttgccaatgaatttaaagtgagacgaattaaattaggatacacccagacaaatgttggggaggccctggcagctgtgcatggctctgaattcagtcaaacaacaatctgccgatttgaaaatctgcagctcagctttaaaaatgcatgcaaactgaaagcaatattatccaaatggctggaggaagctgagcaagtaggagctttgtacaatgaaaaagtgggagcaaatgaaaggaaaagaaaacgaagaacaactataagcattgctgctaaagatgctctggagagacactttggagaacagaataaaccttcttctcaagagatcatgaggatggctgaagaactgaatctggagaaagaagtagtaagagtttggttttgcaaccggaggcagagagaaaaacgggtgaaaacaagtctgaatcagagtttattttctatttctaaggaacatcttgagtgcagataagatttttctattgtataatagcctttttctcccgtttcattcctttctcttcctcaacaaaaacagaaattacttggttgacttaaaatcattttatatcaatagcttttacagaagctttacttttccacttttttttaaaaaaaagaaacc

SEQ ID NO: 23376 - DNA, 1491 bp, Homo sapiens
  source 1..1491: mol_type = unassigned DNA
ctcagagccttcctgatgtatatatgcaggtagtgagaattgaatcggccctttgagacagtaatataataaaactctgatttggggagcagcggttctccttatttttctactctcttgtgggaatgagttgccaagcttttacttcggctgatacctttatacctctgaattctgacgcctctgcaactctgcctctgataatgcatcacagtgctgccgagtgtctaccagtctccaaccatgccaccaatgtgatgtctacagcaacaggacttcattattctgttccttcctgtcattatggaaaccagccatcaacctatggagtgatggcaggtagtttaaccccttgtctttataaatttcctgaccacaccttgagtcatggatttcctcctatacaccagcctcttctggcagaggaccccacagctgctgatttcaagcaggaactcaggcggaaaagtaaattggtggaagagccaatagacatggattctccagaaatcagagaacttgaaaagtttgccaatgaatttaaagtgagacgaattaaattaggatacacccagacaaatgttggggaggccctggcagctgtgcatggctctgaattcagtcaaacaacaatctgccgatttgaaaatctgcagctcagctttaaaaatgcatgcaaactgaaagcaatattatccaaatggctggaggaagctgagcaagtaggagctttgtacaatgaaaaagtgggagcaaatgaaaggaaaagaaaacgaagaacaactataagcattgctgctaaagatgctctggagagacactttggagaacagaataaaccttcttctcaagagatcatgaggatggctgaagaactgaatctggagaaagaagtagtaagagtttggttttgcaaccggaggcagagagaaaaacgggtgaaaacaagtctgaatcagagtttattttctatttctaaggaacatcttgagtgcagataagatttttctattgtataatagcctttttctcccgtttcattcctttctcttcctcaacaaaaacagaaattacttggttgacttaaaatcattttatatcaatagcttttacagaagctttacttttccacttttttttaaaaaaaagaaaccaacaatttaaattatattgatgttatttacttaaaataattattctcagaagccacattgtctattttaagccaaatatattaacagtaataaaatgatctctctgtctctcccgctctctttctcacacacacgcagacatatgagtatgggtttataagttccttttccaaacatgtatattagctttttaacatgtaagtcagtaatgacacatatgtaaagcacatcaccagaaatatccaattcaaaaattaaccaatgttctgctttctaccaactctactaatttgtctgaactaaaagttttgaacttaagagctggaggtgtcttata

SEQ ID NO: 23377 - DNA, 3295 bp, Homo sapiens
  source 1..3295: mol_type = unassigned DNA
gcaggcgcccatggcgggctgagtcctgcccatgccctggtggcctggaagcctgcatgggcgccgtgcaaagatcaacgttttccagaggagcttttgggctcatcactggcctggggagggcttgacacggggttcccacagcttgccccacaccaccttcacacccacacacagcaggtccccgcggggccggtgcaggctgtggctgcccgcgctgcgctgttgctctgtcccagctggctagctccgagtgtggagcgctctgggccggggccgctggggcgcgcacagtggggtgacaggcggcctggctgcagaaacgttgcaccggtgcctgaggtgggaggatgtgatgacgcggcccacgcagcgggaacccaggcctttaaaaagcccaggaaacagcctcagctcaagcggtggctccactggaggaaaacacaccccggtctcacattaaagaagccaaactgtcggcttcaaagagaaaaggcaacatcctgtcacaggccatgctctggcaaaaacccacagctccggagcaagccccagccccggcccggccataccagggcgtccgtgtgaaggagccagtgaaggaactgctgaggaggaagcgaggccacgccagcagtggggcagcacctgcacctacggcggtggtgctgccccatcagcccctggcgacctacaccacagtgggtccttcctgcctggacatggaaggttctgtgtctgcagtgacagaggaggctgccctgtgtgccggctggctctcccagcccaccccggccaccctgcagcccctggccccatggacaccttacaccgagtatgtgccccatgaagctgtcagctgcccctactcagctgacatgtatgtgcagcccgtgtgccccagctacacggtggtggggccctcctcagtgttgacctatgcctctccgccactcatcaccaatgtcacgacaagaagctccgccacgcccgcagtggggcccccgctggagggcccagagcaccaggcacccctcacctatttcccgtggcctcagcccctttccacactacccacctccaccctgcagtaccagcctccggccccagccctacctgggccccagtttgtccagctccccatctctatcccagagccagtccttcaggacatggaagaccccagaagagccgccagctcgttgaccatcgacaagctgcttttggaggaagaggatagcgacgcctatgcgcttaaccacactctctctgtggaaggcttttaggcgtggctcccacctgagtcctgttccctgaaactgggattttaaaatgagcctggaattgagccccaggttcatgcttgtttggagtagtcatttcatgactacactttctacgcacagctagaattgtagacctgtaaaccttccttcccttcttccttcccctccctccctcacttcctccctctcccccatccttccattcttcccctccctcccttcttcctttccaaccccttccttccttttcctccctcccttccttccctccttcccttctccctttccaaccccttccttccttttcctccctcccttccttccctccttcccttctccctttccttctttacctccctccctccctcgcttcttctctctttcttacttcttttttcaattctgttccattttgggaggtaattatagggattttagcaataacattttatgtcaaatgttgccaagtctgtggtccatgggctttcatttctgtcacatttcatttcttggaaaaggcctccttcctccagtgcctgctgaaccatcttagggtcactcacaccctctgtaattttaagatgtatgtggtggccggcgggaagaccagccccgacagcacctcctgagaaagtcagccaagggcctaccctgatgccagagtccttgagctgtcagttcccacagttgctcctttgtttgctcttctcagcctcggccagatttacagtccaggcagcaaaatctcaaggcctggggctcagagtagtaaggggtgggaagtgggtggcagggagaaaagaacatcagggtgggtggggacaggccagtgacgaagagagggacagaggagggatgggaacaggctgtgcatcttagttggagagaggggtgtgggaggaagcttgagtttgatgcagggaggaggaaggctgaggaatgacttggctccagattacttggttattaagaagaacaataaactaaaggaaagcattgcttgaagagatggttttgctgctctccttgaggatacgtgcaagggaagttgggctgttgtaaacagggtgaagggtgtgtttggtcggccatttctgtctcacctctaggccctctgctggtgctgtggaggccaagaccccattaagcctaaaggtgatgggtcctcgcctaggcttagtgctaccatgtgggttttgtttctttccttccttccttccttccttccttccttccttccttccttccttccttccttccttccttctttccttccttccttccttccttccttcctctctctttctttcttttttttggttttttttgggacggagtctcactccattgcccaggctggagtacaatggtgcgatcttggctcactgcacctctgtctcccaagttcaagtgattctcctgcctgagcctcccgagtagctgggattacaggtgcatgccaccatgcctggctaatttttgtatttttagtagagacggggtttcaccatgttggccaggctggtctcgaactcctgaccttgtgatccgcccgcctcagcctctcagagtgctgggatcacaggcgtgagccaccgcacccagccttttaccatgtgggtttctttagtgtcttaaaagcgtccataagccaccattctgtggaaccaaggccccctccacgcaaacaccctccctcctggggacctctggagcctcagccagaagtaccattaggtttaattttaatttgttttgctggagaaacatcaggtttgtaggagactgagttgttagcaggtgtgcttagctcttgatagtgaacgtgtaccttgggaactggctcacccacctgctaatagcaccatcgtcactattaagcagacatttcagttggtagaatccatgtagaagtcatggacttttctgggaaatgacttttctgggaaatgacagtttctttgacatattttctttgcccactttaaataaaaactctggagaaagtt

SEQ ID NO: 23378 - DNA, 4536 bp, Homo sapiens
  source 1..4536: mol_type = unassigned DNA
ggctcggcccccagagagggtggggagatgacacagttgttcccccagccctggcggggcgggcagcatggttcactccagcatgggggctccagaaataagaatgtctaagcccctggaggccgagaagcaaggtctggactccccatcagagcacacagacaccgaaagaaatggaccagacactaatcatcagaacccccaaaataagacctccccattctccgtgtccccaactggccccagtacaaagatcaaggctgaagaccccagtggcgattcagccccagcagcacccctgccccctcagccggcccagcctcatctgccccaggcccaactcatgttgacgggcagccagctagctggggacatacagcagctcctccagctccagcagctggtgcttgtgccaggccaccacctccagccacctgctcagttcctgctaccgcaggcccagcagagccagccaggcctgctaccgacaccaaatctattccagctacctcagcaaacccagggagctcttctgacctcccagccccgggccgggcttcccacacaggccgtgacccgccctacgctgcccgacccgcacctctcgcacccgcagccccccaaatgcttggagccaccatcccaccccgaggagcccagtgatctggaggagctggagcaattcgcccgcaccttcaagcaacgccgcatcaagctgggcttcacgcagggtgatgtgggcctggccatgggcaagctctacggcaacgacttcagccagacgaccatttcccgcttcgaggccctcaacctgagcttcaagaacatgtgcaaactcaagcccctcctggagaagtggctcaacgatgcagagactatgtctgtggactcaagcctgcccagccccaaccagctgagcagccccagcctgggtttcgacggcctgcccggccggagacgcaagaagaggaccagcatcgagacaaacgtccgcttcgccttagagaagagttttctagcgaaccagaagcctacctcagaggagatcctgctgatcgccgagcagctgcacatggagaaggaagtgatccgcgtctggttctgcaaccggcgccagaaggagaaacgcatcaacccctgcagtgcggcccccatgctgcccagcccagggaagccggccagctacagcccccatatggtcacaccccaagggggcgcggggaccttaccgttgtcccaagcttccagcagtctgagcacaacagttactaccttatcctcagctgtggggacgctccaccccagccggacagctggagggggtgggggcgggggcggggctgcgccccccctcaattccatcccctctgtcactcccccacccccggccaccaccaacagcacaaaccccagccctcaaggcagccactcggctatcggcttgtcaggcctgaaccccagcacgggccctggcctctggtggaaccctgccccttaccagccttgatggcagcgggaatctggtgctgggggcagccggtgcagccccggggagccctggcctggtgacctcgccgctcttcttgaatcatgctgggctgcccctgctcagcaccccgcctggtgtgggcctggtctcagcagcggctgcggctgtggcagcctccatctccagcaagtctcctggcctctcctcctcatcctcttcatcctcatcctcctcctcctccacttgcagcgagacggcagcacagacccctggaggtccaggggggcccgaggcagggtccaaacctgagtgagggccagccatgcctcccctcccattcctctggtccctgccttggtcccttgcctgggaagagggcgaggaggccagtggtggggacgcagagggtcctcagagcaggagtgacaagggaggaaagaccaaaaaaacaaccaaccaaaaaaaaaaaaaaaaaggaaagaaactaaccaacaaaagagaaaaccaaaaataatcacaacagaaaccagctgccccaaaggaaccagaggtgaaaaacaaacaaaaaaaaaccaaaaacaaaccaaaaaaaaaaaaaacccacaaaatcaaacaaaccaaaaaaccagtcgcgagccagacctcagcgtgctcaccctcactgctacgacgccaaataaaaaccccagccaggggcggagaagcctccagcaggtcagacctcatgccaccgagccctggctgtgggaccaacccccaaccctgcctcccccgtgggggctacagaaggaaaaagagaagatgccagcttcctaatcccagcccccagccctgggccagcgaagacagggcacagcctgggcagatgggctggggcttagcaccacccaccaaatgttcttttccagaaggtgaaagagaaagggcctgaacaaccttacaccaaatattcagtagcttcatccaaaggatgtacagaatttttagcattgtgctcaacagaatgtgtccctaccatgtgtccccttctcccctggcccccagctctccccacctgggcagggggtcttgctttaacctcctccctccccccagcaggggagagttcaagggaaggcctgcggacaacttttcatcccctgttcctccctcttttcccctttgaagggtgggctaggccattttgccaagttctagctctcacaagtccctcctcaaccctgtcaccctcctctgctctggaactgactccctccccagcctatgggaaggtggaaatttcaggcaagaggggatgaagacattcagttgagggcattcagttgtctttttccatcctgtctgtttccctgaaaaaaaaaaaaattcatattccagtgcctatccgtgggatccttcacgttctttgacattaaccagaaaccaaaaagagaactcacctcgcttttcccaccctgtgcccctctggtactggcgaatgcctctccctccccccacatgcacgcacgcacacaccccagtggtggggttcctcgagatggcatccccatcagggtccatgtggtggggacagtgccacagcctgtggtccccatctgagagggcgcggtggtggccaccactcccacaagacctccacaactcttggctggaccctgtgtttgaccagccccggacacgtctccactgacgacggacagaggagagacaccactgggagccaccctgccctcctgctattgtggaggccaacaaagttttgaaccgaaaaccaaaaaaacagaaacaaacaaacaataaatttaaactagaaaaaaaatttatatatatatataaacatatatatatatatatatataaaagggaaagaagatgaggactcttcaagaataagatggaaccgcgaggcggagccaagcccctgcaccggtggtccaggcccttgttccccaaggcggatggaaggacggatgcttctttctcttcacaaatacctcatggacgttgtctttgggaaagccggagggggcggctggggcagggcctgtccctcggccagggcagatggaagcgggtgggcggggctgagagagggtatcagggacaggggtgaagagccccaaactcccctcccaaatcaactgaaaaagctttaaaaaaagacaggaaaaaaaggagtaagaaagcaaaaagaacagatgaaggaaaacttaacaacttttgggtggtttgattcctcctttgatttctttttcggttctcttttgtctgacctctctcctcccctccttcctctctcctcccctccttcctctctcctctcctccttcctgtctcctctctctccctttgctctcctctcttctctctcaatcttgttctttctgtgtctctcctcaaaccaaagtgttgcagtgaaggacacgagccattgaaatcagggtggggcctgacagccgtagtgtggcccctgccccttgttgggcaggagcagagagagaggagagccctgagaccgcagggctttggcctgggcagcttccactttctgccggacactctgaggagaggcagatggagctccaggcctcagcgttctcttttttccttgtctcccttctcccacccgggaaatgaaactgttgggctgggcgacggaggcagcagagactcggccattgcaggggcctctgggtgccttgtccgggcagtggtgaagtagccgcccctcccaccccggcacgatggggcctggcacctcgtctacccaacctcaccggaatgtaagcatctccgctgaacgactccctgcccttaccctacctctgagtttgtccatgtttatttcctgaagagagaagggactggcaagagggcttgggccccagcccaagggtggagagggggccaagggctcctgaccaaataggaaggacatttgagcagagcaaaatgaaaggaattacaaccaaaaaccccctccgagaagacaggcagcatggaaggcatggtggagatgactcaaacaaaaactatgattctagacc

SEQ ID NO: 23379 - DNA, 4610 bp, Homo sapiens
  source 1..4610: mol_type = unassigned DNA
ggctcggcccccagagagggtggggagatgacacagttgttcccccagccctggcggggcgggcagcatggttcactccagcatgggggctccagaaataagaatgtctaagcccctggaggccgagaagcaaggtctggactccccatcagagcacacagacaccgaaagaaatggaccagacactaatcatcagaacccccaaaataagacctccccattctccgtgtccccaactggccccagtacaaagatcaaggctgaagaccccagtggcgattcagccccagcagcacccctgccccctcagccggcccagcctcatctgccccaggcccaactcatgttgacgggcagccagctagctggggacatacagcagctcctccagctccagcagctggtgcttgtgccaggccaccacctccagccacctgctcagttcctgctaccgcaggcccagcagagccagccaggcctgctaccgacaccaaatctattccagctacctcagcaaacccagggagctcttctgacctcccagccccgggccgggcttcccacacaggccgtgacccgccctacgctgcccgacccgcacctctcgcacccgcagccccccaaatgcttggagccaccatcccaccccgaggagcccagtgatctggaggagctggagcaattcgcccgcaccttcaagcaacgccgcatcaagctgggcttcacgcagggtgatgtgggcctggccatgggcaagctctacggcaacgacttcagccagacgaccatttcccgcttcgaggccctcaacctgagcttcaagaacatgtgcaaactcaagcccctcctggagaagtggctcaacgatgcagagactatgtctgtggactcaagcctgcccagccccaaccagctgagcagccccagcctgggtttcgacggcctgcccggccggagacgcaagaagaggaccagcatcgagacaaacgtccgcttcgccttagagaagagttttctagcgaaccagaagcctacctcagaggagatcctgctgatcgccgagcagctgcacatggagaaggaagtgatccgcgtctggttctgcaaccggcgccagaaggagaaacgcatcaacccctgcagtgcggcccccatgctgcccagcccagggaagccggccagctacagcccccatatggtcacaccccaagggggcgcggggaccttaccgttgtcccaagcttccagcagtctgagcacaacagttactaccttatcctcagctgtggggacgctccaccccagccggacagctggagggggtgggggcgggggcggggctgcgccccccctcaattccatcccctctgtcactcccccacccccggccaccaccaacagcacaaaccccagccctcaaggcagccactcggctatcggcttgtcaggcctgaaccccagcacgggaagcacaatggtggggttgagctccgggctgagtccagccctcatgagcaacaaccctttggccactatccaagccctggcctctggtggaaccctgccccttaccagccttgatggcagcgggaatctggtgctgggggcagccggtgcagccccggggagccctggcctggtgacctcgccgctcttcttgaatcatgctgggctgcccctgctcagcaccccgcctggtgtgggcctggtctcagcagcggctgcggctgtggcagcctccatctccagcaagtctcctggcctctcctcctcatcctcttcatcctcatcctcctcctcctccacttgcagcgagacggcagcacagacccctggaggtccaggggggcccgaggcagggtccaaacctgagtgagggccagccatgcctcccctcccattcctctggtccctgccttggtcccttgcctgggaagagggcgaggaggccagtggtggggacgcagagggtcctcagagcaggagtgacaagggaggaaagaccaaaaaaacaaccaaccaaaaaaaaaaaaaaaaaggaaagaaactaaccaacaaaagagaaaaccaaaaataatcacaacagaaaccagctgccccaaaggaaccagaggtgaaaaacaaacaaaaaaaaaccaaaaacaaaccaaaaaaaaaaaaaacccacaaaatcaaacaaaccaaaaaaccagtcgcgagccagacctcagcgtgctcaccctcactgctacgacgccaaataaaaaccccagccaggggcggagaagcctccagcaggtcagacctcatgccaccgagccctggctgtgggaccaacccccaaccctgcctcccccgtgggggctacagaaggaaaaagagaagatgccagcttcctaatcccagcccccagccctgggccagcgaagacagggcacagcctgggcagatgggctggggcttagcaccacccaccaaatgttcttttccagaaggtgaaagagaaagggcctgaacaaccttacaccaaatattcagtagcttcatccaaaggatgtacagaatttttagcattgtgctcaacagaatgtgtccctaccatgtgtccccttctcccctggcccccagctctccccacctgggcagggggtcttgctttaacctcctccctccccccagcaggggagagttcaagggaaggcctgcggacaacttttcatcccctgttcctccctcttttcccctttgaagggtgggctaggccattttgccaagttctagctctcacaagtccctcctcaaccctgtcaccctcctctgctctggaactgactccctccccagcctatgggaaggtggaaatttcaggcaagaggggatgaagacattcagttgagggcattcagttgtctttttccatcctgtctgtttccctgaaaaaaaaaaaaattcatattccagtgcctatccgtgggatccttcacgttctttgacattaaccagaaaccaaaaagagaactcacctcgcttttcccaccctgtgcccctctggtactggcgaatgcctctccctccccccacatgcacgcacgcacacaccccagtggtggggttcctcgagatggcatccccatcagggtccatgtggtggggacagtgccacagcctgtggtccccatctgagagggcgcggtggtggccaccactcccacaagacctccacaactcttggctggaccctgtgtttgaccagccccggacacgtctccactgacgacggacagaggagagacaccactgggagccaccctgccctcctgctattgtggaggccaacaaagttttgaaccgaaaaccaaaaaaacagaaacaaacaaacaataaatttaaactagaaaaaaaatttatatatatatataaacatatatatatatatatatataaaagggaaagaagatgaggactcttcaagaataagatggaaccgcgaggcggagccaagcccctgcaccggtggtccaggcccttgttccccaaggcggatggaaggacggatgcttctttctcttcacaaatacctcatggacgttgtctttgggaaagccggagggggcggctggggcagggcctgtccctcggccagggcagatggaagcgggtgggcggggctgagagagggtatcagggacaggggtgaagagccccaaactcccctcccaaatcaactgaaaaagctttaaaaaaagacaggaaaaaaaggagtaagaaagcaaaaagaacagatgaaggaaaacttaacaacttttgggtggtttgattcctcctttgatttctttttcggttctcttttgtctgacctctctcctcccctccttcctctctcctcccctccttcctctctcctctcctccttcctgtctcctctctctccctttgctctcctctcttctctctcaatcttgttctttctgtgtctctcctcaaaccaaagtgttgcagtgaaggacacgagccattgaaatcagggtggggcctgacagccgtagtgtggcccctgccccttgttgggcaggagcagagagagaggagagccctgagaccgcagggctttggcctgggcagcttccactttctgccggacactctgaggagaggcagatggagctccaggcctcagcgttctcttttttccttgtctcccttctcccacccgggaaatgaaactgttgggctgggcgacggaggcagcagagactcggccattgcaggggcctctgggtgccttgtccgggcagtggtgaagtagccgcccctcccaccccggcacgatggggcctggcacctcgtctacccaacctcaccggaatgtaagcatctccgctgaacgactccctgcccttaccctacctctgagtttgtccatgtttatttcctgaagagagaagggactggcaagagggcttgggccccagcccaagggtggagagggggccaagggctcctgaccaaataggaaggacatttgagcagagcaaaatgaaaggaattacaaccaaaaaccccctccgagaagacaggcagcatggaaggcatggtggagatgactcaaacaaaaactatgattctagacc

SEQ ID NO: 23380 - DNA, 4513 bp, Homo sapiens
  source 1..4513: mol_type = unassigned DNA
ggctcggcccccagagagggtggggagatgacacagttgttcccccagccctggcggggcgggcagcatggttcactccagcatgggggctccagaaataagaatgtctaagcccctggaggccgagaagcaaggtctggactccccatcagagcacacagacaccgaaagaaatggaccagacactaatcatcagaacccccaaaataagacctccccattctccgtgtccccaactggccccagtacaaagatcaaggctgaagaccccagtggcgattcagccccagcagcacccctgccccctcagccggcccagcctcatctgccccaggcccaactcatgttgacgggcagccagctagctggggacatacagcagctcctccagctccagcagctggtgcttgtgccaggccaccacctccagccacctgctcagttcctgctaccgcaggcccagcagagccagccaggcctgctaccgacaccaaatctattccagctacctcagcaaacccagggagctcttctgacctcccagccccgggccgggcttcccacacagccccccaaatgcttggagccaccatcccaccccgaggagcccagtgatctggaggagctggagcaattcgcccgcaccttcaagcaacgccgcatcaagctgggcttcacgcagggtgatgtgggcctggccatgggcaagctctacggcaacgacttcagccagacgaccatttcccgcttcgaggccctcaacctgagcttcaagaacatgtgcaaactcaagcccctcctggagaagtggctcaacgatgcagagactatgtctgtggactcaagcctgcccagccccaaccagctgagcagccccagcctgggtttcgacggcctgcccggccggagacgcaagaagaggaccagcatcgagacaaacgtccgcttcgccttagagaagagttttctagcgaaccagaagcctacctcagaggagatcctgctgatcgccgagcagctgcacatggagaaggaagtgatccgcgtctggttctgcaaccggcgccagaaggagaaacgcatcaacccctgcagtgcggcccccatgctgcccagcccagggaagccggccagctacagcccccatatggtcacaccccaagggggcgcggggaccttaccgttgtcccaagcttccagcagtctgagcacaacagttactaccttatcctcagctgtggggacgctccaccccagccggacagctggagggggtgggggcgggggcggggctgcgccccccctcaattccatcccctctgtcactcccccacccccggccaccaccaacagcacaaaccccagccctcaaggcagccactcggctatcggcttgtcaggcctgaaccccagcacgggccctggcctctggtggaaccctgccccttaccagccttgatggcagcgggaatctggtgctgggggcagccggtgcagccccggggagccctggcctggtgacctcgccgctcttcttgaatcatgctgggctgcccctgctcagcaccccgcctggtgtgggcctggtctcagcagcggctgcggctgtggcagcctccatctccagcaagtctcctggcctctcctcctcatcctcttcatcctcatcctcctcctcctccacttgcagcgagacggcagcacagacccctggaggtccaggggggcccgaggcagggtccaaacctgagtgagggccagccatgcctcccctcccattcctctggtccctgccttggtcccttgcctgggaagagggcgaggaggccagtggtggggacgcagagggtcctcagagcaggagtgacaagggaggaaagaccaaaaaaacaaccaaccaaaaaaaaaaaaaaaaaggaaagaaactaaccaacaaaagagaaaaccaaaaataatcacaacagaaaccagctgccccaaaggaaccagaggtgaaaaacaaacaaaaaaaaaccaaaaacaaaccaaaaaaaaaaaaaacccacaaaatcaaacaaaccaaaaaaccagtcgcgagccagacctcagcgtgctcaccctcactgctacgacgccaaataaaaaccccagccaggggcggagaagcctccagcaggtcagacctcatgccaccgagccctggctgtgggaccaacccccaaccctgcctcccccgtgggggctacagaaggaaaaagagaagatgccagcttcctaatcccagcccccagccctgggccagcgaagacagggcacagcctgggcagatgggctggggcttagcaccacccaccaaatgttcttttccagaaggtgaaagagaaagggcctgaacaaccttacaccaaatattcagtagcttcatccaaaggatgtacagaatttttagcattgtgctcaacagaatgtgtccctaccatgtgtccccttctcccctggcccccagctctccccacctgggcagggggtcttgctttaacctcctccctccccccagcaggggagagttcaagggaaggcctgcggacaacttttcatcccctgttcctccctcttttcccctttgaagggtgggctaggccattttgccaagttctagctctcacaagtccctcctcaaccctgtcaccctcctctgctctggaactgactccctccccagcctatgggaaggtggaaatttcaggcaagaggggatgaagacattcagttgagggcattcagttgtctttttccatcctgtctgtttccctgaaaaaaaaaaaaattcatattccagtgcctatccgtgggatccttcacgttctttgacattaaccagaaaccaaaaagagaactcacctcgcttttcccaccctgtgcccctctggtactggcgaatgcctctccctccccccacatgcacgcacgcacacaccccagtggtggggttcctcgagatggcatccccatcagggtccatgtggtggggacagtgccacagcctgtggtccccatctgagagggcgcggtggtggccaccactcccacaagacctccacaactcttggctggaccctgtgtttgaccagccccggacacgtctccactgacgacggacagaggagagacaccactgggagccaccctgccctcctgctattgtggaggccaacaaagttttgaaccgaaaaccaaaaaaacagaaacaaacaaacaataaatttaaactagaaaaaaaatttatatatatatataaacatatatatatatatatatataaaagggaaagaagatgaggactcttcaagaataagatggaaccgcgaggcggagccaagcccctgcaccggtggtccaggcccttgttccccaaggcggatggaaggacggatgcttctttctcttcacaaatacctcatggacgttgtctttgggaaagccggagggggcggctggggcagggcctgtccctcggccagggcagatggaagcgggtgggcggggctgagagagggtatcagggacaggggtgaagagccccaaactcccctcccaaatcaactgaaaaagctttaaaaaaagacaggaaaaaaaggagtaagaaagcaaaaagaacagatgaaggaaaacttaacaacttttgggtggtttgattcctcctttgatttctttttcggttctcttttgtctgacctctctcctcccctccttcctctctcctcccctccttcctctctcctctcctccttcctgtctcctctctctccctttgctctcctctcttctctctcaatcttgttctttctgtgtctctcctcaaaccaaagtgttgcagtgaaggacacgagccattgaaatcagggtggggcctgacagccgtagtgtggcccctgccccttgttgggcaggagcagagagagaggagagccctgagaccgcagggctttggcctgggcagcttccactttctgccggacactctgaggagaggcagatggagctccaggcctcagcgttctcttttttccttgtctcccttctcccacccgggaaatgaaactgttgggctgggcgacggaggcagcagagactcggccattgcaggggcctctgggtgccttgtccgggcagtggtgaagtagccgcccctcccaccccggcacgatggggcctggcacctcgtctacccaacctcaccggaatgtaagcatctccgctgaacgactccctgcccttaccctacctctgagtttgtccatgtttatttcctgaagagagaagggactggcaagagggcttgggccccagcccaagggtggagagggggccaagggctcctgaccaaataggaaggacatttgagcagagcaaaatgaaaggaattacaaccaaaaaccccctccgagaagacaggcagcatggaaggcatggtggagatgactcaaacaaaaactatgattctagaccaaaaaggaaaaaaaaaaaaaaaaaa

SEQ ID NO: 23381 - DNA, 1928 bp, Homo sapiens
  source 1..1928: mol_type = unassigned DNA
tggcggggcgggcagcatggttcactccagcatgggggctccagaaataagaatgtctaagcccctggaggccgagaagcaaggtctggactccccatcagagcacacagacaccgaaagaaatggaccagacactaatcatcagaacccccaaaataagacctccccattctccgtgtccccaactggccccagtacaaagatcaaggctgaagaccccagtggcgattcagccccagcagcacccctgccccctcagccggcccagcctcatctgccccaggcccaactcatgttgacgggcagccagctagctggggacatacagcagctcctccagctccagcagctggtgcttgtgccaggccaccacctccagccacctgctcagttcctgctaccgcaggcccagcagagccagccaggcctgctaccgacaccaaatctattccagctacctcagcaaacccagggagctcttctgacctcccagccccgggccgggcttcccacacaggccgtgacccgccctacgctgcccgacccgcacctctcgcacccgcagccccccaaatgcttggagccaccatcccaccccgaggagcccagtgatctggaggagctggagcaattcgcccgcaccttcaagcaacgccgcatcaagctgggcttcacgcagggtgatgtgggcctggccatgggcaagctctacggcaacgacttcagccagacgaccatttcccgcttcgaggccctcaacctgagcttcaagaacatgtgcaaactcaagcccctcctggagaagtggctcaacgatgcagagactatgtctgtggactcaagcctgcccagccccaaccagctgagcagccccagcctgggtttcgacggcctgcccggccggagacgcaagaagaggaccagcatcgagacaaacgtccgcttcgccttagagaagagttttctagcgaaccagaagcctacctcagaggagatcctgctgatcgccgagcagctgcacatggagaaggaagtgatccgcgtctggttctgcaaccggcgccagaaggagaaacgcatcaacccctgcagtgcggcccccatgctgcccagcccagggaagccggccagctacagcccccatatggtcacaccccaagggggcgcggggaccttaccgttgtcccaagcttccagcagtctgagcacaacagttactaccttatcctcagctgtggggacgctccaccccagccggacagctggagggggtgggggcgggggcggggctgcgccccccctcaattccatcccctctgtcactcccccacccccggccaccaccaacagcacaaaccccagccctcaaggcagccactcggctatcggcttgtcaggcctgaaccccagcacgggccctggcctctggtggaaccctgccccttaccagccttgatggcagcgggaatctggtgctgggggcagccggtgcagccccggggagccctggcctggtgacctcgccgctcttcttgaatcatgctgggctgcccctgctcagcaccccgcctggtgtgggcctggtctcagcagcggctgcggctgtggcagcctccatctccagcaagtctcctggcctctcctcctcatcctcttcatcctcatcctcctcctcctccacttgcagcgagacggcagcacagacccctggaggtccaggggggcccgaggcagggtccaaacctgagtgagggccagccatgcctcccctcccattcctctggtccctgccttggtcccttgcctgggaagagggcgaggaggccagtggtggggacgcagagggtcctcagagcaggagtgacaagggaggaaagaccaaaaaaacaaccaaccaaaaaaaaaaaaaaaaaggaaagaaactaacc

SEQ ID NO: 23382 - DNA, 1776 bp, Homo sapiens
  source 1..1776: mol_type = unassigned DNA
gagagggtggggagatgacacagttgttcccccagccctggcggggcgggcagcatggttcactccagcatgggggctccagaaataagaatgtctaagcccctggaggccgagaagcaaggtctggactccccatcagagcacacagacaccgaaagaaatggaccagacactaatcatcagaacccccaaaataagacctccccattctccgtgtccccaactggccccagtacaaagatcaaggctgaagaccccagtggcgattcagccccagcagcacccctgccccctcagccggcccagcctcatctgccccaggcccaactcatgttgacgggcagccagctagctggggacatacagcagctcctccagctccagcagctggtgcttgtgccaggccaccacctccagccacctgctcagttcctgctaccgcaggcccagcagagccagccaggcctgctaccgacaccaaatctattccagctacctcagcaaacccagggagctcttctgacctcccagccccgggccgggcttcccacacagccccccaaatgcttggagccaccatcccaccccgaggagcccagtgatctggaggagctggagcaattcgcccgcaccttcaagcaacgccgcatcaagctgggcttcacgcagggtgatgtgggcctggccatgggcaagctctacggcaacgacttcagccagacgaccatttcccgcttcgaggccctcaacctgagcttcaagaacatgtgcaaactcaagcccctcctggagaagtggctcaacgatgcagagactatgtctgtggactcaagcctgcccagccccaaccagctgagcagccccagcctgggtttcgacggcctgcccggccggagacgcaagaagaggaccagcatcgagacaaacgtccgcttcgccttagagaagagttttctagcgaaccagaagcctacctcagaggagatcctgctgatcgccgagcagctgcacatggagaaggaagtgatccgcgtctggttctgcaaccggcgccagaaggagaaacgcatcaacccctgcagtgcggcccccatgctgcccagcccagggaagccggccagctacagcccccatatggtcacaccccaagggggcgcggggaccttaccgttgtcccaagcttccagcagtctgagcacaacagcacaaaccccagccctcaaggcagccactcggctatcggcttgtcaggcctgaaccccagcacgggccctggcctctggtggaaccctgccccttaccagccttgatggcagcgggaatctggtgctgggggcagccggtgcagccccggggagccctggcctggtgacctcgccgctcttcttgaatcatgctgggctgcccctgctcagcaccccgcctggtgtgggcctggtctcagcagcggctgcggctgtggcagcctccatctccagcaagtctcctggcctctcctcctcatcctcttcatcctcatcctcctcctcctccacttgcagcgagacggcagcacagacccctggaggtccaggggggcccgaggcagggtccaaacctgagtgagggccagccatgcctcccctcccattcctctggtccctgccttggtcccttgcctgggaagagggcgaggaggccagtggtggggacgcagagggtcctcagagcaggagtgacaagggaggaaagaccaaaaaaacaaccaaccaaaaaaaaaaaaaaaaaggaaagaaa

SEQ ID NO: 23383 - DNA, 1703 bp, Homo sapiens
  source 1..1703: mol_type = unassigned DNA
ggcccccagagagggtggggagatgacacagttgttcccccagccctggcggggcgggcagcatggttcactccagcatgggggctccagaaataagaatgtctaagcccctggaggccgagaagcaaggtctggactccccatcagagcacacagacaccgaaagaaatggaccagacactaatcatcagaacccccaaaataagacctccccattctccgtgtccccaactggccccagtacaaagatcaaggctgaagaccccagtggcgattcagccccagcagcacccctgccccctcagccggcccagcctcatctgccccaggcccaactcatgttgacgggcagccagctagctggggacatacagcagctcctccagctccagcagctggtgcttgtgccaggccaccacctccagccacctgctcagttcctgctaccgcaggcccagcagagccagccaggcctgctaccgacaccaaatctattccagctacctcagcaaacccagggagctcttctgacctcccagccccgggccgggcttcccacacaggccgtgacccgccctacgctgcccgacccgcacctctcgcacccgcagccccccaaatgcttggagccaccatcccaccccgaggagcccagtgatctggaggagctggagcaattcgcccgcaccttcaagcaacgccgcatcaagctgggcttcacgcagggtgatgtgggcctggccatgggcaagctctacggcaacgacttcagccagacgaccatttcccgcttcgaggccctcaacctgagcttcaagaacatgtgcaaactcaagcccctcctggagaagtggctcaacgatgcagagactatgtctgtggactcaagcctgcccagccccaaccagctgagcagccccagcctgggtttcgacggcctgcccggccggagacgcaagaagaggaccagcatcgagacaaacgtccgcttcgccttagagaagagttttctagcgaaccagaagcctacctcagaggagatcctgctgatcgccgagcagctgcacatggagaaggaagtgatccgcgtctggttctgcaaccggcgccagaaggagaaacgcatcaacccctgcagtgcggcccccatgctgcccagcccagggaagccggccagctacagcccccatatggtcacaccccaagggggcgcggggaccttaccgttgtcccaagcttccagcagtctgagcacaacagttactaccttatcctcagctgtggggacgctccaccccagccggacagctggagggggtgggggcgggggcggggctgcgccccccctcaattccatcccctctgtcactcccccacccccggccaccaccaacagcacaaaccccagccctcaaggcagccactcggctatcggcttgtcaggcctgaaccccagcacggggtaagtgggtgcacgtgggaagctgtggggagaagcagggtcgctgctgcttctagggtggggagcggcaccccagttatgttggcaggtccctgcccctgctaatgcctctgctttgcctcttgcagaagcacaatggtggggttgagctccgggctgagtccagccctcatgagcaacaaccctttggccactatccaaggtgcgtgctgcctcatgtcacacccatcgtcaccagccc

SEQ ID NO: 23384 - DNA, 2053 bp, Homo sapiens
  source 1..2053: mol_type = unassigned DNA
ctcggcccccagagagggtggggagatgacacagttgttcccccagccctggcggggcgggcagcatggttcactccagcatgggggctccagaaataagaatgtctaagcccctggaggccgagaagcaaggtctggactccccatcagagcacacagacaccgaaagaaatggaccagacactaatcatcagaacccccaaaataagacctccccattctccgtgtccccaactggccccagtacaaagatcaaggctgaagaccccagtggcgattcagccccagcagcacccctgccccctcagccggcccagcctcatctgccccaggcccaactcatgttgacgggcagccagctagctggggacatacagcagctcctccagctccagcagctggtgcttgtgccaggccaccacctccagccacctgctcagttcctgctaccgcaggcccagcagagccagccaggcctgctaccgacaccaaatctattccagctacctcagcaaacccagggagctcttctgacctcccagccccgggccgggcttcccacacagccccccaaatgcttggagccaccatcccaccccgaggagcccagtgatctggaggagctggagcaattcgcccgcaccttcaagcaacgccgcatcaagctgggcttcacgcagggtgatgtgggcctggccatgggcaagctctacggcaacgacttcagccagacgaccatttcccgcttcgaggccctcaacctgagcttcaagaacatgtgcaaactcaagcccctcctggagaagtggctcaacgatgcagagactatgtctgtggactcaagcctgcccagccccaaccagctgagcagccccagcctgggtttcgacggcctgcccggccggagacgcaagaagaggaccagcatcgagacaaacgtccgcttcgccttagagaagagttttctagcgaaccagaagcctacctcagaggagatcctgctgatcgccgagcagctgcacatggagaaggaagtgatccgcgtctggttctgcaaccggcgccagaaggagaaacgcatcaacccctgcagtgcggcccccatgctgcccagcccagggaagccggccagctacagcccccatatggtcacaccccaagggggcgcggggaccttaccgttgtcccaagcttccagcagtctgagcacaacagttactaccttatcctcagctgtggggacgctccaccccagccggacagctggagggggtgggggcgggggcggggctgcgccccccctcaattccatcccctctgtcactcccccacccccggccaccaccaacagcacaaaccccagccctcaaggcagccactcggctatcggcttgtcaggcctgaaccccagcacgggaagcacaatggtggggttgagctccgggctgagtccagccctcatgagcaacaaccctttggccactatccaagccctggcctctggtggaaccctgccccttaccagccttgatggcagcgggaatctggtgctgggggcagccggtgcagccccggggagccctggcctggtgacctcgccgctcttcttgaatcatgctgggctgcccctgctcagcaccccgcctggtgtgggcctggtctcagcagcggctgcggctgtggcagcctccatctccagcaagtctcctggcctctcctcctcatcctcttcatcctcatcctcctcctcctccacttgcagcgagacggcagcacagacccctggaggtccaggggggcccgaggcagggtccaaacctgagtgagggccagccatgcctcccctcccattcctctggtccctgccttggtcccttgcctgggaagagggcgaggaggccagtggtggggacgcagagggtcctcagagcaggagtgacaagggaggaaagaccaaaaaaacaaccaaccaaaaaaaaaaaaaaaaaggaaagaaactaaccaacaaaagagaaaaccaaaaataatcacaacagaaaccagctgccccaaa

SEQ ID NO: 23385 - DNA, 3013 bp, Homo sapiens
  source 1..3013: mol_type = unassigned DNA
gcgacagtggcggcgacggctccggcagcggctcccgcggcggcggcggccgggaactggaggaaggagaccctggcttcgcaggggccccggctggggcagaggcgaggggcctgggggggcgctggctttggccccgcctggggcaggatggtgaatctggagtccatgcacacagatatcaagatgagtggggatgtagccgattccacggatgctcgcagcactctcagccaggtggagccaggaaatgatcgaaatggcctagatttcaacaggcagattaaaaccgaagatctcagtgactccctgcagcagaccctctcccatcggccatgccacctgagtcaaggacctgccatgatgtccggaaaccaaatgtctgggctaaatgccagcccatgtcaggacatggcttccctccatccgctccagcagcttgtgctggttcccggccacttacagtctgtatcccagttcctgctatctcagacccagcctgggcagcaaggtctgcagccaaatctcctcccctttccacagcaacaaagcggtctcctcctcccacagactgggccgggactggcatcccaggcatttgggcaccctgggctgccaggatcctctttagaaccccacctggaagcatcccagcatctcccagtgcccaagcatctacccagctctggaggggccgatgagcccagtgacctcgaggagctggagaagtttgccaagaccttcaagcagaggcgcattaagctgggcttcacacagggagatgtggggctggcgatgggaaagctgtatggcaacgacttcagccagaccaccatctcacgatttgaggccctcaacctgagcttcaagaacatgtgcaagctcaagcccctgctggagaagtggctgaatgatgcagagtcctctccgtcagacccctcagtgagcacgcccagctcctaccccagcctcagtgaagtatttggtaggaagagaaagaaacggaccagcatcgagaccaacatccgcctgactctggagaagaggtttcaagataacccaaaacccagctcggaggagatctccatgattgcagagcagttgtccatggagaaggaggtggtgagggtctggttctgcaaccgacgccaaaaggagaagcgaatcaactgccctgtggccacacccatcaaaccacctgtctacaactcccggctggtatctccctcagggtctctgggccccctctctgtccctcctgtccacagtaccatgcctggaacagtaacgtcatcctgttcccctgggaacaacagcaggccttcatctcctggctcaggactccacgccagcagccccactgcatctcaaaataactccaaagcagcagtgaactccgcctccagttttaactcttcaggatcttggtaccgatggaatcattccacctacctccactgagaccaaaaagtttctcctactccagctggccctgtattccccctggaaggaagggaatcatgccttctatatacagacagattgccttcagaagagtggaagaaaatctccactatcaatgaacccagactcttgtcttcttcaagagcaagggcctccggagatccaaactgtgattgaaccaagtgcagactcctaatgctcttgaaatacacagcccctcctaggagcttaccattttcaccttccttgcctatgcccttgccttctagttccaaatattttagccagcttcactgtggcaatagtctttcagagaaaagacttcttgctgttattctccaactcatccgtgggcttctggggacagccatttggctggggtgccaaacaccagaaggggagataatagttttgactctgaacttggccacaacccctgaactgatcccaaaatctgtgaaaagatttgaatctgatatctccaccaaagccttgatgttttctctgtacagctaagttttctgatggaatcttcatctcaccccattttctttttaacctcgcccccttttctacaatcaaatccattcattattgcgccctccaggtcccctcctttttgcagaaggtgtaaaagagctgcccttggtgggtgccctgggcatgttgcaacgcctgctggtgcccttctgtctgtccacgtctgcctagggctcaggagtgcttgttctttcccttcctccctgtgtttctctttatcctgtcccctctcctttctcctggcagcagaaaaggaagaacacaagagcaaacacacaacaatgatggtggcaaagtacctgtatatagccctttcccattttttgcattatgttcttaactccttaatgtggaattttccagcaaaatgtttaactcaggtgtgatttttgaaaatgtctctgtaatattttatcttctttaaaaaaaagggggggaaataccaaagtgtgaaatactgtgctaccttccagagttcccacatgggctgggatttttttttctttttcttttttttttttttttttgagacagtcttgctccagcccaggctggagtgcagtggcatgatcttggctcactgcatgctctgccacttgggttcaagcgattctcctgcctcagcctctcaagtagcgggattacaggcgcccaccaccaaaaattagcccagctaatttttgtatttttagtagagatggggtttcaccatgttggtcaggctggtcttgaactcctgacctcctgatccacccacctcagcgtcccgaagtgctgggattacaggtgtgagccaccgcgcctggcctgggctgggaatctttgttgacttctttgggaacattatctctagagtctgcttttttgtgggccagtttgtagagatgtaacatgaagccattccagaaatggtaacttaaaaaaaaaaagactacatgtctaggaaactgttgagattcaaaggaatctcactgttcctaaataaatgtgtatagtgattatgaaaagt

SEQ ID NO: 23386 - DNA, 1662 bp, Homo sapiens
  source 1..1662: mol_type = unassigned DNA
ctcactccagcccagagctcaaaaaaccggtttcatggagtctccaagaactgctaaaggaggaagggatatcaagatgagtggggatgtagccgattccacggatgctcgcagcactctcagccaggtggagccaggaaatgatcgaaatggcctagatttcaacaggcagattaaaaccgaagatctcagtgactccctgcagcagaccctctcccatcggccatgccacctgagtcaaggacctgccatgatgtccggaaaccaaatgtctgggctaaatgccagcccatgtcaggacatggcttccctccatccgctccagcagcttgtgctggttcccggccacttacagtctgtatcccagttcctgctatctcagacccagcctgggcagcaaggtctgcagccaaatctcctcccctttccacagcaacaaagcggtctcctcctcccacagactgggccgggactggcatcccaggcatttgggcaccctgggctgccaggatcctctttagaaccccacctggaagcatcccagcatctcccagtgcccaagcatctacccagctctggaggggccgatgagcccagtgacctcgaggagctggagaagtttgccaagaccttcaagcagaggcgcattaagctgggcttcacacagggagatgtggggctggcgatgggaaagctgtatggcaacgacttcagccagaccaccatctcacgatttgaggccctcaacctgagcttcaagaacatgtgcaagctcaagcccctgctggagaagtggctgaatgatgcagagtcctctccgtcagacccctcagtgagcacgcccagctcctaccccagcctcagtgaagtatttggtaggaagagaaagaaacggaccagcatcgagaccaacatccgcctgactctggagaagaggtttcaagataacccaaaacccagctcggaggagatctccatgattgcagagcagttgtccatggagaaggaggtggtgagggtctggttctgcaaccgacgccaaaaggagaagcgaatcaactgccctgtggccacacccatcaaaccacctgtctacaactcccggctggtatctccctcagggtctctgggccccctctctgtccctcctgtccacagtaccatgcctggaacagtaacgtcatcctgttcccctgggaacaacagcaggccttcatctcctggctcaggactccacgccagcagccccactgcatctcaaaataactccaaagcagcagtgaactccgcctccagttttaactcttcaggatcttggtaccgatggaatcattccacctacctccactgagaccaaaaagtttctcctactccagctggccctgtattccccctggaaggaagggaatcatgccttctatatacagacagattgccttcagaagagtggaagaaaatctccactatcaatgaacccagactcttgtcttcttcaagagcaagggcctccggagatccaaactgtgattgaaccaagtgcagactcctaatgctcttgaaatacacagcccctcctaggagcttaccattttcaccttccttgcctatgcccttgccttctagttccaaatattttagccagcttcactgtggcaatagtct

SEQ ID NO: 23387 - DNA, 2928 bp, Homo sapiens
  source 1..2928: mol_type = unassigned DNA
cggcggcggcggcgcggcgcagggcgcggggcggcatggccaccaccgcgcagtacctgccgcggggccccggtggcggagccgggggcaccgggccgcttatgcacccggacgccgcggcggcggcggcggcggcggcggccgcggagcgattgcatgcaggggccgcgtaccgcgaagtgcagaagctgatgcaccacgagtggctgggcgcgggcgcgggccaccccgtgggcctagcgcacccccagtggctacccacgggaggaggcggcggcggcgattgggccggcggcccgcacctagaacacggcaaggcaggcggcggcggcaccggccgagccgacgacggcggcggcggcggaggtttccacgcgcgcctggtgcaccagggggcggcccacgcgggcgcggcatgggcgcagggcagcacagcgcaccacttgggcccggccatgtcgccctcgcccggggccagcgggggccaccagccccagccgctcgggctgtacgcgcaggcggcctacccggggggcggcggcggcggcctggccgggatgctggcggcgggcggtggcggcgcggggccgggcctgcaccacgcgctgcacgaggatggccacgaggcgcagctggagccgtcgccgccgccgcatctgggcgcccacggacacgcacacggacatgcacacgcgggcggcctgcacgcggcggcggcgcacctgcacccgggcgcgggcggcggcggctcatcggtgggcgagcactcggacgaggatgcgcccagctcggacgacctggagcagttcgccaagcagttcaagcagcggcgcatcaagctgggctttacgcaggccgacgtggggctggcgctgggcacgctctacggtaacgtgttctcgcagaccaccatctgccgcttcgaggccctgcagctgagcttcaagaacatgtgcaagctcaagccgctgctcaacaagtggctggaggagaccgactcgtccagcggcagccccaccaacctggacaagatcgcggcgcagggccgcaagcgcaagaagcgcacgtccatcgaggtgggggtcaaaggcgcgctcgagagccactttctcaagtgccccaagccctcggcgcacgagatcaccggcttggcagacagcctgcagctggagaaggaggtggtgcgcgtctggttctgcaaccggcggcagaaggagaagcgcatgacccctgcggccggcgcgggccacccgcccatggacgatgtatacgcgcctggggagctagggcctggcgggggcggcgcatcgccaccctccgcgcccccaccgcccccgccggcggcgctgcaccaccaccaccaccacacactgcccggctcagtgcagtgaccccgcgggccgggcccccgccggcgcgctgcagggcgcgggcgcgcagcccgcccgcgcggcctggactctttttgttcggttgctttggattttacaaaaaaaaaaaaaagcccagaaactttcgaacaaaaccaaacacccggacgaccctctccggtgagcggcgaagacagcccggtaggctgcgtcgcccgagccccgggagagaggagcgaagatccggaactcgccaactcaccccgggcatcctgcccgccgcctgctctctgcccccatcccctcgacgacccccgcccctgcccccccgggctgttcggggccggatcccggcagcggcctccccaaagcgacaggtaacgcagtgcggggttagggattccccgggagagaggacgaagcgaggagagttctccatcccctctccccgcgtggactcctgagcctgcgggtccagggtggggggctgtcactttattcgctacacgcctcttctctcctataaggatgcgccccaccccgctttcccctttctccgggcttggttttttacggtttttatttattcgtggagcctctcggctcctggggtccttctaactccgcccgcgcccttaatttaaatcgcagtatactgtatttatcggggccccggaggggaggtcgcgagagccgcgtctgtgtataaaagcaggaaatagccaaagctttaatctagcctaatttatttttccccttatatttccctaccctaccctccccccaaaaaaaagcaaaaaaaaaaaaaaaaaactaacaaaaaaaattcgagtgttcatttttcgtttcgtttcatccgagccccggcttggttcccggccacgccggaggggtctgcgctcccacacacccagacgggaaggggcttctgccctgctgcagaccgaccgccgcatagcgcggcccctgctccccgcggggccctgccctcctggccacaccaaacgaaacttggaaaagttagagagattgttttttaaccagctgtagaaataagccgttccctgagaaccctccgcctgattccctgcagcttccctctgctccctttccagcccgccgggatgcgggatgccaggggaggccgggagagaaattccccaagtttggggtgaggtgggaaccatgtaaatatgtgagatatgtacacactggcggggagaagaaacattttgtgcttggtttttatttttggttttccgggttacccttccttcctaccctaaaggattttgtacactgactaatccgaaaaagatattttaatatgatttccgaatttctgacccatctctatttattttctggatgtgtttggagcttcccccttctccgtttcttcttctgtttgttaaggtttgaatttaaattttgttattttatttttattattttttgaaacaatgtttcggtgcattctctttgtatctttattgaaaaaaaaataatgtagactgggaagttccctttatatttatgttatagtaaatattttatt

SEQ ID NO: 23388 - DNA, 4081 bp, Homo sapiens
  source 1..4081: mol_type = unassigned DNA
agtaatagcaggagcagcaacagaaggcgtcggagcgggcgtcggagctgcccgctgtgggagagagaggagacagaaagagcgagcgaggagagggagcccgaggcgaaaaagtaactgtcaaatgcgcggctcctttaaccggagcgctcagtccggctccgagagtcatggcgaccgcagcgtctaaccactacagcctgctcacctccagcgcctccatcgtgcacgccgagccgcccggcggcatgcagcagggcgcggggggctaccgcgaagcgcagagcctggtgcagggcgactacggcgctctgcagagcaacggacacccgctcagccacgctcaccagtggatcaccgcgctgtcccacggcggcggcggcgggggcggtggcggcggcggggggggcgggggcggcggcgggggcggcggcgacggctccccgtggtccaccagccccctgggccagccggacatcaagccctcggtggtggtgcagcagggcggccgcggagacgagctgcacgggccaggcgccctgcagcagcagcatcagcagcagcaacagcaacagcagcagcaacagcagcaacagcagcagcagcagcagcaacagcggccgccgcatctggtgcaccacgccgctaaccaccacccgggacccggggcatggcggagcgcggcggctgcagcgcacctcccaccctccatgggagcgtccaacggcggcttgctctactcgcagcccagcttcacggtgaacggcatgctgggcgccggcgggcagccggccggtctgcaccaccacggcctgcgggacgcgcacgacgagccacaccatgccgaccaccacccgcacccgcactcgcacccacaccagcagccgccgcccccgccgcccccgcagggtccgcctggccacccaggcgcgcaccacgacccgcactcggacgaggacacgccgacctcggacgacctggagcagttcgccaagcagttcaagcagcggcggatcaaactgggatttacccaagcggacgtggggctggctctgggcaccctgtatggcaacgtgttctcgcagaccaccatctgcaggtttgaggccctgcagctgagcttcaagaacatgtgcaagctgaagcctttgttgaacaagtggttggaggaggcggactcgtcctcgggcagccccacgagcatagacaagatcgcagcgcaagggcgcaagcggaaaaagcggacctccatcgaggtgagcgtcaagggggctctggagagccatttcctcaaatgccccaagccctcggcccaggagatcacctccctcgcggacagcttacagctggagaaggaggtggtgagagtttggttttgtaacaggagacagaaagagaaaaggatgacccctcccggagggactctgccgggcgccgaggatgtgtacggggggagtagggacactccaccacaccacggggtgcagacgcccgtccagtgaactcgagctgggggaggggcagagcgcggggctccccctccccttcggtccttggccctttcccggccctcttgttccctctctaacttctgattgttcttttatttttaattattatttccccgtcccttaaaaagacaaaaaaaataaggcaaaaggaaagcaactaagacactggactatcctttaaaggtagcaggtgtaatgatgtgttttgacctttgcaggcgagtaaccaggcaatggagtggagtgtctcctggagagagtgaggagagtgtgtgatagctagaaagagagagagacagagagatggcaagcactgagataaatacctggcaaaactaaataaattaccaaaaaggaaaaaaaatccaccaaaccatgataaacacaaaatgcagcttcctgatgcttagagttggcacatgctgctgtgtttatttattgtggattcccatcaggaaagaggaaaaaatacacatgttctttcatataggcaaaatttaaccacataaatttgcactgcaagaaaattgaagtttacgtgaacaaattcatgagcatattttctctttctccccaccgttaatttgggagttgccgttttgggggattttgttttgctttgctttattcatcggagagagttgaagccagctcttggccactctccatttctaatgttcttgtgttgccccttcttcgtactgtttgtgaactttggttaccttcacattccccttacgagggtgtaacatctatttgttcctcttaccaaagcaaaaggattggcttcatacaaaatagacaattctctgatttcaggaaatgtgcatggtctacccgctttatcgaaggcaagaatccggtttggaatataaaaataagcattggttgttcttaccagccacaaagtaaacttcattttcaggcagtgtttctgggggaggttatggagggaagaaaaaagaaaaatcgatagtgagtgactgattgcttcattttatcaggcgggcccattgtgaaagagctcaggggaaatgtggaggttaaatatatttccagagttgtccagcagaaagaaagtggcactttgaagagaactagggaagtacatatcttcagatatccctatatagttctctaccttcagttttagtaacaattatgaagaattatttgtgctgacagcagcagttaaactttgtttctctaatagctttttttttacataaaaaaagacccaggaacttaatagtgtatgcataagactgtgttttttagcacacagatacccacagcatacactgacgatctccacgcagtagacaggttttgtcttcactagctcatttgtttatcaagtcatatttagggtcccacaccctcttttcctgtaatttattgcagaatacaccactttgacttggacagctttctgccccctctttcactaaggaaggcaaatgaagtgaaaaaaaaaaatgccattttcaatccttcctttctcccctttgttaatagttttaagtgaatttttgaccttatcttaatggaaaacggttaactccaaacacaaaagactctactggaaagtgtaggtgaaaaaacttgtaactgtattgaaaataaataccattaaactgtgatcagttaaaatttaaaagaaaaatcagcacaaaagggcgctaaaagggaaaacactttttattaatcttaaaagtttgggggtttttttccagttaggtattagataaatttttattttaaaaaatgaaagtctcactaccataaaattatggttcagcatcagattagcattgcactcagtagtctttaaggttttaggaaatatgctttatattgtcttttcaaacacctgtgattgtttcattttccatgtttttgcaagataaatggtgacttataatgggcatatttatttgcctgtatttcatttcccccaatgaatgtcacaaggagatgggcacggagctgcttcgggtgcatcacgctgctcgttcctgaggtatgggaactggcctttagtgaagctatccagagcagggcaaatagccactggtaaagggaggaaatgaatttccagatacttattaccaagtaggtaaggtcagaagctggagttcagagaatgtgtctacagcttctctgactcttataggtttactaagatgaaagttaccactgaaccttaccactatgtatatatgtttaatatctgtcttttgaaatgcagaaatagtttaaatgtttctttgtctatttttctttttttttaatgctacccagggaaatattttcatatcatttttaagtggcctgcctcaatgtatatttatttcttttgaaacaaaaaggttctggaaactgtttttctgtagctttaaatgaataggtgagcaaaatctatatgggatgtaatttttttgttcagtctcttaaaaaatactttgttttggtacatttggttgtgcttgtggggaaaataaaaacgcagagatccttatatatttatgttaaagtaatattttattatctacataaaacagaaatgc

SEQ ID NO: 23389 - DNA, 1131 bp, Homo sapiens
  source 1..1131: mol_type = unassigned DNA
atggcgaccgcagcgtctaaccactacagcctgctcacctccagcgcctccatcgtgcacgccgagccgcccggcggcatgcagcagggcgcggggggctaccgcgaagcgcagagcctggtgcagggcgactacggcgctctgcagagcaacggacacccgctcagccacgctcaccagtggatcaccgcgctgtcccacggcggcgacggctccccgtggtccaccagccccctgggccagccggacatcaagccctcggtggtggtgcagcagggcggccgcggagacgagctgcacgggccaggcgccctgcagcagcagcatcagcagcagcaacagcaacagcagcagcaacagcagcaacagcagcagcagcagcagcaacagcggccgccgcatctggtgcaccacgccgctaaccaccacccgggacccggggcatggcggagcgcggcggctgcagcgcacctcccaccctccatgggagcgtccaacggcggcttgctctactcgcagcccccgccgcccccgcagggtccgcctggccacccaggcgcgcaccacgacccgcactcggacgaggacacgccgacctcggacgacctggagcagttcgccaagcagttcaagcagcggcggatcaaactgggatttacccaagcggacgtggggctggctctgggcaccctgtatggcaacgtgttctcgcagaccaccatctgcaggtttgaggccctgcagctgagcttcaagaacatgtgcaagctgaagcctttgttgaacaagtggttggaggaggcggactcgtcctcgggcagccccacgagcatagacaagatcgcagcgcaagggcgcaagcggaaaaagcggacctccatcgaggtgagcgtcaagggggctctggagagccatttcctcaaatgccccaagccctcggcccaggagatcacctccctcgcggacagcttacagctggagaaggaggtggtgagagtttggttttgtaacaggagacagaaagagaaaaggatgacccctcccggagggactctgccgggcgccgaggatgtgtacggggggagtagggacactccaccacaccacggggtgcagacgcccgtccagtga

SEQ ID NO: 23390 - DNA, 4961 bp, Homo sapiens
  source 1..4961: mol_type = unassigned DNA
atggccacggcggcttctaacccctacctgccggggaacagcctgctcgcggccggctctattgtgcactcggacgcggcaggggctggcggcggcgggggtggcggcggcggcggcggcgggggcggcgcagggggcgggggcggcggcatgcagccgggcagcgccgccgtgacctcgggcgcctaccggggggacccgtcctctgtcaagatggtccagagcgacttcatgcagggggccatggccgccagcaacggcggccatatgctgagccacgcgcaccagtgggtcacagccctgccccacgccgccgccgccgccgccgctgccgccgccgccgccgtggaggcgagctcgccgtggtcgggcagcgccgtgggcatggctggcagcccccagcagccaccgcagccgccgccgccaccgccgcagggccccgacgtgaagggcggcgccgggcgcgacgacctgcacgcgggcacagcgctgcaccaccgcgggccgccgcacctcggacccccgccgccgcccccacaccagggccaccctgggggctggggggcggccgccgctgccgcagccgcagccgccgccgccgccgccgccgcgcacctcccgtccatggccgggggccagcagccgccgccgcagagtctgctctactcgcagcccggaggcttcacggtgaacggcatgctgagcgcgccaccggggcccggcggcggcggcggcggcgcgggcggtggagcccagagcttggtgcacccggggctggtgcgcggggacacgccagagctggccgagcaccaccaccaccaccaccaccacgcgcatcctcacccgccgcacccgcaccacgcgcagggacccccgcaccacggcggcggcggcggcggcgcggggcctggactcaacagccacgacccgcactcggacgaggacacgccgacgtcggacgacctggagcagttcgccaagcagttcaagcagcggcgcatcaagctgggcttcacgcaggccgacgtggggttggcgctgggcacactctacggcaacgtgttctcgcagaccaccatctgccgcttcgaggccctgcagctgagcttcaagaacatgtgcaagctcaagccgctgctgaacaagtggctggaggaggcggactcaagcaccggcagccccacaagcatcgacaagatcgcggcgcagggccgcaagcgcaagaagcggacctctatcgaggtgagcgtcaagggcgcgctggagagccacttcctcaagtgccccaagccctccgcgcaggagatcaccaacctggccgacagcctgcagctcgagaaggaggtggtgcgggtctggttctgcaatcggcgccaaaaggagaagcgcatgacgccgcccgggatccaacagcagacgcccgacgacgtctactcgcaggtgggcaccgtgagcgccgacacgccgccgcctcaccacgggctgcagacgagcgttcagtgaagccagggcgcagagcgaagagggccgccgccgccgccgcctccgcagccgccgtcagcaccgccgccgcccctgccgccgccgccgccgccgccgccgccgctgccgccgccgcgccgaccctgcacctgggccgctccgggctccagcccaggcccatccgccgccctcccctccacccagagacaggcatgcccgcccttggaggagaaaacgcgggagaaacggaccaaggaggcatttttgcagtccaaggaaggaggggccaaaaaataaaaagcataataaacacccagactgttttgtatacatatataacaaacaaaaccggaagagaaaaagggggcgatcatgagatctcgttcatactgtggtggtgtttcgtttttgtttttgtttttaaagaagggtgaagatgcctgacgcacgaaaactgcactcgtgaggtttttccaccctgagatgacctacacggcagcggtggacagcacctgcctcgtcttctcctctttgaaaaaaagagagagagagagtcccctttcctttcactttctccctccaaaacagctgcctaaagagatccacggaaactttatttcctgggagcgacctgagagaaaacagaggcaccaggttccatcaggggacgacaccgtgctctgggaccctgtttttcttggccatattaaagtcatttggaaacaaatcaactctgaaatgggaaggaggggggaaaaacagtctccaagaaaaaaataattatattgacagcttctgaaactaacagactgaatagcaaagccaaaagaaaagtatcctcaaagtaaccttggaaataaaaggatcgggaaggagcagagggagagggggaacgtccgctgaggagtggcgagaggccccggccgagtcgggtcgcgggcgggcgggcgaactgggagcagagcgggggcccagccagcgaggccgccgagccaggcccggccgcgtacccaggctttgacggctgccattcagggtggacgatgcctaaagattccaccgctaatattttttttattaatattttttattttttatttctggactgactcagataaaggaatttagaaagactgagcaccagccgctgcacttctctggacttctctcctcaatccgttgccaactttgattgaatgggtgctgtggatgtgattatataatactgccatttccaagcagtgtttttggtaggttttaataaacagacttttcaaaagacggcaatatagaattgttagatccgttgttgatctaaaaatatttgctttatattttcattaaatgacttcttttaatattttattcagaatacttatgaactgctgcaaaacggtaatttatttttccccagatcttgtattacgtgtttttttcagacgagcacaaatcaaaatgaaatgaaaatatggacagttgttaggtaataagggtatcttttgatgtgatcatttgattgtaatttaatttgagtagtgattccgtaagagctgatcgagaaaataaatttgttagaatgaaatagtctgtgtctgatgcgtaaacactgtgtgggaagaaaagagttctttaagaaatatttttttactaatgaaaatccctaagtaatagcgttgaggaagtagagcctgctccacttaaggtacttttggaaatctagagtaaagcataggcattgctgagacagctagtattttaacatagtagtcactcctcgataatccataaattcacaatatttttctctcccttaattttagtggatgtctttagtgttttcaggtgagattgcctaaatattaacccttttcttggcgatacctgtgtttcttatcgaaagattgaacgatatcaccagtaaaaatgagccaactggctattaatggttaatacagcccctccccccaagttcagcttcttttttcttctcctgtccccctcccaacatgttcctgtctcttttctctttttctcaagactatagttgttaggagtcgcttataagtcttataaaatattttgatatcaattacttcccatcaataactatatgtaattaaatttaaattattaagctttttgggttttttccccccgtaataaaagaatatagttctaaaatcctgattatggtccacactgcataccatctgtgcaattaccaactcagacttaaggttctatatttctgtgtttttgtctctccccagtatgattctatatcttctttactggtgctgggggttttaggtcaccttttacataaaccctgcagagtggtcacattgatcaagttaatgtttcaatatttacaatgtgggaaaatgaaagtgtaatgcctcaggttgtgagtacttaagacgctaaaggctcggcttagttgagtccctatatattgtacttaaaagtatttagcagtggtagagcaacgattttatagacaaattccccccaatctcacttagctgtcactcactttttttcctccttctctcatcttcactccctctccctgtgatatcaatgcaggggttaaaaaacccggaaaactgtgagagcaacaaggcacagttatttctcccagacaggccctgtgtcactttcataaatcaaacccagccagatggccatgtattgggttgcattattttaaacaccaaatcgtactaaaaatcacaatcattttgatttgtgaaatctgaaaaaggccacatatattaaacagagagaagaaaaaaatgaagacaagaaaccacaatttacttttctttgccttcttgttccctatttctcttgctgctgtaatccctatgcccagcaaatttacaacctggagtgggggtgggggagaagttcaccattttgggggtgtctagagaggcaagcaaagaagtcctcattggaaagctgaggactggtcaggttgtttttatgtggtggatactactggcacgtgagatggaatcttgtttttcctatgggaatggtggtggttgattagacaagtaataggtctattaaaaaaatttcaggaggtatctacttagttgatttagctgacaacaaaagagctaacattagatttcacactgttttctattaaaaagcaaactttgctgattactttggaagaatccctgatttgggggtagcagagtaacttttaattggagaagctgggaaagcaaacccattttgtttcattatttgcattttataaagtgagctaatgcttgcactccattttttttaatcaaccctttcaatgtaattacaaaatgaaattcatggttgaaaaacaaaagagggcagatataactgagaggttttgtgctaaggcttatattgttacacatgtaaataatgaaaatattgttatatatcaccagatctttttaatgaatttggtcattgtgttc

SEQ ID NO: 23391 - DNA, 1507 bp, Homo sapiens
  source 1..1507: mol_type = unassigned DNA
agatgtcaaaggctgaagctgctccctttgccacattataactagtaggggatcctcaccgaccatggccacagctgcctcgaatccctacagcattctcagttccacctccctagtccatgcggactctgcgggcatgcagcaggggagtcctttccgcaaccctcagaaacttctccaaagtgattacttgcagggagttcccagcaatgggcatcccctcgggcatcactgggtgaccagtctgagcgacgggggcccatggtcctccacactggccaccagccccctggaccagcaggacgtgaagcccgggcgcgaagacctgcaactgggtgcgatcatccatcaccgctcgccacacgtagcccaccactcaccgcacactaaccaccccaacgcctggggggccagcccggcaccgaacccgtctatcacgtcaagcggccaacccctcaacgtgtactcgcagcctggcttcaccgtgagcggcatgctggaacacgggggactcaccccacctccagctgccgcctctgcacagagcctgcacccggtgctccgagagcccccggatcacggcgaactgggctcgcaccattgccaggatcactccgacgaggagacgccaacctctgatgagttggaacagttcgccaaacaattcaaacaaagaagaatcaagttgggcttcacgcaggccgacgtggggttggcgctgggcacactgtatggtaacgtgttctcgcagaccaccatctgcaggttcgaaggcttgcagctgagcttcaaaaatatgtgcaagctgaagcccctgctgaacaagtggctggaggaggcggattcgtccacagggagcccgaccagcattgacaagatcgctgcacagggccgcaagcgcaagaagcggacctccatcgaggtgagtgtcaagggcgtactggagacgcatttcctcaagtgtcccaagcctgccgcgcaggagatctcctcgctggcagacagcctccagttggagaaggaagtggtgcgtgtctggttctgtaatcgaagacaaaaagagaaaagaatgactccgccaggggatcagcagccgcatgaggtttattcgcacaccgtgaaaacagacacatcttgccatgatctctgactggaggaagcgaggaggcggccggccgcactgggagcagcgcggatttctctttctctctcactctcttcctttcattctagtattctttattatttttctctctctctcgttcgctcgctctctcgtactctctctcttttccctcctttcctttttctttcctttcccctttttctttcccttctttttccctttcctttcctttcattttctttcctttccccttcccttcccttcccttccatctcttcctttcctttcctttcttttcttttgctttcctttcctttttttcccttttctttccttttcataagaggttctaacttctgttgacaaaggaaacacatactc

SEQ ID NO: 23392 - DNA, 3795 bp, Homo sapiens
  source 1..3795: mol_type = unassigned DNA
agcgggaccgcgaggccggcgcgcggcgctctgcgcggtcagagggagcgcctggcagcagcaggagcagcagcagcagcccgcggcggggccgccgccagccgccgcgaccgccgcggctgcagcctccgaagggaggccgggtgagccggcgtacgcactttcccgcggactttcggagtgtttgtggatatacatgccaagccgccacgatgatgtccatgaacagcaagcagcctcactttgccatgcatcccaccctccctgagcacaagtacccgtcgctgcactccagctccgaggccatccggcgggcctgcctgcccacgccgccgctgcagagcaacctcttcgccagcctggacgagacgctgctggcgcgggccgaggcgctggcggccgtggacatcgccgtgtcccagggcaagagccatcctttcaagccggacgccacgtaccacacgatgaacagcgtgccgtgcacgtccacttccacggtgcctctggcgcaccaccaccaccaccaccaccaccaccaggcgctcgaacccggcgatctgctggaccacatctcctcgccgtcgctcgcgctcatggccggcgcgggcggcgcgggcgcggcggccggcggcggcggcgcccacgacggcccggggggcggtggcggcccgggcggcggcggcggcccgggcggcggccccgggggaggcggcggtggcggcccggggggcggcggcggcggcccgggcggcgggctcctgggcggctccgcgcaccctcacccgcatatgcacagcctgggccacctgtcgcaccccgcggcggcggccgccatgaacatgccgtccgggctgccgcaccccgggctggtggcggcggcggcgcaccacggcgcggcagcggcagcggcggcggcggcggccgggcaggtggcagcggcatcggcggcggcggccgtggtgggcgcagcgggcctggcgtccatctgcgactcggacacggacccgcgcgagctcgaggcgttcgcggagcgcttcaagcagcggcgcatcaagctgggcgtgacgcaggccgacgtgggctcggcgctggccaacctcaagatcccgggcgtgggctcactcagccagagcaccatctgcaggttcgagtcgctcacgctctcgcacaacaacatgatcgcgctcaagcccatcctgcaggcgtggctcgaggaggccgagggcgcccagcgcgagaaaatgaacaagcctgagctcttcaacggcggcgagaagaagcgcaagcggacttccatcgccgcgcccgagaagcgctccctcgaggcctacttcgccgtgcagccccggccctcgtccgagaagatcgccgccatcgccgagaaactggacctcaaaaagaacgtggtgcgggtgtggttttgcaaccagagacagaagcagaagcggatgaaattctctgccacttactgagggggctgggaggtgtcgggcgggacagaatggggagctgaggaggcatttttggggggctttcctctgcttgcctcccctcggatttggagtgtccgttatcctgcctgcatttggggagtcccttctcgctctctttcctccacccattctctgattttcctgcctttgctgtcccctagccttgaggactggggtgctgggtgtggggattggagtatagggtaggggagaagggggggagcattcgggggagtggggagtggggggaaggaaagcggagacccgagcaggggttttaaggagcaggatggttctggggtttgggtggggggagacgcgggaagggtaggaaaatggactgtttctgaccagagacacttacctaaatatcctggggaccaaggaactatgtacaaaaacaaacctaccaaccaccaaaaactagacaaataaagacaaactaaaacaaaacagaacaaaagcaaaggaaaatgctttagaaattttaactccggggagccataatctgcaacttcattttcccccatagaagagaaaaaagagcaccaccattattaccacctccccaaccctacacgcacgaactgagtcgaaaaacgaaaaccaaacgagcgagaagttgaagttctgggtatcaaagctagttgttctgtctgcgtgtttaatttttccctctctcacctccaccccatccatatcctctttatttcctccgttccaatgagaggcctatggctgctctccaatcccgggaagtgagtgggagcacagctgaaaagagagggtcagggggaggctggctgcttgcttaggtggaatccaagttttcccgtggccctgcctatactctggtggcctggtcctgttggggtgggggtctttggagagaagggcatagtctttgagctactaaaaagcagaattccggagcttcgagatatcttattctaggaaaatgaaacaattttaacaacagttttttttcctcttatgtcgaagatctagttttagacaatttcaaaataagcttttcccactcatagaactttaacttgccctttcagttttatcttttttttagagagaggtttaaactactgatttttcctgttgattcaaatagactaatggggtgaaagttattaggagagatactctctcctgttttctccactgaacgagactcatcttgctcttctaggtcccgtttcttcctctcttggaggacatgaaattatagaaatgttgagaagttcctgctttcttttgcggtaggacttggctgtgagaaaatcacctaaatcccagaaaagaggaagacagatttaaagtgcccccacccccatttgtttcaaagaggtctgcatgttgggcgaaaacagaacaactgtgtttccttttacttgttcttattattcaagagtcatttattacaggggataaatgttgggtagcaagaactttaatttgcactaccagtctcccaaatagaaaatcatgtatagtatttcatagtaataatcaggtaccttacaagctgctggtggattttaaaaaattaagatagttgaaggtggttaggtaaaatgcctgctttgtgtacaagatactctttggatctctcgtagagatggtttgttaccatcctttaatcataactaaaacattgaaaacagaacaaatgagaaaagaaaaaaaacctgccgattaacaagactgaaatcatgcatgatctgaaaggtgtggaaagaaacacaattaggtctcactctggttaggcattatttatttaattatgttgtatatcattgtttgcagggcaaacattctatgcatttgaaactgagcactaaactgggctagctttctggtagaccgttttgtggctagtgcgatttcacagtctactgcctgtttccactgaaaacatttttgtcatattcttgtattcaaagaaaaaggaaaaaagattattgtaaatattttatttaatgcacacattcacacagtggtaacagactgccagtgttcatcctgaaatgtctcacggattgatctacctgtccatgtatgtctgctgagctttctccttggttatgttttttctcttttacctttctcctcccttacttctatcagaaccaattctatgcgccaaaatacaacagggggatgtgtcccagtacacttacaaataaaacataactgaaagaagagcagttttatgatttgggtgcgtttttgtgtttatactgggccaggtcctggtagaacctttcaacaaacaaccaaacaaaaa

SEQ ID NO: 23393 - DNA, 1182 bp, Homo sapiens
  source 1..1182: mol_type = unassigned DNA
cgctgagcagcgctcacttggagagcggcaagcaagctagacaagcctgattccatgtcacccgctgccaccctgccaggagcgcgaagatgatggccatgaactccaagcagcctttcggcatgcacccggtgctgcaagaacccaaattctccagtctgcactctggctccgaggccatgcgccgagtctgtctcccagccccgcagctgcagggtaatatatttggaagctttgatgagagcctgctggcacgcgccgaagctctggcggcggtggatatcgtctcccacggcaagaaccatccgttcaagcccgacgccacctaccataccatgagcagcgtgccctgcacgtccacttcgtccaccgtgcccatctcccacccagctgcgctcacctcacaccctcaccacgccgtgcaccagggcctcgaaggcgacctgctggagcacatctcgcccacgctgagtgtgagcggcctgggcgctccggaacactcggtgatgcccgcacagatccatccacaccacctgggcgccatgggccacctgcaccaggccatgggcatgagtcacccgcacaccgtggcccctcatagcgccatgcctgcatgcctcagcgacgtggagtcagacccgcgcgagctggaagccttcgccgagcgcttcaagcagcggcgcatcaagctgggggtgacccaggcggacgtgggcgcggctctggctaatctcaagatccccggcgtgggctcgctgagccaaagcaccatctgcaggttcgagtctctcactctctcgcacaacaacatgatcgctctcaagccggtgctccaggcctggttggaggaggccgaggccgcctaccgagagaagaacagcaagccagagctcttcaacggcagcgaacggaagcgcaaacgcacgtccatcgcggcgccggagaagcgttcactcgaggcctatttcgctatccagccacgtccttcatctgagaagatcgcggccatcgctgagaaactggaccttaaaaagaacgtggtgagagtctggttctgcaaccagagacagaaacagaaacgaatgaagtattcggctgtccactgattgcggcagggcgcagcgtcgggagccgggagagcctagtgctcatccctcccgggttcgggggatggttatcggg

SEQ ID NO: 23394 - DNA, 1163 bp, Homo sapiens
  source 1..1163: mol_type = unassigned DNA
gtagtcctttgttacatgcatgagtcagtgaacagggaatgggtgaatgacatttgtgggtaggttatttctagaagttaggtgggcagcttggaaggcagatgcacttctacagactattccttggggccacacgtaggttcttgaatcccgaatggaaaggggagattgataactggtgtgtttatgttcttacaagtcttctgccttttaaaatccagtcccaggacatcaaagctctgcagaaagaactcgagcaatttgccaagctcctgaagcagaagaggatcaccctgggatatacacaggccgatgtggggctcaccctgggggttctatttgggaaggtattcagccaaacgaccatctgccgctttgaggctctgcagcttagcttcaagaacatgtgtaagctgcggcccttgctgcagaagtgggtggaggaagctgacaacaatgaaaatcttcaggagatatgcaaagcagaaaccctcgtgcaggcccgaaagagaaagcgaaccagtatcgagaaccgagtgagaggcaacctggagaatttgttcctgcagtgcccgaaacccacactgcagcagatcagccacatcgcccagcagcttgggctcgagaaggatgtggtccgagtgtggttctgtaaccggcgccagaagggcaagcgatcaagcagcgactatgcacaacgagaggattttgaggctgctgggtctcctttctcagggggaccagtgtcctttcctctggccccagggccccattttggtaccccaggctatgggagccctcacttcactgcactgtactcctcggtccctttccctgagggggaagcctttccccctgtctctgtcaccactctgggctctcccatgcattcaaactgaggtgcctgcccttctaggaatgggggacagggggaggggaggagctagggaaagaaaacctggagtttgtgccagggtttttgggattaagttcttcattcactaaggaaggaattgggaacacaaagggtgggggcaggggagtttggggcaactggttggagggaaggtgaagttcaatgatgctcttgattttaatcccacatcatgtatcacttttttcttaaataaagaagcctgggacacagtagatagacacactta

SEQ ID NO: 23395 - DNA, 1420 bp, Homo sapiens
  source 1..1420: mol_type = unassigned DNA
agagaggggttgagtagtcccttcgcaagccctcatttcaccaggcccccggcttggggcgccttccttccccatggcgggacacctggcttcggatttcgccttctcgccccctccaggtggtggaggtgatgggccaggggggccggagccgggctgggttgatcctcggacctggctaagcttccaaggccctcctggagggccaggaatcgggccgggggttgggccaggctctgaggtgtgggggattcccccatgccccccgccgtatgagttctgtggggggatggcgtactgtgggccccaggttggagtggggctagtgccccaaggcggcttggagacctctcagcctgagggcgaagcaggagtcggggtggagagcaactccgatggggcctccccggagccctgcaccgtcacccctggtgccgtgaagctggagaaggagaagctggagcaaaacccggaggagtcccaggacatcaaagctctgcagaaagaactcgagcaatttgccaagctcctgaagcagaagaggatcaccctgggatatacacaggccgatgtggggctcaccctgggggttctatttgggaaggtattcagccaaacgaccatctgccgctttgaggctctgcagcttagcttcaagaacatgtgtaagctgcggcccttgctgcagaagtgggtggaggaagctgacaacaatgaaaatcttcaggagatatgcaaagcagaaaccctcgtgcaggcccgaaagagaaagcgaaccagtatcgagaaccgagtgagaggcaacctggagaatttgttcctgcagtgcccgaaacccacactgcagcagatcagccacatcgcccagcagcttgggctcgagaaggatgtggtccgagtgtggttctgtaaccggcgccagaagggcaagcgatcaagcagcgactatgcacaacgagaggattttgaggctgctgggtctcctttctcagggggaccagtgtcctttcctctggccccagggccccattttggtaccccaggctatgggagccctcacttcactgcactgtactcctcggtccctttccctgagggggaagcctttccccctgtctctgtcaccactctgggctctcccatgcattcaaactgaggtgcctgcccttctaggaatgggggacagggggaggggaggagctagggaaagaaaacctggagtttgtgccagggtttttgggattaagttcttcattcactaaggaaggaattgggaacacaaagggtgggggcaggggagtttggggcaactggttggagggaaggtgaagttcaatgatgctcttgattttaatcccacatcatgtatcacttttttcttaaataaagaagcctgggacacagtagatagacacactta

SEQ ID NO: 23396 - DNA, 369 bp, Homo sapiens
  source 1..369: mol_type = unassigned DNA
atggcgggacacctggcttcggatttcgccttctcgccccctccaggtggtggaggtgatgggccaggggggccggagccgggctgggttgatcctcggacctggctaagcttccaaggccctcctggagggccaggaatcgggccgggggttgggccaggctctgaggtgtgggggattcccccatgccccccgccgtatgagttctgtggggggatggcgtactgtgggccccaggttggagtggggctagtgccccaaggcggcttggagacctctcagcctgagggcgaagcaggagtcggggtggagactccgatggggcctccccggagccctgcaccgcatccatttcctttcccactcctg

SEQ ID NO: 23397 - DNA, 1395 bp, Homo sapiens
  source 1..1395: mol_type = unassigned DNA
ccttcgcaagccctcatttcaccaggcccccggcttggggcgccttccttccccatggcgggacacctggcttcggatttcgccttctcgccccctccaggtggtggaggtgatgggccaggggggccggagccgggctgggttgatcctcggacctggctaagcttccaaggccctcctggagggccaggaatcgggccgggggttgggccaggctctgaggtgtgggggattcccccatgccccccgccgtatgagttctgtggggggatggcgtactgtgggccccaggttggagtggggctagtgccccaaggcggcttggagacctctcagcctgagggcgaagcaggagtcggggtggagagcaactccgatggggcctccccggagccctgcaccgtcacccctggtgccgtgaagctggagaaggagaagctggagcaaaacccggaggagtcccaggacatcaaagctctgcagaaagaactcgagcaatttgccaagctcctgaagcagaagaggatcaccctgggatatacacaggccgatgtgcaccctgggggttctatttgggaaggtattcagccaaacgaccatctgccgctttgaggctctgcagcttagcttcaagaacatgtgtaagctgcggcccttgctgcagaagtgggtggaggaagctgacaacaatgaaaatcttcaggagatatgcaaagcagaaaccctcgtgcaggcccgaaagagaaagcgaaccagtatcgagaaccgagtgagaggcaacctggagaatttgttcctgcagtgcccgaaacccacactgcagcagatcagccacatcgcccagcagcttgggctcgagaaggatgtggtccgagtgtggttctgtaaccggcgccagaagggcaagcgatcaagcagcgactatgcacaacgagaggattttgaggctgctgggtctcctttctcagggggaccagtgtcctttcctctggccccagggccccattttggtaccccaggctatgggagccctcacttcactgcactgtactcctcggtccctttccctgagggggaagcctttccccctgtctctgtcaccactctgggctctcccatgcattcaaactgaggtgcctgcccttctaggaatgggggacagggggaggggaggagctagggaaagaaaacctggagtttgtgccagggtttttgggattaagttcttcattcactaaggaaggaattgggaacacaaagggtgggggcaggggagtttggggcaactggttggagggaaggtgaagttcaatgatgctcttgattttaatcccacatcatgtatcacttttttcttaaataaagaagcctgggacacagtagatagacacactt

SEQ ID NO: 23398 - DNA, 1395 bp, Homo sapiens
  source 1..1395: mol_type = unassigned DNA
ccttcgcaagccctcatttcaccaggcccccggcttggggcgccttccttccccatggcgggacacctggcttcagattttgccttctcgccccctccaggtggtggaggtgatgggccaggggggccggagccgggctgggttgatcctcggacctggctaagcttccaaggccctcctggagggccaggaatcgggccgggggttgggccaggctctgaggtgtgggggattcccccatgccccccgccgtatgagttctgtggggggatggcgtactgtgggccccaggttggagtggggctagtgccccaaggcggcttggagacctctcagcctgagggcgaagcaggagtcggggtggagagcaactccgatggggcctccccggagccctgcaccgtcacccctggtgccgtgaagctggagaaggagaagctggagcaaaacccggaggagtcccaggacatcaaagctctgcagaaagaactcgagcaatttgccaagctcctgaagcagaagaggatcaccctgggatatacacaggccgatgtgcaccctgggggttctatttgggaaggtattcagccaaacgaccatctgccgctttgaggctctgcagcttagcttcaagaacatgtgtaagctgcggcccttgctgcagaagtgggtggaggaagctgacaacaatgaaaatcttcaggagatatgcaaagcagaaaccctcgtgcaggcccgaaagagaaagcgaaccagtatcgagaaccgagtgagaggcaacctggagaatttgttcctgcagtgcccgaaacccacactgcagcagatcagccacatcgcccagcagcttgggctcgagaaggatgtggtccgagtgtggttctgtaaccggcgccagaagggcaagcgatcaagcagcgactatgcacaacgagaggattttgaggctgctgggtctcctttctcagggggaccagtgtcctttcctctggccccagggccccattttggtaccccaggctatgggagccctcacttcactgcactgtactcctcggtccctttccctgagggggaagcctttccccctgtctctgtcaccactctgggctctcccatgcattcaaactgaggtgcctgcccttctaggaatgggggacagggggaggggaggagctagggaaagaaaacctggagtttgtgccagggtttttgggattaagttcttcattcactaaggaaggaattgggaacacaaagggtgggggcaggggagtttggggcaactggttggagggaaggtgaagttcaatgatgctcttgattttaatcccacatcatgtatcacttttttcttaaataaagaagcttgggacacagtagatagacacactt

SEQ ID NO: 23399 - DNA, 1718 bp, Homo sapiens
  source 1..1718: mol_type = unassigned DNA
ctggggagagtatatactgaatttagcttctgagacatgatgctcttcctttttaattaacccagaacttagcagcttatctatttctctaatctcaaaacatccttaaactgggggtgatacttgagtgagagaattttgcaggtattaaatgaactatcttcttttttttttttctttgagacagagtcttgctctgtcacccaggctggagtgcagtggcgtgatctcagctcactgcaacctccgcctcccgggttcaagtgattctcctgcctcagcctcctgagtagctgggattacaggtgcgtgccaccgtgcccagctaatttttgtgtttttagtagagacggggtttcaccatgttggccatgctggtcttgaactcctgacctcgtgatctgcccacctcggcctcccaaagtgctggaattataggcgtgagccaccgcgcccagcaaagaacttctaaccttcataacctgacaggtgttctcgaggccagggtctctctttctgtcctttcacgatgctctgcatcccttggatgtgccagtttctgggggaagagtagtcctttgttacatgcatgagtcagtgaacagggaatgggtgaatgacatttgtgggtaggttatttctagaagttaggtgggcagcttggaaggcagaggcacttctacagactattccttggggccacacgtaggttcttgaatcccgaatggaaaggggagattgataactggtgtgtttatgttcttacaagtcttctgccttttaaaatccagtcccaggacatcaaagctctgcagaaagaactcgagcaatttgccaagctcctgaagcagaagaggatcaccctgggatatacacaggccgatgtggggctcaccctgggggttctatttgggaaggtattcagccaaacgaccatctgccgctttgaggctctgcagcttagcttcaagaacatgtgtaagctgcggcccttgctgcagaagtgggtggaggaagctgacaacaatgaaaatcttcaggagatatgcaaagcagaaaccctcgtgcaggcccgaaagagaaagcgaaccagtatcgagaaccgagtgagaggcaacctggagaatttgttcctgcagtgcccgaaacccacactgcagcagatcagccacatcgcccagcagcttgggctcgagaaggatgtggtccgagtgtggttctgtaaccggcgccagaagggcaagcgatcaagcagcgactatgcacaacgagaggattttgaggctgctgggtctcctttctcagggggaccagtgtcctttcctctggccccagggccccattttggtaccccaggctatgggagccctcacttcactgcactgtactcctcggtccctttccctgagggggaagcctttccccctgtctccgtcaccactctgggctctcccatgcattcaaactgaggtgcctgcccttctaggaatgggggacagggggaggggaggagctagggaaagaaaacctggagtttgtgccagggtttttgggattaagttcttcattcactaaggaaggaattgggaacacaaagggtgggggcaggggagtttggggcaactggttggagggaaggtgaagttcaatgatgctcttgattttaatcccacatcatgtatcacttttttcttaaataaagaagcctgggacacagt

SEQ ID NO: 23400 - DNA, 1233 bp, Homo sapiens
  source 1..1233: mol_type = unassigned DNA
ctggggagagtatatactgaatttagcttctgagacatgatgctcttcctttttaattaacccagaacttagcagcttatctatttctctaatctcaaaacatccttaaactgggggtgatacttgagtgagagaattttgcaggtattaaatgaactatcttcttttttttttttctttgagacagagtcttgctctgtcacccaggctggagtgcagtggcgtgatctcagctcactgcaacctccgcctcccgggttcaagtgattctcctgcctcagcctcctgagtagctgggattacagtcccaggacatcaaagctctgcagaaagaactcgagcaatttgccaagctcctgaagcagaagaggatcaccctgggatatacacaggccgatgtggggctcaccctgggggttctatttgggaaggtattcagccaaacgaccatctgccgctttgaggctctgcagcttagcttcaagaacatgtgtaagctgcggcccttgctgcagaagtgggtggaggaagctgacaacaatgaaaatcttcaggagatatgcaaagcagaaaccctcgtgcaggcccgaaagagaaagcgaaccagtatcgagaaccgagtgagaggcaacctggagaatttgttcctgcagtgcccgaaacccacactgcagcagatcagccacatcgcccagcagcttgggctcgagaaggatgtggtccgagtgtggttctgtaaccggcgccagaagggcaagcgatcaagcagcgactatgcacaacgagaggattttgaggctgctgggtctcctttctcagggggaccagtgtcctttcctctggccccagggccccattttggtaccccaggctatgggagccctcacttcactgcactgtactcctcggtccctttccctgagggggaagcctttccccctgtctccgtcaccactctgggctctcccatgcattcaaactgaggtgcctgcccttctaggaatgggggacagggggaggggaggagctagggaaagaaaacctggagtttgtgccagggtttttgggattaagttcttcattcactaaggaaggaattgggaacacaaagggtgggggcaggggagtttggggcaactggttggagggaaggtgaagttcaatgatgctcttgattttaatcccacatcatgtatcacttttttcttaaataaagaagcctgggacacagta

SEQ ID NO: 23401 - DNA, 2335 bp, Homo sapiens
  source 1..2335: mol_type = unassigned DNA
gatggattgctatctctcagcgcagcaggacacggggaccatgcaagctgtaattggtcaggcatgaactctcttgggttgtgttaccctgtttgctgtttactgtcaagatgctgaaagaatgttcttataatgatccaagaggaagtggcaaatgagtgctcttcttcaggatccaatgatagctggacaagtcagtaagcccttgctgtcagtgcggagtgaaatgaatgcggagttgagaggtgaggacaaggctgctacttcagacagcgagctgaatgagcccctgcttgcgcctgtggaatcaaatgacagcgaggacactcccagcaagctcttcggggctagaggaaacccagcattatcagacccaggcactcctgaccaacaccaggccagtcagacccaccccccatttccagttgggccacagccacttctgacggcacagcagttagcttctgctgtggccggcgtgatgccgggaggccccccagccctcaaccagccaatcctcattcccttcaacatggcgggacagctaggaggccagcaaggactggttctcacactgccaacagcgaatctcaccaacatccaagggctggtggcagcagctgcagccggaggcattatgactctgccactgcaaaatctacaagctacctcatccctgaactcccagctccagcagctccagctccagctccagcagcagcagcagcagcagcagcagcagcctcccccgtcaaccaaccagcacccgcaaccagccccacaggcgccctcgcagtcccagcagcagccgctgcagcccaccccaccccagcagccaccacccgcctctcagcagccgccagctcctacatctcagctgcaacaggcgcctcagccccagcagcaccaaccccactcccactcccagaaccagaaccaaccatctccaacccagcagagctccagccccccgcagaaacctagtcagtctccaggacatggcctgccttcaccgctcacgccacccaatcctctacagctggttaataatccactagcaagtcaggctgcagcggctgcagcagccatgagctccatagcaagctcacaggcctttggcaatgccctctccagtcttcagggggtcacaggtcaactagttactaatgcacaaggacagattatcgggaccattccactgatgcctaatccagggccatcgagccaagcagcaagcggcactcagggcttgcaagtgcagccaatcaccccccagctcctcacaaacgcccagggccagatcatcgccacagtcattgggaaccagatcctgcccgtgatcaacacccagggcatcacgctgtcacccatcaagcccggccagcagctccaccaaccctcccagacgtcagtgggtcaagcagcctcccaaggcaaccttctgcacctggctcacagccaagcatccatgtctcaaagtcccgtccggcaggcttcctcttcttcctcctcatcctcctcttcttcagctttgagcgtgggccagttagtcagcaatcctcaaacggcagcgggtgaggtggatggggttaatctggaggagatccgagaatttgccaaagcttttaaaatccggcgcctgtcccttggcctgacccagactcaggtgggacaggctctcagtgctacagagggccccgcgtacagccagtcggccatctgcagacacaccatcctgagaagccactttttcctaccacaggaagcccaagagaacactatagctagcagtctgacagccaaactgaaccctggccttttgtatcctgccaggtttgaaaagctggacatcacccctaaaagtgcccagaagatcaagccggtgcttgagcggtggatggctgaggctgaggcccgccatcgagcaggtatgcagaacctgaccgagtttatcgggagtgaaccatccaaaaagcgcaagcggcgcacctccttcacaccccaggcccttgagatcctcaatgcccactttgagaagaacacacacccttctgggcaggaaatgaccgaaattgctgagaagctgaactatgaccgagaagtagttagagtttggttctgcaataagaggcaagccctgaagaacacaattaaacgcttaaaacagcacgagccggccacggcagtccctttggagcccttaacagactctctggaagaaaactcctaaagagatgcccacccataatcagaagcaaaattcacagaaactaaactccacccttgggactccacaacaacaacaacaacaaaatttaatttaatttaaaaatag

SEQ ID NO: 23402 - DNA, 5925 bp, Homo sapiens
  source 1..5925: mol_type = unassigned DNA
gctgaaagaatgttcttataatgatccaagaggaagtggcaaatgagtgctcttcttcaggatccaatgatagctggacaagtcagtaagcccttgctgtcagtgcggagtgaaatgaatgcggagttgagaggtgaggacaaggctgctacttcagacagcgagctgaatgagcccctgcttgcgcctgtggaatcaaatgacagcgaggacactcccagcaagctcttcggggctagaggaaacccagcattatcagacccaggcactcctgaccaacaccaggccagtcagacccaccccccatttccagttgggccacagccacttctgacggcacagcagttagcttctgctgtggccggcgtgatgccgggaggccccccagccctcaaccagccaatcctcattcccttcaacatggcgggacagctaggaggccagcaaggactggttctcacactgccaacagcgaatctcaccaacatccaagggctggtggcagcagctgcagccggaggcattatgactctgccactgcaaaatctacaagctacctcatccctgaactcccagctccagcagctccagctccagctccagcagcagcagcagcagcagcagcagcagcctcccccgtcaaccaaccagcacccgcaaccagccccacaggcgccctcgcagtcccagcagcagccgctgcagcccaccccaccccagcagccaccacccgcctctcagcagccgccagctcctacatctcagctgcaacaggcgcctcagccccagcagcaccaaccccactcccactcccagaaccagaaccaaccatctccaacccagcagagctccagccccccgcagaaacctagtcagtctccaggacatggcctgccttcaccgctcacgccacccaatcctctacagctggttaataatccactagcaagtcaggctgcagcggctgcagcagccatgagctccatagcaagctcacaggcctttggcaatgccctctccagtcttcagggggtcacaggtcaactagttactaatgcacaaggacagattatcgggaccattccactgatgcctaatccagggccatcgagccaagcagcaagcggcactcagggcttgcaagtgcagccaatcaccccccagctcctcacaaacgcccagggccagatcatcgccacagtcattgggaaccagatcctgcccgtgatcaacacccagggcatcacgctgtcacccatcaagcccggccagcagctccaccaaccctcccagacgtcagtgggtcaagcagcctcccaaggcaaccttctgcacctggctcacagccaagcatccatgtctcaaagtcccgtccggcaggcttcctcttcttcctcctcatcctcctcttcttcagctttgagcgtgggccagttagtcagcaatcctcaaacggcagcgggtgaggtggatggggttaatctggaggagatccgagaatttgccaaagcttttaaaatccggcgcctgtcccttggcctgacccagactcaggtgggacaggctctcagtgctacagagggccccgcgtacagccagtcggccatctgcaggtttgaaaagctggacatcacccctaaaagtgcccagaagatcaagccggtgcttgagcggtggatggctgaggctgaggcccgccatcgagcaggtatgcagaacctgaccgagtttatcgggagtgaaccatccaaaaagcgcaagcggcgcacctccttcacaccccaggcccttgagatcctcaatgcccactttgagaagaacacacacccttctgggcaggaaatgaccgaaattgctgagaagctgaactatgaccgagaagtagttagagtttggttctgcaataagaggcaagccctgaagaacacaattaaacgcttaaaacagcacgagccggccacggcagtccctttggagcccttaacagactctctggaagaaaactcctaaagagatgcccacccataatcagaagcaaaattcacagaaactaaactccacccttgggactccacaacaacaacaacaacaaaatttaatttaatttaaaaatagccccagtcgtcatcacccttgtaagtaaatgactaagaaaactaccaagtggacagaatggtttctacatgtccgttggttttccaaaaaggaaagaagaaaatttttagaaaatttttaaacaaggaatacaccacactgaaggtgtgtgtggtaggatagttcccttcccccacctgtctcccccaaagccagttttttaatggacttaaagcaaaccaaataaccacgtacttttttctgtatattatgaaaatgtgaacacattttaaggaaaaagaaaaaaaaaaactaaaccaaaaaccaacaacgaaggaacaaaaactttgatctgttcaaagcgaatacaagcctgccacctggaggaaggactgcaccccttcaggtactaagtgctgattcactatgaaacctattaaccaaagtcagaaacatggcattgcaacgcgatcgttcgtctacgcttctccgcacgtaaagttgtgttacgaatttttacatttgtactaacagaacaataggaagcctgatttctcccatctttcccatctactgtctccacccatggggtgggtaccattgttgaagccattctgtgaggctcactattgggtttttttgtgggggtggtagggagggtggtcttttttctttgtctttctttttgacgggagggcatcctggatcgtgtgccaaagcatttgttgcttttttctcactatgacttgtgggtttgagaaaagaaaatggagctcgcatttctctcttttcctccatttctccatctccctcgcgcgtggctcctggggtctgctggaaggccacagaagtggggagaagcagtgtcttttccactcagatcctagtgaaatgcaggagagactccaaaataactagggctttgctcgatgaactgtcaacactggcataagctgtaattgtgctcactgtccacaccagagcttgggatttttctcagtctgttggccacgtacatggagagctgaccaaaactaattttgtaatataaacataagctgcacatttggttcaatacttacatctatgttatgcttctgtgcaaagcaatttctctcagaagtctgatagccaaagaaatgtctcaagatttcagtcaaatacacacatgacatgcacacacccataaacacacacacaaagaaacaggctaaaaagaaagtgatagcaactggatcattaaaggccatcgtgtatcctgttaatctcatcttttctgctacttctttcattccaatagcgatggcagacttttttcagggggaataattactcttcgggatatataaatggagcagaaaggtggcgggcaaatttaaacaactggaattgggggccaggttcttcaggggaaaggaagtttgaagaagctttcaccaaaagaaaaaaatatagaaggggcttatctaacaatcagaatagcctgcaatatgagaactagaggattatttcctttaaaaaaaataacttaaaagatctgtgggccacaataacctaataagcaaggacatgttgggatgtgaggacggctgtgcaggtgagcacttggcagctgccactggtgttttcacccaggtacaggcagacggtgttccattaaaggagcaggcaaaagagagctgtcaatttgcttgctgttgaaatgtacatatttatgcataatttataatcatgctaatgtattatctagaagtaagttgtgaaagaaaaaagagaaacccaatctcaagttgcccaactgattagaaatgccatctccttcccctaatacactccctctccctggggagtttgagtttcttctgttggctcctttgctgtttgtgtaaatgctacagtataattgtcccctccaatgattcatgcagcaatcaagagactaccagcaaggaaactctaaaaggaatcctggaagtggaacaagtcactcgtaaaggtgtttccattttaccagtcaatgctaactggaccacagctaacttgatcttcaatgccaacatcacagagcccctttcgccacctcaaaaactgcacaaacatggacaacccagaaacccaaaactttattgattaaaacagattttggattctcctaggacctgctccaaattccatcaagaaaagctccctgcgaagagaagttaacaagataacatatgatggatgctaaatatttaaatatatgccggcagcggttacataaggcctgctcagttctgagatctataattgggagggtctaactaggacagggaaaatataaaataaaagtaatcttccagagtggaacaaaaaagaaatatattcatccgacagtcgtaacaccattcatgtgcagtgatttttttatagttttataattttgtattgttttataaattatttataaggtgttgtaatgcttcttatattaattttttacagataaattttttgctacaaggcataaaaaggtgcctgaaccgattcttaggaatataaattatactgtgtaactcataagtctttgggaccacacctaatgcttaattttatgatgacatttctcatgtctacttgtaaacaacttcatatgccaatggcgtttaagtgtcttttatgtttccatgaactgaaggttaaggttgccacccacaaaaaataaaagccactttgggcatatgtgattgtatttcaagcttcagtatttttctcacataatttttaattattgttatctgcattttcattacttcatgaaaaaatgacagtggatattacattttacacttgtttatagattttctttctttttcaaccaagaaaatattttgaacaattgaaacttttaattgcatttgcaaggttttggcttctttatgttgtcatcacacagatgcacacacacatacacatacaacacaaaagagagaacaaaaaagcaaaaggagctaggaaaaaaacaaaacaaaacaagtagaggtgtatcaaagaactcaagctataaccaaaaagaaatcgtaaaatgcctttgctcgtttctctacgctggaccaaagctcaatatttgtaggtatatgcacattgtatagatatggctaaatgttgctgacaatctcgcaatactaaactgttcctattttaagaaaaaaaaaagaaatacaaactgttcatcaatgttttacctcagcactctacttgtacccagttaatgaccaagcttaaaaaaaaattgagataaaggaaattgattttcatttcaatgtttgactgtaaaatctgtttggataacattttgtaatgagctttttgtcatgtgatttgcttgtcttcaacttgaaattatgtgaggcacatttgtttatttgttgttaagaaagtgatttttttttttttttgtcctatgtgctgtgatctagactggtcaccggggtcacttatgaggcaccacaaagagatctgcttctccgtgcccggagcaggcagcaggagggagggcaggaaacaggactgggttgctttggaaaaatcatcatgacaagaagttgacatgatagacttgtgaccaagaagccaaactgaatatttaaaagctccttacttgctctgacattgaaaccaaagctgattttatctgcacaggttgcttaatatttaaaaaaaaaaaaaactgtacttaatctagagcaatatctgtatggtcagtaaagctgcactttgtgtatttcttaacagcttcagatctgtcacttttaatttgtaccataaaaaataaataattgtttgacatga

SEQ ID NO: 23403 - DNA, 4675 bp, Homo sapiens
  source 1..4675: mol_type = unassigned DNA
cagtagcatcgcccatttgccattcactgcagtagcaaaagtagtactctgtggtgggttaatcggtttgaggcagctccttaaatgaacatttgtgtttcatttttctgttattttcccgaacatgaaaagacgataaaactgaaatggaaaagatctattccagaggggagcttcaccacttcattgacggctttaatgaagagaaaagcaactggatgcgctatgtgaatccagcacactctccccgggagcaaaacctggctgcgtgtcagaacgggatgaacatctacttctacaccattaagcccatccctgccaaccaggaacttcttgtgtggtattgtcgggactttgcagaaaggcttcactacccttatcccggagagctgacaatgatgaatctcacacaaacacagagcagtctaaagcaaccgagcactgagaaaaatgaactctgcccaaagaatgtcccaaagagagagtacagcgtgaaagaaatcctaaaattggactccaacccctccaaaggaaaggacctctaccgttctaacatttcacccctcacatcagaaaaggacctcgatgactttagaagacgtgggagccccgaaatgcccttctaccctcgggtcgtttaccccatccgggcccctctgccagaagactttttgaaagcttccctggcctacgggatcgagagacccacgtacatcactcgctcccccattccatcctccaccactccaagcccctctgcaagaagcagccccgaccaaagcctcaagagctccagccctcacagcagccctgggaatacggtgtcccctgtgggccccggctctcaagagcaccgggactcctacgcttacttgaacgcgtcctacggcacggaaggtttgggctcctaccctggctacgcacccctgccccacctcccgccagctttcatcccctcgtacaacgctcactaccccaagttcctcttgcccccctacggcatgaattgtaatggcctgagcgctgtgagcagcatgaatggcatcaacaactttggcctcttcccgaggctgtgccctgtctacagcaatctcctcggtgggggcagcctgccccaccccatgctcaaccccacttctctcccgagctcgctgccctcagatggagcccggaggttgctccagccggagcatcccagggaggtgcttgtcccggcgccccacagtgccttctcctttaccggggccgccgccagcatgaaggacaaggcctgtagccccacaagcgggtctcccacggcgggaacagccgccacggcagaacatgtggtgcagcccaaagctacctcagcagcgatggcagcccccagcagcgacgaagccatgaatctcattaaaaacaaaagaaacatgaccggctacaagacccttccctacccgctgaagaagcagaacggcaagatcaagtacgaatgcaacgtttgcgccaagactttcggccagctctccaatctgaaggtccacctgagagtgcacagtggagaacggcctttcaaatgtcagacttgcaacaagggctttactcagctcgcccacctgcagaaacactacctggtacacacgggagaaaagccacatgaatgccaggtctgccacaagagatttagcagcaccagcaatctcaagacccacctgcgactccattctggagagaaaccataccaatgcaaggtgtgccctgccaagttcacccagtttgtgcacctgaaactgcacaagcgtctgcacacccgggagcggccccacaagtgctcccagtgccacaagaactacatccatctctgtagcctcaaggttcacctgaaagggaactgcgctgcggccccggcgcctgggctgcccttggaagatctgacccgaatcaatgaagaaatcgagaagtttgacatcagtgacaatgctgaccggctcgaggacgtggaggatgacatcagtgtgatctctgtagtggagaaggaaattctggccgtggtcagaaaagagaaagaagaaactggcctgaaagtgtctttgcaaagaaacatggggaatggactcctctcctcagggtgcagcctttatgagtcatcagatctacccctcatgaagttgcctcccagcaacccactacctctggtacctgtaaaggtcaaacaagaaacagttgaaccaatggatccttaagattttcagaaaacacttattttgtttcttaagttatgacttggtgagtcagggtgcctgtaggaagtggcttgtacataatcccagctctgcaaagctctctcgacagcaaatggtttcccctcacctctggaattaaagaaggaactccaaagttactgaaatctcagggcatgaacaaggcaaaggccatatatatatatatatatatatctgtatacatattatatatacttatttacacctgtgtctatatatttgcccctgtgtattttgaatatttgtgtggacatgtttgcatagccttcccattactaagactattacctagtcataattattttttcaatgataatccttcataatttattatacaatttatcattcagaaagcaataattaaaaaagtttacaatgactggaaagattccttgtaatttgagtataaatgtatttttgtcttgtggccattctttgtagataatttctgcacatctgtataagtacctaagatttagttaaacaaatatatgacttcagtcaacctctctctctaataatggtttgaaaatgaggtttgggtaattgccaatgttggacagttgatgtgttcattcctgggatcctatcatttgaacagcattgtacataacttgggggtatgtgtgcaggattacccaagaataacttaagtagaagaaacaagaaagggaatcttgtatatttttgttgatagttcatgtttttcccccagccacaattttaccggaagggtgacaggaaggctttaccaacctgtctctccctccaaaagagcagaatcctcccaccgccctgccctccccaccgagtcctgtggccattcagagcggccacatgacttttgcatccattgtattatcagaaaatgtgaagaagaaaaaaatgccatgttttaaaaccactgcgaaaatttccccaaagcataggtggctttgtgtgtgtgcgatttgggggcttgagtctgggtggtgttttgttgttggtttttgttgctttttttttttttttttttttaatgtcaaaattgcacaaacatggtgctctaccaggaaggattcgaggtagataggctcaggccacactttaaaaacaaacacacaaacaacaaaaaacgggtattctagtcatcttggggtaaaagcgggtaatgaacattcctatccccaacacatcaattgtattttttctgtaaaactcagattttcctcagtatttgtgtttttacattttatggttaatttaatggaagatgaaagggcattgcaaagttgttcaacaacagttacctcattgagtgtgtccagtagtgcaggaaatgatgtcttatctaatgatttgcttctctagaggagaaaccgagtaaatgtgctccagcaagatagactttgtgttattctatcttttattctgctaagcccaaagattacatgttggtgttcaaagtgtagcaaaaaatgatgtatatttataaatctatttataccactatatcatatgtatatatatttataaccacttaaattgtgagccaagccatgtaaaagatctactttttctaagggcaaaaaaaaaaaaaaaaaaaaaagaacactcctttctgagactttgcttaatacttggtgacctcacaatcacgtcggtatgattgggcacccttgcctactgtaagagaccctaaaaccttggtgcagtggtggggaccacaaaacaaccagggaggaagagatacatcattttttagtattaaggaccatctaagacagctctattttttttttgccactttatgattatgtggtcacacccaagtcacagaaataaaaaactgactttaccgctgcaatttttctgttttcctccttactaaatactgatacattactccaatctattttataattatatttgacattttgttcacatcaactaatgttcacctgtagaagagaacaaatttcgaataatccagggaaacccaagagccttactggtcttctgtaacttccaagactgacagctttttatgtatcagtgtttgataaacacagtccttaactgaaggtaaaccaaagcatcacgttgacattagaccaaatacttttgattcccaactactcgtttgttctttttctccttttgtgctttcccatagtgagaatttttataaagacttcttgcttctctcaccatccatccttctcttttctgcctcttacatgtgaatgttgagcccacaatcaacagtggttttattttttcctctactcaaagttaaaactgaccaaagttactggctttttactttgctagaacaacaaactatcttatgtttacatactggtttacaatgttatttatgtgcaaattgtcaaaatgtaaattaaatataaatgttcatgctttaccaaaat

SEQ ID NO: 23404 - DNA, 2612 bp, Homo sapiens
  source 1..2612: mol_type = unassigned DNA
gggaagccagacggttaacacagacaaagtgctgccgtgacactcggccctccagtgttgcggagaggcaagagcagcgaccgcggcacctgtccgcccggagctgggacgcgggcgcccgggcggccggacgaagcgaggagggaccgccgaggctgcccccaagtgtaactccagcactgtgaggtttcagggattggcagaggggaccaaggggaccatgaaaatggacatggaggatgcggatatgactctgtggacagaggctgagtttgaagagaagtgtacatacattgtgaacgaccacccctgggattctggtgctgatggcggtacttcggttcaggcggaggcatccttaccaaggaatctgcttttcaagtatgccaccaacagtgaagaggttattggagtgatgagtaaagaatacataccaaagggcacacgttttggacccctaataggtgaaatctacaccaatgacacagttcctaagaacgccaacaggaaatatttttggaggatctattccagaggggagcttcaccacttcattgacggctttaatgaagagaaaagcaactggatgcgctatgtgaatccagcacactctccccgggagcaaaacctggctgcgtgtcagaacgggatgaacatctacttctacaccattaagcccatccctgccaaccaggaacttcttgtgtggtattgtcgggactttgcagaaaggcttcactacccttatcccggagagctgacaatgatgaatctcacacaaacacagagcagtctaaagcaaccgagcactgagaaaaatgaactctgcccaaagaatgtcccaaagagagagtacagcgtgaaagaaatcctaaaattggactccaacccctccaaaggaaaggacctctaccgttctaacatttcacccctcacatcagaaaaggacctcgatgactttagaagacgtgggagccccgaaatgcccttctaccctcgggtcgtttaccccatccgggcccctctgccagaagactttttgaaagcttccctggcctacgggatcgagagacccacgtacatcactcgctcccccattccatcctccaccactccaagcccctctgcaagaagcagccccgaccaaagcctcaagagctccagccctcacagcagccctgggaatacggtgtcccctgtgggccccggctctcaagagcaccgggactcctacgcttacttgaacgcgtcctacggcacggaaggtttgggctcctaccctggctacgcacccctgccccacctcccgccagctttcatcccctcgtacaacgctcactaccccaagttcctcttgcccccctacggcatgaattgtaatggcctgagcgctgtgagcagcatgaatggcatcaacaactttggcctcttcccgaggctgtgccctgtctacagcaatctcctcggtgggggcagcctgccccaccccatgctcaaccccacttctctcccgagctcgctgccctcagatggagcccggaggttgctccagccggagcatcccagggaggtgcttgtcccggcgccccacagtgccttctcctttaccggggccgccgccagcatgaaggacaaggcctgtagccccacaagcgggtctcccacggcgggaacagccgccacggcagaacatgtggtgcagcccaaagctacctcagcagcgatggcagcccccagcagcgacgaagccatgaatctcattaaaaacaaaagaaacatgaccggctacaagacccttccctacccgctgaagaagcagaacggcaagatcaagtacgaatgcaacgtttgcgccaagactttcggccagctctccaatctgaaggtccacctgagagtgcacagtggagaacggcctttcaaatgtcagacttgcaacaagggctttactcagctcgcccacctgcagaaacactacctggtacacacgggagaaaagccacatgaatgccaggtctgccacaagagatttagcagcaccagcaatctcaagacccacctgcgactccattctggagagaaaccataccaatgcaaggtgtgccctgccaagttcacccagtttgtgcacctgaaactgcacaagcgtctgcacacccgggagcggccccacaagtgctcccagtgccacaagaactacatccatctctgtagcctcaaggttcacctgaaagggaactgcgctgcggccccggcgcctgggctgcccttggaagatctgacccgaatcaatgaagaaatcgagaagtttgacatcagtgacaatgctgaccggctcgaggacgtggaggatgacatcagtgtgatctctgtagtggagaaggaaattctggccgtggtcagaaaagagaaagaagaaactggcctgaaagtgtctttgcaaagaaacatggggaatggactcctctcctcagggtgcagcctttatgagtcatcagatctacccctcatgaagttgcctcccagcaacccactacctctggtacctgtaaaggtcaaacaagaaacagttgaaccaatggatccttaagattttcagaaaacacttattt

SEQ ID NO: 23405 - DNA, 5164 bp, Homo sapiens
  source 1..5164: mol_type = unassigned DNA
gggaagccagacggttaacacagacaaagtgctgccgtgacactcggccctccagtgttgcggagaggcaagagcagcgaccgcggcacctgtccgcccggagctgggacgcgggcgcccgggcggccggacgaagcgaggagggaccgccgaggtgcgcgtctgtgcggctcagcctggcgggggacgcggggagaatgtggactgggtagagatgaacgagacttttctcagatgttggatatttgcttggaaaaacgtgtgggtacgaccttggctgcccccaagtgtaactccagcactgtgaggtttcagggattggcagaggggaccaaggggaccatgaaaatggacatggaggatgcggatatgactctgtggacagaggctgagtttgaagagaagtgtacatacattgtgaacgaccacccctgggattctggtgctgatggcggtacttcggttcaggcggaggcatccttaccaaggaatctgcttttcaagtatgccaccaacagtgaagaggttattggagtgatgagtaaagaatacataccaaagggcacacgttttggacccctaataggtgaaatctacaccaatgacacagttcctaagaacgccaacaggaaatatttttggaggatctattccagaggggagcttcaccacttcattgacggctttaatgaagagaaaagcaactggatgcgctatgtgaatccagcacactctccccgggagcaaaacctggctgcgtgtcagaacgggatgaacatctacttctacaccattaagcccatccctgccaaccaggaacttcttgtgtggtattgtcgggactttgcagaaaggcttcactacccttatcccggagagctgacaatgatgaatctcacacaaacacagagcagtctaaagcaaccgagcactgagaaaaatgaactctgcccaaagaatgtcccaaagagagagtacagcgtgaaagaaatcctaaaattggactccaacccctccaaaggaaaggacctctaccgttctaacatttcacccctcacatcagaaaaggacctcgatgactttagaagacgtgggagccccgaaatgcccttctaccctcgggtcgtttaccccatccgggcccctctgccagaagactttttgaaagcttccctggcctacgggatcgagagacccacgtacatcactcgctcccccattccatcctccaccactccaagcccctctgcaagaagcagccccgaccaaagcctcaagagctccagccctcacagcagccctgggaatacggtgtcccctgtgggccccggctctcaagagcaccgggactcctacgcttacttgaacgcgtcctacggcacggaaggtttgggctcctaccctggctacgcacccctgccccacctcccgccagctttcatcccctcgtacaacgctcactaccccaagttcctcttgcccccctacggcatgaattgtaatggcctgagcgctgtgagcagcatgaatggcatcaacaactttggcctcttcccgaggctgtgccctgtctacagcaatctcctcggtgggggcagcctgccccaccccatgctcaaccccacttctctcccgagctcgctgccctcagatggagcccggaggttgctccagccggagcatcccagggaggtgcttgtcccggcgccccacagtgccttctcctttaccggggccgccgccagcatgaaggacaaggcctgtagccccacaagcgggtctcccacggcgggaacagccgccacggcagaacatgtggtgcagcccaaagctacctcagcagcgatggcagcccccagcagcgacgaagccatgaatctcattaaaaacaaaagaaacatgaccggctacaagacccttccctacccgctgaagaagcagaacggcaagatcaagtacgaatgcaacgtttgcgccaagactttcggccagctctccaatctgaaggtccacctgagagtgcacagtggagaacggcctttcaaatgtcagacttgcaacaagggctttactcagctcgcccacctgcagaaacactacctggtacacacgggagaaaagccacatgaatgccaggtctgccacaagagatttagcagcaccagcaatctcaagacccacctgcgactccattctggagagaaaccataccaatgcaaggtgtgccctgccaagttcacccagtttgtgcacctgaaactgcacaagcgtctgcacacccgggagcggccccacaagtgctcccagtgccacaagaactacatccatctctgtagcctcaaggttcacctgaaagggaactgcgctgcggccccggcgcctgggctgcccttggaagatctgacccgaatcaatgaagaaatcgagaagtttgacatcagtgacaatgctgaccggctcgaggacgtggaggatgacatcagtgtgatctctgtagtggagaaggaaattctggccgtggtcagaaaagagaaagaagaaactggcctgaaagtgtctttgcaaagaaacatggggaatggactcctctcctcagggtgcagcctttatgagtcatcagatctacccctcatgaagttgcctcccagcaacccactacctctggtacctgtaaaggtcaaacaagaaacagttgaaccaatggatccttaagattttcagaaaacacttattttgtttcttaagttatgacttggtgagtcagggtgcctgtaggaagtggcttgtacataatcccagctctgcaaagctctctcgacagcaaatggtttcccctcacctctggaattaaagaaggaactccaaagttactgaaatctcagggcatgaacaaggcaaaggccatatatatatatatatatatatctgtatacatattatatatacttatttacacctgtgtctatatatttgcccctgtgtattttgaatatttgtgtggacatgtttgcatagccttcccattactaagactattacctagtcataattattttttcaatgataatccttcataatttattatacaatttatcattcagaaagcaataattaaaaaagtttacaatgactggaaagattccttgtaatttgagtataaatgtatttttgtcttgtggccattctttgtagataatttctgcacatctgtataagtacctaagatttagttaaacaaatatatgacttcagtcaacctctctctctaataatggtttgaaaatgaggtttgggtaattgccaatgttggacagttgatgtgttcattcctgggatcctatcatttgaacagcattgtacataacttgggggtatgtgtgcaggattacccaagaataacttaagtagaagaaacaagaaagggaatcttgtatatttttgttgatagttcatgtttttcccccagccacaattttaccggaagggtgacaggaaggctttaccaacctgtctctccctccaaaagagcagaatcctcccaccgccctgccctccccaccgagtcctgtggccattcagagcggccacatgacttttgcatccattgtattatcagaaaatgtgaagaagaaaaaaatgccatgttttaaaaccactgcgaaaatttccccaaagcataggtggctttgtgtgtgtgcgatttgggggcttgagtctgggtggtgttttgttgttggtttttgttgctttttttttttttttttttttaatgtcaaaattgcacaaacatggtgctctaccaggaaggattcgaggtagataggctcaggccacactttaaaaacaaacacacaaacaacaaaaaacgggtattctagtcatcttggggtaaaagcgggtaatgaacattcctatccccaacacatcaattgtattttttctgtaaaactcagattttcctcagtatttgtgtttttacattttatggttaatttaatggaagatgaaagggcattgcaaagttgttcaacaacagttacctcattgagtgtgtccagtagtgcaggaaatgatgtcttatctaatgatttgcttctctagaggagaaaccgagtaaatgtgctccagcaagatagactttgtgttattctatcttttattctgctaagcccaaagattacatgttggtgttcaaagtgtagcaaaaaatgatgtatatttataaatctatttataccactatatcatatgtatatatatttataaccacttaaattgtgagccaagccatgtaaaagatctactttttctaagggcaaaaaaaaaaaaaaaaaaaaaagaacactcctttctgagactttgcttaatacttggtgacctcacaatcacgtcggtatgattgggcacccttgcctactgtaagagaccctaaaaccttggtgcagtggtggggaccacaaaacaaccagggaggaagagatacatcattttttagtattaaggaccatctaagacagctctattttttttttgccactttatgattatgtggtcacacccaagtcacagaaataaaaaactgactttaccgctgcaatttttctgttttcctccttactaaatactgatacattactccaatctattttataattatatttgacattttgttcacatcaactaatgttcacctgtagaagagaacaaatttcgaataatccagggaaacccaagagccttactggtcttctgtaacttccaagactgacagctttttatgtatcagtgtttgataaacacagtccttaactgaaggtaaaccaaagcatcacgttgacattagaccaaatacttttgattcccaactactcgtttgttctttttctccttttgtgctttcccatagtgagaatttttataaagacttcttgcttctctcaccatccatccttctcttttctgcctcttacatgtgaatgttgagcccacaatcaacagtggttttattttttcctctactcaaagttaaaactgaccaaagttactggctttttactttgctagaacaacaaactatcttatgtttacatactggtttacaatgttatttatgtgcaaattgtcaaaatgtaaattaaatataaatgttcatgctttaccaaaa

SEQ ID NO: 23406 - DNA, 583 bp, Homo sapiens
  source 1..583: mol_type = unassigned DNA
ccttttcagtcttccatgtgagaggatgaaagagagctcgcagcagagggaggaggcagttgttttgaaagttgttttgcgttgggagctggtgggaaagttcggtcttccccatttggaaaaggcaggctgggttccgctcctgcaccacacgcgctttccatttttagcttcattcagaggcagacagagctccttcctcttcctctccttgtttgtgacacttttctgaggcagcttttccacagtgccgagggtctggcggccatgaccccaggcattctgggacactggactgtgtgcccagaacatttttctgccatgagaggctgcccccaagtgtaactccagcactgtgaggtttcagggattggcagaggggaccaaggggaccatgaaaatggacatggaggatgcggatatgactctgtggacagaggctgagtttgaagagaagtgtacatacattgtgaacgaccacccctgggattctggtgctgatggcggtacttcggttcaggcggaggcatccttaccaaggaatctgcttttcaagtatgccaccaacagtgaagaggttatt

SEQ ID NO: 23407 - DNA, 4247 bp, Homo sapiens
  source 1..4247: mol_type = unassigned DNA
ggcaagagcagcgaccgcggcacctgtccgcccggagctgggacgcgggcgcccgggcggccggacgaagcgaggagggaccgccgaggtgcgcgtctgtgcggctcagcctggcgggggacgcggggagaatgtggactgggtagagatgaacgagacttttctcagatgttggatatttgcttggaaaaacgtgtgggtacgaccttggctgcccccaagtgtaactccagcactgtgaggtttcagggattggcagaggggaccaaggggaccatgaaaatggacatggaggatgcggatatgactctgtggacagaggctgagtttgaagagaagtgtacatacattgtgaacgaccacccctgggattctggtgctgatggcggtacttcggttcaggcggaggcatccttaccaaggaatctgcttttcaagtatgccaccaacagtgaagaggttattggagtgatgagtaaagaatacataccaaagggcacacgttttggacccctaataggtgaaatctacaccaatgacacagttcctaagaacgccaacaggaaatatttttggaggatctattccagaggggagcttcaccacttcattgacggctttaatgaagagaaaagcaactggatgcgctatgtgaatccagcacactctccccgggagcaaaacctggctgcgtgtcagaacgggatgaacatctacttctacaccattaagcccatccctgccaaccaggaacttcttgtgtggtattgtcgggactttgcagaaaggcttcactacccttatcccggagagctgacaatgatgaatctcacacaaacacagagcagtctaaagcaaccgagcactgagaaaaatgaactctgcccaaagaatgtcccaaagagagagtacagcgtgaaagaaatcctaaaattggactccaacccctccaaaggaaaggacctctaccgttctaacatttcacccctcacatcagaaaaggacctcgatgactttagaagacgtgggagccccgaaatgcccttctaccctcgggtcgtttaccccatccgggcccctctgccagaagactttttgaaagcttccctggcctacgggatcgagagacccacgtacatcactcgctcccccattccatcctccaccactccaagcccctctgcaagaagcagccccgaccaaagcctcaagagctccagccctcacagcagccctgggaatacggtgtcccctgtgggccccggctctcaagagcaccgggactcctacgcttacttgaacgcgtcctacggcacggaaggtttgggctcctaccctggctacgcacccctgccccacctcccgccagctttcatcccctcgtacaacgctcactaccccaagttcctcttgcccccctacggcatgaattgtaatggcctgagcgctgtgagcagcatgaatggcatcaacaactttggcctcttcccgaggctgtgccctgtctacagcaatctcctcggtgggggcagcctgcccaccccatgctcaaccccacttctcccgagctcgctgccctcagatggagcccggaggttgctccagccggagcatcccagggaggtgcttgtcccggcgccccacagtgccttctcctttaccggggccgccgccagcatgaaggacaaggcctgtagccccacaagcgggtctcccacggcgggaacagccgccacggcagaacatgtggtgcagcccaaagctacctcagcagcgatggcagcccccagcagcgacgaagccatgaatctcattaaaaacaaaagaaacatgaccggctacaagacccttccctacccgctgaagaagcagaacggcaagatcaagtacgaatgcaacgtttgcgccaagactttcggccagctctccaatctgaaggtccacctgagagtgcacagtggagaacggcctttcaaatgtcagacttgcaacaagggctttactcagctcgcccacctgcagaaacactacctggtacacacgggagaaaagccacatgaatgccaggtctgccacaagagatttagcagcaccagcaatctcaagacccacctgcgactccattctggagagaaaccataccaatgcaaggtgtgccctgccaagttcacccagtttgtgcacctgaaactgcacaagcgtctgcacacccgggagcggccccacaagtgctcccagtgccacaagaactacatccatctctgtagcctcaaggttcacctgaaagggaactgcgctgcggccccggcgcctgggctgcccttggaagatctgacccgaatcaatgaagaaatcgagaagtttgacatcagtgacaatgctgaccggctcgaggacgtggaggatgacatcagtgtgatctctgtagtggagaaggaaattctggccgtggtcagaaaagagaaagaagaaactggcctgaaagtgtctttgcaaagaaacatggggaatggactcctctcctcagggtgcagcctttatgagtcatcagatctacccctcatgaagttgcctcccagcaacccactacctctggtacctgtaaaggtcaaacaagaaacagttgaaccaatggatccttaagattttcagaaaacacttattttgtttcttaagttatgacttggtgagtcagggtgcctgtaggaagtggcttgtacataatcccagctctgcaaagctctctcgacagcaaatggtttcccctcacctctggaattaaagaaggaactccaaagttactgaaatctcagggcatgaacaaggcaaaggccatatatatatatatatatatatctgtatacatattatatatacttatttacacctgtgtctatatatttgcccctgtgtattttgaatatttgtgtggacatgtttgcatagccttcccattactaagactattacctagtcataattattttttcaatgataatccttcataatttattatacaatttatcattcagaaagcaataattaaaaaagtttacaatgactggaaagattccttgtaatttgagtataaatgtatttttgtcttgtggccattctttgtagataatttctgcacatctgtataagtacctaagatttagttaaacaaatatatgacttcagtcaacctctctctctaataatggtttgaaaatgaggtttgggtaattgccaatgttggacagttgatgtgttcattcctgggatcctatcatttgaacagcattgtacataacttgggggtatgtgtgcaggattacccaagaataacttaagtagaagaaacaagaaagggaatcttgtatatttttgttgatagttcatgtttttcccccagccacaattttaccggaagggtgacaggaaggctttaccaacctgtctctccctccaaaagagcagaatcctcccaccgccctgccctccccaccgagtcctgtggccattcagagcggccacatgacttttgcatccattgtattatcagaaaatgtgaagaagaaaaaaatgccatgttttaaaaccactgcgaaaatttccccaaagcataggtggctttgtgtgtgtgcgatttgggggcttgagtctgggtggtgttttgttgttggtttttgttgctttttttttttttttttttttaatgtcaaaattgcacaaacatggtgctctaccaggaaggattcgaggtagataggctcaggccacactttaaaaacaaacacacaaacaacaaaaaacgggtattctagtcatcttggggtaaaagcgggtaatgaacattcctatccccaacacatcaattgtattttttctgtaaaactcagattttcctcagtatttgtgtttttacattttatggttaatttaatggaagatgaaagggcattgcaaagttgttcaacaacagttacctcattgagtgtgtccagtagtgcaggaaatgatgtcttatctaatgatttgcttctctagaggagaaaccgagtaaatgtgctccagcaagatagactttgtgttattctatcttttattctgctaagcccaaagattacatgttggtgttcaaagtgtagcaaaaaatgatgtatatttataaatctatttataccactatatcatatgtatatatatttataaccacttaaattgtgagccaagccatgtaaaagatctactttttctaaggg

SEQ ID NO: 23408 - DNA, 2344 bp, Homo sapiens
  source 1..2344: mol_type = unassigned DNA
aattccctaccctcgacctgtcgatgccccgcggccccgcccgccctcttaagcctggctcagccctcagggcccgcccgaagtctaccgagcccgagtggcctaccgagcccgagtggccccgcagcgtccaggaggcgcccgctccgcggtggcgctcttggaggtggtgtcggagagccgccgagcgtgcggtcccgggatggctctaccccggccaagtgaggccgtgcctcaggacaaggtgtgctacccgccggagagcagcccgcagaacctggccgcgtactacacgcctttcccgtcctatggacactacagaaacagcctggccaccgtggaggaagacttccaacctttccggcagctggaggccgcagcgtctgctgcccccgccatgccccccttccccttccggatggcgcctcccttgctgagcccgggtctgggcctacagagggagcctctctacgatctgccctggtacagcaagctgccaccgtggtacccaattccccacgtccccagggaagtgccgcccttcctgagcagcagccacgagtacgcgggtgccagcagtgaagatctgggccaccaaatcattggtggcgacaacgagagtggcccgtgttgtggacctgacactttaattccaccgccccctgcggatgcttctctgttacctgaggggctgaggacctcccagttattaccttgctcacccagcaagcagtcagaggatggtcccaaaccctccaaccaagaagggaagtcccctgctcggttccagttcacggaggaggacctgcacttcgttctgtacggggtcactcccagcctggagcacccagccagcctgcaccatgcgatttcaggcctcctggtccccccagacagctctggatctgattctcttcctcaaactctggataaagactcccttcaacttccagaaggtctatgcctcatgcagacggtgtttggtgaagtcccacattttggtgtgttctgcagtagttttatcgccaaaggagtcaggtttgggccctttcaaggtaaagtggtcaatgccagtgaagtgaagacctacggagacaattctgtgatgtgggagatctttgaagatggtcatttgagccactttatagatggaaaaggaggtacggggaactggatgtcctatgtcaactgtgcccgcttccccaaggagcagaacctagttgctgtgcagtgtcaagggcatatattttatgagagctgcaaagagatccatcagaaccaagagctccttgtgtggtatggagactgctatgagaaatttctggatattcctgtgagccttcaggtcacagagccggggaagcagccatctgggccctctgaagagtctgcagaaggctacagatgtgaaagatgtgggaaggtatttacctacaaatattacagagataagcacctcaagtacaccccctgtgtggacaagggcgataggaaatttccctgttctctctgcaaacgatcctttgagaagcgggaccggcttcggatccacattcttcatgttcatgagaagcaccggcctcacaagtgttctacatgtgggaaatgtttctctcaatcttccagcctaaacaaacacatgcgagtccactctggagacagaccataccagtgtgtgtattgtactaagaggttcacagcctccagcatactccgcacacacatcaggcagcactccggggagaagcccttcaaatgcaagtactgtggtaaatcttttgcatcccatgctgcccatgacagccatgtccggcgttcacacaaggaggatgatggctgctcatgcagcatctgtgggaaaatcttctcagatcaagaaacattctactcccacatgaagtttcatgaagactactagccctgccaggcacaatgactcacgcctgtaatcccagcactttgggaggcagaggtgggtggatcactcaagtccaggagttcgagaccagcctgggcaacatggtgaaatcctgtctctaccaaaaaaatacaaaaatcagctgggggtggtggcacatgcctgtggttccagccactcaggaggtcgaggtggcaggatggtttgagcacaggagacggaggttgctgtgagctgagatcgccccactgcttttcaacctgggtgacagaaccagaccctgtctcaaaacaaaacaaaacaaaaaaaatgagtagccctcaagagtgtggagacaatgtaaaaacaagagattcggattctctctatttccttttatgggttatagaagtccctgcagttggctgtgtgtggtggctcacgcct

SEQ ID NO: 23409 - DNA, 422 bp, Homo sapiens
  source 1..422: mol_type = unassigned DNA
acgccgccttcgggcaggctgggatcttccgaactgggagcggagagtaaggggctcgaccccgggacgcgagtccggccttctggactccggttcaggagccgccgagcgtgcggtcccgggatggctctaccccggccaagtgaggccgtgcctcaggacaaggtgtgctacccgccggagagcagcccgcagaacctggccgcgtactacacgcctttcccgtcctatggacactacagaaacagcctggccaccgtggaggaagacttccaacctttccggcagctggaggccgcagcgtctgctgcccccgccatgccccccttccccttccggatggcgcctcccttgctgagcccgggtctgggcctacagagggagcctctctacgatctgccctggtacagcaagctgccacc

SEQ ID NO: 23410 - DNA, 8690 bp, Homo sapiens
  source 1..8690: mol_type = unassigned DNA
gctgcttctggactcaaggaggaggagagagattccgcgagccgacaccatgcgatccaaggcgagggcgaggaagctagccaaaagtgacggtgacgttgtaaataatatgtatgagcccaaccgggacctgctggccagccacagcgcggaggacgaggccgaggacagtgccatgtcgcccatccccgtggggccaccgtcccccttccccaccagcgaggacttcacccccaaggagggctcgccgtacgaggcccctgtctacattcctgaagacattccgatcccagcagacttcgagctccgagagtcctccatcccaggggctggcctgggggtctgggccaagaggaagatggaagccggggagaggctgggcccctgcgtggtggtgccccgggcggcggcaaaggagacagacttcggatgggagcaaatactgacggacgtggaagtgtcgccccaggaaggctgcatcacaaagatctccgaagacctgggcagtgagaagttctgcgtggatgcaaatcaggcgggggctggcagctggctcaagtacatccgtgtggcgtgctcctgcgatgaccagaacctcaccatgtgtcagatcagtgagcagatttactataaagtcattaaggacattgagccaggtgaggagctgctggtgcacgtgaaggaaggcgtctaccccctgggcacagtgccgcccggcctggacgaggagcccacgttccgctgtgacgagtgtgacgaactcttccagtccaagctggacctgcggcgccataagaagtacacgtgtggctcagtgggggctgcgctctacgagggcctggctgaggagctcaagcccgagggccttggcggtggcagcggccaagcccacgagtgcaaggactgcgagcggatgttccccaacaagtacagcctggagcagcacatggtcatccacacggaggagcgcgagtacaaatgcgaccagtgtcccaaggccttcaactggaagtccaacctcatccgccaccagatgtcccacgacagcggcaaacgcttcgaatgtgaaaactgcgtgaaggtgttcacggaccccagcaaccttcagcggcacatccgctcgcagcacgtgggcgctcgggcccacgcctgccccgactgcgggaagaccttcgccacgtcctccggcctcaagcagcacaagcatatccacagcacggtgaagcctttcatatgtgaggtctgccacaagtcctacacgcagttctccaacctgtgccggcacaagcggatgcacgccgactgccgcacgcagatcaagtgcaaggactgtggccagatgttcagcactacctcctccctcaacaagcaccggcgcttctgcgagggcaagaaccattacacgccgggcggcatctttgccccgggcctgcccttgacccccagccccatgatggacaaggcaaaaccctcccccagcctcaatcacgccagcctgggcttcaacgagtactttccctccaggccgcacccggggagcctgcccttctccacggcgcctcccacgttccccgcactcacccccggcttcccgggcatcttccctccatccttgtacccccggccgcctctgctacctcccacatcgctgctcaagagccccctgaaccacacccaggacgccaagctccccagtcccctggggaacccagccctgcccctggtctccgccgtcagcaacagcagccagggcacgacggcagctgcggggcccgaggagaagttcgagagccgcctggaggactcctgtgtggagaagctgaagaccaggagcagcgacatgtcggacggcagtgactttgaggacgtcaacaccaccacggggaccgacctggacacgaccacggggacgggctcggacctggacagcgacgtggacagcgaccctgacaaggacaagggcaagggcaagtccgccgagggccagcccaagtttgggggcggcttggcgcccccgggggccccgaacagcgtggccgaggtgcctgtcttctattcccagcactcattcttcccgccacccgacgagcagctgctgactgcaacgggcgccgccggggactccatcaaggccatcgcatccattgccgagaagtactttggccccggcttcatggggatgcaggagaagaagctgggctcgctcccctaccactcggcgttccccttccagttcctgcccaacttcccccactccctttaccccttcacggaccgagccctcgcccacaacttgctggtcaaggccgagccaaagtcaccccgggacgccctcaaggtgggcggccccagtgccgagtgcccctttgatctcaccaccaagcccaaagacgtgaagcccatcctgcccatgcccaagggcccctcggcccccgcatccggcgaggagcagccgctggacctgagcatcggcagccgggcccgtgccagccaaaacggcggcgggcgggagccccgcaagaaccacgtctatggggaacgcaagctgggcgccggcgaggggctgccccaggtgtgcccggcgcggatgccccagcagcccccgctccactacgccaagccctcgcccttcttcatggaccccatctacagcagggtagaaaagcggaaggtcacagaccccgtgggagccctgaaggagaagtacctgcggccgtccccgctgctcttccacccccagatgtcagccatagagaccatgacagagaagctggagagctttgcagccatgaaggcggactcgggcagctccctgcagcccctcccccaccaccccttcaacttccggtccccacccccaacgctctccgaccccatcctcaggaagggcaaggagcgatacacgtgcaggtactgtgggaagatcttccccagatcagccaatctcaccagacacctgaggacgcacactggggagcagccgtacaggtgtaagtactgcgaccgctccttcagcatctcttcgaacctccagcggcacgtccggaacatccacaacaaggagaagcctttcaagtgccacctgtgcaaccgctgcttcgggcagcagaccaacctggaccggcacctcaagaagcacgagcacgagaacgcaccagtgagccagcaccccggggtcctcacgaaccacctggggaccagcgcgtcctctcccacctcagagtcggacaaccacgcacttttagacgagaaagaagactcttatttctcggaaatcagaaactttattgccaatagtgagatgaaccaagcatcaacgcgaacagagaaacgggcggacatgcagatcgtggacggcagtgcccagtgtccaggcctagccagtgagaagcaggaggacgtggaggaggaggacgacgatgacctggaggaggacgatgaggacagcctggccgggaagtcgcaggatgacaccgtgtcccccgcacccgagccccaggccgcctacgaggatgaggaggatgaggagccagccgcctccctggccgtgggctttgaccacacccgaaggtgtgctgaggaccacgaaggcggtctgttagctttggagccgatgccgacttttgggaaggggctggacctccgcagagcagctgaggaagcatttgaagttaaagatgtgcttaattccaccttagattctgaggctttaaaacatacactgtgcaggcaggctaagaaccaggcatatgcaatgatgctgtccctttccgaagacactcctctccacaccccctcccagggttctctggacgcttggttgaaggtcactggagccacgtcggagtctggagcatttcaccccatcaaccacctctgacgggctgggcagccgggggccggtggccagagcgagggcaccagccacgaaggacggaggcgggcggggccccggagaaccctgtccctgcgtgtggccactcctcagcatcctccccacccaccatggttcattccgacttttccaatggaaactcagatcccaaaagtccctaaagcagtcgtagagtctcaccatctccaaggattggtcttgagaacactgttcagtgacggccatgcaggtggccgtccaaagacagccaacggagctgcctcgcagaatcagccagtgggcaggtggacgctctgctgagacagaagctggtggccactgccgggtgcccgcgtggggtcgcggaagggaatggatagactggtgtgctcaaaagagagagatcactcaaatgatttttataatgaaatgacaagaataacccttttggtaaccgtattgactgcagagtctatttaagcatgtggttttaaaaatagacagtattttttaaaaatcaaaaaatgacttgcaaattgttttttaaaagtaattttgcattgctttgaaatttgagctcatttgcaaacccgagtctgcctgggaacccgcactgtgcctgggtgtattctttatactgtagataatggagaaattttctatctctgtccctatttgtataagccaaggtgatgctgggtgccccgaggcagaacaagaggcgcggggccacacccgtgaaccatgcagacggccgaagaagtcttaggcagggcgccctgggctgcaggcctgcccgaggctgggatgggaagtgtgcctgccctcgtgtgacatggaattggtgtcaggaccgccacgtggccttcagaggaatccacaggtccccacccaagatccctcaattatatggggaagtcgagggcctgtggcttggatccgccatgcagagatgtggccgggcacccatcttccttccctcctctgtccctgcctcggccaccccacgcgggaacccagcgccgtcctctgaaggcagggccttggccacgtcctgggtctcccacctcccacctgaccccagcggctccggtgtcctccacgtggctgccctggggagcaatcccagcggatcgctccgggccaccaagccgcacctgtgcctgagactccggatggacgacacagtcgtcacgtcgctcttcctgcgggttcttggcgagacacagcttgagaacagaagggcgtcgggggaacctgccgcaaggagcagagacagcacagccccccgggcccagccgcctccctctcttgggacgcaacttcttccccactcggatgggctttaaattattcccataggggccaatttcaaataataatttttttccctgatggaatttaccttaatctgtatataacttgtaattttttctaattcatttcttttcttattttatttcctccttaacagtatttttggcattagacattcttattgtgaagaaataatgttaatataagtatctggtgaaggaccaaaaccgtgtgataaggttgtgtgtcgtgtgggagtggggcgattttttatgtgccaaatacccccgtcccccccatgaatcctgctgtccctgctgccgtttaccagacaatcatatgtttttgttaaatttgcgtttcagttacatttgcatttaagacaagtgttctatttatttcttgtattgtttggaagaaaaaatgatgatagagtcccaaaaagaagagaaaaaaaatgcccaagttgccctttaaaaaaaaagagcgtaaatacaaacaggagtggtgcaagccgccttggtgtgggtttgtgtcacgtgtggacatctcctcaggctttgtgtcacgcgtggacatctcctcaggctgtccccagcggtgacgggaggtgtcctggctgctccaggacaaaagacaatcgtctctgtgggtgccgggtggtccaggcttgcactgaagacgtgccacggggaggctcctgcaggaggctcaacccgacggatcacagtgaaagggattcctcccacgccagatctgcacaacgaggcaagacaggacccacctgtgcgtgcgctggggccatggggtggccccgccggggcagcgggggagctgcctgcagaagagccagctggcgtgtcgggaaggatccaggatctgcaaacacaactgctcaggccttctcacgcgtttccacaacatcccctgggtcagacccaccaggtaccccgtaggaatttccagtttcccttgatctagatgggattcttataaaaattcaacctcagacataaacaccccatttctgtaaacccaaattatatggtttcttctgcgaaagagtaaggtgtgtgcttttttttttttgcaatatgaccccgtctctctgaagtgggacattcggacggatggagccctcagcgtgtcttttcagcaggagcagaaccgatgagagccgcccttaccgttggtctccggatcccccagtcccatcccgccgttttcggctgtcttcctaaccgtcctgtcttctcttggcgctctttccttccacctttcccaagagtcctggttgcacgttttaagtcatatattttcgtccccctgaaaatgatggcaagcccagtttctcctgagcattcagacccccaggccccagcacttggcgttttcaggaggccctgttcttagagcccctgacaaaggcagcacttatttcctgggctggtgcgccccaaaacacggccccgacacttagtgtggccccaggccccagcgagcctcgccctcccagttttgctctgcccagcagtgttggtgcccagagatgacaagggccagggagcctggcccgggtgtgagaattcagagattctggcctccagctgtcaccacaccgtaacggggccatgtaactgtgcagcatggacagggatgcgacggggcagctggctgtgtccatggccaggtggccagggtcagggctgcaagccaggggtccagggcccttccgttcagcccaaatgctgccccaatgctaactccttggattgtcaacccccatcccccaaatggaaattccgaaggaggcctcctcgcacctgccctccgctgctcctcagaccccagcccccagcgagccgacgtccccacccgttcctgctctcatccccaggttgggcacgtggggttcctcctctgtgggcctggcagacccttcatgagtgggacccaagatatcactgacttcaacccagaggatcgagcccctgcaccctgcctggggccctggggtgtggagcagtggctggggtgggcgtggtgtggcctgagagactgcccagctggagaggccttcctttacaaggccacgcgtgcagctgtcccatccagaccccgactggccaagacctccacgtccccagagtccagccctggaaattccaagggccctggcgtcctctgccttccccgcttccccatgagcgtctgcaaaacacttgcctgaatacatatcacgtattttagactcgaagcctcaaagcactggattgtggtcccctgccccctctgtcccgtccccctgcccaagtgactgaaacctactgagctatattcactgtgctgtcctagggggagggagagcagagctcgcccctgcactgcagccttgtgggggagggcaaggctctcctcccagccagggacgccaggacatagctgctcctggtcagtggaggtcagccgggtatcaaaagccatgaaactgtgtctctgtagcaatgagtgatactgtgacaaaaccatccttgcattcttcctagaagagttcctctgctccttccattccatttttgtgtttgttttgttcttttctgtcactgatccgtattaccacttttggaaaaaaataaataaataaataaataaaaggcagcttgagtttccaaacgtgtgattcacttgtgaacaaaagtcattctaacaattgccttcagcgtcacgtgcattgccactgcgctttcggcacgagggatgctgagccctggtgtcagagtcgtaatttaaagcgtgtgtgtatatggactttgtcccttaaggtcgatataaagaatcctcgcagaatcacagacctgtgccgcccgccaccttctgccattgttacattacagatttggtttagttttgttttgttttgttttttcttttagaactgtatagtattgaaaaagaaatcaaatgtaaatgtctggttttcatataatgtttaaaaagaccattgagaaggaggctggcgctcgccccatgtcccccttgattgtaaattgcttctgttctgtttataagtaaactgtgcatgactcctgcttagcggtcattatcgtgtctgttggtgaaatttttattaaaaggaaaattctgtagatgcacttattgaatatgtgattaggatctacgtctgagactaggagtcctgaactgctgacgcgaaagaggcgcagttcccaattaatacggaaatcgctgtgggagaagaatgaaataagacgtgaagtgtaggaaatcatgaaaagaacaattttgcaaattgcattctgatgcttgtgatgaacacaaatgtacttgtgtagagacatttccttaagagaaagcctaggagaagccgatttggaggttaatgctgtagaataggactgtataccaaatgtaatctttccaatgctccaatgaatttatacatgagattgatatgcaataaatctgtgtgcttttctaa

SEQ ID NO: 23411 - DNA, 8721 bp, Homo sapiens
  source 1..8721: mol_type = unassigned DNA
ctgacaatgctggggagatgaagatagtgtgtggctgcttctggactcaaggaggaggagagagattccgcgagccgacaccatgcgatccaaggcgagggcgaggaagctagccaaaagtgacggtgacgttgtaaataatatgtatgagcccaaccgggacctgctggccagccacagcgcggaggacgaggccgaggacagtgccatgtcgcccatccccgtggggccaccgtcccccttccccaccagcgaggacttcacccccaaggagggctcgccgtacgaggcccctgtctacattcctgaagacattccgatcccagcagacttcgagctccgagagtcctccatcccaggggctggcctgggggtctgggccaagaggaagatggaagccggggagaggctgggcccctgcgtggtggtgccccgggcggcggcaaaggagacagacttcggatgggagcaaatactgacggacgtggaagtgtcgccccaggaaggctgcatcacaaagatctccgaagacctgggcagtgagaagttctgcgtggatgcaaatcaggcgggggctggcagctggctcaagtacatccgtgtggcgtgctcctgcgatgaccagaacctcaccatgtgtcagatcagtgagcaggtgatttactataaagtcattaaggacattgagccaggtgaggagctgctggtgcacgtgaaggaaggcgtctaccccctgggcacagtgccgcccggcctggacgaggagcccacgttccgctgtgacgagtgtgacgaactcttccagtccaagctggacctgcggcgccataagaagtacacgtgtggctcagtgggggctgcgctctacgagggcctggctgaggagctcaagcccgagggccttggcggtggcagcggccaagcccacgagtgcaaggactgcgagcggatgttccccaacaagtacagcctggagcagcacatggtcatccacacggaggagcgcgagtacaaatgcgaccagtgtcccaaggccttcaactggaagtccaacctcatccgccaccagatgtcccacgacagcggcaaacgcttcgaatgtgaaaactgcgtgaaggtgttcacggaccccagcaaccttcagcggcacatccgctcgcagcacgtgggcgctcgggcccacgcctgccccgactgcgggaagaccttcgccacgtcctccggcctcaagcagcacaagcatatccacagcacggtgaagcctttcatatgtgaggtctgccacaagtcctacacgcagttctccaacctgtgccggcacaagcggatgcacgccgactgccgcacgcagatcaagtgcaaggactgtggccagatgttcagcactacctcctccctcaacaagcaccggcgcttctgcgagggcaagaaccattacacgccgggcggcatctttgccccgggcctgcccttgacccccagccccatgatggacaaggcaaaaccctcccccagcctcaatcacgccagcctgggcttcaacgagtactttccctccaggccgcacccggggagcctgcccttctccacggcgcctcccacgttccccgcactcacccccggcttcccgggcatcttccctccatccttgtacccccggccgcctctgctacctcccacatcgctgctcaagagccccctgaaccacacccaggacgccaagctccccagtcccctggggaacccagccctgcccctggtctccgccgtcagcaacagcagccagggcacgacggcagctgcggggcccgaggagaagttcgagagccgcctggaggactcctgtgtggagaagctgaagaccaggagcagcgacatgtcggacggcagtgactttgaggacgtcaacaccaccacggggaccgacctggacacgaccacggggacgggctcggacctggacagcgacgtggacagcgaccctgacaaggacaagggcaagggcaagtccgccgagggccagcccaagtttgggggcggcttggcgcccccgggggccccgaacagcgtggccgaggtgcctgtcttctattcccagcactcattcttcccgccacccgacgagcagctgctgactgcaacgggcgccgccggggactccatcaaggccatcgcatccattgccgagaagtactttggccccggcttcatggggatgcaggagaagaagctgggctcgctcccctaccactcggcgttccccttccagttcctgcccaacttcccccactccctttaccccttcacggaccgagccctcgcccacaacttgctggtcaaggccgagccaaagtcaccccgggacgccctcaaggtgggcggccccagtgccgagtgcccctttgatctcaccaccaagcccaaagacgtgaagcccatcctgcccatgcccaagggcccctcggcccccgcatccggcgaggagcagccgctggacctgagcatcggcagccgggcccgtgccagccaaaacggcggcgggcgggagccccgcaagaaccacgtctatggggaacgcaagctgggcgccggcgaggggctgccccaggtgtgcccggcgcggatgccccagcagcccccgctccactacgccaagccctcgcccttcttcatggaccccatctacagggtagaaaagcggaaggtcacagaccccgtgggagccctgaaggagaagtacctgcggccgtccccgctgctcttccacccccagatgtcagccatagagaccatgacagagaagctggagagctttgcagccatgaaggcggactcgggcagctccctgcagcccctcccccaccaccccttcaacttccggtccccacccccaacgctctccgaccccatcctcaggaagggcaaggagcgatacacgtgcaggtactgtgggaagatcttccccagatcagccaatctcaccagacacctgaggacgcacactggggagcagccgtacaggtgtaagtactgcgaccgctccttcagcatctcttcgaacctccagcggcacgtccggaacatccacaacaaggagaagcctttcaagtgccacctgtgcaaccgctgcttcgggcagcagaccaacctggaccggcacctcaagaagcacgagcacgagaacgcaccagtgagccagcaccccggggtcctcacgaaccacctggggaccagcgcgtcctctcccacctcagagtcggacaaccacgcacttttagacgagaaagaagactcttatttctcggaaatcagaaactttattgccaatagtgagatgaaccaagcatcaacgcgaacagagaaacgggcggacatgcagatcgtggacggcagtgcccagtgtccaggcctagccagtgagaagcaggaggacgtggaggaggaggacgacgatgacctggaggaggacgatgaggacagcctggccgggaagtcgcaggatgacaccgtgtcccccgcacccgagccccaggccgcctacgaggatgaggaggatgaggagccagccgcctccctggccgtgggctttgaccacacccgaaggtgtgctgaggaccacgaaggcggtctgttagctttggagccgatgccgacttttgggaaggggctggacctccgcagagcagctgaggaagcatttgaagttaaagatgtgcttaattccaccttagattctgaggctttaaaacatacactgtgcaggcaggctaagaaccaggcatatgcaatgatgctgtccctttccgaagacactcctctccacaccccctcccagggttctctggacgcttggttgaaggtcactggagccacgtcggagtctggagcatttcaccccatcaaccacctctgacgggctgggcagccgggggccggtggccagagcgagggcaccagccacgaaggacggaggcgggcggggccccggagaaccctgtccctgcgtgtggccactcctcagcatcctccccacccaccatggttcattccgacttttccaatggaaactcagatcccaaaagtccctaaagcagtcgtagagtctcaccatctccaaggattggtcttgagaacactgttcagtgacggccatgcaggtggccgtccaaagacagccaacggagctgcctcgcagaatcagccagtgggcaggtggacgctctgctgagacagaagctggtggccactgccgggtgcccgcgtggggtcgcggaagggaatggatagactggtgtgctcaaaagagagagatcactcaaatgatttttataatgaaatgacaagaataacccttttggtaaccgtattgactgcagagtctatttaagcatgtggttttaaaaatagacagtattttttaaaaatcaaaaaatgacttgcaaattgttttttaaaagtaattttgcattgctttgaaatttgagctcatttgcaaacccgagtctgcctgggaacccgcactgtgcctgggtgtattctttatactgtagataatggagaaattttctatctctgtccctatttgtataagccaaggtgatgctgggtgccccgaggcagaacaagaggcgcggggccacacccgtgaaccatgcagacggccgaagaagtcttaggcagggcgccctgggctgcaggcctgcccgaggctgggatgggaagtgtgcctgccctcgtgtgacatggaattggtgtcaggaccgccacgtggccttcagaggaatccacaggtccccacccaagatccctcaattatatggggaagtcgagggcctgtggcttggatccgccatgcagagatgtggccgggcacccatcttccttccctcctctgtccctgcctcggccaccccacgcgggaacccagcgccgtcctctgaaggcagggccttggccacgtcctgggtctcccacctcccacctgaccccagcggctccggtgtcctccacgtggctgccctggggagcaatcccagcggatcgctccgggccaccaagccgcacctgtgcctgagactccggatggacgacacagtcgtcacgtcgctcttcctgcgggttcttggcgagacacagcttgagaacagaagggcgtcgggggaacctgccgcaaggagcagagacagcacagccccccgggcccagccgcctccctctcttgggacgcaacttcttccccactcggatgggctttaaattattcccataggggccaatttcaaataataatttttttccctgatggaatttaccttaatctgtatataacttgtaattttttctaattcatttcttttcttattttatttcctccttaacagtatttttggcattagacattcttattgtgaagaaataatgttaatataagtatctggtgaaggaccaaaaccgtgtgataaggttgtgtgtcgtgtgggagtggggcgattttttatgtgccaaatacccccgtcccccccatgaatcctgctgtccctgctgccgtttaccagacaatcatatgtttttgttaaatttgcgtttcagttacatttgcatttaagacaagtgttctatttatttcttgtattgtttggaagaaaaaatgatgatagagtcccaaaaagaagagaaaaaaaatgcccaagttgccctttaaaaaaaaagagcgtaaatacaaacaggagtggtgcaagccgccttggtgtgggtttgtgtcacgtgtggacatctcctcaggctttgtgtcacgcgtggacatctcctcaggctgtccccagcggtgacgggaggtgtcctggctgctccaggacaaaagacaatcgtctctgtgggtgccgggtggtccaggcttgcactgaagacgtgccacggggaggctcctgcaggaggctcaacccgacggatcacagtgaaagggattcctcccacgccagatctgcacaacgaggcaagacaggacccacctgtgcgtgcgctggggccatggggtggccccgccggggcagcgggggagctgcctgcagaagagccagctggcgtgtcgggaaggatccaggatctgcaaacacaactgctcaggccttctcacgcgtttccacaacatcccctgggtcagacccaccaggtaccccgtaggaatttccagtttcccttgatctagatgggattcttataaaaattcaacctcagacataaacaccccatttctgtaaacccaaattatatggtttcttctgcgaaagagtaaggtgtgtgcttttttttttttgcaatatgaccccgtctctctgaagtgggacattcggacggatggagccctcagcgtgtcttttcagcaggagcagaaccgatgagagccgcccttaccgttggtctccggatcccccagtcccatcccgccgttttcggctgtcttcctaaccgtcctgtcttctcttggcgctctttccttccacctttcccaagagtcctggttgcacgttttaagtcatatattttcgtccccctgaaaatgatggcaagcccagtttctcctgagcattcagacccccaggccccagcacttggcgttttcaggaggccctgttcttagagcccctgacaaaggcagcacttatttcctgggctggtgcgccccaaaacacggccccgacacttagtgtggccccaggccccagcgagcctcgccctcccagttttgctctgcccagcagtgttggtgcccagagatgacaagggccagggagcctggcccgggtgtgagaattcagagattctggcctccagctgtcaccacaccgtaacggggccatgtaactgtgcagcatggacagggatgcgacggggcagctggctgtgtccatggccaggtggccagggtcagggctgcaagccaggggtccagggcccttccgttcagcccaaatgctgccccaatgctaactccttggattgtcaacccccatcccccaaatggaaattccgaaggaggcctcctcgcacctgccctccgctgctcctcagaccccagcccccagcgagccgacgtccccacccgttcctgctctcatccccaggttgggcacgtggggttcctcctctgtgggcctggcagacccttcatgagtgggacccaagatatcactgacttcaacccagaggatcgagcccctgcaccctgcctggggccctggggtgtggagcagtggctggggtgggcgtggtgtggcctgagagactgcccagctggagaggccttcctttacaaggccacgcgtgcagctgtcccatccagaccccgactggccaagacctccacgtccccagagtccagccctggaaattccaagggccctggcgtcctctgccttccccgcttccccatgagcgtctgcaaaacacttgcctgaatacatatcacgtattttagactcgaagcctcaaagcactggattgtggtcccctgccccctctgtcccgtccccctgcccaagtgactgaaacctactgagctatattcactgtgctgtcctagggggagggagagcagagctcgcccctgcactgcagccttgtgggggagggcaaggctctcctcccagccagggacgccaggacatagctgctcctggtcagtggaggtcagccgggtatcaaaagccatgaaactgtgtctctgtagcaatgagtgatactgtgacaaaaccatccttgcattcttcctagaagagttcctctgctccttccattccatttttgtgtttgttttgttcttttctgtcactgatccgtattaccacttttggaaaaaaataaataaataaataaataaaaggcagcttgagtttccaaacgtgtgattcacttgtgaacaaaagtcattctaacaattgccttcagcgtcacgtgcattgccactgcgctttcggcacgagggatgctgagccctggtgtcagagtcgtaatttaaagcgtgtgtgtatatggactttgtcccttaaggtcgatataaagaatcctcgcagaatcacagacctgtgccgcccgccaccttctgccattgttacattacagatttggtttagttttgttttgttttgttttttcttttagaactgtatagtattgaaaaagaaatcaaatgtaaatgtctggttttcatataatgtttaaaaagaccattgagaaggaggctggcgctcgccccatgtcccccttgattgtaaattgcttctgttctgtttataagtaaactgtgcatgactcctgcttagcggtcattatcgtgtctgttggtgaaatttttattaaaaggaaaattctgtagatgcacttattgaatatgtgattaggatctacgtctgagactaggagtcctgaactgctgacgcgaaagaggcgcagttcccaattaatacggaaatcgctgtgggagaagaatgaaataagacgtgaagtgtaggaaatcatgaaaagaacaattttgcaaattgcattctgatgcttgtgatgaacacaaatgtacttgtgtagagacatttccttaagagaaagcctaggagaagccgatttggaggttaatgctgtagaataggactgtataccaaatgtaatctttccaatgctccaatgaatttatacatgagattgatatgcaataaatctgtgtgcttttct

SEQ ID NO: 23412 - DNA, 8087 bp, Homo sapiens
  source 1..8087: mol_type = unassigned DNA
ttctgcgcatactctgcaaaaatttactataaagtcattaaggacattgagccaggtgaggagctgctggtgcacgtgaaggaaggcgtctaccccctgggcacagtgccgcccggcctggacgaggagcccacgttccgctgtgacgagtgtgacgaactcttccagtccaagctggacctgcggcgccataagaagtacacgtgtggctcagtgggggctgcgctctacgagggcctggctgaggagctcaagcccgagggccttggcggtggcagcggccaagcccacgagtgcaaggactgcgagcggatgttccccaacaagtacagcctggagcagcacatggtcatccacacggaggagcgcgagtacaaatgcgaccagtgtcccaaggccttcaactggaagtccaacctcatccgccaccagatgtcccacgacagcggcaaacgcttcgaatgtgaaaactgcgtgaaggtgttcacggaccccagcaaccttcagcggcacatccgctcgcagcacgtgggcgctcgggcccacgcctgccccgactgcgggaagaccttcgccacgtcctccggcctcaagcagcacaagcatatccacagcacggtgaagcctttcatatgtgaggtctgccacaagtcctacacgcagttctccaacctgtgccggcacaagcggatgcacgccgactgccgcacgcagatcaagtgcaaggactgtggccagatgttcagcactacctcctccctcaacaagcaccggcgcttctgcgagggcaagaaccattacacgccgggcggcatctttgccccgggcctgcccttgacccccagccccatgatggacaaggcaaaaccctcccccagcctcaatcacgccagcctgggcttcaacgagtactttccctccaggccgcacccggggagcctgcccttctccacggcgcctcccacgttccccgcactcacccccggcttcccgggcatcttccctccatccttgtacccccggccgcctctgctacctcccacatcgctgctcaagagccccctgaaccacacccaggacgccaagctccccagtcccctggggaacccagccctgcccctggtctccgccgtcagcaacagcagccagggcacgacggcagctgcggggcccgaggagaagttcgagagccgcctggaggactcctgtgtggagaagctgaagaccaggagcagcgacatgtcggacggcagtgactttgaggacgtcaacaccaccacggggaccgacctggacacgaccacggggacgggctcggacctggacagcgacgtggacagcgaccctgacaaggacaagggcaagggcaagtccgccgagggccagcccaagtttgggggcggcttggcgcccccgggggccccgaacagcgtggccgaggtgcctgtcttctattcccagcactcattcttcccgccacccgacgagcagctgctgactgcaacgggcgccgccggggactccatcaaggccatcgcatccattgccgagaagtactttggccccggcttcatggggatgcaggagaagaagctgggctcgctcccctaccactcggcgttccccttccagttcctgcccaacttcccccactccctttaccccttcacggaccgagccctcgcccacaacttgctggtcaaggccgagccaaagtcaccccgggacgccctcaaggtgggcggccccagtgccgagtgcccctttgatctcaccaccaagcccaaagacgtgaagcccatcctgcccatgcccaagggcccctcggcccccgcatccggcgaggagcagccgctggacctgagcatcggcagccgggcccgtgccagccaaaacggcggcgggcgggagccccgcaagaaccacgtctatggggaacgcaagctgggcgccggcgaggggctgccccaggtgtgcccggcgcggatgccccagcagcccccgctccactacgccaagccctcgcccttcttcatggaccccatctacagcagggtagaaaagcggaaggtcacagaccccgtgggagccctgaaggagaagtacctgcggccgtccccgctgctcttccacccccagatgtcagccatagagaccatgacagagaagctggagagctttgcagccatgaaggcggactcgggcagctccctgcagcccctcccccaccaccccttcaacttccggtccccacccccaacgctctccgaccccatcctcaggaagggcaaggagcgatacacgtgcaggtactgtgggaagatcttccccagatcagccaatctcaccagacacctgaggacgcacactggggagcagccgtacaggtgtaagtactgcgaccgctccttcagcatctcttcgaacctccagcggcacgtccggaacatccacaacaaggagaagcctttcaagtgccacctgtgcaaccgctgcttcgggcagcagaccaacctggaccggcacctcaagaagcacgagcacgagaacgcaccagtgagccagcaccccggggtcctcacgaaccacctggggaccagcgcgtcctctcccacctcagagtcggacaaccacgcacttttagacgagaaagaagactcttatttctcggaaatcagaaactttattgccaatagtgagatgaaccaagcatcaacgcgaacagagaaacgggcggacatgcagatcgtggacggcagtgcccagtgtccaggcctagccagtgagaagcaggaggacgtggaggaggaggacgacgatgacctggaggaggacgatgaggacagcctggccgggaagtcgcaggatgacaccgtgtcccccgcacccgagccccaggccgcctacgaggatgaggaggatgaggagccagccgcctccctggccgtgggctttgaccacacccgaaggtgtgctgaggaccacgaaggcggtctgttagctttggagccgatgccgacttttgggaaggggctggacctccgcagagcagctgaggaagcatttgaagttaaagatgtgcttaattccaccttagattctgaggctttaaaacatacactgtgcaggcaggctaagaaccaggcatatgcaatgatgctgtccctttccgaagacactcctctccacaccccctcccagggttctctggacgcttggttgaaggtcactggagccacgtcggagtctggagcatttcaccccatcaaccacctctgacgggctgggcagccgggggccggtggccagagcgagggcaccagccacgaaggacggaggcgggcggggccccggagaaccctgtccctgcgtgtggccactcctcagcatcctccccacccaccatggttcattccgacttttccaatggaaactcagatcccaaaagtccctaaagcagtcgtagagtctcaccatctccaaggattggtcttgagaacactgttcagtgacggccatgcaggtggccgtccaaagacagccaacggagctgcctcgcagaatcagccagtgggcaggtggacgctctgctgagacagaagctggtggccactgccgggtgcccgcgtggggtcgcggaagggaatggatagactggtgtgctcaaaagagagagatcactcaaatgatttttataatgaaatgacaagaataacccttttggtaaccgtattgactgcagagtctatttaagcatgtggttttaaaaatagacagtattttttaaaaatcaaaaaatgacttgcaaattgttttttaaaagtaattttgcattgctttgaaatttgagctcatttgcaaacccgagtctgcctgggaacccgcactgtgcctgggtgtattctttatactgtagataatggagaaattttctatctctgtccctatttgtataagccaaggtgatgctgggtgccccgaggcagaacaagaggcgcggggccacacccgtgaaccatgcagacggccgaagaagtcttaggcagggcgccctgggctgcaggcctgcccgaggctgggatgggaagtgtgcctgccctcgtgtgacatggaattggtgtcaggaccgccacgtggccttcagaggaatccacaggtccccacccaagatccctcaattatatggggaagtcgagggcctgtggcttggatccgccatgcagagatgtggccgggcacccatcttccttccctcctctgtccctgcctcggccaccccacgcgggaacccagcgccgtcctctgaaggcagggccttggccacgtcctgggtctcccacctcccacctgaccccagcggctccggtgtcctccacgtggctgccctggggagcaatcccagcggatcgctccgggccaccaagccgcacctgtgcctgagactccggatggacgacacagtcgtcacgtcgctcttcctgcgggttcttggcgagacacagcttgagaacagaagggcgtcgggggaacctgccgcaaggagcagagacagcacagccccccgggcccagccgcctccctctcttgggacgcaacttcttccccactcggatgggctttaaattattcccataggggccaatttcaaataataatttttttccctgatggaatttaccttaatctgtatataacttgtaattttttctaattcatttcttttcttattttatttcctccttaacagtatttttggcattagacattcttattgtgaagaaataatgttaatataagtatctggtgaaggaccaaaaccgtgtgataaggttgtgtgtcgtgtgggagtggggcgattttttatgtgccaaatacccccgtcccccccatgaatcctgctgtccctgctgccgtttaccagacaatcatatgtttttgttaaatttgcgtttcagttacatttgcatttaagacaagtgttctatttatttcttgtattgtttggaagaaaaaatgatgatagagtcccaaaaagaagagaaaaaaaatgcccaagttgccctttaaaaaaaaagagcgtaaatacaaacaggagtggtgcaagccgccttggtgtgggtttgtgtcacgtgtggacatctcctcaggctttgtgtcacgcgtggacatctcctcaggctgtccccagcggtgacgggaggtgtcctggctgctccaggacaaaagacaatcgtctctgtgggtgccgggtggtccaggcttgcactgaagacgtgccacggggaggctcctgcaggaggctcaacccgacggatcacagtgaaagggattcctcccacgccagatctgcacaacgaggcaagacaggacccacctgtgcgtgcgctggggccatggggtggccccgccggggcagcgggggagctgcctgcagaagagccagctggcgtgtcgggaaggatccaggatctgcaaacacaactgctcaggccttctcacgcgtttccacaacatcccctgggtcagacccaccaggtaccccgtaggaatttccagtttcccttgatctagatgggattcttataaaaattcaacctcagacataaacaccccatttctgtaaacccaaattatatggtttcttctgcgaaagagtaaggtgtgtgcttttttttttttgcaatatgaccccgtctctctgaagtgggacattcggacggatggagccctcagcgtgtcttttcagcaggagcagaaccgatgagagccgcccttaccgttggtctccggatcccccagtcccatcccgccgttttcggctgtcttcctaaccgtcctgtcttctcttggcgctctttccttccacctttcccaagagtcctggttgcacgttttaagtcatatattttcgtccccctgaaaatgatggcaagcccagtttctcctgagcattcagacccccaggccccagcacttggcgttttcaggaggccctgttcttagagcccctgacaaaggcagcacttatttcctgggctggtgcgccccaaaacacggccccgacacttagtgtggccccaggccccagcgagcctcgccctcccagttttgctctgcccagcagtgttggtgcccagagatgacaagggccagggagcctggcccgggtgtgagaattcagagattctggcctccagctgtcaccacaccgtaacggggccatgtaactgtgcagcatggacagggatgcgacggggcagctggctgtgtccatggccaggtggccagggtcagggctgcaagccaggggtccagggcccttccgttcagcccaaatgctgccccaatgctaactccttggattgtcaacccccatcccccaaatggaaattccgaaggaggcctcctcgcacctgccctccgctgctcctcagaccccagcccccagcgagccgacgtccccacccgttcctgctctcatccccaggttgggcacgtggggttcctcctctgtgggcctggcagacccttcatgagtgggacccaagatatcactgacttcaacccagaggatcgagcccctgcaccctgcctggggccctggggtgtggagcagtggctggggtgggcgtggtgtggcctgagagactgcccagctggagaggccttcctttacaaggccacgcgtgcagctgtcccatccagaccccgactggccaagacctccacgtccccagagtccagccctggaaattccaagggccctggcgtcctctgccttccccgcttccccatgagcgtctgcaaaacacttgcctgaatacatatcacgtattttagactcgaagcctcaaagcactggattgtggtcccctgccccctctgtcccgtccccctgcccaagtgactgaaacctactgagctatattcactgtgctgtcctagggggagggagagcagagctcgcccctgcactgcagccttgtgggggagggcaaggctctcctcccagccagggacgccaggacatagctgctcctggtcagtggaggtcagccgggtatcaaaagccatgaaactgtgtctctgtagcaatgagtgatactgtgacaaaaccatccttgcattcttcctagaagagttcctctgctccttccattccatttttgtgtttgttttgttcttttctgtcactgatccgtattaccacttttggaaaaaaataaataaataaataaataaaaggcagcttgagtttccaaacgtgtgattcacttgtgaacaaaagtcattctaacaattgccttcagcgtcacgtgcattgccactgcgctttcggcacgagggatgctgagccctggtgtcagagtcgtaatttaaagcgtgtgtgtatatggactttgtcccttaaggtcgatataaagaatcctcgcagaatcacagacctgtgccgcccgccaccttctgccattgttacattacagatttggtttagttttgttttgttttgttttttcttttagaactgtatagtattgaaaaagaaatcaaatgtaaatgtctggttttcatataatgtttaaaaagaccattgagaaggaggctggcgctcgccccatgtcccccttgattgtaaattgcttctgttctgtttataagtaaactgtgcatgactcctgcttagcggtcattatcgtgtctgttggtgaaatttttattaaaaggaaaattctgtagatgcacttattgaatatgtgattaggatctacgtctgagactaggagtcctgaactgctgacgcgaaagaggcgcagttcccaattaatacggaaatcgctgtgggagaagaatgaaataagacgtgaagtgtaggaaatcatgaaaagaacaattttgcaaattgcattctgatgcttgtgatgaacacaaatgtacttgtgtagagacatttccttaagagaaagcctaggagaagccgatttggaggttaatgctgtagaataggactgtataccaaatgtaatctttccaatgctccaatgaatttatacatgagattgatatgcaataaatctgtgtgcttttct

SEQ ID NO: 23413 - DNA, 8718 bp, Homo sapiens
  source 1..8718: mol_type = unassigned DNA
ctgacaatgctggggagatgaagatagtgtgtggctgcttctggactcaaggaggaggagagagattccgcgagccgacaccatgcgatccaaggcgagggcgaggaagctagccaaaagtgacggtgacgttgtaaataatatgtatgagcccaaccgggacctgctggccagccacagcgcggaggacgaggccgaggacagtgccatgtcgcccatccccgtggggccaccgtcccccttccccaccagcgaggacttcacccccaaggagggctcgccgtacgaggcccctgtctacattcctgaagacattccgatcccagcagacttcgagctccgagagtcctccatcccaggggctggcctgggggtctgggccaagaggaagatggaagccggggagaggctgggcccctgcgtggtggtgccccgggcggcggcaaaggagacagacttcggatgggagcaaatactgacggacgtggaagtgtcgccccaggaaggctgcatcacaaagatctccgaagacctgggcagtgagaagttctgcgtggatgcaaatcaggcgggggctggcagctggctcaagtacatccgtgtggcgtgctcctgcgatgaccagaacctcaccatgtgtcagatcagtgagcagatttactataaagtcattaaggacattgagccaggtgaggagctgctggtgcacgtgaaggaaggcgtctaccccctgggcacagtgccgcccggcctggacgaggagcccacgttccgctgtgacgagtgtgacgaactcttccagtccaagctggacctgcggcgccataagaagtacacgtgtggctcagtgggggctgcgctctacgagggcctggctgaggagctcaagcccgagggccttggcggtggcagcggccaagcccacgagtgcaaggactgcgagcggatgttccccaacaagtacagcctggagcagcacatggtcatccacacggaggagcgcgagtacaaatgcgaccagtgtcccaaggccttcaactggaagtccaacctcatccgccaccagatgtcccacgacagcggcaaacgcttcgaatgtgaaaactgcgtgaaggtgttcacggaccccagcaaccttcagcggcacatccgctcgcagcacgtgggcgctcgggcccacgcctgccccgactgcgggaagaccttcgccacgtcctccggcctcaagcagcacaagcatatccacagcacggtgaagcctttcatatgtgaggtctgccacaagtcctacacgcagttctccaacctgtgccggcacaagcggatgcacgccgactgccgcacgcagatcaagtgcaaggactgtggccagatgttcagcactacctcctccctcaacaagcaccggcgcttctgcgagggcaagaaccattacacgccgggcggcatctttgccccgggcctgcccttgacccccagccccatgatggacaaggcaaaaccctcccccagcctcaatcacgccagcctgggcttcaacgagtactttccctccaggccgcacccggggagcctgcccttctccacggcgcctcccacgttccccgcactcacccccggcttcccgggcatcttccctccatccttgtacccccggccgcctctgctacctcccacatcgctgctcaagagccccctgaaccacacccaggacgccaagctccccagtcccctggggaacccagccctgcccctggtctccgccgtcagcaacagcagccagggcacgacggcagctgcggggcccgaggagaagttcgagagccgcctggaggactcctgtgtggagaagctgaagaccaggagcagcgacatgtcggacggcagtgactttgaggacgtcaacaccaccacggggaccgacctggacacgaccacggggacgggctcggacctggacagcgacgtggacagcgaccctgacaaggacaagggcaagggcaagtccgccgagggccagcccaagtttgggggcggcttggcgcccccgggggccccgaacagcgtggccgaggtgcctgtcttctattcccagcactcattcttcccgccacccgacgagcagctgctgactgcaacgggcgccgccggggactccatcaaggccatcgcatccattgccgagaagtactttggccccggcttcatggggatgcaggagaagaagctgggctcgctcccctaccactcggcgttccccttccagttcctgcccaacttcccccactccctttaccccttcacggaccgagccctcgcccacaacttgctggtcaaggccgagccaaagtcaccccgggacgccctcaaggtgggcggccccagtgccgagtgcccctttgatctcaccaccaagcccaaagacgtgaagcccatcctgcccatgcccaagggcccctcggcccccgcatccggcgaggagcagccgctggacctgagcatcggcagccgggcccgtgccagccaaaacggcggcgggcgggagccccgcaagaaccacgtctatggggaacgcaagctgggcgccggcgaggggctgccccaggtgtgcccggcgcggatgccccagcagcccccgctccactacgccaagccctcgcccttcttcatggaccccatctacagggtagaaaagcggaaggtcacagaccccgtgggagccctgaaggagaagtacctgcggccgtccccgctgctcttccacccccagatgtcagccatagagaccatgacagagaagctggagagctttgcagccatgaaggcggactcgggcagctccctgcagcccctcccccaccaccccttcaacttccggtccccacccccaacgctctccgaccccatcctcaggaagggcaaggagcgatacacgtgcaggtactgtgggaagatcttccccagatcagccaatctcaccagacacctgaggacgcacactggggagcagccgtacaggtgtaagtactgcgaccgctccttcagcatctcttcgaacctccagcggcacgtccggaacatccacaacaaggagaagcctttcaagtgccacctgtgcaaccgctgcttcgggcagcagaccaacctggaccggcacctcaagaagcacgagcacgagaacgcaccagtgagccagcaccccggggtcctcacgaaccacctggggaccagcgcgtcctctcccacctcagagtcggacaaccacgcacttttagacgagaaagaagactcttatttctcggaaatcagaaactttattgccaatagtgagatgaaccaagcatcaacgcgaacagagaaacgggcggacatgcagatcgtggacggcagtgcccagtgtccaggcctagccagtgagaagcaggaggacgtggaggaggaggacgacgatgacctggaggaggacgatgaggacagcctggccgggaagtcgcaggatgacaccgtgtcccccgcacccgagccccaggccgcctacgaggatgaggaggatgaggagccagccgcctccctggccgtgggctttgaccacacccgaaggtgtgctgaggaccacgaaggcggtctgttagctttggagccgatgccgacttttgggaaggggctggacctccgcagagcagctgaggaagcatttgaagttaaagatgtgcttaattccaccttagattctgaggctttaaaacatacactgtgcaggcaggctaagaaccaggcatatgcaatgatgctgtccctttccgaagacactcctctccacaccccctcccagggttctctggacgcttggttgaaggtcactggagccacgtcggagtctggagcatttcaccccatcaaccacctctgacgggctgggcagccgggggccggtggccagagcgagggcaccagccacgaaggacggaggcgggcggggccccggagaaccctgtccctgcgtgtggccactcctcagcatcctccccacccaccatggttcattccgacttttccaatggaaactcagatcccaaaagtccctaaagcagtcgtagagtctcaccatctccaaggattggtcttgagaacactgttcagtgacggccatgcaggtggccgtccaaagacagccaacggagctgcctcgcagaatcagccagtgggcaggtggacgctctgctgagacagaagctggtggccactgccgggtgcccgcgtggggtcgcggaagggaatggatagactggtgtgctcaaaagagagagatcactcaaatgatttttataatgaaatgacaagaataacccttttggtaaccgtattgactgcagagtctatttaagcatgtggttttaaaaatagacagtattttttaaaaatcaaaaaatgacttgcaaattgttttttaaaagtaattttgcattgctttgaaatttgagctcatttgcaaacccgagtctgcctgggaacccgcactgtgcctgggtgtattctttatactgtagataatggagaaattttctatctctgtccctatttgtataagccaaggtgatgctgggtgccccgaggcagaacaagaggcgcggggccacacccgtgaaccatgcagacggccgaagaagtcttaggcagggcgccctgggctgcaggcctgcccgaggctgggatgggaagtgtgcctgccctcgtgtgacatggaattggtgtcaggaccgccacgtggccttcagaggaatccacaggtccccacccaagatccctcaattatatggggaagtcgagggcctgtggcttggatccgccatgcagagatgtggccgggcacccatcttccttccctcctctgtccctgcctcggccaccccacgcgggaacccagcgccgtcctctgaaggcagggccttggccacgtcctgggtctcccacctcccacctgaccccagcggctccggtgtcctccacgtggctgccctggggagcaatcccagcggatcgctccgggccaccaagccgcacctgtgcctgagactccggatggacgacacagtcgtcacgtcgctcttcctgcgggttcttggcgagacacagcttgagaacagaagggcgtcgggggaacctgccgcaaggagcagagacagcacagccccccgggcccagccgcctccctctcttgggacgcaacttcttccccactcggatgggctttaaattattcccataggggccaatttcaaataataatttttttccctgatggaatttaccttaatctgtatataacttgtaattttttctaattcatttcttttcttattttatttcctccttaacagtatttttggcattagacattcttattgtgaagaaataatgttaatataagtatctggtgaaggaccaaaaccgtgtgataaggttgtgtgtcgtgtgggagtggggcgattttttatgtgccaaatacccccgtcccccccatgaatcctgctgtccctgctgccgtttaccagacaatcatatgtttttgttaaatttgcgtttcagttacatttgcatttaagacaagtgttctatttatttcttgtattgtttggaagaaaaaatgatgatagagtcccaaaaagaagagaaaaaaaatgcccaagttgccctttaaaaaaaaagagcgtaaatacaaacaggagtggtgcaagccgccttggtgtgggtttgtgtcacgtgtggacatctcctcaggctttgtgtcacgcgtggacatctcctcaggctgtccccagcggtgacgggaggtgtcctggctgctccaggacaaaagacaatcgtctctgtgggtgccgggtggtccaggcttgcactgaagacgtgccacggggaggctcctgcaggaggctcaacccgacggatcacagtgaaagggattcctcccacgccagatctgcacaacgaggcaagacaggacccacctgtgcgtgcgctggggccatggggtggccccgccggggcagcgggggagctgcctgcagaagagccagctggcgtgtcgggaaggatccaggatctgcaaacacaactgctcaggccttctcacgcgtttccacaacatcccctgggtcagacccaccaggtaccccgtaggaatttccagtttcccttgatctagatgggattcttataaaaattcaacctcagacataaacaccccatttctgtaaacccaaattatatggtttcttctgcgaaagagtaaggtgtgtgcttttttttttttgcaatatgaccccgtctctctgaagtgggacattcggacggatggagccctcagcgtgtcttttcagcaggagcagaaccgatgagagccgcccttaccgttggtctccggatcccccagtcccatcccgccgttttcggctgtcttcctaaccgtcctgtcttctcttggcgctctttccttccacctttcccaagagtcctggttgcacgttttaagtcatatattttcgtccccctgaaaatgatggcaagcccagtttctcctgagcattcagacccccaggccccagcacttggcgttttcaggaggccctgttcttagagcccctgacaaaggcagcacttatttcctgggctggtgcgccccaaaacacggccccgacacttagtgtggccccaggccccagcgagcctcgccctcccagttttgctctgcccagcagtgttggtgcccagagatgacaagggccagggagcctggcccgggtgtgagaattcagagattctggcctccagctgtcaccacaccgtaacggggccatgtaactgtgcagcatggacagggatgcgacggggcagctggctgtgtccatggccaggtggccagggtcagggctgcaagccaggggtccagggcccttccgttcagcccaaatgctgccccaatgctaactccttggattgtcaacccccatcccccaaatggaaattccgaaggaggcctcctcgcacctgccctccgctgctcctcagaccccagcccccagcgagccgacgtccccacccgttcctgctctcatccccaggttgggcacgtggggttcctcctctgtgggcctggcagacccttcatgagtgggacccaagatatcactgacttcaacccagaggatcgagcccctgcaccctgcctggggccctggggtgtggagcagtggctggggtgggcgtggtgtggcctgagagactgcccagctggagaggccttcctttacaaggccacgcgtgcagctgtcccatccagaccccgactggccaagacctccacgtccccagagtccagccctggaaattccaagggccctggcgtcctctgccttccccgcttccccatgagcgtctgcaaaacacttgcctgaatacatatcacgtattttagactcgaagcctcaaagcactggattgtggtcccctgccccctctgtcccgtccccctgcccaagtgactgaaacctactgagctatattcactgtgctgtcctagggggagggagagcagagctcgcccctgcactgcagccttgtgggggagggcaaggctctcctcccagccagggacgccaggacatagctgctcctggtcagtggaggtcagccgggtatcaaaagccatgaaactgtgtctctgtagcaatgagtgatactgtgacaaaaccatccttgcattcttcctagaagagttcctctgctccttccattccatttttgtgtttgttttgttcttttctgtcactgatccgtattaccacttttggaaaaaaataaataaataaataaataaaaggcagcttgagtttccaaacgtgtgattcacttgtgaacaaaagtcattctaacaattgccttcagcgtcacgtgcattgccactgcgctttcggcacgagggatgctgagccctggtgtcagagtcgtaatttaaagcgtgtgtgtatatggactttgtcccttaaggtcgatataaagaatcctcgcagaatcacagacctgtgccgcccgccaccttctgccattgttacattacagatttggtttagttttgttttgttttgttttttcttttagaactgtatagtattgaaaaagaaatcaaatgtaaatgtctggttttcatataatgtttaaaaagaccattgagaaggaggctggcgctcgccccatgtcccccttgattgtaaattgcttctgttctgtttataagtaaactgtgcatgactcctgcttagcggtcattatcgtgtctgttggtgaaatttttattaaaaggaaaattctgtagatgcacttattgaatatgtgattaggatctacgtctgagactaggagtcctgaactgctgacgcgaaagaggcgcagttcccaattaatacggaaatcgctgtgggagaagaatgaaataagacgtgaagtgtaggaaatcatgaaaagaacaattttgcaaattgcattctgatgcttgtgatgaacacaaatgtacttgtgtagagacatttccttaagagaaagcctaggagaagccgatttggaggttaatgctgtagaataggactgtataccaaatgtaatctttccaatgctccaatgaatttatacatgagattgatatgcaataaatctgtgtgcttttct

SEQ ID NO: 23414 - DNA, 8661 bp, Homo sapiens
  source 1..8661: mol_type = unassigned DNA
ctgacaatgctggggagatgaagatagtgtgtggctgcttctggactcaaggaggaggagagagattccgcgagccgacaccatgcgatccaaggcgagggcgaggaagctagccaaaagtgacggtgacgttgtaaataatatgtatgagcccaaccgggacctgctggccagccacagcgcggaggacgaggccgaggacagtgccatgtcgcccatccccgtggggccaccgtcccccttccccaccagcgaggacttcacccccaaggagggctcgccgtacgaggcccctgtctacattcctgaagacattccgatcccagcagacttcgagctccgagagtcctccatcccaggggctggcctgggggtctgggccaagaggaagatggaagccggggagaggctgggcccctgcgtggtggtgccccgggcggcggcaaaggagacagacttcggatgggagcaaatactgacggacgtggaagtgtcgccccaggaaggctgcatcacaaagatctccgaagacctgggcagtgagaagttctgcgtggatgcaaatcaggcgggggctggcagctggctcaagtacatccgtgtggcgtgctcctgcgatgaccagaacctcaccatgtgtcagatcagtgagcagatttactataaagtcattaaggacattgagccaggtgaggagctgctggtgcacgtgaaggaaggcgtctaccccctgggcacagtgccgcccggcctggacgaggagcccacgttccgctgtgacgagtgtgacgaactcttccagtccaagctggacctgcggcgccataagaagtacacgtgtggctcagtgggggctgcgctctacgagggcctggctgaggagctcaagcccgagggccttggcggtggcagcggccaagcccacgagtgcaaggactgcgagcggatgttccccaacaagtacagcctggagcagcacatggtcatccacacggaggagcgcgagtacaaatgcgaccagtgtcccaaggccttcaactggaagtccaacctcatccgccaccagatgtcccacgacagcggcaaacgcttcgaatgtgaaaactgcgtgaaggtgttcacggaccccagcaaccttcagcggcacatccgctcgcagcacgtgggcgctcgggcccacgcctgccccgactgcgggaagaccttcgccacgtcctccggcctcaagcagcacaagcatatccacagcacggtgaagcctttcatatgtgaggtctgccacaagtcctacacgcagttctccaacctgtgccggcacaagcggatgcacgccgactgccgcacgcagatcaagtgcaaggactgtggccagatgttcagcactacctcctccctcaacaagcaccggcgcttctgcgagggcaagaaccattacacgccgggcggcatctttgccccgggcctgcccttgacccccagccccatgatggacaaggcaaaaccctcccccagcctcaatcacgccagcctgggcttcaacgagtactttccctccaggccgcacccggggagcctgcccttctccacggcgcctcccacgttccccgcactcacccccggcttcccgggcatcttccctccatccttgtacccccggccgcctctgctacctcccacatcgctgctcaagagccccctgaaccacacccaggacgccaagctccccagtcccctggggaacccagccctgcccctggtctccgccgtcagcaacagcagccagggcacgacggcagctgcggggcccgaggagaagttcgagagccgcctggaggactcctgtgtggagaagctgaagaccaggagcagcgacatgtcggacggcagtgactttgaggacgtcaacaccaccacggggaccgacctggacacgaccacggggacgggctcggacctggacagcgacgtggacagcgaccctgacaaggacaagggcaagggcaagtccgccgagggccagcccaagtttgggggcggcttggcgcccccgggggccccgaacagcgtggccgaggtgcctgtcttctattcccagcactcattcttcccgccacccgacgagcagctgctgactgcaacgggcgccgccggggactccatcaaggccatcgcatccattgccgagaagtactttggccccggcttcatggggatgcaggagaagaagctgggctcgctcccctaccactcggcgttccccttccagttcctgcccaacttcccccactccctttaccccttcacggaccgagccctcgcccacaacttgctggtcaaggccgagccaaagtcaccccgggacgccctcaaggtgggcggccccagtgccgagtgcccctttgatctcaccaccaagcccaaagacgtgaagcccatcctgcccatgcccaagggcccctcggcccccgcatccggcgaggagcagccgctggacctgagcatcggcagccgggcccgtgccagccaaaacggcggcgggcgggagccccgcaagaaccacgtctatggggaacgcaagctgggcgccggcgaggggctgccccaggtgtgcccggcgcggatgccccagcagcccccgctccactacgccaagccctcgcccttcttcatggaccccatctacagggtagaaaagcggaaggtcacagaccccgtgggagccctgaaggagaagtacctgcggccgtccccgctgctcttccacccccagatgtcagccatagagaccatgacagagaagctggagagctttgcagccatgaaggcggactcgggcagctccctgcagcccctcccccaccaccccttcaacttccggtccccacccccaacgctctccgaccccatcctcaggaagggcaaggagcgatacacgtgcaggtactgtgggaagatcttccccagatcagccaatctcaccagacacctgaggacgcacactggggagcagccgtacaggtgtaagtactgcgaccgctccttcagcatctcttcgaacctccagcggcacgtccggaacatccacaacaaggagaagcctttcaagtgccacctgtgcaaccgctgcttcgggcagcagaccaacctggaccggcacctcaagaagcacgagcacgagaacgcaccagtgagccagcaccccggggtcctcacgaaccacctggggaccagcgcgtcctctcccacctcagagtcggacaaccacgcacttttagacgagaaagaagactcttatttctcggaaatcagaaactttattgccaatagtgagatgaaccaagcatcaacgcgaacagagaaacgggcggacatgcagatcgtggacggcagtgcccagtgtccaggcctagccagtgagaagcaggaggacgtggaggaggaggacgacgatgacctggaggaggacgatgaggacagcctggccgggaagtcgcaggatgacaccgtgtcccccgcacccgagccccaggccgcctacgaggatgaggaggatgaggagccagccgcctccctggccgtgggctttgaccacacccgaaggtgtgctgaggaccacgaaggcggtctgttagctttggagccgatgccgacttttgggaaggggctggacctccgcagagcagctgaggaagcatttgaagttaaagatgtgcttaattccaccttagattctgaggctttaaaacatacactgtgcaggcaggctaagaaccagggttctctggacgcttggttgaaggtcactggagccacgtcggagtctggagcatttcaccccatcaaccacctctgacgggctgggcagccgggggccggtggccagagcgagggcaccagccacgaaggacggaggcgggcggggccccggagaaccctgtccctgcgtgtggccactcctcagcatcctccccacccaccatggttcattccgacttttccaatggaaactcagatcccaaaagtccctaaagcagtcgtagagtctcaccatctccaaggattggtcttgagaacactgttcagtgacggccatgcaggtggccgtccaaagacagccaacggagctgcctcgcagaatcagccagtgggcaggtggacgctctgctgagacagaagctggtggccactgccgggtgcccgcgtggggtcgcggaagggaatggatagactggtgtgctcaaaagagagagatcactcaaatgatttttataatgaaatgacaagaataacccttttggtaaccgtattgactgcagagtctatttaagcatgtggttttaaaaatagacagtattttttaaaaatcaaaaaatgacttgcaaattgttttttaaaagtaattttgcattgctttgaaatttgagctcatttgcaaacccgagtctgcctgggaacccgcactgtgcctgggtgtattctttatactgtagataatggagaaattttctatctctgtccctatttgtataagccaaggtgatgctgggtgccccgaggcagaacaagaggcgcggggccacacccgtgaaccatgcagacggccgaagaagtcttaggcagggcgccctgggctgcaggcctgcccgaggctgggatgggaagtgtgcctgccctcgtgtgacatggaattggtgtcaggaccgccacgtggccttcagaggaatccacaggtccccacccaagatccctcaattatatggggaagtcgagggcctgtggcttggatccgccatgcagagatgtggccgggcacccatcttccttccctcctctgtccctgcctcggccaccccacgcgggaacccagcgccgtcctctgaaggcagggccttggccacgtcctgggtctcccacctcccacctgaccccagcggctccggtgtcctccacgtggctgccctggggagcaatcccagcggatcgctccgggccaccaagccgcacctgtgcctgagactccggatggacgacacagtcgtcacgtcgctcttcctgcgggttcttggcgagacacagcttgagaacagaagggcgtcgggggaacctgccgcaaggagcagagacagcacagccccccgggcccagccgcctccctctcttgggacgcaacttcttccccactcggatgggctttaaattattcccataggggccaatttcaaataataatttttttccctgatggaatttaccttaatctgtatataacttgtaattttttctaattcatttcttttcttattttatttcctccttaacagtatttttggcattagacattcttattgtgaagaaataatgttaatataagtatctggtgaaggaccaaaaccgtgtgataaggttgtgtgtcgtgtgggagtggggcgattttttatgtgccaaatacccccgtcccccccatgaatcctgctgtccctgctgccgtttaccagacaatcatatgtttttgttaaatttgcgtttcagttacatttgcatttaagacaagtgttctatttatttcttgtattgtttggaagaaaaaatgatgatagagtcccaaaaagaagagaaaaaaaatgcccaagttgccctttaaaaaaaaagagcgtaaatacaaacaggagtggtgcaagccgccttggtgtgggtttgtgtcacgtgtggacatctcctcaggctttgtgtcacgcgtggacatctcctcaggctgtccccagcggtgacgggaggtgtcctggctgctccaggacaaaagacaatcgtctctgtgggtgccgggtggtccaggcttgcactgaagacgtgccacggggaggctcctgcaggaggctcaacccgacggatcacagtgaaagggattcctcccacgccagatctgcacaacgaggcaagacaggacccacctgtgcgtgcgctggggccatggggtggccccgccggggcagcgggggagctgcctgcagaagagccagctggcgtgtcgggaaggatccaggatctgcaaacacaactgctcaggccttctcacgcgtttccacaacatcccctgggtcagacccaccaggtaccccgtaggaatttccagtttcccttgatctagatgggattcttataaaaattcaacctcagacataaacaccccatttctgtaaacccaaattatatggtttcttctgcgaaagagtaaggtgtgtgcttttttttttttgcaatatgaccccgtctctctgaagtgggacattcggacggatggagccctcagcgtgtcttttcagcaggagcagaaccgatgagagccgcccttaccgttggtctccggatcccccagtcccatcccgccgttttcggctgtcttcctaaccgtcctgtcttctcttggcgctctttccttccacctttcccaagagtcctggttgcacgttttaagtcatatattttcgtccccctgaaaatgatggcaagcccagtttctcctgagcattcagacccccaggccccagcacttggcgttttcaggaggccctgttcttagagcccctgacaaaggcagcacttatttcctgggctggtgcgccccaaaacacggccccgacacttagtgtggccccaggccccagcgagcctcgccctcccagttttgctctgcccagcagtgttggtgcccagagatgacaagggccagggagcctggcccgggtgtgagaattcagagattctggcctccagctgtcaccacaccgtaacggggccatgtaactgtgcagcatggacagggatgcgacggggcagctggctgtgtccatggccaggtggccagggtcagggctgcaagccaggggtccagggcccttccgttcagcccaaatgctgccccaatgctaactccttggattgtcaacccccatcccccaaatggaaattccgaaggaggcctcctcgcacctgccctccgctgctcctcagaccccagcccccagcgagccgacgtccccacccgttcctgctctcatccccaggttgggcacgtggggttcctcctctgtgggcctggcagacccttcatgagtgggacccaagatatcactgacttcaacccagaggatcgagcccctgcaccctgcctggggccctggggtgtggagcagtggctggggtgggcgtggtgtggcctgagagactgcccagctggagaggccttcctttacaaggccacgcgtgcagctgtcccatccagaccccgactggccaagacctccacgtccccagagtccagccctggaaattccaagggccctggcgtcctctgccttccccgcttccccatgagcgtctgcaaaacacttgcctgaatacatatcacgtattttagactcgaagcctcaaagcactggattgtggtcccctgccccctctgtcccgtccccctgcccaagtgactgaaacctactgagctatattcactgtgctgtcctagggggagggagagcagagctcgcccctgcactgcagccttgtgggggagggcaaggctctcctcccagccagggacgccaggacatagctgctcctggtcagtggaggtcagccgggtatcaaaagccatgaaactgtgtctctgtagcaatgagtgatactgtgacaaaaccatccttgcattcttcctagaagagttcctctgctccttccattccatttttgtgtttgttttgttcttttctgtcactgatccgtattaccacttttggaaaaaaataaataaataaataaataaaaggcagcttgagtttccaaacgtgtgattcacttgtgaacaaaagtcattctaacaattgccttcagcgtcacgtgcattgccactgcgctttcggcacgagggatgctgagccctggtgtcagagtcgtaatttaaagcgtgtgtgtatatggactttgtcccttaaggtcgatataaagaatcctcgcagaatcacagacctgtgccgcccgccaccttctgccattgttacattacagatttggtttagttttgttttgttttgttttttcttttagaactgtatagtattgaaaaagaaatcaaatgtaaatgtctggttttcatataatgtttaaaaagaccattgagaaggaggctggcgctcgccccatgtcccccttgattgtaaattgcttctgttctgtttataagtaaactgtgcatgactcctgcttagcggtcattatcgtgtctgttggtgaaatttttattaaaaggaaaattctgtagatgcacttattgaatatgtgattaggatctacgtctgagactaggagtcctgaactgctgacgcgaaagaggcgcagttcccaattaatacggaaatcgctgtgggagaagaatgaaataagacgtgaagtgtaggaaatcatgaaaagaacaattttgcaaattgcattctgatgcttgtgatgaacacaaatgtacttgtgtagagacatttccttaagagaaagcctaggagaagccgatttggaggttaatgctgtagaataggactgtataccaaatgtaatctttccaatgctccaatgaatttatacatgagattgatatgcaataaatctgtgtgcttttct

SEQ ID NO: 23415 - DNA, 3737 bp, Homo sapiens
  source 1..3737: mol_type = unassigned DNA
atttactataaagtcattaaggacattgagccaggtgaggagctgctggtgcacgtgaaggaaggcgtctaccccctgggcacagtgccgcccggcctggacgaggagcccacgttccgctgtgacgagtgtgacgaactcttccagtccaagctggacctgcggcgccataagaagtacacgtgtggctcagtgggggctgcgctctacgagggcctggctgaggagctcaagcccgagggccttggcggtggcagcggccaagcccacgagtgcaaggactgcgagcggatgttccccaacaagtacagcctggagcagcacatggtcatccacacggaggagcgcgagtacaaatgcgaccagtgtcccaaggccttcaactggaagtccaacctcatccgccaccagatgtcccacgacagcggcaaacgcttcgaatgtgaaaactgcgtgaaggtgttcacggaccccagcaaccttcagcggcacatccgctcgcagcacgtgggcgctcgggcccacgcctgccccgactgcgggaagaccttcgccacgtcctccggcctcaagcagcacaagcatatccacagcacggtgaagcctttcatatgtgaggtctgccacaagtcctacacgcagttctccaacctgtgccggcacaagcggatgcacgccgactgccgcacgcagatcaagtgcaaggactgtggccagatgttcagcactacctcctccctcaacaagcaccggcgcttctgcgagggcaagaaccattacacgccgggcggcatctttgccccgggcctgcccttgacccccagccccatgatggacaaggcaaaaccctcccccagcctcaatcacgccagcctgggcttcaacgagtactttccctccaggccgcacccggggagcctgcccttctccacggcgcctcccacgttccccgcactcacccccggcttcccgggcatcttccctccatccttgtacccccggccgcctctgctacctcccacatcgctgctcaagagccccctgaaccacacccaggacgccaagctccccagtcccctggggaacccagccctgcccctggtctccgccgtcagcaacagcagccagggcacgacggcagctgcggggcccgaggagaagttcgagagccgcctggaggactcctgtgtggagaagctgaagaccaggagcagcgacatgtcggacggcagtgactttgaggacgtcaacaccaccacggggaccgacctggacacgaccacggggacgggctcggacctggacagcgacgtggacagcgaccctgacaaggacaagggcaagggcaagtccgccgagggccagcccaagtttgggggcggcttggcgcccccgggggccccgaacagcgtggccgaggtgcctgtcttctattcccagcactcattcttcccgccacccgacgagcagctgctgactgcaacgggcgccgccggggactccatcaaggccatcgcatccattgccgagaagtactttggccccggcttcatggggatgcaggagaagaagctgggctcgctcccctaccactcggcgttccccttccagttcctgcccaacttcccccactccctttaccccttcacggaccgagccctcgcccacaacttgctggtcaaggccgagccaaagtcaccccgggacgccctcaaggtgggcggccccagtgccgagtgcccctttgatctcaccaccaagcccaaagacgtgaagcccatcctgcccatgcccaagggcccctcggcccccgcatccggcgaggagcagccgctggacctgagcatcggcagccgggcccgtgccagccaaaacggcggcgggcgggagccccgcaagaaccacgtctatggggaacgcaagctgggcgccggcgaggggctgccccaggtgtgcccggcgcggatgccccagcagcccccgctccactacgccaagccctcgcccttcttcatggaccccatctacagggtagaaaagcggaaggtcacagaccccgtgggagccctgaaggagaagtacctgcggccgtccccgctgctcttccacccccagatgtcagccatagagaccatgacagagaagctggagagctttgcagccatgaaggcggactcgggcagctccctgcagcccctcccccaccaccccttcaacttccggtccccacccccaacgctctccgaccccatcctcaggaagggcaaggagcgatacacgtgcaggtactgtgggaagatcttccccagatcagccaatctcaccagacacctgaggacgcacactggggagcagccgtacaggtgtaagtactgcgaccgctccttcagcatctcttcgaacctccagcggcacgtccggaacatccacaacaaggagaagcctttcaagtgccacctgtgcaaccgctgcttcgggcagcagaccaacctggaccggcacctcaagaagcacgagcacgagaacgcaccagtgagccagcaccccggggtcctcacgaaccacctggggaccagcgcgtcctctcccacctcagagtcggacaaccacgcacttttagacgagaaagaagactcttatttctcggaaatcagaaactttattgccaatagtgagatgaaccaagcatcaacgcgaacagagaaacgggcggacatgcagatcgtggacggcagtgcccagtgtccaggcctagccagtgagaagcaggaggacgtggaggaggaggacgacgatgacctggaggaggacgatgaggacagcctggccgggaagtcgcaggatgacaccgtgtcccccgcacccgagccccaggccgcctacgaggatgaggaggatgaggagccagccgcctccctggccgtgggctttgaccacacccgaaggtgtgctgaggaccacgaaggcggtctgttagctttggagccgatgccgacttttgggaaggggctggacctccgcagagcagctgaggaagcatttgaagttaaagatgtgcttaattccaccttagattctgaggctttaaaacatacactgtgcaggcaggctaagaaccaggcatatgcaatgatgctgtccctttccgaagacactcctctccacaccccctcccagggttctctggacgcttggttgaaggtcactggagccacgtcggagtctggagcatttcaccccatcaaccacctctgacgggctgggcagccgggggccggtggccagagcgagggcaccagccacgaaggacggaggcgggcggggccccggagaaccctgtccctgcgtgtggccactcctcagcatcctccccacccaccatggttcattccgacttttccaatggaaactcagatcccaaaagtccctaaagcagtcgtagagtctcaccatctccaaggattggtcttgagaacactgttcagtgacggccatgcaggtggccgtccaaagacagccaacggagctgcctcgcagaatcagccagtgggcaggtggacgctctgctgagacagaagctggtggccactgccgggtgcccgcgtggggtcgcggaagggaatggatagactggtgtgctcaaaagagagagatcactcaaatgatttttataatgaaatgacaagaataacccttttggtaaccgtattgactgcagagtctatttaagcatgtgg

SEQ ID NO: 23416 - DNA, 5447 bp, Homo sapiens
  source 1..5447: mol_type = unassigned DNA
gaagatagtgtgtggctgcttctggactcaaggaggaggagagagattccgcgagccgacaccatgcgatccaaggcgagggcgaggaagctagccaaaagtgacggtgacgttgtaaataatatgtatgagcccaaccgggacctgctggccagccacagcgcggaggacgaggccgaggacagtgccatgtcgcccatccccgtggggccaccgtcccccttccccaccagcgaggacttcacccccaaggagggctcgccgtacgaggcccctgtctacattcctgaagacattccgatcccagcagacttcgagctccgagagtcctccatcccaggggctggcctgggggtctgggccaagaggaagatggaagccggggagaggctgggcccctgcgtggtggtgccccgggcggcggcaaaggagacagacttcggatgggagcaaatactgacggacgtggaagtgtcgccccaggaaggctgcatcacaaagatctccgaagacctgggcagtgagaagttctgcgtggatgcaaatcaggcgggggctggcagctggctcaagtacatccgtgtggcgtgctcctgcgatgaccagaacctcaccatgtgtcagatcagtgagcagatttactataaagtcattaaggacattgagccaggtgaggagctgctggtgcacgtgaaggaaggcgtctaccccctgggcacagtgccgcccggcctggacgaggagcccacgttccgctgtgacgagtgtgacgaactcttccagtccaagctggacctgcggcgccataagaagtacacgtgtggctcagtgggggctgcgctctacgagggcctggctgaggagctcaagcccgagggccttggcggtggcagcggccaagcccacgagtgcaaggactgcgagcggatgttccccaacaagtacagcctggagcagcacatggtcatccacacggaggagcgcgagtacaaatgcgaccagtgtcccaaggccttcaactggaagtccaacctcatccgccaccagatgtcccacgacagcggcaaacgcttcgaatgtgaaaactgcgtgaaggtgttcacggaccccagcaaccttcagcggcacatccgctcgcagcacgtgggcgctcgggcccacgcctgccccgactgcgggaagaccttcgccacgtcctccggcctcaagcagcacaagcatatccacagcacggtgaagcctttcatatgtgaggtctgccacaagtcctacacgcagttctccaacctgtgccggcacaagcggatgcacgccgactgccgcacgcagatcaagtgcaaggactgtggccagatgttcagcactacctcctccctcaacaagcaccggcgcttctgcgagggcaagaaccattacacgccgggcggcatctttgccccgggcctgcccttgacccccagccccatgatggacaaggcaaaaccctcccccagcctcaatcacgccagcctgggcttcaacgagtactttccctccaggccgcacccggggagcctgcccttctccacggcgcctcccacgttccccgcactcacccccggcttcccgggcatcttccctccatccttgtacccccggccgcctctgctacctcccacatcgctgctcaagagccccctgaaccacacccaggacgccaagctccccagtcccctggggaacccagccctgcccctggtctccgccgtcagcaacagcagccagggcacgacggcagctgcggggcccgaggagaagttcgagagccgcctggaggactcctgtgtggagaagctgaagaccaggagcagcgacatgtcggacggcagtgactttgaggacgtcaacaccaccacggggaccgacctggacacgaccacggggacgggctcggacctggacagcgacgtggacagcgaccctgacaaggacaagggcaagggcaagtccgccgagggccagcccaagtttgggggcggcttggcgcccccgggggccccgaacagcgtggccgaggtgcctgtcttctattcccagcactcattcttcccgccacccgacgagcagctgctgactgcaacgggcgccgccggggactccatcaaggccatcgcatccattgccgagaagtactttggccccggcttcatggggatgcaggagaagaagctgggctcgctcccctaccactcggcgttccccttccagttcctgcccaacttcccccactccctttaccccttcacggaccgagccctcgcccacaacttgctggtcaaggccgagccaaagtcaccccgggacgccctcaaggtgggcggccccagtgccgagtgcccctttgatctcaccaccaagcccaaagacgtgaagcccatcctgcccatgcccaagggcccctcggcccccgcatccggcgaggagcagccgctggacctgagcatcggcagccgggcccgtgccagccaaaacggcggcgggcgggagccccgcaagaaccacgtctatggggaacgcaagctgggcgccggcgaggggctgccccaggtgtgcccggcgcggatgccccagcagcccccgctccactacgccaagccctcgcccttcttcatggaccccatctacagcagggtagaaaagcggaaggtcacagaccccgtgggagccctgaaggagaagtacctgcggccgtccccgctgctcttccacccccagatgtcagccatagagaccatgacagagaagctggagagctttgcagccatgaaggcggactcgggcagctccctgcagcccctcccccaccaccccttcaacttccggtccccacccccaacgctctccgaccccatcctcaggaagggcaaggagcgatacacgtgcaggtactgtgggaagatcttccccagatcagccaatctcaccagacacctgaggacgcacactggggagcagccgtacaggtgtaagtactgcgaccgctccttcagcatctcttcgaacctccagcggcacgtccggaacatccacaacaaggagaagcctttcaagtgccacctgtgcaaccgctgcttcgggcagcagaccaacctggaccggcacctcaagaagcacgagcacgagaacgcaccagtgagccagcaccccggggtcctcacgaaccacctggggaccagcgcgtcctctcccacctcagagtcggacaaccacgcacttttagacgagaaagaagactcttatttctcggaaatcagaaactttattgccaatagtgagatgaaccaagcatcaacgcgaacagagaaacgggcggacatgcagatcgtggacggcagtgcccagtgtccaggcctagccagtgagaagcaggaggacgtggaggaggaggacgacgatgacctggaggaggacgatgaggacagcctggccgggaagtcgcaggatgacaccgtgtcccccgcacccgagccccaggccgcctacgaggatgaggaggatgaggagccagccgcctccctggccgtgggctttgaccacacccgaaggtgtgctgaggaccacgaaggcggtctgttagctttggagccgatgccgacttttgggaaggggctggacctccgcagagcagctgaggaagcatttgaagttaaagatgtgcttaattccaccttagattctgaggctttaaaacatacactgtgcaggcaggctaagaaccagggttctctggacgcttggttgaaggtcactggagccacgtcggagtctggagcatttcaccccatcaaccacctctgacgggctgggcagccgggggccggtggccagagcgagggcaccagccacgaaggacggaggcgggcggggccccggagaaccctgtccctgcgtgtggccactcctcagcatcctccccacccaccatggttcattccgacttttccaatggaaactcagatcccaaaagtccctaaagcagtcgtagagtctcaccatctccaaggattggtcttgagaacactgttcagtgacggccatgcaggtggccgtccaaagacagccaacggagctgcctcgcagaatcagccagtgggcaggtggacgctctgctgagacagaagctggtggccactgccgggtgcccgcgtggggtcgcggaagggaatggatagactggtgtgctcaaaagagagagatcactcaaatgatttttataatgaaatgacaagaataacccttttggtaaccgtattgactgcagagtctatttaagcatgtggttttaaaaatagacagtattttttaaaaatcaaaaaatgacttgcaaattgttttttaaaagtaattttgcattgctttgaaatttgagctcatttgcaaacccgagtctgcctgggaacccgcactgtgcctgggtgtattctttatactgtagataatggagaaattttctatctctgtccctatttgtataagccaaggtgatgctgggtgccccgaggcagaacaagaggcgcggggccacacccgtgaaccatgcagacggccgaagaagtcttaggcagggcgccctgggctgcaggcctgcccgaggctgggatgggaagtgtgcctgccctcgtgtgacatggaattggtgtcaggaccgccacgtggccttcagaggaatccacaggtccccacccaagatccctcaattatatggggaagtcgagggcctgtggcttggatccgccatgcagagatgtggccgggcacccatcttccttccctcctctgtccctgcctcggccaccccacgcgggaacccagcgccgtcctctgaaggcagggccttggccacgtcctgggtctcccacctcccacctgaccccagcggctccggtgtcctccacgtggctgccctggggagcaatcccagcggatcgctccgggccaccaagccgcacctgtgcctgagactccggatggacgacacagtcgtcacgtcgctcttcctgcgggttcttggcgagacacagcttgagaacagaagggcgtcgggggaacctgccgcaaggagcagagacagcacagccccccgggcccagccgcctccctctcttgggacgcaacttcttccccactcggatgggctttaaattattcccataggggccaatttcaaataataatttttttccctgatggaatttaccttaatctgtatataacttgtaattttttctaattcatttcttttcttattttatttcctccttaacagtatttttggcattagacattcttattgtgaagaaataatgttaatataagtatctggtgaaggaccaaaaccgtgtgataaggttgtgtgtcgtgtgggagtggggcgattttttatgtgccaaatacccccgtccccccca

SEQ ID NO: 23417 - DNA, 4210 bp, Homo sapiens
  source 1..4210: mol_type = unassigned DNA
ggctgaggatccggaaacgcgccgcagagggtgcggcccagaggaggccgcgggccgggaagggccgggcgggacgggaaacgttagggcagcggcccccggggtgagggggccgagcggacgggcagggccccgaggcgaactctgcccggatgaggaacaaagcagtggggcaggcgcgtgcgcccccagcgcagctggcaggttgggcagcccccttcccgaagcttctggacggaaggccccaggtgttccccgagatgccccaacccgtggcggggtgcacggccaccggccctcgggagaagttgggcggccccgggcgaccccggggacgagtggccgcgtcggtgcagcggttgtgagcaagatgtggtagcacgtgaccctggaacgcaaaccctgatgcctgttccccaccacccgagcgctcctttctctgatatttggccccaagccgatgcatcacaggatgaatgaaatgaacctgagtccagtggggatggagcagctgacttcatcctctgtgagcaatgccttgccagtctcaggaagtcacctgggattggctgcctcacccactcacagtgccatccctgccccaggcctcccagtggcaattccaaacctgggtccctccctgagctctctgccttctgctctgtctttaatgctaccaatgggtattggggatcgaggggtgatgtgtgggttacctgaaagaaactacaccctacctccaccaccttaccctcacctggagagcagttatttcagaaccattctacctggcattttatcttatttagctgacagaccacctccacagtacatccaccctaactctataaatgttgatggtaatacagcattatctatcaccaataacccttcagcactagatccctatcagtccaatggaaatgttggattagaaccaggcattgtttcaatagactctcgctctgtgaacacacatggtgcccaaagtcttcatcccagtgatggccatgaggtggccttggacacagcaatcactatggagaacgtttctagggttaccagcccaatttcgacagatggaatggcagaggagcttacgatggacggtgttgcaggcgagcattcccaaatcccaaatggctccagaagtcatgaacctctgtctgtggattctgtgagcaacaaccttgcagcagacgctgtaggacatggtggtgtgatacccatgcatgggaatggcctggagctccctgtggtcatggagacagaccacattgcaagtcgggtcaatggcatgtctgacagtgccctcagtgactccattcacactgtggccatgagcaccaactctgtaagcgtggcactctctacctcacacaaccttgcctccctagaatctgtttccctccatgaagttggcctcagcctagaacctgtggctgtctcctccatcacccaggaggttgctatggggacaggtcatgtagatgtatcttcagacagtctttcttttgtatcaccttcactgcaaatggaagactccaattcaaacaaggagaacatggcaaccttgtttacaatttggtgtactctgtgtgaccgcgcctatccctcggactgtcccgaacatggaccagtgacttttgttcctgacactccaatagagagcagagcaaggctttctctcccaaagcagcttgttctccgtcagtcaattgtgggagcagaagttggtgtatggactggagaaaccattcctgtgcggacttgctttggacctctaattggccagcagagtcactccatggaagtagcagaatggacagacaaggcagttaaccatatctggaagatataccacaatggtgtcctagaattctgcatcattacaactgatgaaaatgaatgtaattggatgatgtttgtgcgcaaagccaggaaccgggaagagcagaatttggtggcttatcctcatgatggaaaaatctttttctgcacctcacaagatatccctcctgaaaatgaactgcttttttattatagccgagattatgctcaacagattggtgttcctgaacacccagatgtgcatctctgtaactgtggcaaggagtgcaattcttacacagagttcaaagcccatctgaccagccacatccataaccatcttcctacccagggacatagcggcagccatgggccaagtcacagcaaagaaaggaagtggaagtgctcaatgtgcccccaagcttttatctctccttccaaacttcatgtccactttatgggtcacatgggtatgaagccccacaagtgtgatttctgtagcaaggcttttagtgatcccagcaacctgcggacccacctcaagatacatacaggtcagaagaactacaggtgtaccttgtgtgacaagtctttcacccagaaggctcacctggagtcccacatggttatccacactggggagaagaatcttaagtgtgattactgtgacaagttgtttatgcggaggcaggacctcaagcagcacgtgctcatccacactcaagaacgccagatcaagtgtcccaagtgtgataagctgttcttgagaacaaatcacttaaagaagcatctcaattctcatgaaggaaaacgggattatgtctgtgaaaaatgtacaaaggcttatctaaccaaataccatctcacccgccacctgaaaacctgcaaagggcccacctccagttcgtcagcaccagaggaggaagaagaggatgactcagaagaggaagatctagcagactctgtggggacagaagactgtaggattaacagtgctgtgtattcagcggatgagtctctttctgcacataaataaaaggaaaagaaacaagcaattttggatgaaaatgcaaatggaaaaatacacataaccagttatctactataatggtttttatataaaatggttcctgatttattttcagccagtaatcaaaacagactgggaatgaataaagcacttacagaagagtatcctaatgaaaacactttaaaacagattgggaaaactgagcatgtgtcctgttttaagtggtggactgggagggaagtgtcaacttctgaggtctttatttacatgataatctgggagatgcatttatgcctgaatcaaagctgccttctgctcaaacaaatcagatttatttcacattcttccattattccattttcctgctggtcctgtgacttggtaacattctaaacggtccttgccccatagccatcctgattgctgatagtgttttatgcagactcttgtgacttatactcaccacagaatggattgggacacagcagcataagtgtgctacttggcagctagtaagtttaaagcaggacctgccttaactgctcctggccacttggaagtttagggtagatcttgttttccaaagtttcggcaggtgcctggagggcaaataaaaaagcagcagtcagtcagtagtcagtgatggagagaacaagaggagagatgcctggcctctgcccaagaaattagctttgatggaagcctgagcaagtcacctggttattgtaacgtggagatctttgtaggtttagacatggctccctgtctccagtaaacatccagccattcagacaaagggggcctggagatacagagagcccaaataatgcctgctggattgtctcctgatgagtacatgtggactcacctgaggaagggaaggaagggaataatcttttatgtttcatttaccttatgaaaagtgttaaaacattgccaactcaaaataacattatttaatgcatgtgcaaagttaggtcttcccagttgtctcagtgctgaggaacctcatcagagaagcatggaagatgccaaaggatttttggaaggtaaagaaggctgaatagtgaccacatgggcctgttttcagggtcccagcttagttaagtcacccatgcacctggtcattgtgtctcccatgcacatccagcgtttctcagaagcagacccacccttaagttgacaggattgatggaacatgctctcctgctcaaggcacaacctctgggctggagtagaggactctggtgggaaggttttgctgctaatgtatttatggaatgaatgtatttcattcaaatctgtattcctctaggaaggattaaaattaaacttttttaaaatacagga

SEQ ID NO: 23418 - DNA, 640 bp, Homo sapiens
  source 1..640: mol_type = unassigned DNA
ggggcggggcgcggcggcccggcctgcgggccgcgggcgggctaatccacagcccttgggtggcggtgtcggcagcgcctggggctttcgggtagctgggatgggggctgcgaccttgttgtggttttggtgaccgctcttgtccccactcccccaggttgggcagcccccttcccgaagcttctggacggaaggccccaggtgttccccgagatgccccaacccgtggcggggtgcacggccaccggccctcgggagaagttgggcggccccgggcgaccccggggacgagtggccgcgtcggtgcagcggttgtgagcaagatgtggtagcacgtgaccctggaacgcaaaccctgatgcctgttccccaccacccgagcgctcctttctctgatatttggccccaagccgatgcatcacaggatgaatgaaatgaacctgagtccagtggggatggagcagctgacttcatcctctgtgagcaatgccttgccagtctcaggaagtcacctgggattggctgcctcacccactcacagtgccatccctgccccaggcctcccagtggcaattccaaacctgggtccctccctgagctctctgccttctgctctgtctttaatgctaccaatgggtat

SEQ ID NO: 23419 - DNA, 5330 bp, Homo sapiens
  source 1..5330: mol_type = unassigned DNA
gcgcccccgcagcaggaatggcaggaacggatccgggccgagcccgacccgggacgaggaggggctgagccgcgggggatcctggaatcggcagggaggtggggattctgggaggaaaactccatttcctccttccctgccggtttctcccctctaccctggcaccccaaatttcgatgtgccgcctgccgggcgctaagcgccggtgttgagagaggcggcggccgccgcgcccgggaaaatgctgggcatgtacgtgccggacaggttctccctgaagtcctcccgggttcaggacggcatggggctctacacggcccgcagagtgcgaaagggtgaaaagttcggaccctttgctggagagaagagaatgcctgaagacttggatgaaaatatggattacaggttgatgtgggaggttcgtgggagtaagggagaagttttgtacattttggatgctaccaacccacggcactccaactggcttcgcttcgttcatgaggcaccatctcaggagcagaagaacttggctgccattcaagaaggagaaaacattttctatttggcagttgaagatatagaaacagacacggagcttctgattggctacctggatagtgacatggaggctgaggaggaagaacagcaaattatgacagtcatcaaagaaggggaagttgaaaattctagaagacaatcaacagcgggcagaaaagatcgccttggctgtaaagaggactatgcttgtcctcaatgtgaatcgagttttaccagtgaggatattcttgctgagcatctccagacattgcaccagaaacccacagaggagaaagaatttaagtgcaagaactgtgggaagaaattcccagttaagcaggctttgcaaagacatgttcttcagtgcacagcgaaaagcagtctaaaggagtcttcgcgaagttttcagtgctctgtttgcaattcttccttcagttcagcatcgagttttgagcagcaccaggagacttgccggggggatgccaggtttgtgtgcaaggctgacagctgtggaaagaggctgaagagcaaggatgccctgaaaagacaccaggaaaatgtccacactggagatcctaagaaaaagcttatatgttcagtgtgcaataaaaagtgttcttcagcatcaagcctacaggaacatagaaagattcatgagatatttgattgtcaagaatgtatgaagaaatttatttcagctaatcagctaaaacgtcatatgatcacccactcagaaaaacgaccctataattgcgagatttgtaataagtctttcaagaggcttgatcaagtgggtgctcacaaagtaatacacagcgaagacaaaccttacaaatgcaaactttgtggaaagggatttgcccacagaaatgtttacaagaatcataagaagacccactctgaggagagaccgttccaatgtgaagaatgtaaagctttgttccggaccccattttctttacagagacacctgctaatacataacagtgagaggactttcaagtgccatcactgcgatgctacctttaagaggaaggatacattaaatgttcatgtccaggtggttcatgaaagacacaagaagtataggtgtgagctatgtaataaggcctttgttacaccttcagtgcttagaagtcataagaaaacacatacaggagaaaaggagaaaatctgtccatattgtggccagaaatttgccagcagtggtacactcagagttcatatccggagccacacaggtgagcgtccctatcaatgtccttactgtgaaaaaggattcagtaaaaatgatggactgaagatgcacattcgtactcacaccagggagaagccgtacaagtgctcagagtgcagcaaggccttcagccagaagcgaggcctggatgagcacaagaggacgcacactggagaaaagccttttcagtgtgatgtttgtgatttggcttttagcctgaagaaaatgctgattcgacacaagatgactcataatcccaatcgtcccctggcagaatgccagttttgccataagaagtttacaaggaatgactacctcaaagtgcacatggacaatatccatggtgtagctgacagctaataggggctgtaaaggaattaaactattcagaagggctcctaatatgaatcccagatttttatcacctgatcagcataacagaagtagccaaaagtgacttactggtctcatagttcttatttgcctacatttagagtctgtagatgcatatgcaaccaaaaaaaagtcttacttttaacaagaaatggtataaatggaaaaaaaatacaactccatagccttgcaaaatgcaacttgtgctctgtcttataaaaatggagaaaggagtcatggctctctttcttggccatccctctgtaatgaagtttataatatacttccctaataggcctttttattttattgttattctttgtgtgtctgtgtgtctgtgtgtctgtatgtgtctgtgtgtgtgcactcacttgcaaatgccagttgttgcagctggttttaccaatttaaatagaaataaatcaagatatccaactatttctttgcagatgaggataagaataagttatcaaagtctcaagtttgataggaaaataaatagttgctattttataagacaaaccaagagctgagcttatctaatagctctgtgcaacaaatgagtttaaaatagatatttgataactaaaacatctattaaaatattgctcattttagaggattcttaggaaacattatttattctcatcattcagatgcagacattcatggtctggaatacttttataagttctacacaaaaatgaccatcacatttaaatattcagcaggctacccctcttgaatttagaccatttagctttagaaattaacagtataccaatatatataattaaaaatagaaaccaaatagattctctgtatttggcaacagagtggcagaacaatagtggcatctccacatttgttaggatgaacatagccctttcccctctccttccataaaagtgcacagaacatgttagtgcagatacagtcctcagaacattaacattccattttgcaaaagacattttccagaatcttggcagtaggtaattctgaaacacttttgaattaccttcaatcatcccatataattaggaatccagaatacaaagtacaaacttggcaattgttatgattgaaactgtcactgatgcttaagggaaattgaagcaagaagcataatttcttcctttaggttatatttcagcaaaatacttgacagcaacatacaatgaacagcttgtttggagagatgatatgatacaatgtaatagtgatgtcaaaataacctggaggaatatccaaaaaccagaaaaacgttaaaatgaagcccaactcatgaacctctctaactgaagcccagtcaaaagaaaggaagtatagttttaaggaagttatttggttctaatgagttaaggagaaaggttatctgagacacagttctttgacttcaggaatctcattttagaattatattcatgcccagttccagttttaaaaagaaacataaagattcaatgtagacatttgaatgttgtaaaatactaaatttgaaactcagaagagataacttttaaaaacataaatcctaaaattatagtttagaagatatttaagtatagttatatgtagtattttgaatctgaaattatagactgtattttataaaaataaattttggtcttgtttctcactatatcatttgtttcaacaatatatttttagatctaaagtgttttcattttaatatgatagtgtgtttaatatcatttgaatataaaaagacagctgtaaaatttgatagtgtgtattatttaagcacatcctgtatatttctttgaatgctgctttctctatatgggatgctttatatcccgattatgtgatgaatgtaaaacttgaaaggagtccaaattccaattttgtgtaatctcagtgagtcacagttcacatggctgctggggaaattaccctgaaaactgtggtgtcgctatgctgtggagtaaacagacaggcaagaggtgctgggctttatcctgctgaaggtttatagacatggaaatctttagaaaatggtgtagaaggacctacaccagagagtggtacaccactctctcctttcagaggactgaaaccaaaacaagtccttagtagactatttgtatgctgtaaatttttatccaaaagacaagtattcatgggtagtttcagatatattagcatttgcttgctaaaacttttaaattacttagtaataaccaaaaaaagacactattttaggcatgattgatcaattgaaagcatagataatcataaggaaaagtcttacagacaagctgaagtacaggtacctactttgaaatgtcttctgtttcctgctgtgaaagattttggctggggtattttcttgagaaaagaccagacccttaggtgcctataaagtctaagtaattgagacttagaaattggctaagtaaatttaagagacgttcaataatgtaggtgggttcagatacccttttataataactgtcttcttagtatattaacactcaagatgtttgtgtatctttaatttgcctttgtttcacaataactggcttttgttttccttttcatggtgtgttgttggctatatagaggcatttattggtaaattataatcagcagttgcaccatggaagtattcttggtgataaattcttggggttacatagtatagttaacatgttattttcaagaaacatgagtgtgtgtgtctgtgtgtgtgtgtctgaagagtatcacttatatgcagtgcatatacatgtaagtgcattactttgctcaaatatcttctgacctattacagtcaactcatgcatgagtgtgaacatgtattacagaaggtcttacagccttagtttctgttttagattttatgtgctgcttcctttctcaaacaaaagcatgaaaggaaagaggataagtactagaaatattcatttttttccttcacaaatctaaatgttgcttatgaaaactcatcttagagtaatgaatatgtggaagtgggtaggtaggaggaaatgtgcctctttaaaatcctaaaattttaccattgatattgacatttgtttgcgtgtatataaatggagcatgtgtaaatatagaattccaatagcattttttattttattataaatctataataaatatatataaatcactacca

SEQ ID NO: 23420 - DNA, 2492 bp, Homo sapiens
  source 1..2492: mol_type = unassigned DNA
gcgcccaggcccgcgccccccgcgcccccgcagcaggaatggcaggaacggatccgggccgagcccgacccgggacgaggaggggctgagccgcgggggatcctggaatcggcagggaggtggggattctgggaggaaaactccatttcctccttccctgccggtttctcccctctaccctggcaccccaaatttcgatgtgccgcctgccgggcgctaagcgccggtgttgagagaggcggcggccgccgcgcccgggaaaatgctgggcatgtacgtgccggacaggttctccctgaagtcctcccgggttcaggacggcatggggctctacacggcccgcagagtgcgaaagggtgaaaagttcggaccctttgctggagagaagagaatgcctgaagacttggatgaaaatatggattacaggttgatgtgggaggttcgtgggagtaagggagaagttttgtacattttggatgctaccaacccacggcactccaactggcttcgcttcgttcatgaggcaccatctcaggagcagaagaacttggctgccattcaagacaagaatttgggacccgccgaatggcgaggctaaaagagctgtaacacagacaagactgagacctgctccttgcttgccacattgcgagtgaagagaaggagagaagagctgcagcctttcagggatcccagacctgggagctccccaagccagggctgtgactccttctttggggtgctgcagttcctggtgtctccgagcttctggatgccactgtgttccctggtgtcagctgtggaagctacttgcggtgtgcctgtcccagctgcagcctggcagagagctggcacctgtgctggcacctggagctgcccacccttctgcagcagccggcatatctgactgtgcattggccagaccccacactcactctcacaccccttgccgctccatgcagtctcccttggcaggtgtggaatccaggccattagtgtgagctgaacacagcctgccaggtcgagtgagcagaatgagctcagtgggctgaagcaaaaatttgggcaaaggcacgactggccacagaggtttccagccagaaaagcaacaccccaaagatcccataataataggagtgcaaaacctgttgtaaactgtgcatgccagggatctaggttgtgtgttccttatgagaatctagctaatgcctggtgatctgaggtggaacagttttatcccaaaaccatccccagccccatccctgtccatggaaaaactgtcttccacaaaacctgttcctgatgccaaaaaggttgggcactgctattctataccgctgtaggatgactatagttaacaataatatatagtttcaaaaagctagaaggaagacattgaatgttcccaacacaaagaaatgatacatgtttgagatgatggatatgctgattatcttgatctgatcactatacatgatatgtattgtaacatcactaggtaccccatgaatatgtacaattatgtgtcaagataaataagtaataaaataaaaagctttatcttattccccaaaaaaagacagcttgaggaaaggaaaaaggaagattactagcagagttgtaggctattgtctatggtactttactgcatgaagaaggtacagaggctgaatggaagaggggttgtaaaactggagtatgggctttcctttcacatggagctttgtttaacagaagtctagaaagtagatataagaatcattatcatggttagtttatgtcaaaactatacatactgtcttattatacttaattaaatgggtaatcatttgactagtgtgtctatgagttcgtaagttggtacttaatggttatattatttaattcacctcagtggacagagattaaaacagagtcattttctggttccttttcctgtggttaattaagtcctttgagatatggctgtatacactttatggtggtttacacatgtctgttttattagttttgcagacagtagacaggaacaaaaaggggcatagtcattcttgctgtgagttaaccctacacttctccaagcagtagaatgtaaactcaactaggcttttgagaactttccctcagtgacttaattaattccatgcccatttctggactttggaatatagcatgcatctatgtagcttgttttttactttatcaaatttaaaatgctcattatcgaacatttatatttttatattaaacttttgtaagtataacctgcttggtttcaaatatttcacatgcaacatgacattggttggaataatgttatgttgtatgtaaaagtgtaagttgtatgtaaaagattaatatcacaatcctttgaaatactttgcaccttgctattgaataaagttgatgacttttaattctgttgacataatctagaacccatagggaaactctatgataatgttttacttctagaaagtcagtcaataagt

SEQ ID NO: 23421 - DNA, 2338 bp, Homo sapiens
  source 1..2338: mol_type = unassigned DNA
gcgccccccgcgcccccgcagcaggaatggcaggaacggatccgggccgagcccgacccgggacgaggaggggctgagccgcgggggatcctggaatcggcagggaggtggggattctgggaggaaaactccatttcctccttccctgccggtttctcccctctaccctggcaccccaaatttcgatgtgccgcctgccgggcgctaagcgccggtgttgagagaggcggcggccgccgcgcccgggaaaatgctgggcatgtacgtgccggacaggttctccctgaagtcctcccgggttcaggacggcatggggctctacacggcccgcagagtgcgaaagggtgaaaagttcggaccctttgctggagagaagagaatgcctgaagacttggatgaaaatatggattacaggttgatgtgggaggttcgtgggagtaagggagaagttttgtacattttggatgctaccaacccacggcactccaactggcttcgcttcgttcatgaggcaccatctcaggagcagaagaacttggctgccattcaagaaggagaaaacattttctatttggcagttgaagatatagaaacagacacggagcttctgattggctacctggatagtgacatggaggctgaggaggaagaacagcaaattatgacagtcatcaaagaaggggaagttgaaaattctagaagacaatcaacagcgggcagaaaagatcgccttggctgtaaagaggactatgcttgtcctcaatgtgaatcgagttttaccagtgaggatattcttgctgagcatctccagacattgcaccagaaacccacagaggagaaagaatttaagtgcaagaactgtgggaagaaattcccagttaagcaggctttgcaaagacattttgagcagcaccaggagacttgccggggggatgccaggtttgtgtgcaaggctgacagctgtggaaagaggctgaagagcaaggatgccctgaaaagacaccaggaaaatgtccacactggagatcctaagaaaaagcttatatgttcagtgtgcaataaaaagtgttcttcagcatcaagcctacaggaacatagaaagattcatgagatatttgattgtcaagaatgtatgaagaaatttatttcagctaatcagctaaaacgtcatatgatcacccactcagaaaaacgaccctataattgcgagatttgtaataagtctttcaagaggcttgatcaagtgggtgctcacaaagtaatacacagcgaagacaaaccttacaaatgcaaactttgtggaaagggatttgcccacagaaatgtttacaagaatcataagaagacccactctgaggagagaccgttccaatgtgaagaatgtaaagctttgttccggaccccattttctttacagagacacctgctaatacataacagtgagaggactttcaagtgccatcactgcgatgctacctttaagaggaaggatacattaaatgttcatgtccaggtggttcatgaaagacacaagaagtataggtgtgagctatgtaataaggcctttgttacaccttcagtgcttagaagtcataagaaaacacatacaggagaaaaggagaaaatctgtccatattgtggccagaaatttgccagcagtggtacactcagagttcatatccggagccacacaggtgagcgtccctatcaatgtccttactgtgaaaaaggattcagtaaaaatgatggactgaagatgcacattcgtactcacaccagggagaagccgtacaagtgctcagagtgcagcaaggccttcagccagaagcgaggcctggatgagcacaagaggacgcacactggagaaaagccttttcagtgtgatgtttgtgatttggcttttagcctgaagaaaatgctgattcgacacaagatgactcataatcccaatcgtcccctggcagaatgccagttttgccataagaagtttacaaggaatgactacctcaaagtgcacatggacaatatccatggtgtagctgacagctaataggggctgtaaaggaattaaactattcagaagggctcctaatatgaatcccagatttttatcacctgatcagcataacagaagtagccaaaagtgacttactggtctcatagttcttatttgcctacatttagagtctgtagatgcatatgcaaccaaaaaaaagtcttacttttaacaagaaatggtataaatggaaaaaaaatacaactccatagccttgcaaaatgcaacttgtgctctgtcttataaaaatggagaaaggagtcatggctctctttcttggcc

SEQ ID NO: 23422 - DNA, 2259 bp, Homo sapiens
  source 1..2259: mol_type = unassigned DNA
caggcccgcgccccccgcgcccccgcagcaggaatggcaggaacggatccgggccgagcccgacccgggacgaggaggggctgagccgcgggggatcctggaatcggcagggaggtggggattctgggaggaaaactccatttcctccttccctgccggtttctcccctctaccctggcaccccaaatttcgatgtgccgcctgccgggcgctaagcgccggtgttgagagaggcggcggccgccgcgcccgggaaaatgctgggcatgtacgtgccggacaggttctccctgaagtcctcccgggttcaggacggcatggggctctacacggcccgcagagtgcgaaagggtgaaaagttcggaccctttgctggagagaagagaatgcctgaagacttggatgaaaatatggattacaggttgatgtgggaggttcgtgggagtaagggagaagttttgtacattttggatgctaccaacccacggcactccaactggcttcgcttcgttcatgaggcaccatctcaggagcagaagaacttggctgccattcaagaaggagaaaacattttctatttggcagttgaagatatagaaacagacacggagcttctgattggctacctggatagtgacatggaggctgaggaggaagaacagcaaattatgacagtcatcaaagaaggggaagttgaaaattctagaagacaatcaacagcgggcagaaaagatcgccttggctgtaaagaggactatgcttgtcctcaatgtgaatcgagttttaccagtgaggatattcttgctgagcatctccagacattgcaccagaaacccacagaggagaaagaatttaagtgcaagaactgtgggaagaaattcccagttaagcaggctttgcaaagacattttgagcagcaccaggagacttgccggggggatgccaggtttgtgtgcaaggctgacagctgtggaaagaggctgaagagcaaggatgccctgaaaagacaccaggaaaatgtccacactggagatcctaagaaaaagcttatatgttcagtgtgcaataaaaagtgttcttcagcatcaagcctacaggaacatagaaagattcatgagatatttgattgtcaagaatgtatgaagaaatttatttcagctaatcagctaaaacgtcatatgatcacccactcagaaaaacgaccctataattgcgagatttgtaataagtctttcaagaggcttgatcaagtgggtgctcacaaagtaatacacagcgaagacaaaccttacaaatgcaaactttgtggaaagggatttgcccacagaaatgtttacaagaatcataagaagacccactctgaggagagaccgttccaatgtgaagaatgtaaagctttgttccggaccccattttctttacagagacacctgctaatacataacagtgagaggactttcaagtgccatcactgcgatgctacctttaagaggaaggatacattaaatgttcatgtccaggtggttcatgaaagacacaagaagtataggtgtgagctatgtaataaggcctttgttacaccttcagtgcttagaagtcataagaaaacacatacaggagaaaaggagaaaatctgtccatattgtggccagaaatttgccagcagtggtacactcagagttcatatccggagccacacaggagaagccgtacaagtgctcagagtgcagcaaggccttcagccagaagcgaggcctggatgagcacaagaggacgcacactggagaaaagccttttcagtgtgatgtttgtgatttggcttttagcctgaagaaaatgctgattcgacacaagatgactcataatcccaatcgtcccctggcagaatgccagttttgccataagaagtttacaaggaatgactacctcaaagtgcacatggacaatatccatggtgtagctgacagctaataggggctgtaaaggaattaaactattcagaagggctcctaatatgaatcccagatttttatcacctgatcagcataacagaagtagccaaaagtgacttactggtctcatagttcttatttgcctacatttagagtctgtagatgcatatgcaaccaaaaaaaagtcttacttttaacaagaaatggtataaatggaaaaaaaatacaactccatagccttgcaaaatgcaacttgtgctctgtcttataaaaatggagaaaggagtcatggctctctttcttggcc

SEQ ID NO: 23423 - DNA, 2027 bp, Homo sapiens
  source 1..2027: mol_type = unassigned DNA
ctctgagagaacgcccggccagggtgaacgccgcggcaggagagcacgggagattgtgaagagcatggggagcctttgtcgtgcagcgtgaaacccttgagcctttggcctaggagctgggagactcagggcccttctcacactcagaattggagcagggccttctagacagtcccagcaccatgagccctgaaaagtcccaagaggagagcccagaagaagacacagagagaacagagcggaagcccatggtcaaagatgccttcaaagacatttccatatacttcaccaaggaagaatgggcagagatgggagactgggagaaaactcgctataggaatgtgaaaaggaactataatgcactgattactataggtctcagagccactcgaccagctttcatgtgtcaccgaaggcaggccatcaaactccaggtggatgacacagaagattctgatgaagaatggacccctaggcagcaagtcaaacctccttggatggccttaagagtggaacagcgtaaacaccagaagggaatgcccaaggcgtcattcagtaatgaatctagtttgaaagaattgtcaagaacagcaaatttactgaatgcaagtggctcagagcaggctcagaaaccagtgtccccttctggagaagcaagtacctctggacagcactcaagactaaaactggaactcaggaagaaggagactgaaagaaagatgtatagcctgcgagaaagaaagggtcatgcatacaaagaggtcagcgagccgcaggatgatgattacctctattgtgagatgtgtcagaacttcttcattgacagctgtgctgcccatgggccccctacatttgtaaaggacagtgcagtggacaaggggcaccccaaccgttcagccctcagtctgcccccagggctgagaattgggccatcaggcatccctcaggctgggcttggagtatggaatgaggcatctgatctgccgctgggtctgcactttggcccttatgagggccgaattacagaagacgaagaggcagccaacaatggatactcctggctgatcaccaaggggagaaactgctatgagtatgtggatggaaaagataaatcctgggccaactggatgaggtatgtgaactgtgcccgggatgatgaagagcagaacctggtggccttccagtaccacaggcagatcttctatagaacctgccgagtcattaggccaggctgtgaactgctggtctggtatggggatgaatacggccaggaactgggcatcaagtggggcagcaagtggaagaaagagctcatggcagggagagaaccaaagccagagatccatccatgtccctcatgctgtctggccttttcaagtcagaaatttctcagtcaacatgtagaacgcaatcactcctctcagaacttcccaggaccatctgcaagaaaactcctccaaccagagaatccctgcccaggggatcagaatcaggagcagcaatatccagatccacacagccgtaatgacaaaaccaaaggtcaagagatcaaagaaaggtccaaactcttgaataaaaggacatggcagagggagatttcaagggccttttctagcccacccaaaggacaaatggggagctgtagagtgggaaaaagaataatggaagaagagtccagaacaggccagaaagtgaatccagggaacacaggcaaattatttgtgggggtaggaatctcaagaattgcaaaagtcaagtatggagagtgtggacaaggtttcagtgttaaatcagatgttattacacaccaaaggacacatacaggggagaagccctatgtctgcagggagtgtgggcggggctttagctggcagtcagtcctcctcactcaccagaggacacacacaggggagaagccctatgtctgcagggagtgtgggcggggctttagccggcagtcagtcctcctcactcaccagaggacacacacaggggagaagccctacgtctgcagggaggatgagtaa

SEQ ID NO: 23424 - DNA, 3691 bp, Homo sapiens
  source 1..3691: mol_type = unassigned DNA
ctctgagagaacgcccggccagggtgaacgccgcggcaggagagcacgggagattgtgaagagcatggggagcctttgtcgtgcagcgtgaaacccttgagcctttggcctaggagctgggagactcagggcccttctcacactcagaattggagcagggccttctagacagtcccagcaccatgagccctgaaaagtcccaagaggagagcccagaagaagacacagagagaacagagcggaagcccatggtcaaagatgccttcaaagacatttccatatacttcaccaaggaagaatgggcagagatgggagactgggagaaaactcgctataggaatgtgaaaaggaactataatgcactgattactataggtctcagagccactcgaccagctttcatgtgtcaccgaaggcaggccatcaaactccaggtggatgacacagaagattctgatgaagaatggacccctaggcagcaagtcaaacctccttggatggccttaagagtggaacagcgtaaacaccagaagggaatgcccaaggcgtcattcagtaatgaatctagtttgaaagaattgtcaagaacagcaaatttactgaatgcaagtggctcagagcaggctcagaaaccagtgtccccttctggagaagcaagtacctctggacagcactcaagactaaaactggaactcaggaagaaggagactgaaagaaagatgtatagcctgcgagaaagaaagggtcatgcatacaaagaggtcagcgagccgcaggatgatgattacctctattgtgagatgtgtcagaacttcttcattgacagctgtgctgcccatgggccccctacatttgtaaaggacagtgcagtggacaaggggcaccccaaccgttcagccctcagtctgcccccagggctgagaattgggccatcaggcatccctcaggctgggcttggagtatggaatgaggcatctgatctgccgctgggtctgcactttggcccttatgagggccgaattacagaagacgaagaggcagccaacaatggatactcctggctgatcaccaaggggagaaactgctatgagtatgtggatggaaaagataaatcctgggccaactggatgaggtatgtgaactgtgcccgggatgatgaagagcagaacctggtggccttccagtaccacaggcagatcttctatagaacctgccgagtcattaggccaggctgtgaactgctggtctggtatggggatgaatacggccaggaactgggcatcaagtggggcagcaagtggaagaaagagctcatggcagggagagaaccaaagccagagatccatccatgtccctcatgctgtctggccttttcaagtcagaaatttctcagtcaacatgtagaacgcaatcactcctctcagaacttcccaggaccatctgcaagaaaactcctccaaccagagaatccctgcccaggggatcagaatcaggagcagcaatatccagatccacacagccgtaatgacaaaaccaaaggtcaagagatcaaagaaaggtccaaactcttgaataaaaggacatggcagagggagatttcaagggccttttctagcccacccaaaggacaaatggggagctgtagagtgggaaaaagaataatggaagaagagtccagaacaggccagaaagtgaatccagggaacacaggcaaattatttgtgggggtaggaatctcaagaattgcaaaagtcaagtatggagagtgtggacaaggtttcagtgttaaatcagatgttattacacaccaaaggacacatacaggggagaagctctacgtctgcagggagtgtgggcggggctttagctggaagtcacacctcctcattcaccagaggatacacacaggggagaagccctatgtctgcagggagtgtgggcggggctttagctggcagtcagtcctcctcactcaccagaggacacacacaggggagaagccctatgtctgcagggagtgtgggcggggctttagccggcagtcagtcctcctcactcaccagaggagacacacaggggagaagccctatgtctgcagggagtgtgggcggggctttagccggcagtcagtcctcctcactcaccagaggagacacacaggggagaagccctatgtctgcagggagtgtgggcggggctttagctggcagtcagtcctcctcactcaccagaggacacacacaggggagaagccctatgtctgcagggagtgtgggcggggctttagctggcagtcagtcctcctcactcaccagaggacacacacaggggagaagccctatgtctgcagggagtgtgggcggggctttagcaataagtcacacctcctcagacaccagaggacacacacaggggagaagccctatgtctgcagggagtgtgggcggggctttcgcgataagtcacacctcctcagacaccagaggacacacacaggggagaagccctatgtctgcagggagtgtgggcggggctttagagataagtcaaacctcctcagtcaccagaggacacacacaggggagaagccctatgtctgcagggagtgtgggcggggctttagcaataagtcacacctcctcagacaccagaggacacacacaggggagaagccctatgtctgcagggagtgtgggcggggctttcgcaataagtcacacctcctcagacaccagaggacacacacaggggagaagccctacgtctgcagggagtgtgggcggggctttagcgataggtcaagcctctgctatcaccagaggacacacacaggggagaagccctacgtctgcagggaggatgagtaagtcattagtaataaaacctcatctcaatagccacaaaaagacaaatgtggtcaccacacacttgcacaccccagctgtgaggtggcttcagcggaagtctgctgaccccttatattccccgagagtataaagagatcggaaataactgattaaacaaatccgccactttcatgactagagatgaggaagaacaagggatagttctgtaagtgttcgggggacatcagcatgtgtggttctttcccgcactgatcccctccattttttgtttgtttttttgcctcctgttctaataaattttgtctccatacaaatctgaaccccaagtgtgtacctcattcttcccttatcactgaaggcaagaagagtccagaagggccacagagaactcatgtgttcagctcaagactccacaggaattcaacccccagaaagacataaacttggagtccgtctggtttaattattggagaatcgattcccaagtccaggaagagaaatgtaagattctagaaagtcgcagcaggaaagggagttccctggtctcctgggaagtgtggcttcttctcctaatggacacctctcctctgctgccatactctcccttggctccccagtctcctctcctgatctcctccaatctctgtagcccaagatgtgaaagccagacaagaacacgcgtgtgtgtatatatgtgttcgggtgtgggggtatgtgccctccgtgtaggtaactgtgtgagtgtggggggtttcaagggtgtgttaggaacaacgctcaaaatcctaaggaaactgaacactcgaacgaaggattcttagcaa

SEQ ID NO: 23425 - DNA, 558 bp, Homo sapiens
  source 1..558: mol_type = unassigned DNA
aacttacaccacagttaaaggaacaccaaccctcccagatgagaatcagtgcaagaactctggcaattcaaaaagacacagtgtccccttggaagacccaggcctgcggagggacgtgaggagcagccccgacgcccgactcagtcgcaaacaccggagttggggaaaaccaagagcctttggcctaggagctgggagactcagggcccttctcacactcagaattggagcagggccttctagacagtcccagcaccatgagccctgaaaagtcccaagaggagagcccagaagaagacacagagagaacagagcggaagcccatggtcaaagatgccttcaaagacatttccatatacttcaccaaggaagaatgggcagagatgggagactgggagaaaactcgctataggaatgtgaaaaggaactataatgcactgattactataggtctcagagccactcgaccagctttcatgtgtcaccgaaggcaggccatcaaactccaggtggatgacacagaagattctgatgaagaatggacccctaggcagcaag

SEQ ID NO: 23426 - DNA, 1332 bp, Homo sapiens
  source 1..1332: mol_type = unassigned DNA
tcccggtgtgccccgcggtggcgaggggcgtaacggttgttgtagtccggccccctcctggctggtccagccacattaaccggcaggatgtcggaggtgcggctgccaccgctacgcgccctggacgactttgttctggggtcggcgcgtctggcggctccggatccatgcgacccgcagcgatggtgccaccgcgtcatcaacaacctcctctactaccaaaccaactaccttctctgcttcggcatcggcctcgctctcgccgggtacgtgcggccacttcatacgctcctgagcgcgctggtagtggcggtggccctcggcgtgctggtgtgggcagctgagacccgcgcagctgtgcgccgctgccgccgcagccaccctgcagcctgcctggccgcagtgcttgccgtcggcctcctggtgctctgggtcgcgggcggcgcttgcaccttcctgttcagcatcgccgggccggtgcttctgatcctggtgcacgcctcgttgcgcctgcgcaaccttaagaacaagattgagaacaagatcgagagcattggtctcaagcggacgccaatgggcctgctactagaggcactgggacaagagcaggaggctggatcctaggcccctgggatctgtacccaggacctggagaataccaccccacccccagcccataattgggacccagagccctttcccagcacttaaaacaggagcctagagccccctgcccaaacaaaacaggacatctgtgaccgccctacccccacgccagccccaaactaagatatccctcacacccagcccccattacctagggacaagagtcttccccagccttgaacctaggaccaagagccacctacatccagccccaaaactggggcttcaggccagagcatccatggccaatttcaaattgtgaacccagagacactcccatccacccttctccatgctcatccccaaactggggcctggagcaaggcactctcaaatcttgaaccctggaccaaagcttttccagaccccaccctaccttccaacccaggtcaagacattgccaaatcttgaactcagaacccaagtgttccatgcccctgtgtggatggagtcgggtatcctgactgttggacccctggtccaggtgatcccgaccctcaccagtcccatttgcctccctccagctctgcttaggcattttgcccctcaccccaatgttccacaccatcgacaaccaaggggtgaggtggggacaggcctcagcagggaatggggcgtatatgttagtgttgctgcaacaataaagcctgttgcatctctcatgcc

SEQ ID NO: 23427 - DNA, 1080 bp, Homo sapiens
  source 1..1080: mol_type = unassigned DNA
tagaaggcagtcttgtgggtgcctcctcccccagccgcaactcaggtctgcagctgggtcctgcctccttccgagtgggccatggccggtacatggctgctacttctcctggcccttgggtgtccagccctacccacaggtgtgggcggcacaccctttccttctctggccccaccaatcatgctgctggtggatggaaagcagcagatggtggtggtctgcctggtccttgatgttgcaccccctggccttgacagccccatctggttctcagccggcaatggcagtgcactggatgccttcacctatggcccttccccagcaacggatggcacctggaccaacttggcccatctctccctgccttctgaggagctggcatcctgggagcctttggtctgccacactgggcctggggctgagggtcacagcaggagtacacagcccatgcatctgtcaggagaggcttctacagccaggacctgcccccaggagcctctcagggggacaccgggtggggcgctgtggctgggggtcctgcggctgctgctcttcaagctgctgctgtttgacctgctcctgacctgcagctgcctgtgcgaccccgcgggcccgctgccttcccccgcaaccaccacccgcctgcgagccctcggctcccatcgactgcacccggccacggagactgggggacgagaggccaccagctcacccagaccccagcctcgggaccgccgctggggtgacacccctccgggtcggaagcccgggagcccagtatggggggaagggtcttacctcagcagttaccccacttgcccagcacaggcctggtgctcaagatctgccctcagggctccttcctccagtcttggagcattttttgcaggtgacctgcctcctcctctgcaggctggagctgcctgagggcagggctctacctcccctgcgtcacactgtgtgaggctgtgtctctgccatccaaaagggggccccttgagaatggtgatccacccagttacaggggcatttagggagcagatgactgagaacattaaaaaagaacttaaatgacacagc

SEQ ID NO: 23428 - DNA, 880 bp, Homo sapiens
  source 1..880: mol_type = unassigned DNA
gtgggccatggccggtacatggctgctacttctcctggcccttgggtgtccagccctacccacaggtcctgtttccttcccttcctcaccagaggctgccacaacagggtgtgggcggcacaccctttccttctctggccccaccaatcatgctgctggtggatggaaagcagcagatggtggtggtctgcctggtccttgatgttgcaccccctggccttgacagccccaggtcggaagcccgggagcccagtatggggggaagggtcttacctcagcagttaccccacttgcccagcacaggcctggtgctcaagatctgccctcagggctccttcctccagtcttggagcattttttgcaggtgacctgcctcctcctctgcaggctggagctgcctgagggcagggctctacctcccctgcgtcacactgtgtgaggctgtgtctctgccatccaaaagggggccccttgagaatggtgatccacccagttacaggggcatttagggagcagatgactgagaacattaaaaaagaacttaaatgacacagcaaatgaaaaatatttgaattcatgtctatcctgggaggaaggaatttggcagagttagaagtaggaaaaatccaggaaagctcccttgaggaagagggcttcctgagacagaacttgggaactgcagagtgggactggtggctgggaaggcggctgtctcctcccccaacagcaagcggggaggccccctcttctcctcaccctggcccaacctctgtgagaggtcagggcagagagcccaggaacccaggaaggtgggtggtgggtctgatgtgaactctcgtacagaggtgaacagggccagggtttctggggaacaggatcg

SEQ ID NO: 23429 - DNA, 1005 bp, Homo sapiens
  source 1..1005: mol_type = unassigned DNA
tagaaggcagtcttgtgggtgcctcctcccccagccgcaactcaggtctgcagctgggtcctgcctccttccgagtgggccatggccggtacatggctgctacttctcctggcccttgggtgtccagccctacccacaggtcctgtttccttcccttcctcaccagaggctgccacaacaggccccatctggttctcagccggcaatggcagtgcactggatgccttcacctatggcccttccccagcaacggatggcacctggaccaacttggcccatctctccctgccttctgaggagctggcatcctgggagcctttggtctgccacactgggcctggggctgagggtcacagcaggagtacacagcccatgcatctgtcaggagaggcttctacagccaggacctgcccccaggagcctctcagggggacaccgggtggggcgctgtggctgggggtcctgcggctgctgctcttcaagctgctgctgtttgacctgctcctgacctgcagctgcctgtgcgaccccgcgggcccgctgccttcccccgcaaccaccacccgcctgcgagccctcggctcccatcgactgcacccggccacggagactgggggacgagaggccaccagctcacccagaccccagcctcgggaccgccgctggggtgacacccctccgggtcggaagcccgggagcccagtatggggggaagggtcttacctcagcagttaccccacttgcccagcacaggcctggtgctcaagatctgccctcagggctccttcctccagtcttggagcattttttgcaggtgacctgcctcctcctctgcaggctggagctgcctgagggcagggctctacctcccctgcgtcacactgtgtgaggctgtgtctctgccatccaaaagggggccccttgagaatggtgatccacccagttacaggggcatttagggagcagatgactgagaacattaaaaaagaacttaaatgacacagc

SEQ ID NO: 23430 - DNA, 759 bp, Homo sapiens
  source 1..759: mol_type = unassigned DNA
tagaaggcagtcttgtgggtgcctcctcccccagccgcaactcaggtctgcagctgggtcctgcctccttccgagtgggccatggccggtacatggctgctacttctcctggcccttgggtgtccagccctacccacaggagaggcttctacagccaggacctgcccccaggagcctctcagggggacaccgggtggggcgctgtggctgggggtcctgcggctgctgctcttcaagctgctgctgtttgacctgctcctgacctgcagctgcctgtgcgaccccgcgggcccgctgccttcccccgcaaccaccacccgcctgcgagccctcggctcccatcgactgcacccggccacggagactgggggacgagaggccaccagctcacccagaccccagcctcgggaccgccgctggggtgacacccctccgggtcggaagcccgggagcccagtatggggggaagggtcttacctcagcagttaccccacttgcccagcacaggcctggtgctcaagatctgccctcagggctccttcctccagtcttggagcattttttgcaggtgacctgcctcctcctctgcaggctggagctgcctgagggcagggctctacctcccctgcgtcacactgtgtgaggctgtgtctctgccatccaaaagggggccccttgagaatggtgatccacccagttacaggggcatttagggagcagatgactgagaacattaaaaaagaacttaaatgacacagc

SEQ ID NO: 23431 - DNA, 755 bp, Homo sapiens
  source 1..755: mol_type = unassigned DNA
agaaagtctgggatggtagtggccaggaacggggtgtgccacggccccacctctcagagcagggaggaggatgctgggccagcccttggggaccccaggcaccgtggccacaggagtcagagctctgcatgtctgcaccatgtcctgggctcctgtcctgctcatgctgtttgtctactgcacaggttgtggtcctcagccggtgctgcatcagccgccggccatgtcctcggcccttggaaccacaatccgcctcacctgcaccctgaggaacgaccatgacatcggtgtgtacagcgtctactggtaccagcagaggccgggccaccctcccaggttcctgctgagatatttctcacaatcagacaagagccagggcccccaggtcccccctcgcttctctggatccaaagatgtggccaggaacagggggtatttgagcatctctgagctgcagcctgaggacgaggctatgtattactgtgctatgggggcccgcagctcggagaaggaggagagggagagggagtgggaggaagaaatggaacccactgcagccaggacacgtgtcccttgaactgaagacagcagaggcacgcatccccttggagagactgtcatggaagagggtggagccgccgcccgaagcgccgaggaggctgagccactcagcatctcctggtcctgcagtgttgctgtaaatccccattggagactgcattagggaattaaagctgcttgtcactttttgctga

SEQ ID NO: 23432 - DNA, 610 bp, Homo sapiens
  source 1..610: mol_type = unassigned DNA
gcatgctctgttgtggtccagtggccttcccagccctgtgccccaaagcacctggagcatatagccttgcagaacttctacttgcctgcctccctgcctctggccatggcctgccggtgcctcagcttccttctgatggggaccttcctgtcagtttcccagacagtcctggcccagctggatgcactgctggtcttcccaggccaagtggctcaactctcctgcacgctcagcccccagcacgtcaccatcagggactacggtgtgtcctggtaccagcagcgggcaggcagtgcccctcgatatctcctctactaccgctcggaggaggatcaccaccggcctgctgacatccccgatcgattctcggcagccaaggatgaggcccacaatgcctgtgtcctcaccattagtcccgtgcagcctgaagacgacgcggattactactgctctgttggctacggctttagtccctaggggtggggtgtgagatgggtgcctcccctctgcctcccatttctgcccctgaccttgggtcccttttaaactttctctgagccttgcttcccctctgtaaaatgggttaataatattcaacatgtcaacaaca

SEQ ID NO: 23433 - DNA, 734 bp, Homo sapiens
  source 1..734: mol_type = unassigned DNA
aatgcatatttgcaaaaggattaagccacagatttaagcgccgggagcccatttctgccttgcaaaggagaccggactgaaaaacctaaagccagctctgatttcttttcgccaagtgggaaggatttgaagacaagcttgaaggataaaaagccttggtgcttcccaggagccgagccgaggagcagaagaggaagagccgggggctgccgtagcctttggagatggacgagcagcccaggctgatgcattcccatgctggggtcgggatggccggacaccccggcctgtcccagcacttgcaggatggggccggagggaccgagggggagggcgggaggaagcaggacattggagacattttacagcaaattatgaccatcacagaccagagtttggatgaggcgcaggccagaaaacatgctttaaactgccacagaatgaagcctgccttgtttaatgtgttgtgtgaaatcaaagaaaaaacagttttgagtatccgaggagcccaggaggaggaacccacagacccccagctgatgcggctggacaacatgctgttagcggaaggcgtggcggggcctgagaagggcggagggtcggcggcagcggcggcagcggcggcggcttctggaggggcaggttcagacaactcagtggagcattcagattacagagccaaactctcacagatcagacaaatctaccatacggagctggagaaatacgagcag

SEQ ID NO: 23434 - DNA, 1459 bp, Homo sapiens
  source 1..1459: mol_type = unassigned DNA
atggacgagcagcccaggctgatgcattcccatgctggggtcgggatggccggacaccccggcctgtcccagcacttgcaggatggggccggagggaccgagggggagggcgggaggaagcaggacattggagacattttacagcaaattatgaccatcacagaccagagtttggatgaggcgcaggccagaaaacatgctttaaactgccacagaatgaagcctgccttgtttaatgtgttgtgtgaaatcaaagaaaaaacagttttgagtatccgaggagcccaggaggaggaacccacagacccccagctgatgcggctggacaacatgctgttagcggaaggcgtggcggggcctgagaagggcggagggtcggcggcagcggcggcagcggcggcggcttctggaggggcaggttcagacaactcagtggagcattcagattacagagccaaactctcacagatcagacaaatctaccatacggagctggagaaatacgagcaggcctgcaacgagttcaccacccacgtgatgaatctcctgcgagagcaaagccggaccaggcccatctccccaaaggagattgagcggatggtcagcatcatccaccgcaagttcagctccatccagatgcagctcaagcagagcacgtgcgaggcggtgatgatcctgcgttcccgatttctggatgcgcggcggaagagacggaatttcaacaagcaagcgacagaaatcctgaatgaatatttctattcccatctcagcaacccttaccccagtgaggaagccaaagaggagttagccaagaagtgtggcatcacagtctcccaggtatcaaactggtttggaaataagcgaatccggtacaagaagaacataggtaaatttcaagaggaagccaatatttatgctgccaaaacagctgtcactgctaccaatgtgtcagcccatggaagccaagctaactcgccctcaactcccaactcggctggtggatacccttcgccatgttatcagccagacaggaggatacagtgatggactcgcagccagtcagatgtacagtccgcagggcatcagtgctaatggaggttggcaggatgctactaccccttcatcagtgacctcccctacagaaggccctggcagtgttcactctgatacctccaactgatctcccagcaatcgcatcccggctgaccctgtgccccagttggggcaggggcaggagggagggtttctctcccaacgctgaagcggtcagactggaggtcgaagcaatcagcaaacacaataagagtctccttctcttctcttctttgggatgctatttcagccaatctggacacttctttatactctcttcccttttttttctgggtagaagccacccttccctgcctccagctgtcagcctggttttcgtcatcttccctgcccctgtgcctctgtc

SEQ ID NO: 23435 - DNA, 1044 bp, Homo sapiens
  source 1..1044: mol_type = unassigned DNA
atggacgagcagcccaggctgatgcattcccatgctggggtcgggatggccggacaccccggcctgtcccagcacttgcaggatggggccggagggaccgagggggagggcgggaggaagcaggacattggagacattttacagcaaattatgaccatcacagaccagagtttggatgaggcgcaggccagaaaacatgctttaaactgccacagaatgaagcctgccttgtttaatgtgttgtgtgaaatcaaagaaaaaacagttttgagtatccgaggagcccaggaggaggaacccacagacccccagctgatgcggctggacaacatgctgttagcggaaggcgtggcggggcctgagaagggcggagggtcggcggcagcggcggcagcggcggcggcttctggaggggcaggttcagacaactcagtggagcattcagattacagagccaaactctcacagatcagacaaatctaccatacggagctggagaaatacgagcaggcctgcaacgagttcaccacccacgtgatgaatctcctgcgagagcaaagccggaccaggcccatctccccaaaggagattgagcggatggtcagcatcatccaccgcaagttcagctccatccagatgcagctcaagcagagcacgtgcgaggcggtgatgatcctgcgttcccgatttctggatgcgcggcggaagagacggaatttcaacaagcaagcgacagaaatcctgaatgaatatttctattcccatctcagcaacccttaccccagtgaggaagccaaagaggagttagccaagaagtgtggcatcacagtctcccaggtatcaaactggtttggaaataagcgaatccggtacaagaagaacataggtaaatttcaagaggaagccaatatttatgctgccaaaacagctgtcactgctaccaatgtgtcagcccatggaagccaagctaactcgccctcaactcccaactcggctggtggatacccttcgccatgttatcagccagacaggaggatacagtga

SEQ ID NO: 23436 - DNA, 6635 bp, Homo sapiens
  source 1..6635: mol_type = unassigned DNA
atcctcccaccatcctctaaagaggcaaagggattttttttttcttttggtcttcttttttcccccttccctgtttatcctgaaaaggatttgaagacaagcttgaaggataaaaagccttggtgcttcccaggagccgagccgaggagcagaagaggaagagccgggggctgccgtagcctttggagatggacgagcagcccaggctgatgcattcccatgctggggtcgggatggccggacaccccggcctgtcccagcacttgcaggatggggccggagggaccgagggggagggcgggaggaagcaggacattggagacattttacagcaaattatgaccatcacagaccagagtttggatgaggcgcaggccagaaaacatgctttaaactgccacagaatgaagcctgccttgtttaatgtgttgtgtgaaatcaaagaaaaaacagttttgagtatccgaggagcccaggaggaggaacccacagacccccagctgatgcggctggacaacatgctgttagcggaaggcgtggcggggcctgagaagggcggagggtcggcggcagcggcggcagcggcggcggcttctggaggggcaggttcagacaactcagtggagcattcagattacagagccaaactctcacagatcagacaaatctaccatacggagctggagaaatacgagcaggcctgcaacgagttcaccacccacgtgatgaatctcctgcgagagcaaagccggaccaggcccatctccccaaaggagattgagcggatggtcagcatcatccaccgcaagttcagctccatccagatgcagctcaagcagagcacgtgcgaggcggtgatgatcctgcgttcccgatttctggatgcgcggcggaagagacggaatttcaacaagcaagcgacagaaatcctgaatgaatatttctattcccatctcagcaacccttaccccagtgaggaagccaaagaggagttagccaagaagtgtggcatcacagtctcccaggtatcaaactggtttggaaataagcgaatccggtacaagaagaacataggtaaatttcaagaggaagccaatatttatgctgccaaaacagctgtcactgctaccaatgtgtcagcccatggaagccaagctaactcgccctcaactcccaactcggctggttcttccagttcttttaacatgtcaaactctggagatttgttcatgagcgtgcagtcactcaatggggattcttaccaaggggcccaggttggagccaacgtgcaatcacaggtggatacccttcgccatgttatcagccagacaggaggatacagtgatggactcgcagccagtcagatgtacagtccgcagggcatcagtgctaatggaggttggcaggatgctactaccccttcatcagtgacctcccctacagaaggccctggcagtgttcactctgatacctccaactgatctcccagcaatcgcatcccggctgaccctgtgccccagttggggcaggggcaggagggagggtttctctcccaacgctgaagcggtcagactggaggtcgaagcaatcagcaaacacaataagagtctccttctcttctcttctttgggatgctatttcagccaatctggacacttctttatactctcttcccttttttttctgggtagaagccacccttccctgcctccagctgtcagcctggttttcgtcatcttccctgcccctgtgcctctgtcctagactcccggggtccccgccctctctcatatcactgaaggatattttcaacaattagaggaatttaaagaggaaaaaaattacaaagaaaataataaaagtgtttgtacgttttcatgctggtggtttgaggagccaaatttacctcactcgaatccctcactccctatgttaacaggcaatccttctctgtttctcttattactctcactacctcttagcaggaatactccacattgccctattcattccaggcctccctgcttcctcttgctcttcctccctggggacagtactgattggaacactttcctcctcttccttcctagccccagctattcactggggactgtcatagctgggattctaaaggtgccacatttttcagtttcatctccactaggttggttcccgggcaggaagtcaggcagcagggaaggacacgggaacagcaggtggagaattcctacagtctttcttaccctgctagcaatagctctcagtttcagaggcacagtctttggagaccattcagcactgagaaagcaatatttagaacctattgcaaaactgggcctgagttaggcatggtgatgaatgcatcagcaaggaatagaaagttcttatcgtgaaacccttcaacctcaactatgccttcatagacacacacgttcatgcacatgtaggcacatgtaccatctcacatcttcactttcccgagatgccatatacaattacctacattaataactgtagcactatgccttttgagcccgagagagggaattagtgactctaagtgaaggtcactgacacagagaagcagtatgtgtctggggcttccaggacctgcaggcccactagcgtgcacttaccagaatggcatacacaggacctgatcatgaggaagaccaggtttccagtgtaaactactcttgttcccaccacctctggagcactcagggagccccatacagtacttacaatgtctttaatggacttgattctgtttaattttttgttttatattaggcacactgtattaattttccaaaatgttataccacactatgttcttggtcctgacctattgctctggaggaaagagttgtataagaacgtggctcatgtgaacttttgctagcttcatttgaggacctgagaatcatggggaaagggaaggtaatgttttcattgaaatcatcacagtgatttttattccctgggaacacagcgtgtactaaaaatacatgagaaaatagcatgtatatgaaagctattctcaaaagtcacctgagctcaccatcttcatagccaaccctaccagttataaagatggcagctctatcacttgattaagtgggaggtggtcaaatattttggtgcctcattttcttcatctgtgagatgggaactgttatgcctggcttactaagagtcttgtgagagactgagaagttgattttgttcatatccaatctgtaaatgcgaagtcaggggaagtaatgtccctgaaataaacgggttcatgccatctagggacaataaatggttttcttgttgtaacttctggttaatatcagtaccttgatgtcatcaccgtgatgacaaagagaagagttattgttgatcttcttggttttggtctgtctcttttcttaggataaagaaaaacttccaaactagaaaaacaggccctggttcccttagtttgcacttgaacccaatatgttgccttgtacatacttggtccctgtcacattgactgcttgggaggcttccagggagaagtatgagaccctgaggggtgagaatgggcagctagcaagaacatggaaattctgcttggcactacagtcataaatagaaaacactgtgtgtgctcaggggagcaggggatgccactgaagaaactcaagggaatgtgtatttgaaggaaatgcaaaaactaagtatttagcaaaatgaaattatgccttgatgactaaaaggcactagaaaggttgtgtctactaacttcagccctaatcagaacagatgcctagaaggagcatttttgtgacaacttcatagtgattagaatcagtggagaactccatcttagtggcaggaatataatgaaactacccacgcaagaacatggttgaatcacatttgcttgacttagggcaaagtacgaaagagagacaaaagggttctcttggaaacaagaagagtgactccagatgtggcctgaataattgccatgttaagttaatgcaaaagatcagaacagggctacatttgcacaggcagtttctctccgggccgtagttttcactgatgatcacctttcacagcattttccccaaccagcatttcacttagtcttctctatacccagcacctcccccggcacccccggcaagcccactatcacttccgacttccaacgtggcatccgtgagatctgtccacattaggcgaagcaggagaacactgagagcagcaggatgggtttggaaagagcatgcctctggaaacacagcttcctgggaattcacatgaggccagtcctacagagagcaagatgcaccccaggatttcttcattttctaatagatgtgggagtgctccattttccccgacagcgaatttcccctgagaaacgatactagaccctgggtttgcccaccttgtaactcttccttatctcctccttttcatccctaatccatcctccctctggcatggaattgacgcccgtgcagtacatttgccaagtggcaccttctttcaatttatgttttattttgctatggtggtgattctttatttgctggttgtcttttctcacacatctttctctctgtctctctctttcctgctctttgtttttctgcccagaaaaacctgacttcgataccaaaaaagatgaaactacagaaactcaaatttaaaaaaaactttaaaagaaacaaaaaaatactcaacgattctttcagctttattaacattttccattgtttcttgcgacttgtgtctcgttctttgtagtattgatgatgaacatttgataatgaatgttcttgtatattcagataaagaaaaaaaaaaccaaaaaagcggtctgaatttaatagtgtttataataaaaattttaaaaatgaccctcatagcacgcaaaacaggatggggaatttcccctcttctttctgtgacaatgcgcatcattcctgcattagtttttaacaccagactacctacattcatcatttccctcatttttcttttattttcttgcatttgtgaattagttcaagaatgctagaaaagtgtcgagttgtgcacatccatttcttgtttcacaatgtttaaaagtgacagtaattcattttgtaaactaaaaaaaaaaaaaaaaaggttggaatagtgagcataataggtacaacctaacacattattatgtttattaactttgagacccagaaataaattcttttcttttcttgattcttgctcttaaaaatacaaaaaaaaaaatgttttgttttgtgttatttttggtttgtttattggggggctttttttaattgtcaggattatgatcttgctgtttttcttcaatatgtatacaaggtgatgtgaaaagatgacttgggcagaggagtaagaacaagtaggcttgttcttctactttgcttcagaattcagttaatgccaaaagcgaagatcaagcccatgttgatgtctcgttgctcacctgcatttccagagagtgtgacactcatgcagtccctgagaaaaataaaatcagggacatacttctccttttagccttttaaaaattcaaaaacgtttagtccaagggaactttttatgctatcaggaaaggtttttgctgtttttgattctgattatcacagccaagtactttgttttatttctccctaattaataactacattccatgaggcctcttccaaccaaagaggccttttcttccaggagagtcccgcaggagatgctggtatgatgggcaccattggttaagtaaactacatgcaggaagaagtccttggggccagtctgccagctgagtcctggttttggatgaagagttaatgagatattgggccaggctcaatgctgtagttttaatgctaagaggttacgtttacttcacagagtacacctcttagtaacctctgacttaggcagctgcttaaagcaaattgcaaaactggcttgatttggaatgtttttattagaggaaaaaagaaagccatattatctggaaaaaaattcattttaaataccatcattcaacaaattatgttcagaaagtggtcagaacttaagcaagaaaagtaaagaaagaatgcagaattgtggagcaatgctttaggaaatatttctacctgaacacttgtactcttgaagtcacaacaaaataatgatgagcttttcacatcacctttatggtttcaatccctagctcaaagcttcctggaatcttttattttttgtaaacttttttttcttttgttaaaataaataaaacattcaatgtttttctccttttctctcttattacttctttcctttggcattttcaatttgaaatgctttcctttggttgttggttttattctccccctacccctccccttttcttattattcagaatataaacctgcaaagctctgctctgttttggttttgaaagtttaagcttttctgcttctgtgagagcacaggcttctgtcccttttgattccaactgaacttttgtgttctctaatgatactaacacggtgtaggttttacagtctcctaatttgtactggtaatgcatattccaaataaatagtttcttttgttgcaaaaaaaaa

SEQ ID NO: 23437 - DNA, 1818 bp, Homo sapiens
  source 1..1818: mol_type = unassigned DNA
aagacacataggcagagatctaagaatgaattagagttctccagataaaggggatgtaaggggcagaggggagcagactggccgaagaacatttttgttaaaatccttttttttttgttttgaagaaatatgacttttgtcctaaaattccacagcagagcttccagggctatggtagggattaaggtattctacaacagatgaacaagtcttttagggacagcctgaattgaaggaggccaggagtcggaactgcccctcattgttctttttggtgactaggatacaaagttctgttcggcacagagtactctcctctgcttctacctccgggaaccccgttaccccccagcccacacaccaccaccccagttttgggtggggagaaggcaaagttttgagtatccgaggagcccaggaggaggaacccacagacccccagctgatgcggctggacaacatgctgttagcggaaggcgtggcggggcctgagaagggcggagggtcggcggcagcggcggcagcggcggcggcttctggaggggcaggttcagacaactcagtggagcattcagattacagagccaaactctcacagatcagacaaatctaccatacggagctggagaaatacgagcaggcctgcaacgagttcaccacccacgtgatgaatctcctgcgagagcaaagccggaccaggcccatctccccaaaggagattgagcggatggtcagcatcatccaccgcaagttcagctccatccagatgcagctcaagcagagcacgtgcgaggcggtgatgatcctgcgttcccgatttctggatgcgcggcggaagagacggaatttcaacaagcaagcgacagaaatcctgaatgaatatttctattcccatctcagcaacccttaccccagtgaggaagccaaagaggagttagccaagaagtgtggcatcacagtctcccaggtatcaaactggtttggaaataagcgaatccggtacaagaagaacataggtaaatttcaagaggaagccaatatttatgctgccaaaacagctgtcactgctaccaatgtgtcagcccatggaagccaagctaactcgccctcaactcccaactcggctggttcttccagttcttttaacatgtcaaactctggagatttgttcatgagcgtgcagtcactcaatggggattcttaccaaggggcccaggttggagccaacgtgcaatcacaggtggatacccttcgccatgttatcagccagacaggaggatacagtgatggactcgcagccagtcagatgtacagtccgcagggcatcagtgctaatggaggttggcaggatgctactaccccttcatcagtgacctcccctacagaaggccctggcagtgttcactctgatacctccaactgatctcccagcaatcgcatcccggctgaccctgtgccccagttggggcaggggcaggagggagggtttctctcccaacgctgaagcggtcagactggaggtcgaagcaatcagcaaacacaataagagtctccttctcttctcttctttgggatgctatttcagccaatctggacacttctttatactctcttcccttttttttctgggtagaagccacccttccctgcctccagctgtcagcctggttttcgtcatcttccctgcccctgtgcctctgtcctagactcccggggtccccgccctctctcatatcactgaaggatattttcaacaattagaggaatttaaagaggaaaaaaattacaaagaaaataataaaagtgtttgtacgtttt

SEQ ID NO: 23438 - DNA, 1538 bp, Homo sapiens
  source 1..1538: mol_type = unassigned DNA
atgctccttgttttctttgtgctctggacttgctcacttgcactgcttgcttcttcccaatcgccgccgcccccctgtgcttcagttttgagtatccgaggagcccaggaggaggaacccacagacccccagctgatgcggctggacaacatgctgttagcggaaggcgtggcggggcctgagaagggcggagggtcggcggcagcggcggcagcggcggcggcttctggaggggcaggttcagacaactcagtggagcattcagattacagagccaaactctcacagatcagacaaatctaccatacggagctggagaaatacgagcaggcctgcaacgagttcaccacccacgtgatgaatctcctgcgagagcaaagccggaccaggcccatctccccaaaggagattgagcggatggtcagcatcatccaccgcaagttcagctccatccagatgcagctcaagcagagcacgtgcgaggcggtgatgatcctgcgttcccgatttctggatgcgcggcggaagagacggaatttcaacaagcaagcgacagaaatcctgaatgaatatttctattcccatctcagcaacccttaccccagtgaggaagccaaagaggagttagccaagaagtgtggcatcacagtctcccaggtatcaaactggtttggaaataagcgaatccggtacaagaagaacataggtaaatttcaagaggaagccaatatttatgctgccaaaacagctgtcactgctaccaatgtgtcagcccatggaagccaagctaactcgccctcaactcccaactcggctggttcttccagttcttttaacatgtcaaactctggagatttgttcatgagcgtgcagtcactcaatggggattcttaccaaggggcccaggttggagccaacgtgcaatcacaggtggatacccttcgccatgttatcagccagacaggaggatacagtgatggactcgcagccagtcagatgtacagtccgcagggcatcagtgctaatggaggttggcaggatgctactaccccttcatcagtgacctcccctacagaaggccctggcagtgttcactctgatacctccaactgatctcccagcaatcgcatcccggctgaccctgtgccccagttggggcaggggcaggagggagggtttctctcccaacgctgaagcggtcagactggaggtcgaagcaatcagcaaacacaataagagtctccttctcttctcttctttgggatgctatttcagccaatctggacacttctttatactctcttcccttttttttctgggtagaagccacccttccctgcctccagctgtcagcctggttttcgtcatcttccctgcccctgtgcctctgtcctagactcccggggtccccgccctctctcatatcactgaaggatattttcaacaattagaggaatttaaagaggaaaaaaattacaaagaaaataataaaagtgtttgtacgttttcatgctggtggtttgaggagccaaatttac

SEQ ID NO: 23439 - DNA, 1263 bp, Homo sapiens
  source 1..1263: mol_type = unassigned DNA
atggacgagcagcccaggctgatgcattcccatgctggggtcgggatggccggacaccccggcctgtcccagcacttgcaggatggggccggagggaccgagggggagggcgggaggaagcaggacattggagacattttacagcaaattatgaccatcacagaccagagtttggatgaggcgcaggccagaaaacatgctttaaactgccacagaatgaagcctgccttgtttaatgtgttgtgtgaaatcaaagaaaaaacagttttgagtatccgaggagcccaggaggaggaacccacagacccccagctgatgcggctggacaacatgctgttagcggaaggcgtggcggggcctgagaagggcggagggtcggcggcagcggcggcagcggcggcggcttctggaggggcaggttcagacaactcagtggagcattcagattacagagccaaactctcacagatcagacaaatctaccatacggagctggagaaatacgagcaggcctgcaacgagttcaccacccacgtgatgaatctcctgcgagagcaaagccggaccaggcccatctccccaaaggagattgagcggatggtcagcatcatccaccgcaagttcagctccatccagatgcagctcaagcagagcacgtgcgaggcggtgatgatcctgcgttcccgatttctggatgcgcggcggaagagacggaatttcaacaagcaagcgacagaaatcctgaatgaatatttctattcccatctcagcaacccttaccccagtgaggaagccaaagaggagttagccaagaagtgtggcatcacagtctcccaggtatcaaactggtttggaaataagcgaatccggtacaagaagaacataggtaaatttcaagaggaagccaatatttatgctgccaaaacagctgtcactgctaccaatgtgtcagcccatggaagccaagctaactcgccctcaactcccaactcggctggttcttccagttcttttaacatgtcaaactctggagatttgttcatgagcgtgcagtcactcaatggggattcttaccaaggggcccaggttggagccaacgtgcaatcacaggtggatacccttcgccatgttatcagccagacaggaggatacagtgatggactcgcagccagtcagatgtacagtccgcagggcatcagtcacctcccccggcacccccggcaagcccactatcacttccgacttccaacgtggcatccgtga

SEQ ID NO: 23440 - DNA, 1459 bp, Homo sapiens
  source 1..1459: mol_type = unassigned DNA
agttttgagtatccgaggagcccaggaggaggaacccacagacccccagctgatgcggctggacaacatgctgttagcggaaggcgtggcggggcctgagaagggcggagggtcggcggcagcggcggcagcggcggcggcttctggaggggcaggttcagacaactcagtggagcattcagattacagagccaaactctcacagatcagacaaatctaccatacggagctggagaaatacgagcaggcctgcaacgagttcaccacccacgtgatgaatctcctgcgagagcaaagccggaccaggcccatctccccaaaggagattgagcggatggtcagcatcatccaccgcaagttcagctccatccagatgcagctcaagcagagcacgtgcgaggcggtgatgatcctgcgttcccgatttctggatgcgcggcggaagagacggaatttcaacaagcaagcgacagaaatcctgaatgaatatttctattcccatctcagcaacccttaccccagtgaggaagccaaagaggagttagccaagaagtgtggcatcacagtctcccaggtatcaaactggtttggaaataagcgaatccggtacaagaagaacataggtaaatttcaagaggaagccaatatttatgctgccaaaacagctgtcactgctaccaatgtgtcagcccatggaagccaagctaactcgccctcaactcccaactcggctggttcttccagttcttttaacatgtcaaactctggagatttgttcatgagcgtgcagtcactcaatggggattcttaccaaggggcccaggttggagccaacgtgcaatcacaggtggatacccttcgccatgttatcagccagacaggaggatacagtgatggactcgcagccagtcagatgtacagtccgcagggcatcagtgaaattgcaagaacctattgatggcttggatgctctggtggtgacagcaagtcctcttctcttgactgaagaaatgtcttcccctatctgaaaagtggcctctcttccggaatgacacatactgacttttgaagaagcaaaaggatacctgctggccagtcatatcagccaaaaaactctggtgagcagtgagttggcagatgttgcaactggaagactgtggcatcaacagagccccaaagcaataatctctctttctcttcgcccccactaatccagcaatcaaataatcacttttaagcatttactgtgcaccaccatataacataaaatgtgatgaatagctaggtatatatatgacaacctctaaattctcaaaatattataataaattaagaaagcaagagttgtgcatgtaaaaagacaattaactacatagggagaaggcagtgaacacatttagtgcatctcccctgtaccggtcactgtgtgaggtgctgtacaagtactaatttatctaat

SEQ ID NO: 23441 - DNA, 1020 bp, Homo sapiens
  source 1..1020: mol_type = unassigned DNA
atggacgagcagcccaggctgatgcattcccatgctggggtcgggatggccggacaccccggcctgtcccagcacttgcaggatggggccggagggaccgagggggagggcgggaggaagcaggacattggagacattttacagcaaattatgaccatcacagaccagagtttggatgaggcgcaggccagaaaacatgctttaaactgccacagaatgaagcctgccttgtttaatgtgttgtgtgaaatcaaagaaaaaacagttttgagtatccgaggagcccaggaggaggaacccacagacccccagctgatgcggctggacaacatgctgttagcggaaggcgtggcggggcctgagaagggcggagggtcggcggcagcggcggcagcggcggcggcttctggaggggcaggttcagacaactcagtggagcattcagattacagagccaaactctcacagatcagacaaatctaccatacggagctggagaaatacgagcaggcctgcaacgagttcaccacccacgtgatgaatctcctgcgagagcaaagccggaccaggcccatctccccaaaggagattgagcggatggtcagcatcatccaccgcaagttcagctccatccagatgcagctcaagcagagcacgtgcgaggcggtgatgatcctgcgttcccgatttctggatgcgcggcggaagagacggaatttcaacaagcaagcgacagaaatcctgaatgaatatttctattcccatctcagcaacccttaccccagtgaggaagccaaagaggagttagccaagaagtgtggcatcacagtctcccaggtggatacccttcgccatgttatcagccagacaggaggatacagtgatggactcgcagccagtcagatgtacagtccgcagggcatcagtgctaatggaggttggcaggatgctactaccccttcatcagtgacctcccctacagaaggccctggcagtgttcactctgatacctccaactga

SEQ ID NO: 23442 - DNA, 1674 bp, Homo sapiens
  source 1..1674: mol_type = unassigned DNA
aatgtgggcttggagtcacattcagagcctctgaggcagaggggtgcctgcggtctgttcccagggagccgggcctagggtctgttcctgggaaggatctgttccgtggggcccgctggagccgcgttttcaatatgcaaagtgccggtgctgtgcagacctcggtggtggtggttttgcatgcagaagtgaaattcagaaggccgcgtgtgagcacgtggttttgagtatccgaggagcccaggaggaggaacccacagacccccagctgatgcggctggacaacatgctgttagcggaaggcgtggcggggcctgagaagggcggagggtcggcggcagcggcggcagcggcggcggcttctggaggggcaggttcagacaactcagtggagcattcagattacagagccaaactctcacagatcagacaaatctaccatacggagctggagaaatacgagcaggcctgcaacgagttcaccacccacgtgatgaatctcctgcgagagcaaagccggaccaggcccatctccccaaaggagattgagcggatggtcagcatcatccaccgcaagttcagctccatccagatgcagctcaagcagagcacgtgcgaggcggtgatgatcctgcgttcccgatttctggatgcgcggcggaagagacggaatttcaacaagcaagcgacagaaatcctgaatgaatatttctattcccatctcagcaacccttaccccagtgaggaagccaaagaggagttagccaagaagtgtggcatcacagtctcccaggtatcaaactggtttggaaataagcgaatccggtacaagaagaacataggtaaatttcaagaggaagccaatatttatgctgccaaaacagctgtcactgctaccaatgtgtcagcccatggaagccaagctaactcgccctcaactcccaactcggctggttcttccagttcttttaacatgtcaaactctggagatttgttcatgagcgtgcagtcactcaatggggattcttaccaaggggcccaggttggagccaacgtgcaatcacaggtggatacccttcgccatgttatcagccagacaggaggatacagtgatggactcgcagccagtcagatgtacagtccgcagggcatcagtgctaatggaggttggcaggatgctactaccccttcatcagtgacctcccctacagaaggccctggcagtgttcactctgatacctccaactgatctcccagcaatcgcatcccggctgaccctgtgccccagttggggcaggggcaggagggagggtttctctcccaacgctgaagcggtcagactggaggtcgaagcaatcagcaaacacaataagagtctccttctcttctcttctttgggatgctatttcagccaatctggacacttctttatactctcttcccttttttttctgggtagaagccacccttccctgcctccagctgtcagcctggttttcgtcatcttccctgcccctgtgcctctgtcctagactcccggggtccccgccctctctcatatcactgaaggatattttcaacaattagaggaatttaaagaggaaaaaaattacaaagaaaataataaaagtgtttgtacgttttcatgctggtggtttgaggagccaaatttac

SEQ ID NO: 23443 - DNA, 1804 bp, Homo sapiens
  source 1..1804: mol_type = unassigned DNA
agagtactctcctctgcttctacctccgggaaccccgttaccccccagcccacacaccaccaccccagttttgggtggggagaaggcaaagagtgggaagataagaacacatgtagagatgataaaatgtcattggctccaagagacaagcttccgaaatccatggtggttgaagaacatcaaagaggagcaattatttcagtcattagggcagttccacctgttctaattgaacatttttaggatgtagaagatgcatcatacattggtatctattcagaaggtggggacatctgctgtctgtcatgtatctgggagatgtttatctcaacaggaggcaataataatatgttttgagtatccgaggagcccaggaggaggaacccacagacccccagctgatgcggctggacaacatgctgttagcggaaggcgtggcggggcctgagaagggcggagggtcggcggcagcggcggcagcggcggcggcttctggaggggcaggttcagacaactcagtggagcattcagattacagagccaaactctcacagatcagacaaatctaccatacggagctggagaaatacgagcaggcctgcaacgagttcaccacccacgtgatgaatctcctgcgagagcaaagccggaccaggcccatctccccaaaggagattgagcggatggtcagcatcatccaccgcaagttcagctccatccagatgcagctcaagcagagcacgtgcgaggcggtgatgatcctgcgttcccgatttctggatgcgcggcggaagagacggaatttcaacaagcaagcgacagaaatcctgaatgaatatttctattcccatctcagcaacccttaccccagtgaggaagccaaagaggagttagccaagaagtgtggcatcacagtctcccaggtatcaaactggtttggaaataagcgaatccggtacaagaagaacataggtaaatttcaagaggaagccaatatttatgctgccaaaacagctgtcactgctaccaatgtgtcagcccatggaagccaagctaactcgccctcaactcccaactcggctggttcttccagttcttttaacatgtcaaactctggagatttgttcatgagcgtgcagtcactcaatggggattcttaccaaggggcccaggttggagccaacgtgcaatcacaggtggatacccttcgccatgttatcagccagacaggaggatacagtgatggactcgcagccagtcagatgtacagtccgcagggcatcagtgctaatggaggttggcaggatgctactaccccttcatcagtgacctcccctacagaaggccctggcagtgttcactctgatacctccaactgatctcccagcaatcgcatcccggctgaccctgtgccccagttggggcaggggcaggagggagggtttctctcccaacgctgaagcggtcagactggaggtcgaagcaatcagcaaacacaataagagtctccttctcttctcttctttgggatgctatttcagccaatctggacacttctttatactctcttcccttttttttctgggtagaagccacccttccctgcctccagctgtcagcctggttttcgtcatcttccctgcccctgtgcctctgtcctagactcccggggtccccgccctctctcatatcactgaaggatattttcaacaattagaggaatttaaagaggaaaaaaattacaaagaaaataataaaagtgtttgtacgttttcatgctggtggtttgaggagccaaatttac

SEQ ID NO: 23444 - DNA, 3757 bp, Homo sapiens
  source 1..3757: mol_type = unassigned DNA
ctctctcacacacacccccgcttgggcctcctctctctctccggctccattttctccgccgccgggggccggggtctcctgtggggggcccagccggtatcccaggtctcccttcagtgccggggtgaacccccgggggagccgggagccgggggcagacgggcgggggttggggcggagggagcagcggccccagcgagtttggggggagaagtaaccaggcggggggaggggcggagcagggagggggcctcagggcccccccccagctatggacgaacggctactggggccgccccctccaggcgggggccgggggggcctgggattggtgagtggggagcctgggggccctggcgagcctcccggtggcggagaccccggtgggggtagcgggggggtcccgggaggccgagggaagcaagacatcggggacattctgcagcagataatgaccatcaccgaccagagcctggacgaggcccaggccaagaaacacgccctaaactgccaccgaatgaagcctgctctctttagcgtcctgtgtgaaatcaaggagaaaactggcctcagcattcggagctcccaggaggaggagccggtggacccacagctgatgcgcttggacaacatgcttctggcagagggtgtggctgggcccgagaaagggggcggctcagcagcagcagctgcagccgctgcagcctctggtggtggtgtgtcccctgacaactccatcgaacactcggactatcgcagcaaacttgcccagatccgtcacatataccactcggagctggagaagtatgagcaggcatgtaatgagttcacgacccatgtcatgaacctgctgagggagcagagccgcaccaggcccgtggcccccaaagagatggaacgcatggtgagcatcatccatcgaaagttcagcgccatccagatgcagctgaagcagagcacctgcgaggctgtgatgatcctgcgctcccgtttcctggatgccagacgaaagcgccgtaacttcagcaaacaggccactgaggtcctaaatgagtatttctactcccacctgagtaacccatatcctagtgaggaggccaaggaggagcttgccaagaagtgtggcatcaccgtgtctcaggtctccaactggtttggcaacaagaggattcgctataagaaaaacatcggaaagttccaagaggaggcaaacatctatgctgtcaagaccgccgtgtcagtcacccaggggggccacagccgcaccagctccccgacacccccttcctctgcaggctctggcggctctttcaatctctcaggatctggagacatgtttctggggatgcctgggctcaacggagattcctattctgcttcccaggtggaatcactccgacactcgatggggccagggggctatggggataacctcgggggaggccagatgtacagcccacgggaaatgagggcaaatggcagctggcaagaggctgtgaccccctcttcagtgacatccccaacggagggaccagggagtgttcactctgatacctccaactgatcttgcccctcagggtcacaggggtgggggctctcacaaggcgacttgaagaggacgcaggcttccagaggacaaaccccaatacaggagaagcacaagacagagaagggccaatggggtcatcccctccctaacgagactctctgtgctgggggtgctaattacatggcaggaagaatggggcctctaaggggagtgtggggtctgtctctcccttttttccatctttttcctctctcgctttctttcttacacagaaacatacacataccgagaaacctatttctcagacccctttttctcctctgtctttctctctccctctcccacacctcacacacacatactcccacttgcaactattctgtttctctcctgggctcccccactttcccttccccaccccacttgtatgctctggaatctgtggagacgccagccctgcccaatcagagatgccaaaaatggggacatgacttctggacagaggacatgggccacgcccccatgcatccccacccccgcccctccggacggcttacttacctcatacgcagctcatcttaaaccaatagaatcgctcggtggacgagagtgtctgactcagatatctacctcggagggagtttctgctactttagggaattattgactgggctttggggttgaacttttttttttttaaagaaagaaaaagaaaccctgggatccatctgttttttttgttgttgttgttgtttttgttgttgttggtggtggtggtggtggtggttcttaatttttaatttagtttggggaagtagcttgtttttttttttataaatatgttgatttcttgtctttttttttttttatttcttactttcccatattaggggtgatagccaaaggggttctggtaagagaaagggggacaaacagaactggtaaagaggcccccctggctccaggcctgtccatcaggaagtaaattttacagggcaccaagctttgccccctaaaatcccttaggtgttctttgttcatgcaggcaggtttctgccgcatttgatgtggaggcagtgaagggcttgccctgctggcctctcatcccccttcttcccacaacccttgggcagggctggactcagtaattttgaggaaattgaagatgccatcttcccctgtgagtgacatgtctttaattttttaaaaaactactatttgaaaattggagggggaagaatgggaagggagttattgccaaatatgttaaatatgggttggggtgcttgtatatgtatcttcctcaatttccccataaatgaggtatctttttgtcacaccaaaatcaaggggtagggagagggaggaggttgcaaaaagccagatgtgggggaaaagtaacatcaacactgtcccatcctcagccctgaactagctaccatctgatcccctcagacattctcaggattttacaagactgtcagagtggggaacccctcccattaaagatccgggcaggactggggacaggttggaagtgtgatgggtgggggggtgggaggcatgggccgggggcagttctctcctcacttgtaaacttgtgtagtttcacagaaaaaaaacaaaatgcagttttaaataaagaaatttcttttttccctgggtttagttgagaatttttttcaaaaaacatgagaaaccccagaaaaaaaatgattttctttcacgaagttccaaacaggtttctctcctgttccccagccttgccttcatgatgcaggcccaattgcacccttgcagacaacagtctggcctgaaccctattgatgcaactttgcgcaatcaagatggggctccagtgggtcaccaggcagccctgatggactgatggaataaataggatcgggggctctgagggaatgagaccctagagggtacactccccatcccccagggaagtgactgtacccagaggctggtagtacccaggggtggggtgataattatttctctagtacctgaaggactcttgtcccaaaggcatgaattcctagcattccctgtgacaagacgactgaaagatgggggctggagagagggtgcaggccccacctagggcggaggccacagcagggagaggggcagacagagccaggaccctggaaggaagcaggatggctgccggaacagcagttggagcctgggtgc

SEQ ID NO: 23445 - DNA, 3210 bp, Homo sapiens
  source 1..3210: mol_type = unassigned DNA
ctctctcacacacacccccgcttgggcctcctctctctctccggctccattttctccgccgccgggggccggggtctcctgtggggggcccagccggtatcccaggtctcccttcagtgccggggtgaacccccgggggagccgggagccgggggcagacgggcgggggttggggcggagggagcagcggccccagcgagtttggggggagaagtaaccaggcggggggaggggcggagcagggagggggcctcagggcccccccccagctatggacgaacggctactggggccgccccctccaggcgggggccgggggggcctaggattggtgagtggggagcctgggggccctggcgagcctcccggtggcggagaccccggtgggggtagcgggggggtcccgggaggccgagggaagcaagacatcggggacattctgcagcagataatgaccatcaccgaccagagcctggacgaggcccaggccaagaaacacgccctaaactgccaccgaatgaagcctgctctctttagcgtcctgtgtgaaatcaaggagaaaactggcctcagcattcggagctcccaggaggaggagccggtggacccacagctgatgcgcttggacaacatgcttctggcagagggtgtggctgggcccgagaaagggggcggctcagcagcagcagctgcagccgctgcagcctctggtggtggtgtgtcccctgacaactccatcgaacactcggactatcgcagcaaacttgcccagatccgtcacatataccactcggagctggagaagtatgagcaggcatgtaatgagttcacgacccatgtcatgaacctgctgagggagcagagccgcaccaggcccgtggcccccaaagagatggaacgcatggtgagcatcatccatcgaaagttcagcgccatccagatgcagctgaagcagagcacctgcgaggctgtgatgatcctgcgctcccgtttcctggatgccagacgaaagcgccgtaacttcagcaaacaggccactgaggtcctaaatgagtatttctactcccacctgagtaacccatatcctagtgaggaggccaaggaggagcttgccaagaagtgtggcatcaccgtgtctcaggtctccaactggtttggcaacaagaggattcgctataagaaaaacatcggaaagttccaagaggaggcaaacatctatgctgtcaagaccgccgtgtcagtcacccaggggggccacagccgcaccagctccccgacacccccttcctctgcaggctctggcggctctttcaatctctcaggatctggagacatgtttctggggatgcctgggctcaacggagattcctattctgcttcccaggtggaatcactccgacactcgatggggccagggggctatggggataacctcgggggaggccagatgtacagcccacgggaaatgagggcaaatggcagctggcaagaggctgtgaccccctcttcagtgacatccccaacggagggaccagggagtgttcactctgatacctccaactgatcttgcccctcagggtcacaggggtgggggctctcacaaggcgacttgaagaggacgcaggcttccagaggacaaaccccaatacaggagaagcacaagacagagaagggccaatggggtcatcccctccctaacgagactctctgtgctgggggtgctaattacatggcaggaagaatggggcctctaaggggagtgtggggtctgtctctcccttttttccatctttttcctctctcgctttctttcttacacagaaacatacacataccgagaaacctatttctcagacccctttttctcctctgtctttctctctccctctcccacacctcacacacacatactcccacttgcaactattctgtttctctcctgggctcccccactttcccttccccaccccacttgtatgctctggaatctgtggagacgccagccctgcccaatcagagatgccaaaaatggggacatgacttctggacagaggacatgggccacgcccccatgcatccccacccccgcccctccggacggcttacttacctcatacgcagctcatcttaaaccaatagaatcgctcggtggacgagagtgtctgactcagatatctacctcggagggagtttctgctactttagggaattattgactgggctttggggttgaacttttttttttttaaagaaagaaaaagaaaccctgggatccatctgttttttttgttgttgttgttgtttttgttgttgttgttggtggtggtggtggtggttcttaatttttaatttagtttggggaagtagcttgtttttttttttataaatatgttgatttcttgtcttttttttttatttcttactttcccatattaggggtgatagccaaaggggttctggtaagagaaagggggacaaacagaactggtaaagaggcccccctggctccaggcctgtccatcaggaagtaaattttacagggcaccaagctttgccccctaaaatcccttaggtgttctttgttcatgcaggcaggtttctgccgcatttgatgtggaggcagtgaagggcttgccctgctggcctctcatcccccttcttcccacaacccttgggcagggctggactcagtaattttgaggaaattgaagatgccatcttcccctgtgagtgacatgtctttaattttttaaaaaactactatttgaaaattggagggggaagaatgggaagggagttattgccaaatatgttaaatatgggttggggtgcttgtatatgtatcttcctcaatttccccataaatgaggtatctttttgtcacaccaaaatcaaggggtagggagagggaggaggttgcaaaaagccagatgtgggggaaaagtaacatcaacactgtcccatcctcagccctgaactagctaccatctgatcccctcagacattctcaggattttacaagactgtcagagtggggaacccctcccattaaagatccgggcaggactggggacaggttggaagtgtgatgggtgggggggtgggaggcatgggccgggggcagttctctcctcacttgtaaacttgtgtagtttcacagaaaaaaaacaaaatgcagttttaaataaagaaatttcttttttccctggg

SEQ ID NO: 23446 - DNA, 3202 bp, Homo sapiens
  source 1..3202: mol_type = unassigned DNA
ctctctcacacacacccccgcttgggcctcctctctctctccggctccattttctccgccgccgggggccggggtctcctgtggggggcccagccggtatcccaggtctcccttcagtgccggggtgaacccccgggggagccgggagccgggggcagacgggcgggggttggggcggagggagcagcggccccagcgagtttggggggagaagtaaccaggcggggggaggggcggagcagggagggggcctcagggcccccccccagctatggacgaacggctactggggccgccccctccaggcgggggccgggggggcctgggattggtgagtggggagcctgggggccctggcgagcctcccggtggcggagaccccggtgggggtagcgggggggtcccgggaggccgagggaagcaagacatcggggacattctgcagcagataatgaccatcaccgaccagagcctggacgaggcccaggccaagaaacacgccctaaactgccaccgaatgaagcctgctctctttagcgtcctgtgtgaaatcaaggagaaaactggcctcagcattcggagctcccaggaggaggagccggtggacccacagctgatgcgcttggacaacatgcttctggcagagggtgtggctgggcccgagaaagggggcggctcagcagcagcagctgcagccgctgcagcctctggtggtggtgtgtcccctgacaactccatcgaacactcggactatcgcagcaaacttgcccagatccgtcacatataccactcggagctggagaagtatgagcaggcatgtaatgagttcacgacccatgtcatgaacctgctgagggagcagagccgcaccaggcccgtggcccccaaagagatggaacgcatggtgagcatcatccatcgaaagttcagcgccatccagatgcagctgaagcagagcacctgcgaggctgtgatgatcctgcgctcccgtttcctggatgccagacgaaagcgccgtaacttcagcaaacaggccactgaggtcctaaatgagtatttctactcccacctgagtaacccatatcctagtgaggaggccaaggaggagcttgccaagaagtgtggcatcaccgtgtctcaggtctccaactggtttggcaacaagaggattcgctataagaaaaacatcggaaagttccaagaggaggcaaacatctatgctgtcaagaccgccgtgtcagtcacccaggggggccacagccgcaccagctccccgacacccccttcctctgcaggctctggcggctctttcaatctctcaggatctggagacatgtttctggggatgcctgggctcaacggagattcctattctgcttcccaggtggaatcactccgacactcgatggggccagggggctatggggataacctcgggggaggccagatgtacagcccacgggaaatgagggcaaatggcagctggcaagaggctgtgaccccctcttcagtgacatccccaacggagggaccagggagtgttcactctgatacctccaactgatcttgcccctcagggtcacaggggtgggggctctcacaaggcgacttgaagaggacgcaggcttccagaggacaaaccccaatacaggagaagcacaagacagagaagggccaatggggtcatcccctccctaacgagactctctgtgctgggggtgctaattacatggcaggaagaatggggcctctaaggggagtgtggggtctgtctctcccttttttccatctttttcctctctcgctttctttcttacacagaaacatacacataccgagaaacctatttctcagacccctttttctcctctgtctttctctctccctctcccacacctcacacacacatactcccacttgcaactattctgtttctctcctgggctcccccactttcccttccccaccccacttgtatgctctggaatctgtggagacgccagccctgcccaatcagagatgccaaaaatggggacatgacttctggacagaggacatgggccacgcccccatgcatccccacccccgcccctccggacggcttacttacctcatacgcagctcatcttaaaccaatagaatcgctcggtggacgagagtgtctgactcagatatctacctcggagggagtttctgctactttagggaattattgactgggctttggggttgaacttttttttttttaaagaaagaaaaagaaaccctgggatccatctgttttttttgttgttgttgttgtttttgttgttggtggtggtggtggtggtggtggttcttaatttttaatttagtttggggaagtagcttgtttttttttttataaatatgttgatttcttgtcttttttttttatttcttactttcccatattaggggtgatagccaaaggggttctggtaagagaaagggggacaaacagaactggtaaagaggcccccctggctccaggcctgtccatcaggaagtaaattttacagggcaccaagctttgccccctaaaatcccttaggtgttctttgttcatgcaggcaggtttctgccgcatttgatgtggaggcagtgaagggcttgccctgctggcctctcatcccccttcttcccacaacccttgggcagggctggactcagtaattttgaggaaattgaagatgccatcttcccctgtgagtgacatgtctttaattttttaaaaaactactatttgaaaattggagggggaagaatgggaagggagttattgccaaatatgttaaatatgggttggggtgcttgtatatgtatcttcctcaatttccccataaatgaggtatctttttgtcacaccaaaatcaaggggtagggagagggaggaggttgcaaaaagccagatgtgggggaaaagtaacatcaacactgtcccatcctcagccctgaactagctaccatctgatcccctcagacattctcaggattttacaagactgtcagagtggggaacccctcccattaaagatccgggcaggactggggacaggttggaagtgtgatgggtgggggggtgggaggcatgggccgggggcagttctctcctcacttgtaaacttgtgtagtttcacagaaaaaaaacaaaatgcagttttaaataaagaaatttcttttt

SEQ ID NO: 23447 - DNA, 3202 bp, Homo sapiens
  source 1..3202: mol_type = unassigned DNA
ctctctcacacacacccccgcttgggcctcctctctctctccggctccattttctccgccgccgggggccggggtctcctgtggggggcccagccggtatcccaggtctcccttcagtgccggggtgaacccccgggggagccgggagccgggggcagacgggcgggggttggggcggagggagcagcggccccagcgagtttggggggagaagtaaccaggcggggggaggggcggagcagggagggggcctcagggcccccccccagctatggacgaacggctactggggccgccccctccaggcgggggccgggggggcctgggattggtgagtggggagcctgggggccctggcgagcctcccggtggcggagaccccggtgggggtagcgggggggtcccgggaggccgagggaagcaagacatcggggacattctgcagcagataatgaccatcaccgaccagagcctggacgaggcccaggccaagaaacacgccctaaactgccaccgaatgaagcctgctctctttagcgtcctgtgtgaaatcaaggagaaaactggcctcagcattcggagctcccaggaggaggagccggtggacccacagctgatgcgcttggacaacatgcttctggcagagggtgtggctgggcccgagaaagggggcggctcagcagcagcagctgcagccgctgcagcctctggtggtggtgtgtcccctgacaactccatcgaacactcggactatcgcagcaaacttgcccagatccgtcacatataccactcggagctggagaagtatgagcaggcatgtaatgagttcacgacccatgtcatgaacctgctgagggagcagagccgcaccaggcccgtggcccccaaagagatggaacgcatggtgagcatcatccatcgaaagttcagcgccatccagatgcagctgaagcagagcacctgcgaggctgtgatgatcctgcgctcccgtttcctggatgccagacgaaagcgccgtaacttcagcaaacaggccactgaggtcctaaatgagtatttctactcccacctgagtaacccatatcctagtgaggaggccaaggaggagcttgccaagaagtgtggcatcaccgtgtctcaggtctccaactggtttggcaacaagaggattcgctataagaaaaacatcggaaagttccaagaggaggcaaacatctatgctgtcaagaccgccgtgtcagtcacccaggggggccacagccgcaccagctccccgacacccccttcctctgcaggctctggcggctctttcaatctctcaggatctggagacatgtttctggggatgcctgggctcaacggagattcctattctgcttcccaggtggaatcactccgacactcgatggggccagggggctatggggataacctcgggggaggccagatgtacagcccacgggaaatgagggcaaatggcagctggcaagaggctgtgaccccctcttcagtgacatccccaacggagggaccagggagtgttcactctgatacctccaactgatcttgcccctcagggtcacaggggtgggggctctcacaaggcgacttgaagaggacgcaggcttccagaggacaaaccccaatacaggagaagcacaagacagagaagggccaatggggtcatcccctccctaacgagactctctgtgctgggggtgctaattacatggcaggaagaatggggcctctaaggggagtgtggggtctgtctctcccttttttccatctttttcctctctcgctttctttcttacacagaaacatacacataccgagaaacctatttctcagacccctttttctcctctgtctttctctctccctctcccacacctcacacacacatactcccacttgcaactattctgtttctctcctgggctcccccactttcccttccccaccccacttgtatgctctggaatctgtggagacgccagccctgcccaatcagagatgccaaaaatggggacatgacttctggacagaggacatgggccacgcccccatgcatccccacccccgcccctccggacggcttacttacctcatacgcagctcatcttaaaccaatagaatcgctcggtggacgagagtgtctgactcagatatctacctcggagggagtttctgctactttagggaattattgactgggctttggggttgaacttttttttttttaaagaaagaaaaagaaaccctgggatccatctgttttttttgttgttgttgttgtttttgttgttgttggtggtggtggtggtggtggttcttaatttttaatttagtttggggaagtagcttgtttttttttttataaatatgttgatttcttgtcttttttttttatttcttactttcccatattaggggtgatagccaaaggggttctggtaagagaaagggggacaaacagaactggtaaagaggcccccctggctccaggcctgtccatcaggaagtaaattttacagggcaccaagctttgccccctaaaatcccttaggtgttctttgttcatgcaggcaggtttctgccgcatttgatgtggaggcagtgaagggcttgccctgctggcctctcatcccccttcttcccacaacccttgggcagggctggactcagtaattttgaggaaattgaagatgccatcttcccctgtgagtgacatgtctttaattttttaaaaaactactatttgaaaattggagggggaagaatgggaagggagttattgccaaatatgttaaatatgggttggggtgcttgtatatgtatcttcctcaatttccccataaatgaggtatctttttgtcacaccaaaatcaaggggtagggagagggaggaggttgcaaaaagccagatgtgggggaaaagtaacatcaacactgtcccatcctcagccctgaactagctaccatctgatcccctcagacattctcaggattttacaagactgtcagagtggggaacccctcccattaaagatccgggcaggactggggacaggttggaagtgtgatgggtgggggggtgggaggcatgggccgggggcagttctctcctcacttgtaaacttgtgtagtttcacagaaaaaaaacaaaatgcagttttaaataaagaaatttcttttt

SEQ ID NO: 23448 - DNA, 3211 bp, Homo sapiens
  source 1..3211: mol_type = unassigned DNA
ctctctcacacacacccccgcttgggcctcctctctctctccggctccattttctccgccgccgggggccggggtctcctgtggggggcccagccggtatcccaggtctcccttcagtgccggggtgaacccccgggggagccgggagccgggggcagacgggcgggggttggggcggagggagcagcggccccagcgagtttggggggagaagtaaccaggcggggggaggggcggagcagggagggggcctcagggcccccccccagctatggacgaacggctactggggccgccccctccaggcgggggccgggggggcctgggattggtgagtggggagcctgggggccctggcgagcctcccggtggcggagaccccggtgggggtagcgggggggtcccgggaggccgagggaagcaagacatcggggacattctgcagcagataatgaccatcaccgaccagagcctggacgaggcccaggccaagaaacacgccctaaactgccaccgaatgaagcctgctctctttagcgtcctgtgtgaaatcaaggagaaaactggcctcagcattcggagctcccaggaggaggagccggtggacccacagctgatgcgcttggacaacatgcttctggcagagggtgtggctgggcccgagaaagggggcggctcagcagcagcagctgcagccgctgcagcctctggtggtggtgtgtcccctgacaactccatcgaacactcggactatcgcagcaaacttgcccagatccgtcacatataccactcggagctggagaagtatgagcaggcatgtaatgagttcacgacccatgtcatgaacctgctgagggagcagagccgcaccaggcccgtggcccccaaagagatggaacgcatggtgagcatcatccatcgaaagttcagcgccatccagatgcagctgaagcagagcacctgcgaggctgtgatgatcctgcgctcccgtttcctggatgccagacgaaagcgccgtaacttcagcaaacaggccactgaggtcctaaatgagtatttctactcccacctgagtaacccatatcctagtgaggaggccaaggaggagcttgccaagaagtgtggcatcaccgtgtctcaggtctccaactggtttggcaacaagaggattcgctataagaaaaacatcggaaagttccaagaggaggcaaacatctatgctgtcaagaccgccgtgtcagtcacccaggggggccacagccgcaccagctccccgacacccccttcctctgcaggctctggcggctctttcaatctctcaggatctggagacatgtttctggggatgcctgggctcaacggagattcctattctgcttcccaggtggaatcactccgacactcgatggggccagggggctatggggataacctcgggggaggccagatgtacagcccacgggaaatgagggcaaatggcagctggcaagaggctgtgaccccctcttcagtgacatccccaacggagggaccagggagtgttcactctgatacctccaactgatcttgcccctcagggtcacaggggtgggggctctcacaaggcgacttgaagaggacgcaggcttccagaggacaaaccccaatacaggagaagcacaagacagagaagggccaatggggtcatcccctccctaacgagactctctgtgctgggggtgctaattacatggcaggaagaatggggcctctaaggggagtgtggggtctgtctctcccttttttccatctttttcctctctcgctttctttcttacacagaaacatacacataccgagaaacctatttctcagacccctttttctcctctgtctttctctctccctctcccacacctcacacacacatactcccacttgcaactattctgtttctctcctgggctcccccactttcccttccccaccccacttgtatgctctggaatctgtggagacgccagccctgcccaatcagagatgccaaaaatggggacatgacttctggacagaggacatgggccacgcccccatgcatccccacccccgcccctccggacggcttacttacctcatacgcagctcatcttaaaccaatagaatcgctcggtggacgagagtgtctgactcagatatctacctcggagggagtttctgctactttagggaattattgactgggctttggggttgaactttttttttttttaaagaaagaaaaagaaaccctgggatccatctgttttttttgttgttgttgttgtttttgttgttggtggtggtggtggtggtggtggttcttaatttttaatttagtttggggaagtagcttgtttttttttttataaatatgttgatttcttgtcttttttttttatttcttactttcccatattaggggtgatagccaaaggggttctggtaagagaaagggggacaaacagaactggtaaagaggcccccctggctccaggcctgtccatcaggaagtaaattttacagggcaccaagctttgccccctaaaatcccttaggtgttctttgttcatgcaggcaggtttctgccgcatttgatgtggaggcagtgaagggcttgccctgctggcctctcatcccccttcttcccacaacccttgggcagggctggactcagtaattttgaggaaattgaagatgccatcttcccctgtgagtgacatgtctttaattttttaaaaaactactatttgaaaattggagggggaagaatgggaagggagttattgccaaatatgttaaatatgggttggggtgcttgtatatgtatcttcctcaatttccccataaatgaggtatctttttgtcacaccaaaatcaaggggtagggagagggaggaggttgcaaaaagccagatgtgggggaaaagtaacatcaacactgtcccatcctcagccctgaactagctaccatctgatcccctcagacattctcaggattttacaagactgtcagagtggggaacccctcccattaaagatccgggcaggactggggacaggttggaagtgtgatgggtgggggggtgggaggcatgggccgggggcagttctctcctcacttgtaaacttgtgtagtttcacagaaaaaaaacaaaatgcagttttaaataaagaaatttcttttttccctggg

SEQ ID NO: 23449 - DNA, 3210 bp, Homo sapiens
  source 1..3210: mol_type = unassigned DNA
ctctctcacacacacccccgcttgggcctcctctctctctccggctccattttctccgccgccgggggccggggtctcctgtggggggcccagccggtatcccaggtctcccttcagtgccggggtgaacccccgggggagccgggagccgggggcagacgggcgggggttggggcggagggagcagcggccccagcgagtttggggggagaagtaaccaggcggggggaggggcggagcagggagggggcctcagggcccccccccagctatggacgaacggctactggggccgccccctccaggcgggggccgggggggcctgggattggtgagtggggagcctgggggccctggcgagcctcccggtggcggagaccccggtgggggtagcgggggggtcccgggaggccgagggaagcaagacatcggggacattctgcagcagataatgaccatcaccgaccagagcctggacgaggcccaggccaagaaacacgccctaaactgccaccgaatgaagcctgctctctttagcgtcctgtgtgaaatcaaggagaaaactggcctcagcattcggagctcccaggaggaggagccggtggacccacagctgatgcgcttggacaacatgcttctggcagagggtgtggctgggcccgagaaagggggcggctcagcagcagcagctgcagccgctgcagcctctggtggtggtgtgtcccctgacaactccatcgaacactcggactatcgcagcaaacttgcccagatccgtcacatataccactcggagctggagaagtatgagcaggcatgtaatgagttcacgacccatgtcatgaacctgctgagggagcagagccgcaccaggcccgtggcccccaaagagatggaacgcatggtgagcatcatccatcgaaagttcagcgccatccagatgcagctgaagcagagcacctgcgaggctgtgatgatcctgcgctcccgtttcctggatgccagacgaaagcgccgtaacttcagcaaacaggccactgaggtcctaaatgagtatttctactcccacctgagtaacccatatcctagtgaggaggccaaggaggagcttgccaagaagtgtggcatcaccgtgtctcaggtctccaactggtttggcaacaagaggattcgctataagaaaaacatcggaaagttccaagaggaggcaaacatctatgctgtcaagaccgccgtgtcagtcacccaggggggccacagccgcaccagctccccgacacccccttcctctgcaggctctggcggctctttcaatctctcaggatctggagacatgtttctggggatgcctgggctcaacggagattcctattctgcttcccaggtggaatcactccgacactcgatggggccagggggctatggggataacctcgggggaggccagatgtacagcccacgggaaatgagggcaaatggcagctggcaagaggctgtgaccccctcttcagtgacatccccaacggagggaccagggagtgttcactctgatacctccaactgatcttgcccctcagggtcacaggggtgggggctctcacaaggcgacttgaagaggacgcaggcttccagaggacaaaccccaatacaggagaagcacaagacagagaagggccaatggggtcatcccctccctaacgagactctctgtgctgggggtgctaattacatggcaggaagaatggggcctctaaggggagtgtggggtctgtctctcccttttttccatctttttcctctctcgctttctttcttacacagaaacatacacataccgagaaacctatttctcagacccctttttctcctctgtctttctctctccctctcccacacctcacacacacatactcccacttgcaactattctgtttctctcctgggctcccccactttcccttccccaccccacttgtatgctctggaatctgtggagacgccagccctgcccaatcagagatgccaaaaatggggacatgacttctggacagaggacatgggccacgcccccatgcatccccacccccgcccctccggacggcttacttacctcatacgcagctcatcttaaaccaatagaatcgctcggtggacgagagtgtctgactcagatatctacctcggagggagtttctgctactttagggaattattgactgggctttggggttgaacttttttttttttaaagaaagaaaaagaaaccctgggatccatctgttttttttgttgttgttgttgtttttgttgttggtggtggtggtggtggtggtggttcttaatttttaatttagtttggggaagtagcttgtttttttttttataaatatgttgatttcttgtcttttttttttatttcttactttcccatattaggggtgatagccaaaggggttctggtaagagaaagggggacaaacagaactggtaaagaggcccccctggctccaggcctgtccatcaggaagtaaattttacagggcaccaagctttgccccctaaaatcccttaggtgttctttgttcatgcaggcaggtttctgccgcatttgatgtggaggcagtgaagggcttgccctgctggcctctcatcccccttcttcccacaacccttgggcagggctggactcagtaattttgaggaaattgaagatgccatcttcccctgtgagtgacatgtctttaattttttaaaaaactactatttgaaaattggagggggaagaatgggaagggagttattgccaaatatgttaaatatgggttggggtgcttgtatatgtatcttcctcaatttccccataaatgaggtatctttttgtcacaccaaaatcaaggggtagggagagggaggaggttgcaaaaagccagatgtgggggaaaagtaacatcaacactgtcccatcctcagccctgaactagctaccatctgatcccctcagacattctcaggattttacaagactgtcagagtggggaacccctcccattaaagatccgggcaggactggggacaggttggaagtgtgatgggtgggggggtgggaggcatgggccgggggcagttctctcctcacttgtaaacttgtgtagtttcacagaaaaaaatcaaaatgcagttttaaataaagaaatttcttttttccctggg

SEQ ID NO: 23450 - DNA, 3210 bp, Homo sapiens
  source 1..3210: mol_type = unassigned DNA
ctctctcacacacacccccgcttgggcctcctctctctctccggctccattttctccgccgccgggggccggggtctcctgtggggggcccagccggtatcccaggtctcccttcagtgccggggtgaacccccgggggagccgggagccgggggcagacgggcgggggttggggcggagggagcagcggccccagcgagtttggggggagaagtaaccaggcggggggaggggcggagcagggagggggcctcagggcccccccccagctatggacgaacggctactggggccgccccctccaggcgggggccgggggggcctgggattggtgagtggggagcctgggggccctggcgagcctcccggtggcggagaccccggtgggggtagcgggggggtcccgggaggccgagggaagcaagacatcggggacattctgcagcagataatgaccatcaccgaccagagcctggacgaggcccaggccaagaaacacgccctaaactgccaccgaatgaagcctgctctctttagcgtcctgtgtgaaatcaaggagaaaactggcctcagcattcggagctcccaggaggaggagccggtggacccacagctgatgcgcttggacaacatgcttctggcagagggtgtggctgggcccgagaaagggggcggctcagcagcagcagctgcagccgctgcagcctctggtggtggtgtgtcccctgacaactccatcgaacactcggactatcgcagcaaacttgcccagatccgtcacatataccactcggagctggagaagtatgagcaggcatgtaatgagttcacgacccatgtcatgaacctgctgagggagcagagccgcaccaggcccgtggcccccaaagagatggaacgcatggtgagcatcatccatcgaaagttcagcgccatccagatgcagctgaagcagagcacctgcgaggctgtgatgatcctgcgctcccgtttcctggatgccagacgaaagcgccgtaacttcagcaaacaggccactgaggtcctaaatgagtatttctactcccacctgagtaacccatatcctagtgaggaggccaaggaggagcttgccaagaagtgtggcatcaccgtgtctcaggtctccaactggtttggcaacaagaggattcgctataagaaaaacatcggaaagttccaagaggaggcaaacatctatgctgtcaagaccgccgtgtcagtcacccaggggggccacagccgcaccagctccccgacacccccttcctctgcaggctctggcggctctttcaatctctcaggatctggagacatgtttctggggatgcctgggctcaacggagattcctattctgcttcccaggtggaatcactccgacactcgatggggccagggggctatggggataacctcgggggaggccagatgtacagcccacgggaaatgagggcaaatggcagctggcaagaggctgtgaccccctcttcagtgacatccccaacggagggaccagggagtgttcactctgatacctccaactgatcttgcccctcagggtcacaggggtgggggctctcacaaggcgacttgaagaggacgcaggcttccagaggacaaaccccaatacaggagaagcacaagacagagaagggccaatggggtcatcccctccctaacgagactctctgtgctgggggtgctaattacatggcaggaagaatggggcctctaaggggagtgtggggtctgtctctcccttttttccatctttttcctctctcgctttctttcttacacagaaacatacacataccgagaaacctatttctcagacccctttttctcctctgtctttctctctccctctcccacacctcacacacacatactcccacttgcaactattctgtttctctcctgggctcccccactttcccttccccaccccacttgtatgctctggaatctgtggagacgccagccctgcccaatcagagatgccaaaaatggggacatgacttctggacagaggacatgggccacgcccccatgcatccccacccccgcccctccggacggcttacttacctcatacgcagctcatcttaaaccaatagaatcgctcggtggacgagagtgtctgactcagatatctacctcggagggagtttctgctactttagggaattattgactgggctttggggttgaacttttttttttttaaagaaagaaaaagaaaccctgggatccatctgttttttttgttgttgttgttgtttttgttgttgttgttggtggtggtggtggtggttcttaatttttaatttagtttggggaagtagcttgtttttttttttataaatatgttgatttcttgtcttttttttttatttcttactttcccatattaggggtgatagccaaaggggttctggtaagagaaagggggacaaacagaactggtaaagaggcccccctggctccaggcctgtccatcaggaagtaaattttacagggcaccaagctttgccccctaaaatcccttaggtgttctttgttcatgcaggcaggtttctgccgcatttgatgtggaggcagtgaagggcttgccctgctggcctctcatcccccttcttcccacaacccttgggcagggctggactcagtaattttgaggaaattgaagatgccatcttcccctgtgagtgacatgtctttaattttttaaaaaactactatttgaaaattggagggggaagaatgggaagggagttattgccaaatatgttaaatatgggttggggtgcttgtatatgtatcttcctcaatttccccataaatgaggtatctttttgtcacaccaaaatcaaggggtagggagagggaggaggttgcaaaaagccagatgtgggggaaaagtaacatcaacactgtcccatcctcagccctgaactagctaccatctgatcccctcagacattctcaggattttacaagactgtcagagtggggaacccctcccattaaagatccgggcaggactggggacaggttggaagtgtgatgggtgggggggtgggaggcatgggccgggggcagttctctcctcacttgtaaacttgtgtagtttcacagaaaaaaaacaaaatgcagttttaaataaagaaatttcttttttccctggg

SEQ ID NO: 23451 - DNA, 2333 bp, Homo sapiens
  source 1..2333: mol_type = unassigned DNA
cacacccccgcttgggcctcctctctctctccggctccattttctccgccgccgggggccggggtctcctgtggggggcccagccggtatcccaggtctcccttcagtgccggggtgaacccccgggggagccgggagccgggggcagacgggcgggggttggggcggagggagcagcggccccagcgagtttggggggagaagtaaccaggcggggggaggggcggagcagggagggggcctcagggcccccccccagctatggacgaacggctactggggccgccccctccaggcgggggccgggggggcctgggattggtgagtggggagcctgggggccctggcgagcctcccggtggcggagaccccggtgggggtagcgggggggtcccgggaggccgagggaagcaagacatcggggacattctgcagcagataatgaccatcaccgaccagagcctggacgaggcccaggccaagaaacacgccctaaactgccaccgaatgaagcctgctctctttagcgtcctgtgtgaaatcaaggagaaaactggcctcagcattcggagctcccaggaggaggagccggtggacccacagctgatgcgcttggacaacatgcttctggcagagggtgtggctgggcccgagaaagggggcggctcagcagcagcagctgcagccgctgcagcctctggtggtggtgtgtcccctgacaactccatcgaacactcggactatcgcagcaaacttgcccagatccgtcacatataccactcggagctggagaagtatgagcaggcatgtaatgagttcacgacccatgtcatgaacctgctgagggagcagagccgcaccaggcccgtggcccccaaagagatggaacgcatggtgagcatcatccatcgaaagttcagcgccatccagatgcagctgaagcagagcacctgcgaggctgtgatgatcctgcgctcccgtttcctggatgccagacgaaagcgccgtaacttcagcaaacaggccactgaggtcctaaatgagtatttctactcccacctgagtaacccatatcctagtgaggaggccaaggaggagcttgccaagaagtgtggcatcaccgtgtctcaggtattatggaggttgcgggaggagttgtcaggcaaagtgcacgcatctcagctaggtgcagtggtctccaactggtttggcaacaagaggattcgctataagaaaaacatcggaaagttccaagaggaggcaaacatctatgctgtcaagaccgccgtgatcatagcagagagggggccttttggggtgagagggaccgagctgagtcttccctctctgcccccacaaggctctggcggctctttcaatctctcaggatctggagacatgtttctggggatgcctgggctcaacggagattcctattctgcttcccaggtcagatgcccatctcccctgcaggtggaatcactccgacactcgatggggccagggggctatggggataacctcgggggaggccagatgtacagcccacgggaaatgagggcaaatggcagctggcaagaggctgtgaccccctcttcagtgacatccccaacggagggaccagggagtgttcactctgatacctccaactgatcttgcccctcagggtcacaggggtgggggctctcacaaggcgacttgaagaggacgcaggcttccagaggacaaaccccaatacaggagaagcacaagacagagaagggccaatggggtcatcccctccctaacgagactctctgtgctgggggtgctaattacatggcaggaagaatggggcctctaaggggagtgtggggtctgtctctcccttttttccatctttttcctctctcgctttctttcttacacagaaacatacacataccgagaaacctatttctcagacccctttttctcctctgtctttctctctccctctcccacacctcacacacacatactcccacttgcaactattctgtttctctcctgggctcccccactttcccttccccaccccacttgtatgctctggaatctgtggagacgccagccctgcccaatcagagatgccaaaaatggggacatgacttctggacagaggacatgggccacgcccccatgcatccccacccccgcccctccggacggcttacttacctcatacgcagctcatcttaaaccaatagaatcgctcggtggacgagagtgtctgactcagatatctacctcggagggagtttctgctactttagggaattattgactgggctttggggttgaacttttttttt

SEQ ID NO: 23452 - DNA, 2333 bp, Homo sapiens
  source 1..2333: mol_type = unassigned DNA
cacacccccgcttgggcctcctctctctctccggctccattttctccgccgccgggggccggggtctcctgtggggggcccagccggtatcccaggtctcccttcagtgccggggtgaacccccgggggagccgggagccgggggcagacgggcgggggttggggcggagggagcagcggccccagcgagtttggggggagaagtaaccaggcggggggaggggcggagcagggagggggcctcagggcccccccccagctatggacgaacggctactggggccgccccctccaggcgggggccgggggggcctaggattggtgagtggggagcctgggggccctggcgagcctcccggtggcggagaccccggtgggggtagcgggggggtcccgggaggccgagggaagcaagacatcggggacattctgcagcagataatgaccatcaccgaccagagcctggacgaggcccaggccaagaaacacgccctaaactgccaccgaatgaagcctgctctctttagcgtcctgtgtgaaatcaaggagaaaactggcctcagcattcggagctcccaggaggaggagccggtggacccacagctgatgcgcttggacaacatgcttctggcagagggtgtggctgggcccgagaaagggggcggctcagcagcagcagctgcagccgctgcagcctctggtggtggtgtgtcccctgacaactccatcgaacactcggactatcgcagcaaacttgcccagatccgtcacatataccactcggagctggagaagtatgagcaggcatgtaatgagttcacgacccatgtcatgaacctgctgagggagcagagccgcaccaggcccgtggcccccaaagagatggaacgcatggtgagcatcatccatcgaaagttcagcgccatccagatgcagctgaagcagagcacctgcgaggctgtgatgatcctgcgctcccgtttcctggatgccagacgaaagcgccgtaacttcagcaaacaggccactgaggtcctaaatgagtatttctactcccacctgagtaacccatatcctagtgaggaggccaaggaggagcttgccaagaagtgtggcatcaccgtgtctcaggtattatggaggttgcgggaggagttgtcaggcaaagtgcacgcatctcagctaggtgcagtggtctccaactggtttggcaacaagaggattcgctataagaaaaacatcggaaagttccaagaggaggcaaacatctatgctgtcaagaccgccgtgatcatagcagagagggggccttttggggtgagagggaccgagctgagtcttccctctctgcccccacaaggctctggcggctctttcaatctctcaggatctggagacatgtttctggggatgcctgggctcaacggagattcctattctgcttcccaggtcagatgcccatctcccctgcaggtggaatcactccgacactcgatggggccagggggctatggggataacctcgggggaggccagatgtacagcccacgggaaatgagggcaaatggcagctggcaagaggctgtgaccccctcttcagtgacatccccaacggagggaccagggagtgttcactctgatacctccaactgatcttgcccctcagggtcacaggggtgggggctctcacaaggcgacttgaagaggacgcaggcttccagaggacaaaccccaatacaggagaagcacaagacagagaagggccaatggggtcatcccctccctaacgagactctctgtgctgggggtgctaattacatggcaggaagaatggggcctctaaggggagtgtggggtctgtctctcccttttttccatctttttcctctctcgctttctttcttacacagaaacatacacataccgagaaacctatttctcagacccctttttctcctctgtctttctctctccctctcccacacctcacacacacatactcccacttgcaactattctgtttctctcctgggctcccccactttcccttccccaccccacttgtatgctctggaatctgtggagacgccagccctgcccaatcagagatgccaaaaatggggacatgacttctggacagaggacatgggccacgcccccatgcatccccacccccgcccctccggacggcttacttacctcatacgcagctcatcttaaaccaatagaatcgctcggtggacgagagtgtctgactcagatatctacctcggagggagtttctgctactttagggaattattgactgggctttggggttgaacttttttttt

SEQ ID NO: 23453 - DNA, 2258 bp, Homo sapiens
  source 1..2258: mol_type = unassigned DNA
cacacccccgcttgggcctcctctctctctccggctccattttctccgccgccgggggccggggtctcctgtggggggcccagccggtatcccaggtctcccttcagtgccggggtgaacccccgggggagccgggagccgggggcagacgggcgggggttggggcggagggagcagcggccccagcgagtttggggggagaagtaaccaggcggggggaggggcggagcagggagggggcctcagggcccccccccagctatggacgaacggctactggggccgccccctccaggcgggggccgggggggcctgggattggtgagtggggagcctgggggccctggcgagcctcccggtggcggagaccccggtgggggtagcgggggggtcccgggaggccgagggaagcaagacatcggggacattctgcagcagataatgaccatcaccgaccagagcctggacgaggcccaggccaagaaacacgccctaaactgccaccgaatgaagcctgctctctttagcgtcctgtgtgaaatcaaggagaaaactggcctcagcattcggagctcccaggaggaggagccggtggacccacagctgatgcgcttggacaacatgcttctggcagagggtgtggctgggcccgagaaagggggcggctcagcagcagcagctgcagccgctgcagcctctggtggtggtgtgtcccctgacaactccatcgaacactcggactatcgcagcaaacttgcccagatccgtcacatataccactcggagctggagaagtatgagcaggcatgtaatgagttcacgacccatgtcatgaacctgctgagggagcagagccgcaccaggcccgtggcccccaaagagatggaacgcatggtgagcatcatccatcgaaagttcagcgccatccagatgcagctgaagcagagcacctgcgaggctgtgatgatcctgcgctcccgtttcctggatgccagacgaaagcgccgtaacttcagcaaacaggccactgaggtcctaaatgagtatttctactcccacctgagtaacccatatcctagtgaggaggccaaggaggagcttgccaagaagtgtggcatcaccgtgtctcaggtctccaactggtttggcaacaagaggattcgctataagaaaaacatcggaaagttccaagaggaggcaaacatctatgctgtcaagaccgccgtgtcagtcacccaggggggccacagccgcaccagctccccgacacccccttcctctgcaggctctggcggctctttcaatctctcaggatctggagacatgtttctggggatgcctgggctcaacggagattcctattctgcttcccaggtcagatgcccatctcccctgcaggtggaatcactccgacactcgatggggccagggggctatggggataacctcgggggaggccagatgtacagcccacgggaaatgagggcaaatggcagctggcaagaggctgtgaccccctcttcagtgacatccccaacggagggaccagggagtgttcactctgatacctccaactgatcttgcccctcagggtcacaggggtgggggctctcacaaggcgacttgaagaggacgcaggcttccagaggacaaaccccaatacaggagaagcacaagacagagaagggccaatggggtcatcccctccctaacgagactctctgtgctgggggtgctaattacatggcaggaagaatggggcctctaaggggagtgtggggtctgtctctcccttttttccatctttttcctctctcgctttctttcttacacagaaacatacacataccgagaaacctatttctcagacccctttttctcctctgtctttctctctccctctcccacacctcacacacacatactcccacttgcaactattctgtttctctcctgggctcccccactttcccttccccaccccacttgtatgctctggaatctgtggagacgccagccctgcccaatcagagatgccaaaaatggggacatgacttctggacagaggacatgggccacgcccccatgcatccccacccccgcccctccggacggcttacttacctcatacgcagctcatcttaaaccaatagaatcgctcggtggacgagagtgtctgactcagatatctacctcggagggagtttctgctactttagggaattattgactgggctttggggttgaacttttttttt

SEQ ID NO: 23454 - DNA, 2258 bp, Homo sapiens; identical to SEQ ID NO: 23453
  source 1..2258: mol_type = unassigned DNA

SEQ ID NO: 23455 - DNA, 2333 bp, Homo sapiens; identical to SEQ ID NO: 23451
  source 1..2333: mol_type = unassigned DNA

SEQ ID NO: 23456 - DNA, 2333 bp, Homo sapiens; identical to SEQ ID NO: 23451
  source 1..2333: mol_type = unassigned DNA

SEQ ID NO: 23457 - DNA, 2012 bp, Homo sapiens
  source 1..2012: mol_type = unassigned DNA
ggggcggagcagggagggggcctcagggcccccccccagctatggacgaacggctactggggccgccccctccaggcgggggccggggggctgggattggtgagtggggagcctgggggccctggcgagcctcccggtggcggagaccccggtgggggtagcgggggggtcccgggaggccgagggaagcaagacatcggggacattctgcagcagataatgaccatcaccgaccagagcctggacgaggcccaggccaagaaacacgccctaaactgccaccgaatgaagcctgctctctttagcgtcctgtgtgaaatcaaggagaaaactggcctcagcattcggagctcccaggaggaggagccggtggacccacagctgatgcgcttggacaacatgcttctggcagagggtgtggctgggcccgagaaagggggcggctcagcagcagcagctgcagccgctgcagcctctggtggtggtgtgtcccctgacaactccatcgaacactcggactatcgcagcaaacttgcccagatccgtcacatataccactcggagctggagaagtatgagcaggcatgtaatgagttcacgacccatgtcatgaacctgctgagggagcagagccgcaccaggcccgtggcccccaaagagatggaacgcatggtgagcatcatccatcgaaagttcagcgccatccagatgcagctgaagcagagcacctgcgaggctgtgatgatcctgcgctcccgtttcctggatgccagacgaaagcgccgtaacttcagcaaacaggccactgaggtcctaaatgagtatttctactcccacctgagtaacccatatcctagtgaggaggccaaggaggagcttgccaagaagtgtggcatcaccgtgtctcaggtctccaactggtttggcaacaagaggattcgctataagaaaaacatcggaaagttccaagaggaggcaaacatctatgctgtcaagaccgccgtgtcagtcacccaggggggccacagccgcaccagctccccgacacccccttcctctgcaggctctggcggctctttcaatctctcaggatctggagacatgtttctggggatgcctgggctcaacggagattcctattctgcttcccaggtggaatcactccgacactcgatggggccagggggctatggggataacctcgggggaggccagatgtacagcccacgggaaatgagggcaaatggcagctggcaagaggctgtgaccccctcttcagtgacatccccaacggagggaccagggagtgttcactctgatacctccaactgatcttgcccctcagggtcacaggggtgggggctctcacaaggcgacttgaagaggacgcaggcttccagaggacaaaccccaatacaggagaagcacaagacagagaagggccaatggggtcatcccctccctaacgagactctctgtgctgggggtgctaattacatggcaggaagaatggggcctctaaggggagtgtggggtctgtctctcccttttttccatctttttcctctctcgctttctttcttacacagaaacatacacataccgagaaacctatttctcagacccctttttctcctctgtctttctctctccctctcccacacctcacacacacatactcccacttgcaactattctgtttctctcctgggctcccccactttcccttccccaccccacttgtatgctctggaatctgtggagacgccagccctgcccaatcagagatgccaaaaatggggacatgacttctggacagaggacatgggccacgcccccatgcatccccacccccgcccctccggacggcttacttacctcatacgcagctcatcttaaaccaatagaatcgctcggtggacgagagtgtctgactcagatatctacctcggagggagtttctgctactttagggaattattgactgggctttggggttgaacttttttttt

SEQ ID NO: 23458 - DNA, 2012 bp, Homo sapiens; identical to SEQ ID NO: 23457
  source 1..2012: mol_type = unassigned DNA

SEQ ID NO: 23459 - DNA, 2258 bp, Homo sapiens; identical to SEQ ID NO: 23453
  source 1..2258: mol_type = unassigned DNA

SEQ ID NO: 23460 - DNA, 2321 bp, Homo sapiens
  source 1..2321: mol_type = unassigned DNA
cacacccccgcttgggcctcctctctctctccggctccattttctccgccgccgggggccggggtctcctgtggggggcccagccggtatcccaggtctcccttcagtgccggggtgaacccccgggggagccgggagccgggggcagacgggcgggggttggggcggagggagcagcggccccagcgagtttggggggagaagtaaccaggcggggggaggggcggagcagggagggggcctcagggcccccccccagctatggacgaacggctactggggccgccccctccaggcgggggccgggggggcctgggattggtgagtggggagcctgggggccctggcgagcctcccggtggcggagaccccggtgggggtagcgggggggtcccgggaggccgagggaagcaagacatcggggacattctgcagcagataatgaccatcaccgaccagagcctggacgaggcccaggccaagaaacacgccctaaactgccaccgaatgaagcctgctctctttagcgtcctgtgtgaaatcaaggagaaaactggcctcagcattcggagctcccaggaggaggagccggtggacccacagctgatgcgcttggacaacatgcttctggcagagggtgtggctgggcccgagaaagggggcggctcagcagcagcagctgcagccgctgcagcctctggtggtggtgtgtcccctgacaactccatcgaacactcggactatcgcagcaaacttgcccagatccgtcacatataccactcggagctggagaagtatgagcaggcatgtaatgagttcacgacccatgtcatgaacctgctgagggagcagagccgcaccaggcccgtggcccccaaagagatggaacgcatggtgagcatcatccatcgaaagttcagcgccatccagatgcagctgaagcagagcacctgcgaggctgtgatgatcctgcgctcccgtttcctggatgccagacgaaagcgccgtaacttcagcaaacaggccactgaggtcctaaatgagtatttctactcccacctgagtaacccatatcctagtgaggaggccaaggaggagcttgccaagaagtgtggcatcaccgtgtctcaggtattatggaggttgcgggaggagttgtcaggcaaagtgcacgcatctcagctaggtgcagtggtctccaactggtttggcaacaagaggattcgctataagaaaaacatcggaaagttccaagaggaggcaaacatctatgctgtcaagaccgccgtgtcagtcacccaggggggccacagccgcaccagctccccgacacccccttcctctgcaggctctggcggctctttcaatctctcaggatctggagacatgtttctggggatgcctgggctcaacggagattcctattctgcttcccaggtcagatgcccatctcccctgcaggtggaatcactccgacactcgatggggccagggggctatggggataacctcgggggaggccagatgtacagcccacgggaaatgagggcaaatggcagctggcaagaggctgtgaccccctcttcagtgacatccccaacggagggaccagggagtgttcactctgatacctccaactgatcttgcccctcagggtcacaggggtgggggctctcacaaggcgacttgaagaggacgcaggcttccagaggacaaaccccaatacaggagaagcacaagacagagaagggccaatggggtcatcccctccctaacgagactctctgtgctgggggtgctaattacatggcaggaagaatggggcctctaaggggagtgtggggtctgtctctcccttttttccatctttttcctctctcgctttctttcttacacagaaacatacacataccgagaaacctatttctcagacccctttttctcctctgtctttctctctccctctcccacacctcacacacacatactcccacttgcaactattctgtttctctcctgggctcccccactttcccttccccaccccacttgtatgctctggaatctgtggagacgccagccctgcccaatcagagatgccaaaaatggggacatgacttctggacagaggacatgggccacgcccccatgcatccccacccccgcccctccggacggcttacttacctcatacgcagctcatcttaaaccaatagaatcgctcggtggacgagagtgtctgactcagatatctacctcggagggagtttctgctactttagggaattattgactgggctttggggttgaacttttttttt

SEQ ID NO: 23461 - DNA, 2012 bp, Homo sapiens; identical to SEQ ID NO: 23457
  source 1..2012: mol_type = unassigned DNA

SEQ ID NO: 23462 - DNA, 2258 bp, Homo sapiens
  source 1..2258: mol_type = unassigned DNA
cacacccccgcttgggcctcctctctctctccggctccattttctccgccgccgggggccggggtctcctgtggggggcccagccggtatcccaggtctcccttcagtgccggggtgaacccccgggggagccgggagccgggggcagacgggcgggggttggggcggagggagcagcggccccagcgagtttggggggagaagtaaccaggcggggggaggggcggagcagggagggggcctcagggcccccccccagctatggacgaacggctactggggccgccccctccaggcgggggccgggggggcctaggattggtgagtggggagcctgggggccctggcgagcctcccggtggcggagaccccggtgggggtagcgggggggtcccgggaggccgagggaagcaagacatcggggacattctgcagcagataatgaccatcaccgaccagagcctggacgaggcccaggccaagaaacacgccctaaactgccaccgaatgaagcctgctctctttagcgtcctgtgtgaaatcaaggagaaaactggcctcagcattcggagctcccaggaggaggagccggtggacccacagctgatgcgcttggacaacatgcttctggcagagggtgtggctgggcccgagaaagggggcggctcagcagcagcagctgcagccgctgcagcctctggtggtggtgtgtcccctgacaactccatcgaacactcggactatcgcagcaaacttgcccagatccgtcacatataccactcggagctggagaagtatgagcaggcatgtaatgagttcacgacccatgtcatgaacctgctgagggagcagagccgcaccaggcccgtggcccccaaagagatggaacgcatggtgagcatcatccatcgaaagttcagcgccatccagatgcagctgaagcagagcacctgcgaggctgtgatgatcctgcgctcccgtttcctggatgccagacgaaagcgccgtaacttcagcaaacaggccactgaggtcctaaatgagtatttctactcccacctgagtaacccatatcctagtgaggaggccaaggaggagcttgccaagaagtgtggcatcaccgtgtctcaggtctccaactggtttggcaacaagaggattcgctataagaaaaacatcggaaagttccaagaggaggcaaacatctatgctgtcaagaccgccgtgtcagtcacccaggggggccacagccgcaccagctccccgacacccccttcctctgcaggctctggcggctctttcaatctctcaggatctggagacatgtttctggggatgcctgggctcaacggagattcctattctgcttcccaggtcagatgcccatctcccctgcaggtggaatcactccgacactcgatggggccagggggctatggggataacctcgggggaggccagatgtacagcccacgggaaatgagggcaaatggcagctggcaagaggctgtgaccccctcttcagtgacatccccaacggagggaccagggagtgttcactctgatacctccaactgatcttgcccctcagggtcacaggggtgggggctctcacaaggcgacttgaagaggacgcaggcttccagaggacaaaccccaatacaggagaagcacaagacagagaagggccaatggggtcatcccctccctaacgagactctctgtgctgggggtgctaattacatggcaggaagaatggggcctctaaggggagtgtggggtctgtctctcccttttttccatctttttcctctctcgctttctttcttacacagaaacatacacataccgagaaacctatttctcagacccctttttctcctctgtctttctctctccctctcccacacctcacacacacatactcccacttgcaactattctgtttctctcctgggctcccccactttcccttccccaccccacttgtatgctctggaatctgtggagacgccagccctgcccaatcagagatgccaaaaatggggacatgacttctggacagaggacatgggccacgcccccatgcatccccacccccgcccctccggacggcttacttacctcatacgcagctcatcttaaaccaatagaatcgctcggtggacgagagtgtctgactcagatatctacctcggagggagtttctgctactttagggaattattgactgggctttggggttgaacttttttttt

SEQ ID NO: 23463 - DNA, 2258 bp, Homo sapiens; identical to SEQ ID NO: 23453
  source 1..2258: mol_type = unassigned DNA

SEQ ID NO: 23464 - DNA, 2012 bp, Homo sapiens
  source 1..2012: mol_type = unassigned DNA
ggggcggagcagggagggggcctcagggcccccccccagctatggacgaacggctactggggccgccccctccaggcgggggccggggggctaggattggtgagtggggagcctgggggccctggcgagcctcccggtggcggagaccccggtgggggtagcgggggggtcccgggaggccgagggaagcaagacatcggggacattctgcagcagataatgaccatcaccgaccagagcctggacgaggcccaggccaagaaacacgccctaaactgccaccgaatgaagcctgctctctttagcgtcctgtgtgaaatcaaggagaaaactggcctcagcattcggagctcccaggaggaggagccggtggacccacagctgatgcgcttggacaacatgcttctggcagagggtgtggctgggcccgagaaagggggcggctcagcagcagcagctgcagccgctgcagcctctggtggtggtgtgtcccctgacaactccatcgaacactcggactatcgcagcaaacttgcccagatccgtcacatataccactcggagctggagaagtatgagcaggcatgtaatgagttcacgacccatgtcatgaacctgctgagggagcagagccgcaccaggcccgtggcccccaaagagatggaacgcatggtgagcatcatccatcgaaagttcagcgccatccagatgcagctgaagcagagcacctgcgaggctgtgatgatcctgcgctcccgtttcctggatgccagacgaaagcgccgtaacttcagcaaacaggccactgaggtcctaaatgagtatttctactcccacctgagtaacccatatcctagtgaggaggccaaggaggagcttgccaagaagtgtggcatcaccgtgtctcaggtctccaactggtttggcaacaagaggattcgctataagaaaaacatcggaaagttccaagaggaggcaaacatctatgctgtcaagaccgccgtgtcagtcacccaggggggccacagccgcaccagctccccgacacccccttcctctgcaggctctggcggctctttcaatctctcaggatctggagacatgtttctggggatgcctgggctcaacggagattcctattctgcttcccaggtggaatcactccgacactcgatggggccagggggctatggggataacctcgggggaggccagatgtacagcccacgggaaatgagggcaaatggcagctggcaagaggctgtgaccccctcttcagtgacatccccaacggagggaccagggagtgttcactctgatacctccaactgatcttgcccctcagggtcacaggggtgggggctctcacaaggcgacttgaagaggacgcaggcttccagaggacaaaccccaatacaggagaagcacaagacagagaagggccaatggggtcatcccctccctaacgagactctctgtgctgggggtgctaattacatggcaggaagaatggggcctctaaggggagtgtggggtctgtctctcccttttttccatctttttcctctctcgctttctttcttacacagaaacatacacataccgagaaacctatttctcagacccctttttctcctctgtctttctctctccctctcccacacctcacacacacatactcccacttgcaactattctgtttctctcctgggctcccccactttcccttccccaccccacttgtatgctctggaatctgtggagacgccagccctgcccaatcagagatgccaaaaatggggacatgacttctggacagaggacatgggccacgcccccatgcatccccacccccgcccctccggacggcttacttacctcatacgcagctcatcttaaaccaatagaatcgctcggtggacgagagtgtctgactcagatatctacctcggagggagtttctgctactttagggaattattgactgggctttggggttgaacttttttttt

SEQ ID NO: 23465 - DNA, 2333 bp, Homo sapiens; identical to SEQ ID NO: 23451
  source 1..2333: mol_type = unassigned DNA

SEQ ID NO: 23466 - DNA, 2012 bp, Homo sapiens; identical to SEQ ID NO: 23457
  source 1..2012: mol_type = unassigned DNA

SEQ ID NO: 23467 - DNA, 2012 bp, Homo sapiens; identical to SEQ ID NO: 23457
  source 1..2012: mol_type = unassigned DNA

SEQ ID NO: 23468 - DNA, 2755 bp, Homo sapiens
  source 1..2755: mol_type = unassigned DNA
cctccccctccccctccccctctttcttctcctccctcgtcgccgccgccgccgccgccgcctcagccttcgcctcagccgccgcccgctcccgcccgcgcgcggcgggatggacgatcaatccaggatgctgcagactctggccggggtgaacctggctggccactcggtgcaggggggcatggccctgccgcctcccccgcacggccacgaaggggcggacggcgacggcaggaagcaggacatcggcgacatcctccaccagatcatgaccatcaccgaccagagcttggacgaggcgcaagcaaagaaacatgccctgaactgtcacagaatgaaaccagcgctcttcagcgtcctgtgtgagatcaaagagaaaacaggtctcagcatcagaggagcccaggaggaggaccctcccgatccccagctaatgagactggacaatatgcttttggcagaaggggtttcaggtcctgagaaaggtgggggatcggcggcagcagctgcagccgcggcagcctctggaggttcttcagataactctattgaacactcagattacagagccaaattgacccagatcagacaaatctatcacacagaactggagaaatatgaacaggcatgtaatgaatttactacacatgtgatgaaccttctccgagaacagagtagaacacgtcccatttctccaaaagagattgaaagaatggtgggcatcatccatcgaaaatttagttccattcagatgcagctcaaacaaagcacttgtgaagcagttatgattttaagatcaaggttccttgatgccagacggaaaaggcgtaacttcagtaaacaggccacagaaatcttgaatgaatatttttactcacacctcagcaacccctaccccagtgaagaagccaaagaggagctggccaagaaatgcagcatcacagtgtcacaggtatccaattggtttggcaacaaacgaatcaggtacaagaagaacattggcaagtttcaggaagaagccaacctctatgctgcaaagacggccgtgacagctgcacacgcagtagcagcagctgtgcagaacaaccagaccaattcgcccaccacaccaaattccggtggataccctccgtcatgttatcaatcagacgggaggctacagtgatggccttggaggaaattcactgtacagtccacataatttaaatgctaatggaggctggcaggacgcaacaactccatcttctgtgacttctcctacagaaggcccaggaagtgtgcactcggatacctctaactaatctctggccacacttttccctgagctacatgccttgataagtgcattcagagcaataggaggaaaaggaaagcgtttttgtagcccaccatctacagctttactgtaaaaccttgtcttattcgagaacttggtaaatctgttttttaaggaatcataatcatttgtatttatacttaaaaacacacaatgttaaaaaaaataaagcactttatccaattaggccaagatttaacattgttgacagtcctgtagctattttatcataatttattatcaatattttacattaatggtttcacagttgccaattacttggccttaagggtaaaaagtacaatatacactaaacctcaaccgttaaagcagatgcaaaaattcacctcacctaaattgaacttcttgcatatttccattactgacttggattgtctttctttcatatcactaatggagttggaataaagagctgtttgcctatccctgttaatgatggttgtgtttaagaatcttcctcgtcacgtttgtgttcagatctcttatgttataattagatcagagactggtagcatcgtttctctctctgaaagcaccagtgcccagagtctgctcggtaataaaattatggatccagattgttctgagagacgaagatacttgctgctgatagaggtgaaaacgagattgatccgtctggggttttacggtgtgcactgggtgctgcacagacttgtcaaggtttgctacgtcctctgggcatctgcaaaaggccctgctctctggagtgttgtatatagtgtagcaaaagagtatttatacatcccaccaatcaaaacacagctttattacctcatgcgaactcatacaaaccaatagaatttcaacatgttctgtagcttagagtgctcacttactacctctgaacaatactcacgctgtagtttgtctctttcttatctttttgcatcttgtaattaactctttgtttcccttcataaaatgtaatgtacattgtaatcttttaaaagaaaaatcagggttgcacttgcaacttttaaaaaaccgagtgtggaaacattgggtcttaattcaacacaggatcggtaaaactgttgtaaatactgagaaacattttgaatgttcttcatcttattactaatccatgcaaaaaaaaaaaaaaaagcagcgactaattgtgatgcattcagatttcagtattcagtactgtatatttcaccctgtgtaatggggccccctctcctttctctctttttgtattgtatgcgattctgaaactgattgagtcatgaaaataatttgtggcggtgattctaatgtattaaaaacgtttcgtgttcctttctaactggattacaccctggattgaaaaagtcttcctcgtggtagttatatgtagtttcaaacatgaataaactttttgctttcatgattaaa

SEQ ID NO: 23469 - DNA, 1063 bp, Homo sapiens
  source 1..1063: mol_type = unassigned DNA
atggacgatcaatccaggatgctgcagactctggccggggtgaacctggctggccactcggtgcaggggggcatggccctgccgcctcccccgcacggccacgaaggggcggacggcgacggcaggaagcaggacatcggcgacatcctccaccagatcatgaccatcaccgaccagagcttggacgaggcgcaagcaaagaaacatgccctgaactgtcacagaatgaaaccagcgctcttcagcgtcctgtgtgagatcaaagagaaaacaggcatgtaatgaatttactacacatgtgatgaaccttctccgagaacagagtagaacacgtcccatttctccaaaagagattgaaagaatggtgggcatcatccatcgaaaatttagttccattcagatgcagctcaaacaaagcacttgtgaagcagttatgattttaagatcaaggttccttgatgccagacggaaaaggcgtaacttcagtaaacaggccacagaaatcttgaatgaatatttttactcacacctcagcaacccctaccccagtgaagaagccaaagaggagctggccaagaaatgcagcatcacagtgtcacaggtatccaattggtttggcaacaaacgaatcaggtacaagaagaacattggcaagtttcaggaagaagccaacctctatgctgcaaagacggccgtgacagctgcacacgcagtagcagcagctgtgcagaacaaccagaccaattcgcccaccacaccaaattccggttcttctggttcttttaacctcccaaattctggggacatgttcatgaacatgcagagtctgaatggggattcttaccaagggtcccaagtcggagccaatgtgcaatcacaggtggataccctccgtcatgttatcaatcagacgggaggctacagtgatggccttggaggaaattcactgtacagtccacataatttaaatgctaatggaggctggcaggacgcaacaactccatcttctgtgacttctcctacagaaggcccaggaagtgtgcactcggatacctctaactaa

SEQ ID NO: 23470 - DNA, 2902 bp, Homo sapiens
  source 1..2902: mol_type = unassigned DNA
tcctccctcgtcgccgccgccgccgccgccgcctcagccttcgcctcagccgccgcccgctcccgcccgcgcgcggcgggatggacgatcaatccaggatgctgcagactctggccggggtgaacctggctggccactcggtgcaggggggcatggccctgccgcctcccccgcacggccacgaaggggcggacggcgacggcaggaagcaggacatcggcgacatcctccaccagatcatgaccatcaccgaccagagcttggacgaggcgcaagcaaagaaacatgccctgaactgtcacagaatgaaaccagcgctcttcagcgtcctgtgtgagatcaaagagaaaacaggtctcagcatcagaggagcccaggaggaggaccctcccgatccccagctaatgagactggacaatatgcttttggcagaaggggtttcaggtcctgagaaaggtgggggatcggcggcagcagctgcagccgcggcagcctctggaggttcttcagataactctattgaacactcagattacagagccaaattgacccagatcagacaaatctatcacacagaactggagaaatatgaacaggcatgtaatgaatttactacacatgtgatgaaccttctccgagaacagagtagaacacgtcccatttctccaaaagagattgaaagaatggtgggcatcatccatcgaaaatttagttccattcagatgcagctcaaacaaagcacttgtgaagcagttatgattttaagatcaaggttccttgatgccagacggaaaaggcgtaacttcagtaaacaggccacagaaatcttgaatgaatatttttactcacacctcagcaacccctaccccagtgaagaagccaaagaggagctggccaagaaatgcagcatcacagtgtcacagagtcttgtaaaggatccaaaagaaagagggagcaaaggttctgacatccagccaactagcgtggtatccaattggtttggcaacaaacgaatcaggtacaagaagaacattggcaagtttcaggaagaagccaacctctatgctgcaaagacggccgtgacagctgcacacgcagtagcagcagctgtgcagaacaaccagaccaattcgcccaccacaccaaattccggttcttctggttcttttaacctcccaaattctggggacatgttcatgaacatgcagagtctgaatggggattcttaccaagggtcccaagtcggagccaatgtgcaatcacaggtggataccctccgtcatgttatcaatcagacgggaggctacagtgatggccttggaggaaattcactgtacagtccacataatttaaatgctaatggaggctggcaggacgcaacaactccatcttctgtgacttctcctacagaaggcccaggaagtgtgcactcggatacctctaactaatctctggccacacttttccctgagctacatgccttgataagtgcattcagagcaataggaggaaaaggaaagcgtttttgtagcccaccatctacagctttactgtaaaaccttgtcttattcgagaacttggtaaatctgttttttaaggaatcataatcatttgtatttatacttaaaaacacacaatgttaaaaaaaataaagcactttatccaattaggccaagatttaacattgttgacagtcctgtagctattttatcataatttattatcaatattttacattaatggtttcacagttgccaattacttggccttaagggtaaaaagtacaatatacactaaacctcaaccgttaaagcagatgcaaaaattcacctcacctaaattgaacttcttgcatatttccattactgacttggattgtctttctttcatatcactaatggagttggaataaagagctgtttgcctatccctgttaatgatggttgtgtttaagaatcttcctcgtcacgtttgtgttcagatctcttatgttataattagatcagagactggtagcatcgtttctctctctgaaagcaccagtgcccagagtctgctcggtaataaaattatggatccagattgttctgagagacgaagatacttgctgctgatagaggtgaaaacgagattgatccgtctggggttttacggtgtgcactgggtgctgcacagacttgtcaaggtttgctacgtcctctgggcatctgcaaaaggccctgctctctggagtgttgtatatagtgtagcaaaagagtatttatacatcccaccaatcaaaacacagctttattacctcatgcgaactcatacaaaccaatagaatttcaacatgttctgtagcttagagtgctcacttactacctctgaacaatactcacgctgtagtttgtctctttcttatctttttgcatcttgtaattaactctttgtttcccttcataaaatgtaatgtacattgtaatcttttaaaagaaaaatcagggttgcacttgcaacttttaaaaaaccgagtgtggaaacattgggtcttaattcaacacaggatcggtaaaactgttgtaaatactgagaaacattttgaatgttcttcatcttattactaatccatgcaaaaaaaaaaaaaaaagcagcgactaattgtgatgcattcagatttcagtattcagtactgtatatttcaccctgtgtaatggggccccctctcctttctctctttttgtattgtatgcgattctgaaactgattgagtcatgaaaataatttgtggcggtgattctaatgtattaaaaacgtttcgtgttcctttctaactggattacaccctggattgaaaaagtcttcctcgtggtagttatatgtagtttcaaacatgaataaactttttgctttcatgattaaa

SEQ ID NO: 23471 - DNA, 2502 bp, Homo sapiens
  source 1..2502: mol_type = unassigned DNA
gcccgcgcgcggcgggatggacgatcaatccaggatgctgcagactctggccggggtgaacctggctggccactcggtgcaggggggcatggccctgccgcctcccccgcacggccacgaaggggcggacggcgacggcaggaagcaggacatcggcgacatcctccaccagatcatgaccatcaccgaccagagcttggacgaggcgcaagcaaagaaacatgccctgaactgtcacagaatgaaaccagcgctcttcagcgtcctgtgtgagatcaaagagaaaacaggtctcagcatcagaggagcccaggaggaggaccctcccgatccccagctaatgagactggacaatatgcttttggcagaaggggtttcaggtcctgagaaaggtgggggatcggcggcagcagctgcagccgcggcagcctctggaggttcttcagataactctattgaacactcagattacagagccaaattgacccagatcagacaaatctatcacacagaactggagaaatatgaacaggcatgtaatgaatttactacacatgtgatgaaccttctccgagaacagagtagaacacgtcccatttctccaaaagagattgaaagaatggtgggcatcatccatcgaaaatttagttccattcagatgcagctcaaacaaagcacttgtgaagcagttatgattttaagatcaaggttccttgatgccagacggaaaaggcgtaacttcagtaaacaggccacagaaatcttgaatgaatatttttactcacacctcagcaacccctaccccagtgaagaagccaaagaggagctggccaagaaatgcagcatcacagtgtcacaggtatccaattggtttggcaacaaacgaatcaggtacaagaagaacattggcaagtttcaggaagaagccaacctctatgctgcaaagacggccgtgacagctgcacacgcagtagcagcagctgtgcagaacaaccagaccaattcgcccaccacaccaaattccggttcttctggttcttttaacctcccaaattctggggacatgttcatgaacatgcagagtctgaatggggattcttaccaagggtcccaagtcggagccaatgtgcaatcacaggtggataccctccgtcatgttatcaatcagacgggaggctacagtgatggccttggaggaaattcactgtacagtccacataatttaaatgctaatggaggctggcaggacgcaacaactccatcttctgtgacttctcctacagaaggcccaggaagtgtgcactcggatacctctaactaatctctggccacacttttccctgagctacatgccttgataagtgcattcagagcaataggaggaaaaggaaagcgtttttgtagcccaccatctacagctttactgtaaaaccttgtcttattcgagaacttggtaaatctgttttttaaggaatcataatcatttgtatttatacttaaaaacacacaatgttaaaaaaaataaagcactttatccaattaggccaagatttaacattgttgacagtcctgtagctattttatcataatttattatcaatattttacattaatggtttcacagttgccaattacttggccttaagggtaaaaagtacaatatacactaaacctcaaccgttaaagcagatgcaaaaattcacctcacctaaattgaacttcttgcatatttccattactgacttggattgtctttctttcatatcactaatggagttggaataaagagctgtttgcctatccctgttaatgatggttgtgtttaagaatcttcctcgtcacgtttgtgttcagatctcttatgttataattagatcagagactggtagcatcgtttctctctctgaaagcaccagtgcccagagtctgctcggtaataaaattatggatccagattgttctgagagacgaagatacttgctgctgatagaggtgaaaacgagattgatccgtctggggttttacggtgtgcactgggtgctgcacagacttgtcaaggtttgctacgtcctctgggcatctgcaaaaggccctgctctctggagtgttgtatatagtgtagcaaaagagtatttatacatcccaccaatcaaaacacagctttattacctcatgcgaactcatacaaaccaatagaatttcaacatgttctgtagcttagagtgctcacttactacctctgaacaatactcacgctgtagtttgtctctttcttatctttttgcatcttgtaattaactctttgtttcccttcataaaatgtaatgtacattgtaatcttttaaaagaaaaatcagggttgcacttgcaacttttaaaaaaccgagtgtggaaacattgggtcttaattcaacacaggatcggtaaaactgttgtaaatactgagaaacattttgaatgttcttcatcttattactaatccatgcaaaaaaaaaaaaaaaa

SEQ ID NO: 23472 - DNA, 1035 bp, Homo sapiens
  source 1..1035: mol_type = unassigned DNA
agtagtcatttcggccatggtgcagcgaggtcataagctgagctcagtgaagggagccagaacatgaaatgatgctgagagaacgtctgggagatgagaggtctcagcatcagaggagcccaggaggaggaccctcccgatccccagctaatgagactggacaatatgcttttggcagaaggggtttcaggtcctgagaaaggtgggggatcggcggcagcagctgcagccgcggcagcctctggaggttcttcagataactctattgaacactcagattacagagccaaattgacccagatcagacaaatctatcacacagaactggagaaatatgaacaggcatgtaatgaatttactacacatgtgatgaaccttctccgagaacagagtagaacacgtcccatttctccaaaagagattgaaagaatggtgggcatcatccatcgaaaatttagttccattcagatgcagctcaaacaaagcacttgtgaagcagttatgattttaagatcaaggttccttgatgccagacggaaaaggcgtaacttcagtaaacaggccacagaaatcttgaatgaatatttttactcacacctcagcaacccctaccccagtgaagaagccaaagaggagctggccaagaaatgcagcatcacagtgtcacaggtatccaattggtttggcaacaaacgaatcaggtacaagaagaacattggcaagtttcaggaagaagccaacctctatgctgcaaagacggccgtgacagctgcacacgcagtagcagcagctgtgcagaacaaccagaccaattcgcccaccacaccaaattccggtggataccctccgtcatgttatcaatcagacgggaggctacagtgatggccttggaggaaattcactgtacagtccacataatttaaatgctaatggaggctggcaggacgcaacaactccatcttctgtgacttctcctacagaaggcccaggaagtgtgcactcggatacctctaactaatctctggccacactttt

SEQ ID NO: 23473 - DNA, 1723 bp, Homo sapiens
  source 1..1723: mol_type = unassigned DNA
ctctgcacaggagcggacgcgggagcccctccgcacccgtcccctcccccgggtcgccttcgcctgcccccggggcgaggctccccgcgcgggttcgcgtcgcgtctgcagtggccgaggctgctgcctgccgggcagatgggtccgccttgttccggctgcagctttcgccgccggggcttgctggctgtcgggaactagtcaactggagtttttgttgacttcccacggaaacatgccctgaactgtcacagaatgaaaccagcgctcttcagcgtcctgtgtgagatcaaagagaaaacaggtctcagcatcagaggagcccaggaggaggaccctcccgatccccagctaatgagactggacaatatgcttttggcagaaggggtttcaggtcctgagaaaggtgggggatcggcggcagcagctgcagccgcggcagcctctggaggttcttcagataactctattgaacactcagattacagagccaaattgacccagatcagacaaatctatcacacagaactggagaaatatgaacaggcatgtaatgaatttactacacatgtgatgaaccttctccgagaacagagtagaacacgtcccatttctccaaaagagattgaaagaatggtgggcatcatccatcgaaaatttagttccattcagatgcagctcaaacaaagcacttgtgaagcagttatgattttaagatcaaggttccttgatgccagacggaaaaggcgtaacttcagtaaacaggccacagaaatcttgaatgaatatttttactcacacctcagcaacccctaccccagtgaagaagccaaagaggagctggccaagaaatgcagcatcacagtgtcacaggtatccaattggtttggcaacaaacgaatcaggtacaagaagaacattggcaagtttcaggaagaagccaacctctatgctgcaaagacggccgtgacagctgcacacgcagtagcagcagctgtgcagaacaaccagaccaattcgcccaccacaccaaattccggttcttctggttcttttaacctcccaaattctggggacatgttcatgaacatgcagagtctgaatggggattcttaccaagggtcccaagtcggagccaatgtgcaatcacaggtggataccctccgtcatgttatcaatcagacgggaggctacagtgatggccttggaggaaattcactgtacagtccacataatttaaatgctaatggaggctggcaggacgcaacaactccatcttctgtgacttctcctacagaaggcccaggaagtgtgcactcggatacctctaactaatctctggccacacttttccctgagctacatgccttgataagtgcattcagagcaataggaggaaaaggaaagcgtttttgtagcccaccatctacagctttactgtaaaaccttgtcttattcgagaacttggtaaatctgttttttaaggaatcataatcatttgtatttatacttaaaaacacacaatgttaaaaaaaataaagcactttatccaattaggccaagatttaacattgttgacagtcctgtagctattttatcataatttattatcaatattttacattaatggtttcacagttgccaattacttggccttaagggtaaaaagtacaatatacactaaacctcaaccgttaaagcagatgcaaaaattcacctcacc

SEQ ID NO: 23474 - DNA, 2202 bp, Homo sapiens
  source 1..2202: mol_type = unassigned DNA
aatgtagggaaagcagggcggagtcctctgcaggctcgggggaggggaggggcgtgaatgcgtggatttctgtggagagtggaaacacggggagtcgaggggagcatgcgcgggcctcagaaagttttgggaaaccgactcctgggagcagggaggaacgcgcgctccagagacaacttcgcggtgtggtgaactctctgaggaaaaaccattttgattattactctcagacgtgcgtggcaacaagtgactgagacctagaaatccaagcgttggaggtcctgaggccagcctaagtcgcttcaaaatggaacgaaggcgtttgtggggttccattcagagccgatacatcagcatgagtgtgtggacaagcccacggagacttgtggagctggcagggcagagcctgctgaaggatgaggccctggccattgccgccctggagttgctgcccagggagctcttcccgccactcttcatggcagcctttgacgggagacacagccagaccctgaaggcaatggtgcaggcctggcccttcacctgcctccctctgggagtgctgatgaagggacaacatcttcacctggagaccttcaaagctgtgcttgatggacttgatgtgctccttgcccaggaggttcgccccaggaggtggaaacttcaagtgctggatttacggaagaactctcatcaggacttctggactgtatggtctggaaacagggccagtctgtactcatttccagagccagaagcagctcagcccatgacaaagaagcgaaaagtagatggtttgagcacagaggcagagcagcccttcattccagtagaggtgctcgtagacctgttcctcaaggaaggtgcctgtgatgaattgttctcctacctcattgagaaagtgaagcgaaagaaaaatgtactacgcctgtgctgtaagaagctgaagatttttgcaatgcccatgcaggatatcaagatgatcctgaaaatggtgcagctggactctattgaagatttggaagtgacttgtacctggaagctacccaccttggcgaaattttctccttacctgggccagatgattaatctgcgtagactcctcctctcccacatccatgcatcttcctacatttccccggagaaggaagagcagtatatcgcccagttcacctctcagttcctcagtctgcagtgcctgcaggctctctatgtggactctttatttttccttagaggccgcctggatcagttgctcaggcacgtgatgaaccccttggaaaccctctcaataactaactgccggctttcggaaggggatgtgatgcatctgtcccagagtcccagcgtcagtcagctaagtgtcctgagtctaagtggggtcatgctgaccgatgtaagtcccgagcccctccaagctctgctggagagagcctctgccaccctccaggacctggtctttgatgagtgtgggatcacggatgatcagctccttgccctcctgccttccctgagccactgctcccagcttacaaccttaagcttctacgggaattccatctccatatctgccttgcagagtctcctgcagcacctcatcgggctgagcaatctgacccacgtgctgtatcctgtccccctggagagttatgaggacatccatggtaccctccacctggagaggcttgcctatctgcatgccaggctcagggagttgctgtgtgagttggggcggcccagcatggtctggcttagtgccaacccctgtcctcactgtggggacagaaccttctatgacccggagcccatcctgtgcccctgtttcatgcctaactagctgggtgcacatatcaaatgcttcattctgcatacttggacactaaagccaggatgtgcatgcatcttgaagcaacaaagcagccacagtttcagacaaatgttcagtgtgagtgaggaaaacatgttcagtgaggaaaaaacattcagacaaatgttcagtgaggaaaaaaaggggaagttggggataggcagatgttgacttgaggagttaatgtgatctttggggagatacatcttatagagttagaaatagaatctgaatttctaaagggagattctggcttgggaagtacatgtaggagttaatccctgtgtagactgttgtaaagaaactgttgaaaataaagagaagcaatgtgaagc

SEQ ID NO: 23475 - DNA, 2196 bp, Homo sapiens
  source 1..2196: mol_type = unassigned DNA
gttttgcatacagtccctgttgactctagtgccccctgctggccccagacgcgagttccggcgaggcttcagggtacagctcccccgcagccagaagccgggcctgcagcgcctcagcaccgctccgggacaccccacccgcttcccaggcgtgacctgtcaacagcaacttcgcggtgtggtgaactctctgaggaaaaaccattttgattattactctcagacgtgcgtggcaacaagtgactgagacctagaaatccaagcgttggaggtcctgaggccagcctaagtcgcttcaaaatggaacgaaggcgtttgtggggttccattcagagccgatacatcagcatgagtgtgtggacaagcccacggagacttgtggagctggcagggcagagcctgctgaaggatgaggccctggccattgccgccctggagttgctgcccagggagctcttcccgccactcttcatggcagcctttgacgggagacacagccagaccctgaaggcaatggtgcaggcctggcccttcacctgcctccctctgggagtgctgatgaagggacaacatcttcacctggagaccttcaaagctgtgcttgatggacttgatgtgctccttgcccaggaggttcgccccaggaggtggaaacttcaagtgctggatttacggaagaactctcatcaggacttctggactgtatggtctggaaacagggccagtctgtactcatttccagagccagaagcagctcagcccatgacaaagaagcgaaaagtagatggtttgagcacagaggcagagcagcccttcattccagtagaggtgctcgtagacctgttcctcaaggaaggtgcctgtgatgaattgttctcctacctcattgagaaagtgaagcgaaagaaaaatgtactacgcctgtgctgtaagaagctgaagatttttgcaatgcccatgcaggatatcaagatgatcctgaaaatggtgcagctggactctattgaagatttggaagtgacttgtacctggaagctacccaccttggcgaaattttctccttacctgggccagatgattaatctgcgtagactcctcctctcccacatccatgcatcttcctacatttccccggagaaggaagagcagtatatcgcccagttcacctctcagttcctcagtctgcagtgcctgcaggctctctatgtggactctttatttttccttagaggccgcctggatcagttgctcaggcacgtgatgaaccccttggaaaccctctcaataactaactgccggctttcggaaggggatgtgatgcatctgtcccagagtcccagcgtcagtcagctaagtgtcctgagtctaagtggggtcatgctgaccgatgtaagtcccgagcccctccaagctctgctggagagagcctctgccaccctccaggacctggtctttgatgagtgtgggatcacggatgatcagctccttgccctcctgccttccctgagccactgctcccagcttacaaccttaagcttctacgggaattccatctccatatctgccttgcagagtctcctgcagcacctcatcgggctgagcaatctgacccacgtgctgtatcctgtccccctggagagttatgaggacatccatggtaccctccacctggagaggcttgcctatctgcatgccaggctcagggagttgctgtgtgagttggggcggcccagcatggtctggcttagtgccaacccctgtcctcactgtggggacagaaccttctatgacccggagcccatcctgtgcccctgtttcatgcctaactagctgggtgcacatatcaaatgcttcattctgcatacttggacactaaagccaggatgtgcatgcatcttgaagcaacaaagcagccacagtttcagacaaatgttcagtgtgagtgaggaaaacatgttcagtgaggaaaaaacattcagacaaatgttcagtgaggaaaaaaaggggaagttggggataggcagatgttgacttgaggagttaatgtgatctttggggagatacatcttatagagttagaaatagaatctgaatttctaaagggagattctggcttgggaagtacatgtaggagttaatccctgtgtagactgttgtaaagaaactgttgaaaataaagagaagcaatgtgaagca

SEQ ID NO: 23476 - DNA, 2057 bp, Homo sapiens
  source 1..2057: mol_type = unassigned DNA
gagttccggcgaggcttcagggtacagctcccccgcagccagaagccgggcctgcagcgcctcagcaccgctccgggacaccccacccgcttcccaggcgtgacctgtcaacagcaacttcgcggtgtggtgaactctctgaggaaaaacacgtgcgtggcaacaagtgactgagacctagaaatccaagcgttggaggtcctgaggccagcctaagtcgcttcaaaatggaacgaaggcgtttgtggggttccattcagagccgatacatcagcatgagtgtgtggacaagcccacggagacttgtggagctggcagggcagagcctgctgaaggatgaggccctggccattgccgccctggagttgctgcccagggagctcttcccgccactcttcatggcagcctttgacgggagacacagccagaccctgaaggcaatggtgcaggcctggcccttcacctgcctccctctgggagtgctgatgaagggacaacatcttcacctggagaccttcaaagctgtgcttgatggacttgatgtgctccttgcccaggaggttcgccccaggaggtggaaacttcaagtgctggatttacggaagaactctcatcaggacttctggactgtatggtctggaaacagggccagtctgtactcatttccagagccagaagcagctcagcccatgacaaagaagcgaaaagtagatggtttgagcacagaggcagagcagcccttcattccagtagaggtgctcgtagacctgttcctcaaggaaggtgcctgtgatgaattgttctcctacctcattgagaaagtgaagcgaaagaaaaatgtactacgcctgtgctgtaagaagctgaagatttttgcaatgcccatgcaggatatcaagatgatcctgaaaatggtgcagctggactctattgaagatttggaagtgacttgtacctggaagctacccaccttggcgaaattttctccttacctgggccagatgattaatctgcgtagactcctcctctcccacatccatgcatcttcctacatttccccggagaaggaagagcagtatatcgcccagttcacctctcagttcctcagtctgcagtgcctgcaggctctctatgtggactctttatttttccttagaggccgcctggatcagttgctcaggcacgtgatgaaccccttggaaaccctctcaataactaactgccggctttcggaaggggatgtgatgcatctgtcccagagtcccagcgtcagtcagctaagtgtcctgagtctaagtggggtcatgctgaccgatgtaagtcccgagcccctccaagctctgctggagagagcctctgccaccctccaggacctggtctttgatgagtgtgggatcacggatgatcagctccttgccctcctgccttccctgagccactgctcccagcttacaaccttaagcttctacgggaattccatctccatatctgccttgcagagtctcctgcagcacctcatcgggctgagcaatctgacccacgtgctgtatcctgtccccctggagagttatgaggacatccatggtaccctccacctggagaggcttgcctatctgcatgccaggctcagggagttgctgtgtgagttggggcggcccagcatggtctggcttagtgccaacccctgtcctcactgtggggacagaaccttctatgacccggagcccatcctgtgcccctgtttcatgcctaactagctgggtgcacatatcaaatgcttcattctgcatacttggacactaaagccaggatgtgcatgcatcttgaagcaacaaagcagccacagtttcagacaaatgttcagtgtgagtgaggaaaacatgttcagtgaggaaaaaacattcagacaaatgttcagtgaggaaaaaaaggggaagttggggataggcagatgttgacttgaggagttaatgtgatctttggggagatacatcttatagagttagaaatagaatctgaatttctaaagggagattctggcttgggaagtacatgta

SEQ ID NO: 23477 - DNA, 567 bp, Homo sapiens
  source 1..567: mol_type = unassigned DNA
ctcgactctctgggcgacctcactggatctcgtgagattttgccctggaaggactgagaaacggggattggtcagaccaggctgcccagccccccggcccccaccgccgccccccccgccccacgcagcggctagggcgcttagctgagccattgtctcgttctttccttccagcaacttcgcggtgtggtgaactctctgaggaaaaaccattttgattattactctcagacgtgcgtggcaacaagtgactgagacctagaaatccaagcgttggaggtcctgaggccagcctaagtcgcttcaaaatggaacgaaggcgtttgtggggttccattcagagccgatacatcagcatgagtgtgtggacaagcccacggagacttgtggagctggcagggcagagcctgctgaaggatgaggccctggccattgccgccctggagttgctgcccagggagctcttcccgccactcttcatggcagcctttgacgggagacacagccagaccctgaaggcaatggtgcaggcctggcccttcacctgcctccctctgggagtgctga

SEQ ID NO: 23478 - DNA, 2179 bp, Homo sapiens
  source 1..2179: mol_type = unassigned DNA
aatgtagggaaagcagggcggagtcctctgcaggctcgggggaggggaggggcgtgaatgcgtggatttctgtggagagtggaaacacggggagtcgaggggagcatgcgcgggcctcagaaagttttgggaaaccgactcctgggagcagggaggaacgcgcgctccagagacaacttcgcggtgtggtgaactctctgaggaaaaacacgtgcgtggcaacaagtgactgagacctagaaatccaagcgttggaggtcctgaggccagcctaagtcgcttcaaaatggaacgaaggcgtttgtggggttccattcagagccgatacatcagcatgagtgtgtggacaagcccacggagacttgtggagctggcagggcagagcctgctgaaggatgaggccctggccattgccgccctggagttgctgcccagggagctcttcccgccactcttcatggcagcctttgacgggagacacagccagaccctgaaggcaatggtgcaggcctggcccttcacctgcctccctctgggagtgctgatgaagggacaacatcttcacctggagaccttcaaagctgtgcttgatggacttgatgtgctccttgcccaggaggttcgccccaggaggtggaaacttcaagtgctggatttacggaagaactctcatcaggacttctggactgtatggtctggaaacagggccagtctgtactcatttccagagccagaagcagctcagcccatgacaaagaagcgaaaagtagatggtttgagcacagaggcagagcagcccttcattccagtagaggtgctcgtagacctgttcctcaaggaaggtgcctgtgatgaattgttctcctacctcattgagaaagtgaagcgaaagaaaaatgtactacgcctgtgctgtaagaagctgaagatttttgcaatgcccatgcaggatatcaagatgatcctgaaaatggtgcagctggactctattgaagatttggaagtgacttgtacctggaagctacccaccttggcgaaattttctccttacctgggccagatgattaatctgcgtagactcctcctctcccacatccatgcatcttcctacatttccccggagaaggaagagcagtatatcgcccagttcacctctcagttcctcagtctgcagtgcctgcaggctctctatgtggactctttatttttccttagaggccgcctggatcagttgctcaggcacgtgatgaaccccttggaaaccctctcaataactaactgccggctttcggaaggggatgtgatgcatctgtcccagagtcccagcgtcagtcagctaagtgtcctgagtctaagtggggtcatgctgaccgatgtaagtcccgagcccctccaagctctgctggagagagcctctgccaccctccaggacctggtctttgatgagtgtgggatcacggatgatcagctccttgccctcctgccttccctgagccactgctcccagcttacaaccttaagcttctacgggaattccatctccatatctgccttgcagagtctcctgcagcacctcatcgggctgagcaatctgacccacgtgctgtatcctgtccccctggagagttatgaggacatccatggtaccctccacctggagaggcttgcctatctgcatgccaggctcagggagttgctgtgtgagttggggcggcccagcatggtctggcttagtgccaacccctgtcctcactgtggggacagaaccttctatgacccggagcccatcctgtgcccctgtttcatgcctaactagctgggtgcacatatcaaatgcttcattctgcatacttggacactaaagccaggatgtgcatgcatcttgaagcaacaaagcagccacagtttcagacaaatgttcagtgtgagtgaggaaaacatgttcagtgaggaaaaaacattcagacaaatgttcagtgaggaaaaaaaggggaagttggggataggcagatgttgacttgaggagttaatgtgatctttggggagatacatcttatagagttagaaatagaatctgaatttctaaagggagattctggcttgggaagtacatgtaggagttaatccctgtgtagactgttgtaaagaaactgttgaaaataaagagaagcaatgtgaa

SEQ ID NO: 23479 - DNA, 740 bp, Homo sapiens
  source 1..740: mol_type = unassigned DNA
gtacagctcccccgcagccagaagccgggcctgcagcgcctcagcaccgctccgggacaccccacccgcttcccaggcgtgacctgtcaacagcaacttcgcggtgtggtgaactctctgaggaaaaaccccaggaaacactggtgctcaggtttggagccagagatttgcactgaaagggcgggattgagtcgccagttgtcagtttcctcagcagtatttgcggaggttttcacaggaggccgttgcttcgtaaatattatacatgtattcttctttttggagcattttgattattactctcagacgtgcgtggcaacaagtgactgagacctagaaatccaagcgttggaggtcctgaggccagcctaagtcgcttcaaaatggaacgaaggcgtttgtggggttccattcagagccgatacatcagcatgagtgtgtggacaagcccacggagacttgtggagctggcagggcagagcctgctgaaggatgaggccctggccattgccgccctggagttgctgcccagggagctcttcccgccactcttcatggcagcctttgacgggagacacagccagaccctgaaggcaatggtgcaggcctggcccttcacctgcctccctctgggagtgctgatgaagggacaacatcttcacctggagaccttcaaagctgtgcttgatggacttgatgtgctccttgcccaggaggttcgccccaggtaagggtgacct

SEQ ID NO: 23480 - DNA, 705 bp, Homo sapiens
  source 1..705: mol_type = unassigned DNA
cgtggatttctgtggagagtggaaacacggggagtcgaggggagcatgcgcgggcctcagaaagttttgggaaaccgactcctgggagcagggaggaacgcgcgctccagagacaacttcgcggtgtggtgaactctctgaggaaaaaccattttgattattactctcagacgtgcgtggcaacaagtgactgagacctagaaatccaagcgttggaggtcctgaggccagcctaagtcgcttcaaaatggaacgaaggcgtttgtggggttccattcagagccgatacatcagcatgagtgtgtggacaagcccacggagacttgtggagctggcagggcagagcctgctgaaggatgaggccctggccattgccgccctggagttgctgcccagggagctcttcccgccactcttcatggcagcctttgacgggagacacagccagaccctgaaggcaatggtgcaggcctggcccttcacctgcctccctctgggagtgctgatgaagggacaacatcttcacctggagaccttcaaagctgtgcttgatggacttgatgtgctccttgcccaggaggttcgccccaggaggtggaaacttcaagtgctggatttacggaagaactctcatcaggacttctggactgtatggtctggaaacagggccagtctgtactcatttccagagccagaagcagctca

SEQ ID NO: 23481 - DNA, 1766 bp, Homo sapiens
  source 1..1766: mol_type = unassigned DNA
agacgcaaaagcccacacttccagtggtgtcagagagtatgagctccaggaggctttgatctcactgccccatgggcttgggccattagggggttccattcagagccgatacatcagcatgagtgtgtggacaagcccacggagacttgtggagctggcagggcagagcctgctgaaggatgaggccctggccattgccgccctggagttgctgcccagggagctcttcccgccactcttcatggcagcctttgacgggagacacagccagaccctgaaggcaatggtgcaggcctggcccttcacctgcctccctctgggagtgctgatgaagggacaacatcttcacctggagaccttcaaagctgtgcttgatggacttgatgtgctccttgcccaggaggttcgccccaggaggtggaaacttcaagtgctggatttacggaagaactctcatcaggacttctggactgtatggtctggaaacagggccagtctgtactcatttccagagccagaagcagctcagcccatgacaaagaagcgaaaagtagatggtttgagcacagaggcagagcagcccttcattccagtagaggtgctcgtagacctgttcctcaaggaaggtgcctgtgatgaattgttctcctacctcattgagaaagtgaagcgaaagaaaaatgtactacgcctgtgctgtaagaagctgaagatttttgcaatgcccatgcaggatatcaagatgatcctgaaaatggtgcagctggactctattgaagatttggaagtgacttgtacctggaagctacccaccttggcgaaattttctccttacctgggccagatgattaatctgcgtagactcctcctctcccacatccatgcatcttcctacatttccccggagaaggaagagcagtatatcgcccagttcacctctcagttcctcagtctgcagtgcctgcaggctctctatgtggactctttatttttccttagaggccgcctggatcagttgctcaggcacgtgatgaaccccttggaaaccctctcaataactaactgccggctttcggaaggggatgtgatgcatctgtcccagagtcccagcgtcagtcagctaagtgtcctgagtctaagtggggtcatgctgaccgatgtaagtcccgagcccctccaagctctgctggagagagcctctgccaccctccaggacctggtctttgatgagtgtgggatcacggatgatcagctccttgccctcctgccttccctgagccactgctcccagcttacaaccttaagcttctacgggaattccatctccatatctgccttgcagagtctcctgcagcacctcatcgggctgagcaatctgacccacgtgctgtatcctgtccccctggagagttatgaggacatccatggtaccctccacctggagaggcttgcctatctgcatgccaggctcagggagttgctgtgtgagttggggcggcccagcatggtctggcttagtgccaacccctgtcctcactgtggggacagaaccttctatgacccggagcccatcctgtgcccctgtttcatgcctaactagctgggtgcacatatcaaatgcttcattctgcatacttggacactaaagccaggatgtgcatgcatcttgaagcaacaaagcagccacagtttcagacaaatgttcagtgtgagtgaggaaaacatgttcagtgaggaaaaaacattcagacaaatgttcagtgagg

SEQ ID NO: 23482 - DNA, 891 bp, Homo sapiens
  source 1..891: mol_type = unassigned DNA
cgaggcttcagggtacagctcccccgcagccagaagccgggcctgcagcgcctcagcaccgctccgggacaccccacccgcttcccaggcgtgacctgtcaacagcaacttcgcggtgtggtgaactctctgaggaaaaacgaggccgttgcttcgtaaatattatacatgtattcttctttttggagcattttgattattactctcagacgtgcgtggcaacaagtgactgagacctagaaatccaagcgttggaggtcctgaggccagcctaagtcgcttcaaaatggaacgaaggcgtttgtggggttccattcagagccgatacatcagcatgagtgtgtggacaagcccacggagacttgtggagctggcagggcagagcctgctgaaggatgaggccctggccattgccgccctggagttgctgcccagggagctcttcccgccactcttcatggcagcctttgacgggagacacagccagaccctgaaggcaatggtgcaggcctggcccttcacctgcctccctctgggagtgctgatgaagggacaacatcttcacctggagaccttcaaagctgtgcttgatggacttgatgtgctccttgcccaggaggttcgccccaggaggtggaaacttcaagtgctggatttacggaagaactctcatcaggacttctggactgtatggtctggaaacagggccagtctgtactcatttccagagccagaagcagctcagcccatgacaaagaagcgaaaagtagatggtttgagcacagaggcagagcagcccttcattccagtagaggtgctcgtagacctgttcctcaaggaaggtgcctgtgatgaattgttctcctacctcattgagaaagtgaagcgaaa

SEQ ID NO: 23483 - DNA, 2223 bp, Homo sapiens
  source 1..2223: mol_type = unassigned DNA
aaaagcaccagtgggtgatcaggcccaggataggaatcatccctaagcagatccttaaatgccaaatataacttcaattttttgtgacggaaaatgtatttgtgcactgtgcctagcatggaaatagagaaaaactgagtctaattgataggcctgattgcatctcgctgaccagaatctctgtacctgagcagcttaggggcaagaaagaacagctgttttcttgaagtgtggaaacattagtaatacttaggaaggggctggccattggagattatgtttgtggtaaaggcctgacctgctgcttgtgaacagccccagtgtggaagaggacacctaaccataaagagaagggttccattcagagccgatacatcagcatgagtgtgtggacaagcccacggagacttgtggagctggcagggcagagcctgctgaaggatgaggccctggccattgccgccctggagttgctgcccagggagctcttcccgccactcttcatggcagcctttgacgggagacacagccagaccctgaaggcaatggtgcaggcctggcccttcacctgcctccctctgggagtgctgatgaagggacaacatcttcacctggagaccttcaaagctgtgcttgatggacttgatgtgctccttgcccaggaggttcgccccaggaggtggaaacttcaagtgctggatttacggaagaactctcatcaggacttctggactgtatggtctggaaacagggccagtctgtactcatttccagagccagaagcagctcagcccatgacaaagaagcgaaaagtagatggtttgagcacagaggcagagcagcccttcattccagtagaggtgctcgtagacctgttcctcaaggaaggtgcctgtgatgaattgttctcctacctcattgagaaagtgaagcgaaagaaaaatgtactacgcctgtgctgtaagaagctgaagatttttgcaatgcccatgcaggatatcaagatgatcctgaaaatggtgcagctggactctattgaagatttggaagtgacttgtacctggaagctacccaccttggcgaaattttctccttacctgggccagatgattaatctgcgtagactcctcctctcccacatccatgcatcttcctacatttccccggagaaggaagagcagtatatcgcccagttcacctctcagttcctcagtctgcagtgcctgcaggctctctatgtggactctttatttttccttagaggccgcctggatcagttgctcaggcacgtgatgaaccccttggaaaccctctcaataactaactgccggctttcggaaggggatgtgatgcatctgtcccagagtcccagcgtcagtcagctaagtgtcctgagtctaagtggggtcatgctgaccgatgtaagtcccgagcccctccaagctctgctggagagagcctctgccaccctccaggacctggtctttgatgagtgtgggatcacggatgatcagctccttgccctcctgccttccctgagccactgctcccagcttacaaccttaagcttctacgggaattccatctccatatctgccttgcagagtctcctgcagcacctcatcgggctgagcaatctgacccacgtgctgtatcctgtccccctggagagttatgaggacatccatggtaccctccacctggagaggcttgcctatctgcatgccaggctcagggagttgctgtgtgagttggggcggcccagcatggtctggcttagtgccaacccctgtcctcactgtggggacagaaccttctatgacccggagcccatcctgtgcccctgtttcatgcctaactagctgggtgcacatatcaaatgcttcattctgcatacttggacactaaagccaggatgtgcatgcatcttgaagcaacaaagcagccacagtttcagacaaatgttcagtgtgagtgaggaaaacatgttcagtgaggaaaaaacattcagacaaatgttcagtgaggaaaaaaaggggaagttggggataggcagatgttgacttgaggagttaatgtgatctttggggagatacatcttatagagttagaaatagaatctgaatttctaaagggagattctggcttgggaagtacatgtaggagttaatccctgtgtagactgttgtaaagaaactgttgaaaataaagagaagcaatgtg

SEQ ID NO: 23484 - DNA, 2758 bp, Homo sapiens
  source 1..2758: mol_type = unassigned DNA
cgagttccggcgaggcttcagggtacagctcccccgcagccagaagccgggcctgcagcgcctcagcaccgctccgggacaccccacccgcttcccaggcgtgacctgtcaacagcaacttcgcggtgtggtgaactctctgaggaaaaacgtaagttcgagccctgattcctccgcttccccgcagggtgaccttgggcttgtgcccccggcaccacccctgtcccgggtccctgttttctctctggaaatgggttgaagaccaaagaaaataatgtgcgccacttgggtcaccccgggccgcctgccccggaaaattggccccagttgaggagttgtggctgtaaggatgccttgaaccgaggcggcggtgctcgtggttggagctctccagggtgggtgcgcatttgtaatgcggtggatgctctgggactcggcccctctgaaggtgctgggggttggggacggcccaggcagtggcgtaggcgtcctaggaaggcgggagcagaggcagaaatgtcgctgcaagaccgtagtcagggtccttgaccacaggggtcacttgtgaccaaccacatggtctgttgttcctcctgccccctggttcagcccaggaaacactggtgctcaggtttggagccagagatttgcactgaaagggcgggattgagtcgccagttgtcagtttcctcagcagtatttgcggaggttttcacaggaggccgttgcttcgtaaatattatacatgtattcttctttttggagcattttgattattactctcagacgtgcgtggcaacaagtgactgagacctagaaatccaagcgttggaggtcctgaggccagcctaagtcgcttcaaaatggaacgaaggcgtttgtggggttccattcagagccgatacatcagcatgagtgtgtggacaagcccacggagacttgtggagctggcagggcagagcctgctgaaggatgaggccctggccattgccgccctggagttgctgcccagggagctcttcccgccactcttcatggcagcctttgacgggagacacagccagaccctgaaggcaatggtgcaggcctggcccttcacctgcctccctctgggagtgctgatgaagggacaacatcttcacctggagaccttcaaagctgtgcttgatggacttgatgtgctccttgcccaggaggttcgccccaggaggtggaaacttcaagtgctggatttacggaagaactctcatcaggacttctggactgtatggtctggaaacagggccagtctgtactcatttccagagccagaagcagctcagcccatgacaaagaagcgaaaagtagatggtttgagcacagaggcagagcagcccttcattccagtagaggtgctcgtagacctgttcctcaaggaaggtgcctgtgatgaattgttctcctacctcattgagaaagtgaagcgaaagaaaaatgtactacgcctgtgctgtaagaagctgaagatttttgcaatgcccatgcaggatatcaagatgatcctgaaaatggtgcagctggactctattgaagatttggaagtgacttgtacctggaagctacccaccttggcgaaattttctccttacctgggccagatgattaatctgcgtagactcctcctctcccacatccatgcatcttcctacatttccccggagaaggaagagcagtatatcgcccagttcacctctcagttcctcagtctgcagtgcctgcaggctctctatgtggactctttatttttccttagaggccgcctggatcagttgctcaggcacgtgatgaaccccttggaaaccctctcaataactaactgccggctttcggaaggggatgtgatgcatctgtcccagagtcccagcgtcagtcagctaagtgtcctgagtctaagtggggtcatgctgaccgatgtaagtcccgagcccctccaagctctgctggagagagcctctgccaccctccaggacctggtctttgatgagtgtgggatcacggatgatcagctccttgccctcctgccttccctgagccactgctcccagcttacaaccttaagcttctacgggaattccatctccatatctgccttgcagagtctcctgcagcacctcatcgggctgagcaatctgacccacgtgctgtatcctgtccccctggagagttatgaggacatccatggtaccctccacctggagaggcttgcctatctgcatgccaggctcagggagttgctgtgtgagttggggcggcccagcatggtctggcttagtgccaacccctgtcctcactgtggggacagaaccttctatgacccggagcccatcctgtgcccctgtttcatgcctaactagctgggtgcacatatcaaatgcttcattctgcatacttggacactaaagccaggatgtgcatgcatcttgaagcaacaaagcagccacagtttcagacaaatgttcagtgtgagtgaggaaaacatgttcagtgaggaaaaaacattcagacaaatgttcagtgaggaaaaaaaggggaagttggggataggcagatgttgacttgaggagttaatgtgatctttggggagatacatcttatagagttagaaatagaatctgaatttctaaagggagattctggcttgggaagtacatgtaggagttaatccctgtgtagactgttgtaaagaaactgttgaaaataaagagaagcaatgtgaagc

SEQ ID NO: 23485 - DNA, 1352 bp, Homo sapiens
  source 1..1352: mol_type = unassigned DNA
cctatttcagtccaactcccactgcgcaggcgcttacagtgcaccaagatggccgcccccgtggatctagagctgaagaaggccttcacagagcttcaagccaaagttattgacactcaacagaaggtgaagctcgcagacatacagattgaacagctaaacagaacgaaaaagcatgcacatcttacagatacagagatcatgactttggtagatgagactaacatgtatgaaggtgtaggaagaatgtttattcttcagtccaaggaagcaattcacagtcagctgttagagaagcagaaaatagcagaagaaaaaattaaagaactagaacagaaaaagtcctacctggagcgaagcgttaaggaagctgaggacaacatccgggagatgctgatggcacgaagggcccagtagggagcctctctgggaagctcttcctcctgcccctcccattcctggtgggggcagaggagtgtctgcagggaaacagcttctcctctgccccgatggatgctttatttggatggcctggcaacatcacattttctgcatcaccctgagccccatttgcttcccagccctggagtttttacccggctttgcctgccacctctgcccaggacactcttccctctcgggatgtgtgatgaactcccaggagagggaagatgggagccagggcaagataggaagctctgcctgagctttccactaggcacgccagccagaccaataaaaagcgtctgtcccactctgctaagcctggttttcttgagcagagggatggaacagagggtgagagaggcagtggccgtctccacctcagctcctgctccctctgcatcagagcccttcctttcttgggggatgggccttgccctcttctcttttcccttcctgtacctttgactaacgctcagcttccgggcctgcatgcagtagacagaagaggaagaaagaacagatgttcacagctgaatctcagtgaacagaatagcagtccctggatggcagtctgcctaaagattcctttccctgccttctcccatacattccaaaaggaagttcaacagtaagcagcacctccaagactgtctccttttggccaatatcataagatggacgccataatcctgaggcctcctagaggctgagggggcaacggtgtgatccagctggctcatcccagcccaggtgggccaattattcaattttcaagaattttgttgcaagccagttgtcaaacacagccattataattatgtaaatttgcaaattatgttaaaaacaaggacaataaatattcaaaatgcatccctaattactacatttgaccacgatctgtgctc

SEQ ID NO: 23486 - DNA, 677 bp, Homo sapiens
  source 1..677: mol_type = unassigned DNA
agcgagtgggcggtaactcgcaggccggacgtgacgcaaggcgggggctgagctgcgccggccggaaacccagcaggcggcgaagatggcggagaacagcggtcgcgccggcaagagcagcgggagcggcgcggggaagggggcggtgtccgcagagcaggtgattgctggcttcaaccgccttcggcaggaacagcgaggcctggcatccaaagcagctgagttggagatggagttgaatgagcacagcctagtgatcgatacactgaaggaggtagatgaaactcgtaagtgctaccgcatggttggaggagtgctggtggagcgaactgtcaaagaggtgctgcccgctttggagaacaacaaggagcagatacagaagatcattgagacactgacacagcagcttcaggcaaagggaaaagaactaaatgaattccgggaaaagcacaacattcgtctcatgggagaagatgagaagccagcagccaaggaaaactcagaaggggctggggctaaggccagctcagctggagtgttggtctcctagggaccaaggcctttgcatttttttctaccctgactcccacttctaatttctctttattgttattattattattttctctgctattgtaatatttttttgttaattaaatgttttggtcagaatctta

SEQ ID NO: 23487 - DNA, 1462 bp, Homo sapiens
  source 1..1462: mol_type = unassigned DNA
acacccccgtgtttatgtcggtccacgggggttgcctgtccctttaattggcatgtaccaagtccttccaggtcacatttcctccctacgtcccagccgtttggactcactggccaaaagtccaagaggacggaatgtggagacagtgttgtatttttgcggggagttctaggccgaccgggagcgagagaacgctcgggggcgaagcgcgccattgcggccctccccgccgcctgcggtagtccagtcccaagatggcggccaccatgaagaaggcggctgcagaagatgtcaatgttactttcgaagatcaacaaaagataaacaaatttgcacggaatacaagtagaatcacagagctgaaggaagaaatagaagtaaaaaagaaacaactccaaaacctagaagatgcttgtgatgacatcatgcttgcagatgatgattgcttaatgataccttatcaaattggtgatgtcttcattagccattctcaagaagaaacgcaagaaatgttagaagaagcaaagaaaaatttgcaagaagaaattgacgccttagaatccagagtggaatcaattcagcgagtgttagcagatttgaaagttcagttgtatgcaaaattcgggagcaacataaaccttgaagctgatgaaagttaaacattttataatactttttttatttgtttaataaacttgaatattgtttaaaatgataattttccttcttcaaatgacatggaaagcaaaactttcttttttaaaaattttcatttatttaatggaaacttgcccattttcacatgtctgcttatttattttatatttttaaaagaagacagtattcacctatgtattttgcataacgattatatcaagtctaggggcttcatgtcatgttattaaaatcagttaagcaatcttttatgtttctatattatttagaatatttgttgttgcaattttcacataagaaaatttaacagttgtgtcatgttgtttctgtctgattttaattgctgtctaatgacggggaaagcacgatgaaaagatgtacaatcctgcatccttgcttatttcacaactaaagctttgtcatagacttcaaaatatatatgtatatattttatttaaatatatgttacatattatatttaaacatacatatttaacattttttacatatctatcaatatcagagatttgggtaaaagaatgggtaatgtttaaacatgtggaggcatgtggagctttatacaaacagggcagaaccacagaagaacgttttagaaaccaagagatgtgcagaaagaaatgtttagtgttttttcgttttaaattttagattttattttagtgctttgtaattaattggggtttatattgataaagatgtggaagttaaacagctatgtatgtaaaagtaaggcttatttcttaaataaaggatgcatttcttccca

SEQ ID NO: 23488 - DNA, 586 bp, Homo sapiens
  source 1..586: mol_type = unassigned DNA
agtcggccttcccaacatggcgcagtctattaacatcacggagctgaatctgccgcagctagaaatgctcaagaaccagctggaccaggaagtggagttcttgtccacgtccattgctcagctcaaagtggtacagaccaagtatgtggaagccaaggactgtctgaacgtgctgaacaagagcaacgaggggaaagaattactcgtcccactgacgagttctatgtatgtccctgggaagctgcatgatgtggaacacgtgctcatcgatgtgggaactgggtactatgtagagaagacagctgaggatgccaaggacttcttcaagaggaagatagattttctaaccaagcagatggagaaaatccaaccagctcttcaggagaagcacgccatgaaacaggccgtcatggaaatgatgagtcagaagattcagcagctcacagccctgggggcagctcaggctactgctaaggcctgagagtttttgcagaaatggggcagagggacaccctttgggcgtggcttcctggtgatgggaagggtcttgtgttttaatgccaataaatgtgccagctgggcagaa

SEQ ID NO: 23489 - DNA, 478 bp, Homo sapiens
  source 1..478: mol_type = unassigned DNA
gctcgccgagagacttcctcttcgttaagtcggccttcccaacatggcgcagtctattaacatcacggagctgaatctgccgcagctagaaatgctcaagaaccagctggaccagatgtatgtccctgggaagctgcatgatgtggaacacgtgctcatcgatgtgggaactgggtactatgtagagaagacagctgaggatgccaaggacttcttcaagaggaagatagattttctaaccaagcagatggagaaaatccaaccagctcttcaggagaagcacgccatgaaacaggccgtcatggaaatgatgagtcagaagattcagcagctcacagccctgggggcagctcaggctactgctaaggcctgagagtttttgcagaaatggggcagagggacaccctttgggcgtggcttcctggtgatgggaagggtcttgtgttttaatgccaataaatgtgccagctgggcagaa

SEQ ID NO: 23490 - DNA, 847 bp, Homo sapiens
  source 1..847: mol_type = unassigned DNA
atatcgtggttgtgtcgtgagaactttaagattttgcagttccttgtaggcaggagtcctgtttgctgctactttacaatactaggcttaagacattttatgaaatgaactcacacaacagtctctgagaggctcaagcccctccttcccttccgggacggaggatcatagagctgtctggcgcagcgaggcctcccggcgccaccgagacgcgcagaggacggctagagcgttgctcgccgagagacttcctcttcgttaagtcggccttcccaacatggcgcagtctattaacatcacggagctgaatctgccgcagctagaaatgctcaagaaccagctggaccaggaagtggagttcttgtccacgtccattgctcagctcaaagtggtacagaccaagtatgtggaagccaaggactgtctgaacgtgctgaacaagagcaacgaggggaaagaattactcgtcccactgacgagttctatgtatgtccctgggaagctgcatgatgtggaacacgtgctcatcgatgtgggaactgggtactatgtagagaagacagctgaggatgccaaggacttcttcaagaggaagatagattttctaaccaagcagatggagaaaatccaaccagctcttcaggagaagcacgccatgaaacaggccgtcatggaaatgatgagtcagaagattcagcagctcacagccctgggggcagctcaggctactgctaaggcctgagagtttttgcagaaatggggcagagggacaccctttgggcgtggcttcctggtgatgggaagggtcttgtgttttaatgccaataaatgtgccagctgggcagaa

SEQ ID NO: 23491 - DNA, 2276 bp, Homo sapiens
  source 1..2276: mol_type = unassigned DNA
gagcttgagaattgctcctgccctgggaagaggctcagcacagaaagaggaaggacagcacagctgacagccgtgctcagagagtttctggatcctaggcttatctccacagaggagaacacacaagcagcagagaccatgggaaccctctcagcccctccctgcacacagcgcatcaaatggaaggggctcctgctcacagcatcacttttaaacttctggaacctgcccaccactgcccaagtcacgattgaagccgagccaaccaaagtttccgaggggaaggatgttcttctacttgtccacaatttgccccagaatcttaccggctacatctggtacaaagggcaaatgagggacctctaccattacattacatcatatgtagtagacggtgaaataattatatatgggcctgcatatagtggacgagaaacagcatattccaatgcatccctgctgatccagaatgtcacccgggaggacgcaggatcctacaccttacacatcataaagggagatgatgggactagaggagtaactggacgtttcaccttcaccttacacctggagactcctaagccctccatctccagcagcaacttaaatcccagggagaccatggaggctgtgagcttaacctgtgaccctgagactccagacgcaagctacctgtggtggatgaatggtcagagcctccctatgactcacagcttgaagctgtccgaaaccaacaggaccctctttctattgggtgtcacaaagtatactgcaggaccctatgaatgtgaaatacggaacccagtgagtgccagccgcagtgacccagtcaccctgaatctcctcccgaagctgcccaagccctacatcaccatcaacaacttaaaccccagggagaataaggatgtcttaaacttcacctgtgaacctaagagtgagaactacacctacatttggtggctaaatggtcagagcctcccggtcagtcccagggtaaagcgacccattgaaaacaggatcctcattctacccagtgtcacgagaaatgaaacaggaccctatcaatgtgaaatacgggaccgatatggtggcatccgcagtgacccagtcaccctgaatgtcctctatggtccagacctccccagaatttacccttcattcacctattaccgttcaggagaagtcctctacttgtcctgttctgcggactctaacccaccggcacagtattcttggacaattaatgaaaagtttcagctaccaggacaaaagctctttatccgccatattactacaaagcatagcgggctctatgtttgctctgttcgtaactcagccactggcaaggaaagctccaaatccatgacagtcgaagtctctggtaagtggatcccagcatcgttggcaatagggttttaggtggagtctatctggcattcagagaagagtcaggaaaacaattgtattcccagcctgtgtcccatgggcacaagcaaatcccaaattctcctcctgaaccctccaaatttgtctaagaacttcgaaaactttaacaaacaggctgatatcttcataatattcccagcctagaccaagcaggaagaacattgatttcattgaaataattgataataatgaagataatgtttttatgatttttatttgaaaatttgctgattctttaaatggtttgttttctacattgatggaatttttctcttttaatctatctacagcttatagcagttcaataaactatacttctgggaaccgtaattgaaacatttacttttgctttctacctgactgccccagaattgggcaactattcatgagaattgatatgtttatggtaatacacatatttgcacaagtacagtaacaatctgctttctttgtaacatgacacatttgaaatcattggttatattaccaatgctttgattcggatgttatattaaaaacatagatagaatgaaccaatatgaactgcaggcaaagtctgaagtcagccttggtttggcttcctattctcaagaggtttgtgaagatttaatctcagattccttataaaaacttagagaaaagaaaattttagaagacagcctacatggtccattgctactcttgctgcacttatgtaaacaatcagaccacatttgaagaaactccacctattttgcaaacaaacttattctactgaaattatcattggtaaaagtagagatgcccatagagggaaaaattatgtggaaaataaaaactgtagtatacct

SEQ ID NO: 23492 - DNA, 1858 bp, Homo sapiens
  source 1..1858: mol_type = unassigned DNA
ggaaggacagcacagctgacagccgtgctcagagagtttctggatcctaggcttatctccacagaggagaacacacaagcagcagagaccatgggaaccctctcagcccctccctgcacacagcgcatcaaatggaaggggctcctgctcacagcatcacttttaaacttctggaacctgcccaccactgcccaagtcacgattgaagccgagccaaccaaagtttccgaggggaaggatgttcttctacttgtccacaatttgccccagaatcttaccggctacatctggtacaaagggcaaatgagggacctctaccattacattacatcatatgtagtagacggtgaaataattatatatgggcctgcatatagtggacgagaaacagcatattccaatgcatccctgctgatccagaatgtcacccgggaggacgcaggatcctacaccttacacatcataaagggagatgatgggactagaggagtaactggacgtttcaccttcaccttacacctggagactcctaagccctccatctccagcagcaacttaaatcccagggagaccatggaggctgtgagcttaacctgtgaccctgagactccagacgcaagctacctgtggtggatgaatggtcagagcctccctatgactcacagcttgaagctgtccgaaaccaacaggaccctctttctattgggtgtcacaaagtatactgcaggaccctatgaatgtgaaatacggaacccagtgagtgccagccgcagtgacccagtcaccctgaatctcctcccgaagctgcccaagccctacatcaccatcaacaacttaaaccccagggagaataaggatgtcttaaacttcacctgtgaacctaagagtgagaactacacctacatttggtggctaaatggtcagagcctcccggtcagtcccagggtaaagcgacccattgaaaacaggatcctcattctacccagtgtcacgagaaatgaaacaggaccctatcaatgtgaaatacgggaccgatatggtggcatccgcagtgacccagtcaccctgaatgtcctctatggtccagacctccccagaatttacccttcattcacctattaccgttcaggagaagtcctctacttgtcctgttctgcggactctaacccaccggcacagtattcttggacaattaatgaaaagtttcagctaccaggacaaaagctctttatccgccatattactacaaagcatagcgggctctatgtttgctctgttcgtaactcagccactggcaaggaaagctccaaatccatgacagtcgaagtctctgctcctccaggaataggacgtcttcctttctttactccaatagagcagcggtgatgtcatttctgtatttcaggaagactggcagacagttgctttgattcttcctcaaagtatttaccatcagctacagtccaaaattgctttttcttcaaggagatttatggaaaagactctgacaaggactctggaatacaagctcctgataacttcaagatcataccactggactaagaactttcaaaattttaatgaacaggctgataccttcatgaaattcaagacaaagaagaaaaaaaactcaattttattggaataaataatcaaaaggataatgttttcataattttctatttgaaaatgtgctgagtctttgaatgttttattctccagatttatgaacttttttccttgaacaattggtaaagtatacttttgtaaacaaaaattgaaacatttgcttttgctgagtgccccagaattgggaaactattcatgagtattcatatgtttatggtaataaagttat

SEQ ID NO: 23493 - DNA, 1882 bp, Homo sapiens
  source 1..1882: mol_type = unassigned DNA
ggacagcacagctgacagccgtgctcagagagtttctggatcctaggcttatctccacagaggagaacacacaagcagcagagaccatgggaaccctctcagcccctccctgcacacagcgcatcaaatggaaggggctcctgctcacagcatcacttttaaacttctggaacctgcccaccactgcccaagtcacgattgaagccgagccaaccaaagtttccgaggggaaggatgttcttctacttgtccacaatttgccccagaatcttaccggctacatctggtacaaagggcaaatgagggacctctaccattacattacatcatatgtagtagacggtgaaataattatatatgggcctgcatatagtggacgagaaacagcatattccaatgcatccctgctgatccagaatgtcacccgggaggacgcaggatcctacaccttacacatcataaagggagatgatgggactagaggagtaactggacgtttcaccttcaccttacacctggagactcctaagccctccatctccagcagcaacttaaatcccagggagaccatggaggctgtgagcttaacctgtgaccctgagactccagacgcaagctacctgtggtggatgaatggtcagagcctccctatgactcacagcttgaagctgtccgaaaccaacaggaccctctttctattgggtgtcacaaagtatactgcaggaccctatgaatgtgaaatacggaacccagtgagtgccagccgcagtgacccagtcaccctgaatctcctcccgaagctgcccaagccctacatcaccatcaacaacttaaaccccagggagaataaggatgtcttaaacttcacctgtgaacctaagagtgagaactacacctacatttggtggctaaatggtcagagcctcccggtcagtcccagggtaaagcgacccattgaaaacaggatcctcattctacccagtgtcacgagaaatgaaacaggaccctatcaatgtgaaatacgggaccgatatggtggcatccgcagtgacccagtcaccctgaatgtcctctatggtccagacctccccagaatttacccttcattcacctattaccgttcaggagaagtcctctacttgtcctgttctgcggactctaacccaccggcacagtattcttggacaattaatgaaaagtttcagctaccaggacaaaagctctttatccgccatattactacaaagcatagcgggctctatgtttgctctgttcgtaactcagccactggcaaggaaagctccaaatccatgacagtcgaagtctctgcttatagcagttcaataaactatacttctgggaaccgtaattgaaacatttacttttgctttctacctgactgccccagaattgggcaactattcatgagaattgatatgtttatggtaatacacatatttgcacaagtacagtaacaatctgctttctttgtaacatgacacatttgaaatcattggttatattaccaatgctttgattcggatgttatattaaaaacatagatagaatgaaccaatatgaactgcaggcaaagtctgaagtcagccttggtttggcttcctattctcaagaggtttgtgaagatttaatctcagattccttataaaaacttagagaaaagaaaattttagaagacagcctacatggtccattgctactcttgctgcacttatgtaaacaatcagaccacatttgaagaaactccacctattttgcaaacaaacttattctactgaaattatcattggtaaaagtagagatgcccatagagggaaaaattatgtggaaaataaaaactgtagtatacctgttatgagactgc

SEQ ID NO: 23494 - DNA, 2047 bp, Homo sapiens
  source 1..2047: mol_type = unassigned DNA
cctgggaagaggctcagcacagaaagaggaaggacagcacagctgacagccgtgctcagagagtttctggatcctaggcttatctccacagaggagaacacacaagcagcagagaccatgggaaccctctcagcccctccctgcacacagcgcatcaaatggaaggggctcctgctcacagcatcacttttaaacttctggaacctgcccaccactgcccaagtcacgattgaagccgagccaaccaaagtttccgaggggaaggatgttcttctacttgtccacaatttgccccagaatcttaccggctacatctggtacaaagggcaaatgagggacctctaccattacattacatcatatgtagtagacggtgaaataattatatatgggcctgcatatagtggacgagaaacagcatattccaatgcatccctgctgatccagaatgtcacccgggaggacgcaggatcctacaccttacacatcataaagggagatgatgggactagaggagtaactggacgtttcaccttcaccttacacctggagactcctaagccctccatctccagcagcaacttaaatcccagggagaccatggaggctgtgagcttaacctgtgaccctgagactccagacgcaagctacctgtggtggatgaatggtcagagcctccctatgactcacagcttgaagctgtccgaaaccaacaggaccctctttctattgggtgtcacaaagtatactgcaggaccctatgaatgtgaaatacggaacccagtgagtgccagccgcagtgacccagtcaccctgaatctcctcccgaagctgcccaagccctacatcaccatcaacaacttaaaccccagggagaataaggatgtcttaaacttcacctgtgaacctaagagtgagaactacacctacatttggtggctaaatggtcagagcctcccggtcagtcccagggtaaagcgacccattgaaaacaggatcctcattctacccagtgtcacgagaaatgaaacaggaccctatcaatgtgaaatacgggaccgatatggtggcatccgcagtgacccagtcaccctgaatgtcctctatggtccagacctccccagaatttacccttcattcacctattaccgttcaggagaagtcctctacttgtcctgttctgcggactctaacccaccggcacagtattcttggacaattaatgaaaagtttcagctaccaggacaaaagctctttatccgccatattactacaaagcatagcgggctctatgtttgctctgttcgtaactcagccactggcaaggaaagctccaaatccatgacagtcgaagtctctgactggacagttccctgaattctactagtacctccaattccattttctcccatggaatcactaagagcaagacccactctgttccagaagccctataagctggaggtggacaactcaatgtaaatttcatgggaaaacccttgtacgtgaagcatgagccactcagaactcaccaaaatattcgacaccataacaacagatgctcaaactgtaaaccaggacaacaagtggatgacttcacactgtggacagtttttcccaagatgtcagaacaagactccccatcatgatgaggctctcccccctcttaactgtccttgctcatgcctgcctctttcacttggcaggataatgcagtcattagaatttcacatgtagtagcttctgagagtaacaacagagtgtcagatatgtcatctcaacctcaaacttttacataacatctcagggggaaatgtggctctctccaccttgcatacagggctcccaatagaaatgaacacagagatattgcctgtgtgtttgcagagaagatggtttgtatgaagacgtaggaaagctgaaattataatagagtcccctttaaatccacattgtgtggatggctcttgccgtttcctaagagatacattgtaaaacgtgacagtaagacattctagcagaataaaacatgtaccacctttgctaa

SEQ ID NO: 23495 - DNA, 1903 bp, Homo sapiens
  source 1..1903: mol_type = unassigned DNA
gtgctcagagagtttctggatcctaggcttatctccacagaggagaacacacaagcagcagagaccatgggaaccctctcagcccctccctgcacacagcgcatcaaatggaaggggctcctgctcacagcatcacttttaaacttctggaacctgcccaccactgcccaagtcacgattgaagccgagccaaccaaagtttccgaggggaaggatgttcttctacttgtccacaatttgccccagaatcttaccggctacatctggtacaaagggcaaatgagggacctctaccattacattacatcatatgtagtagacggtgaaataattatatatgggcctgcatatagtggacgagaaacagcatattccaatgcatccctgctgatccagaatgtcacccgggaggacgcaggatcctacaccttacacatcataaagggagatgatgggactagaggagtaactggacgtttcaccttcaccttacacctggagactcctaagccctccatctccagcagcaacttaaatcccagggagaccatggaggctgtgagcttaacctgtgaccctgagactccagacgcaagctacctgtggtggatgaatggtcagagcctccctatgactcacagcttgaagctgtccgaaaccaacaggaccctctttctattgggtgtcacaaagtatactgcaggaccctatgaatgtgaaatacggaacccagtgagtgccagccgcagtgacccagtcaccctgaatctcctcccgaagctgcccaagccctacatcaccatcaacaacttaaaccccagggagaataaggatgtcttaaacttcacctgtgaacctaagagtgagaactacacctacatttggtggctaaatggtcagagcctcccggtcagtcccagggtaaagcgacccattgaaaacaggatcctcattctacccagtgtcacgagaaatgaaacaggaccctatcaatgtgaaatacgggaccgatatggtggcatccgcagtgacccagtcaccctgaatgtcctctatggtccagacctccccagaatttacccttcattcacctattaccgttcaggagaagtcctctacttgtcctgttctgcggactctaacccaccggcacagtattcttggacaattaatgaaaagtttcagctaccaggacaaaagctctttatccgccatattactacaaagcatagcgggctctatgtttgctctgttcgtaactcagccactggcaaggaaagctccaaatccatgacagtcgaagtctctgaagccctataagctggaggtggacaactcaatgtaaatttcatgggaaaacccttgtacgtgaagcatgagccactcagaactcaccaaaatattcgacaccataacaacagatgctcaaactgtaaaccaggacaacaagtggatgacttcacactgtggacagtttttcccaagatgtcagaacaagactccccatcatgatgaggctctcccccctcttaactgtccttgctcatgcctgcctctttcacttggcaggataatgcagtcattagaatttcacatgtagtagcttctgagagtaacaacagagtgtcagatatgtcatctcaacctcaaacttttacataacatctcagggggaaatgtggctctctccaccttgcatacagggctcccaatagaaatgaacacagagatattgcctgtgtgtttgcagagaagatggtttgtatgaagacgtaggaaagctgaaattataatagagtcccctttaaatccacattgtgtggatggctcttgccgtttcctaagagatacattgtaaaacgtgacagtaagacattctagcagaataaaacatgtaccacct

SEQ ID NO: 23496 - DNA, 1243 bp, Homo sapiens
  source 1..1243: mol_type = unassigned DNA
gtctcagcgcagaaggaggaaggacagcacagctgacagccgtgctctggaagcttctggatcctaggctcatctccacagaggagaacatgcacgcagcagagatcatggggcccctctcagcccctccctgcacagagcacatcaaatggaaggggctcctgctcacagtggagactcccaagccctccatctccagcagcaacttaaaccccagggaggccatggagactgtgatcttaacctgtaatcctgagactccggacgcaagctacctgtggtggatgaatggtcagagcctccctatgactcataggatgcagctgtctgaaaccaacaggaccctctttctatttggtgtcacaaagtatactgcaggaccctatgaatgtgaaatatggaactcagggagtgccagccgcagtgacccagtcaccctgaatctcctccatggtccagacctccccagaattttcccttcagtcacctcttactattcaggagagaacctcgacttgtcctgcttcgcaaactctaacccaccagcacagtattcttggacaattaatgggaagtttcagctatcaggacaaaagctctttatccctcagattactccaaagcataatgggctctatgcttgctctgctcgtaactcagccactggcgaggaaagctccacatccttgacaatcagagtcattgctcctccaggattaggaacttttgctttcaataatccaacgtagcagccgtgatgtcatttttgtatttcaggaagactggcagaaagttgctttgattcttcctcaaagtatttaaaatcagctacagtccaaaattgctttttcttcaaggagatttatggaaaagactatgaaaaggactcttgaatacaagttcctgataacttcaagatcataccactggactaagaactttcaaaattttgatgaacaggctgataccttcatgaaattcaagacaaagaagaaaagaactccatttcattggactaaataacaaaaggataatgttttcataattttttattggaaaatgtgctgattttttgaatgttttatcctccagatttatgaatttttttcttcagcaattggtaaagtatacttttgtaaacaaaaattgaaacatttgcttttgctctctgagtgccccagaattgggaatctattcatgaatattcatatgtttatggtaataaagttatttgcacaagttt

SEQ ID NO: 23497 - DNA, 1575 bp, Homo sapiens
  source 1..1575: mol_type = unassigned DNA
tgagcttgagaagtgctccttccaccgggaagagtctcagcgcagaaggaggaaggacagcacagctgacagccgtgctctggaagcttctggatcctaggctcatctccacagaggagaacatgcacgcagcagagatcatggggcccctctcagcccctccctgcacagagcacatcaaatggaaggggctcctgctcacagcattacttttaaacttctggaacttgcctaccactgcccaagtcatgattgaagcccagccacccaaagtgtccgaggggaaggatgttcttctacttgtccacaatttgccccagaatcttactggctacatctggtacaaagggcaaatcagggacctctaccattacattacatcatatgtagtagacggtcaaataattatatatggaccggcatacagtggacgagaaacagtatattccaatgcatccctgctgatccagaatgtcacccgggaggacgcaggatcctacaccttacacatcataaagcgaggtgatgggactagaggagtaactggatatttcaccttcaccttatacctggagactcccaagccctccatctccagcagcaacttaaaccccagggaggccatggagactgtgatcttaacctgtaatcctgagactccggacgcaagctacctgtggtggatgaatggtcagagcctccctatgactcataggatgcagctgtctgaaaccaacaggaccctctttctatttggtgtcacaaagtatactgcaggaccctatgaatgtgaaatatggaactcagggagtgccagccgcagtgacccagtcaccctgaatctcctccatggtccagacctccccagaattttcccttcagtcacctcttactattcaggagagaacctcgacttgtcctgcttcgcaaactctaacccaccagcacagtattcttggacaattaatgggaagtttcagctatcaggacaaaagctctttatccctcagattactccaaagcataatgggctctatgcttgctctgctcgtaactcagccactggcgaggaaagctccacatccttgacaatcagagtcattgctcctccaggattaggaacttttgctttcaataatccaacgtagcagccgtgatgtcatttttgtatttcaggaagactggcaggagatttatggaaaagactatgaaaaggactcttgaatacaagttcctgataacttcaagatcataccactggactaagaactttcaaaattttgatgaacaggctgataccttcatgaaattcaagacaaagaagaaaagaactccatttcattggactaaataacaaaaggataatgttttcataattttttattggaaaatgtgctgattttttgaatgttttatcctccagatttatgaatttttttcttcagcaattggtaaagtatacttttgtaaacaaaaattgaaacatttgcttttgctctctgagtgccccagaattgggaatctattcatgaatattcatatgtttatggtaataaagttatttgcacaagttta

SEQ ID NO: 23498 - DNA, 1576 bp, Homo sapiens
  source 1..1576: mol_type = unassigned DNA
tcagcgcagaaggaggaaggacagcacagctgacagccgtgctctggaagcttctggatcctaggctcatctccacagaggagaacatgcacgcagcagagatcatggggcccctctcagcccctccctgcacagagcacatcaaatggaaggggctcctgctcacagcattacttttaaacttctggaacttgcctaccactgcccaagtcatgattgaagcccagccacccaaagtgtccgaggggaaggatgttcttctacttgtccacaatttgccccagaatcttactggctacatctggtacaaagggcaaatcagggacctctaccattacattacatcatatgtagtagacggtcaaataattatatatggaccggcatacagtggacgagaaacagtatattccaatgcatccctgctgatccagaatgtcacccgggaggacgcaggatcctacaccttacacatcataaagcgaggtgatgggactagaggagtaactggatatttcaccttcaccttatacctggagactcccaagccctccatctccagcagcaacttaaaccccagggaggccatggagactgtgatcttaacctgtaatcctgagactccggacgcaagctacctgtggtggatgaatggtcagagcctccctatgactcataggatgcagctgtctgaaaccaacaggaccctctttctatttggtgtcacaaagtatactgcaggaccctatgaatgtgaaatatggaactcagggagtgccagccgcagtgacccagtcaccctgaatctcctccatggtccagacctccccagaattttcccttcagtcacctcttactattcaggagagaacctcgacttgtcctgcttcgcaaactctaacccaccagcacagtattcttggacaattaatgggaagtttcagctatcaggacaaaagctctttatccctcagattactccaaagcataatgggctctatgcttgctctgctcgtaactcagccactggcgaggaaagctccacatccttgacaatcagagtcattgctcctccaggattaggaacttttgctttcaataatccaacgtagcagccgtgatgtcatttttgtatttcaggaagactggcagaaagttgctttgattcttcctcaaagtatttaaaatcagctacagtccaaaattgctttttcttcaaggagatttatggaaaagactatgaaaaggactcttgaatacaagttcctgataacttcaagatcataccactggactaagaactttcaaaattttgatgaacaggctgataccttcatgaaattcaagacaaagaagaaaagaactccatttcattggactaaataacaaaaggataatgttttcataattttttattggaaaatgtgctgattttttgaatgttttatcctccagatttatgaatttttttcttcagcaattggtaaagtatacttttgtaaacaaaaattgaaacatttgcttttgctctctgagtgccccagaattgggaatctattcatgaatattcatatgt

SEQ ID NO: 23499 - DNA, 1163 bp, Homo sapiens
  source 1..1163: mol_type = unassigned DNA
aggaggaaggacagcacagctgacagccgtgctctggaagcttctggatcctaggctcatctccacagaggagaacatgcacgcagcagagatcatggggcccctctcagcccctccctgcacagagcacatcaaatggaaggggctcctgctcacagtggagactcccaagccctccatctccagcagcaacttaaaccccagggaggccatggagactgtgatcttaacctgtaatcctgagactccggacgcaagctacctgtggtggatgaatggtcagagcctccctatgactcataggatgcagctgtctgaaaccaacaggaccctctttctatttggtgtcacaaagtatactgcaggaccctatgaatgtgaaatatggaactcagggagtgccagccgcagtgacccagtcaccctgaatctcctccatggtccagacctccccagaattttcccttcagtcacctcttactattcaggagagaacctcgacttgtcctgcttcgcaaactctaacccaccagcacagtattcttggacaattaatgggaagtttcagctatcaggacaaaagctctttatccctcagattactccaaagcataatgggctctatgcttgctctgctcgtaactcagccactggcgaggaaagctccacatccttgacaatcagagtcattgctcctccaggattaggaacttttgctttcaataatccaacgtagcagccgtgatgtcatttttgtatttcaggaagactggcaggagatttatggaaaagactatgaaaaggactcttgaatacaagttcctgataacttcaagatcataccactggactaagaactttcaaaattttgatgaacaggctgataccttcatgaaattcaagacaaagaagaaaagaactccatttcattggactaaataacaaaaggataatgttttcataattttttattggaaaatgtgctgattttttgaatgttttatcctccagatttatgaatttttttcttcagcaattggtaaagtatacttttgtaaacaaaaattgaaacatttgcttttgctctctgagtgccccagaattgggaatctattcatgaatattcatatgtttatggtaataaagttatttgcacaagttta

SEQ ID NO: 23500 - DNA, 1529 bp, Homo sapiens
  source 1..1529: mol_type = unassigned DNA
ggaggaaggacagcacagctgacagccgtgctcaggaagtttctggatcctaggctcatctccacagaggagaacacacaggcagcagagaccatggggcccctctcagcccctccctgcacagagcacatcaaatggaaggggctcctggtcacagcatcacttttaaacttctggaacctgcccaccactgcccaagtcacgattgaagcccagccaccaaaagtttccgaggggaaggatgttcttctacttgtccacaatttgccccagaatcttactggctacatctggtacaaagggcaaatcagggacctctaccattacattacatcatatgtagtagacggtcaaataattatatatgggcctgcatatagtggacgagaaacagcatattccaatgcatccctgctgatccagaatgtcacccgggaggacgcaggatcctacaccttacacatcataaagcgaggtgatgggactagaggagtaactggatatttcaccttcaccttatacctggagactcccaagccctccatctccagcagcaacttaaaccccagggaggccatggaaactgtgatcttaacctgtgatcctgagactccggacacaagctaccagtggtggatgaatggtcagagcctccctatgactcataggtttcagctgtccgaaaccaacaggaccctctttctatttggtgtcacaaagtatactgcaggaccctatgaatgtgaaatacggaactcagggagtgccagccgcagtgacccagtcaccctgaatctcctccatggtccagacctccccagaattcacccttcatacaccaattaccgttcaggagataacctctacttgtcttgcttcgcgaactctaacccaccggcacagtattcttggacaattaatgggaagtttcagcaatcaggacaaaatctgtttatcccccaaattactacaaagcatagcgggctctatgtttgctctgttcgtaactcagccactggcgaggaaagctccacatcgttgacagtcaaagtctctgcttctacaagaataggacttcttcctctccttaatccaacatagcagctgtgatgtcatttctgtatttcaggaagactggcagatttatggaaaggtctcttacaaggactcttgaatacaagctcctgataacttcaagatcataccactggactaagaactttcaaaattttaatgaacaggctgataccttcatgaaattcaagacaaagaagaaaaatactcaatgttattggactaaataatcaaaaggataatgatttcataattttctatttgaaaatgtgctgattcttggaatgtttcattctccagatttatgaacattttttcttgagcaattggtaaagtatacttttgtaaacaaaaattgaaacatttccttttgctctctatctgagtgccccagaattgggaatctattcatgagtattcatatgtttatggtaataaagctatttgcacaagtt

SEQ ID NO: 23501 - DNA, 1555 bp, Homo sapiens
  source 1..1555: mol_type = unassigned DNA
ggaggaaggacagcacagctgacagccgtgctcaggaagtttctggatcctaggctcatctccacagaggagaacacacaggcagcagagaccatggggcccctctcagcccctccctgcacagagcacatcaaatggaaggggctcctggtcacagcatcacttttaaacttctggaacctgcccaccactgcccaagtcacgattgaagcccagccaccaaaagtttccgaggggaaggatgttcttctacttgtccacaatttgccccagaatcttactggctacatctggtacaaagggcaaatcagggacctctaccattacattacatcatatgtagtagacggtcaaataattatatatgggcctgcatatagtggacgagaaacagcatattccaatgcatccctgctgatccagaatgtcacccgggaggacgcaggatcctacaccttacacatcataaagcgaggtgatgggactagaggagtaactggatatttcaccttcaccttatacctggagactcccaagccctccatctccagcagcaacttaaaccccagggaggccatggaaactgtgatcttaacctgtgatcctgagactccggacacaagctaccagtggtggatgaatggtcagagcctccctatgactcataggtttcagctgtccgaaaccaacaggaccctctttctatttggtgtcacaaagtatactgcaggaccctatgaatgtgaaatacggaactcagggagtgccagccgcagtgacccagtcaccctgaatctcctccatggtccagacctccccagaattcacccttcatacaccaattaccgttcaggagataacctctacttgtcttgcttcgcgaactctaacccaccggcacagtattcttggacaattaatgggaagtttcagcaatcaggacaaaatctgtttatcccccaaattactacaaagcatagcgggctctatgtttgctctgttcgtaactcagccactggcgaggaaagctccacatcgttgacagtcaaagtctctgcttctacaagaataggacttcttcctctccttaatccaacatagcagctgtgatgtcatttctgtatttcaggaagactggcagtccaaaattgctttttcttcaaggagatttatggaaaggtctcttacaaggactcttgaatacaagctcctgataacttcaagatcataccactggactaagaactttcaaaattttaatgaacaggctgataccttcatgaaattcaagacaaagaagaaaaatactcaatgttattggactaaataatcaaaaggataatgatttcataattttctatttgaaaatgtgctgattcttggaatgtttcattctccagatttatgaacattttttcttgagcaattggtaaagtatacttttgtaaacaaaaattgaaacatttccttttgctctctatctgagtgccccagaattgggaatctattcatgagtattcatatgtttatggtaataaagctatttgcacaagtt

SEQ ID NO: 23502 - DNA, 1538 bp, Homo sapiens
  source 1..1538: mol_type = unassigned DNA
gcagaaggaggaaggacagcacagctgacagccgtgctcaggaagtttctggatcctaggctcatctccacagaggagaacacacaggcagcagagaccatggggcccctctcagcccctccctgcacagagcacatcaaatggaaggggctcctggtcacagcatcacttttaaacttctggaacctgcccaccactgcccaagtcacgattgaagcccagccaccaaaagtttccgaggggaaggatgttcttctacttgtccacaatttgccccagaatcttactggctacatctggtacaaagggcaaatcagggacctctaccattacattacatcatatgtagtagacggtcaaataattatatatgggcctgcatatagtggacgagaaacagcatattccaatgcatccctgctgatccagaatgtcacccgggaggacgcaggatcctacaccttacacatcataaagcgaggtgatgggactagaggagtaactggatatttcaccttcaccttatacctggagactcccaagccctccatctccagcagcaacttaaaccccagggaggccatggaaactgtgatcttaacctgtgatcctgagactccggacacaagctaccagtggtggatgaatggtcagagcctccctatgactcataggtttcagctgtccgaaaccaacaggaccctctttctatttggtgtcacaaagtatactgcaggaccctatgaatgtgaaatacggaactcagggagtgccagccgcagtgacccagtcaccctgaatctcctccatggtccagacctccccagaattcacccttcatacaccaattaccgttcaggagataacctctacttgtcttgcttcgcgaactctaacccaccggcacagtattcttggacaattaatgggaagtttcagcaatcaggacaaaatctgtttatcccccaaattactacaaagcatagcgggctctatgtttgctctgttcgtaactcagccactggcgaggaaagctccacatcgttgacagtcaaagtctctgcttctacaagaataggacttcttcctctccttaatccaacatagcagctgtgatgtcatttctgtatttcaggaagactggcaggagatttatggaaaggtctcttacaaggactcttgaatacaagctcctgataacttcaagatcataccactggactaagaactttcaaaattttaatgaacaggctgataccttcatgaaattcaagacaaagaagaaaaatactcaatgttattggactaaataatcaaaaggataatgatttcataattttctatttgaaaatgtgctgattcttggaatgtttcattctccagatttatgaacattttttcttgagcaattggtaaagtatacttttgtaaacaaaaattgaaacatttccttttgctctctatctgagtgccccagaattgggaatctattcatgagtattcatatgtttatggtaataaagctatttgcacaagtt

SEQ ID NO: 23503 - DNA, 1961 bp, Homo sapiens
  source 1..1961: mol_type = unassigned DNA
tgagagaggaggggacagagaggtgtcctgggcctgaccccgcccatgaacctgagaagtgctcctgccccgggaagaggctcagcgcagaaggaggaaggacagcacagctgagagccatgctcaggaagtttctggatcctaggctcagctccacagaggagaacacgcaggcagcagagaccatggggcccctctcagcccctccctgcacacagcgcatcacctggaaggggctcctgctcacagcattacttttaaacttctggaacttgcctaccactgcccaagtcacgattgaagccgagccaaccaaagtttccaaggggaaggacgttcttctacttgtccacaatttgccccagaatcttgctggctacatctggtacaaagggcaaatgaaggacctctaccattacattacatcatacgtagtagatggtcaaataattatatatgggcctgcatacagtggacgagaaacagtatattccaatgcatccctgctgatccagaatgtcacccgggaggacgcaggatcctacaccttacacatcgtaaagcgaggtgatgggactagaggagaaactggacatttcaccttcaccttatacctggagactcccaagccctccatctccagcagcaacttataccccagggaggacatggaggctgtgagcttaacctgtgatcctgagactccggacgcaagctacctgtggtggatgaatggtcagagcctccctatgactcacagcttgcagttgtccaaaaacaaaaggaccctctttctatttggtgtcacaaagtacactgcaggaccctatgaatgtgaaatacggaacccagtgagtgccagccgcagtgacccagtcaccctgaatctcctcccgaagctgcccaagccctacatcaccatcaacaacttaaaccccagggagaataaggatgtcttagccttcacctgtgaacctaagagtgagaactacacctacatttggtggctaaatggtcagagcctcccggtcagtcccagggtaaagcgacccattgaaaacaggatcctcattctacccagtgtcacgagaaatgaaacaggaccctatcaatgtgaaatacaggaccgatatggtggcatccgcagttacccagtcaccctgaatgtcctctatggtccagacctccccagaatttacccttcattcacctattaccattcaggagaaaacctctacttgtcctgcttcgcggactctaacccaccagcagaatattcttggacaattaatgggaagtttcagctatcaggacaaaagctctttatcccccagattactacaaagcatagcgggctctatgcttgctctgttcgtaactcagccactggcatggaaagctccaaatccatgacagtcaaagtctctgctccttcaggaacaggacatcttcctggccttaatccattatagcagccgtgatgtcatttctgtatttcaggaagactggcagacagttgctttcattcttcctcaaagtatttaccatcagctacagtccaaaattgctttttgttcaaggagatttatgaaaagactctgacaaggactcttgaatacaagttcctgataacttcaagatcataccactggactaagaactttcaaaattttaatgaacaggctgatacttcatgaaattcaagacaaagaaaaaaacccaattttattggactaaatagtcaaaacaatgttttcataattttctatttgaaaatgtgctgattctttgaatgttttattctccagatttatgcactttttttcttcagcaattggtaaagtatacttttgtaaacaaaaattgaaacatttgcttttgctccctaagtgccccagaattgggaaactattcaggagtattcatatgtttatggtaataaagttatctgcacaagttca

SEQ ID NO: 23504 - DNA, 1678 bp, Homo sapiens
  source 1..1678: mol_type = unassigned DNA
gaggagaacacacaagcagcagagaccatggggcccctctcagcccctccctgcacacagcgcatcacctggaagggggtcctgctcacagcatcacttttaaacttctggaatccgcccacaactgcccaagtcacgattgaagcccagccacccaaagtttctgaggggaaggatgttcttctacttgtccacaatttgccccagaatcttgctggctacatttggtacaaagggcaaatgacatacctctaccattacattacatcatatgtagtagacggtcaaagaattatatatgggcctgcatacagtggaagagaaagagtatattccaatgcatccctgctgatccagaatgtcacgcaggaggatgcaggatcctacaccttacacatcataaagcgacgcgatgggactggaggagtaactggacatttcaccttcaccttacacctggagactcccaagccctccatctccagcagcaacttaaatcccagggaggccatggaggctgtgatcttaacctgtgatcctgcgactccagccgcaagctaccagtggtggatgaatggtcagagcctccctatgactcacaggttgcagctgtccaaaaccaacaggaccctctttatatttggtgtcacaaagtatattgcaggaccctatgaatgtgaaatacggaacccagtgagtgccagccgcagtgacccagtcaccctgaatctcctccatggtccagacctccccagcatttacccttcattcacctattaccgttcaggagaaaacctctacttgtcctgcttcgccgagtctaacccacgggcacaatattcttggacaattaatgggaagtttcagctatcaggacaaaagctctctatcccccaaataactacaaagcatagtgggctctatgcttgctctgttcgtaactcagccactggcaaggaaagctccaaatccatcacagtcaaagtctctgactggatattaccctgaattctactagttcctccaattccattttctcccatggaatcacgaagagcaagacccactctgttccagaagccctataagctggaggtggacaactcgatgtaaatttcatgggaaaacccttgtacctgacatgtgagccactcagaactcaccaaaatgttcgacaccataacaacagctactcaaactgtaaaccaggataacaagttgatgacttcacactgtggacagtttttccaaagatgtcagaacaagactccccatcatgataaggctcccacccctcttaaccgtccttgctcatgcctgcctctttcacttggcaggataatgcagtcattagaatttcacatgtagtagcttctgagggtaacaacagagtgtcagatatgtcatctcaacctcaaacttttacgtaacatctcaggggaaatgtggctctctccatcttgcatacagggctcccaatagaaatgaacacagagatattgcctgtgtgtttgcagagaagatggtttctataaagagtaggaaagctgaaattatagtagagtctcctttaaatgcacattgtgtggatggctctcaccatttcctaagagatacagtgtaaaacgtgacagtaatactgattctagcagaataaaacatgtaccacatttgctaa

SEQ ID NO: 23505 - DNA, 2168 bp, Homo sapiens
  source 1..2168: mol_type = unassigned DNA
agggacctgaaacacagacaaaaggaaaaacaggagggacaaggaggcagaactgagagaggaggggacagagaggtgtcctgggcctgaccccgcccacgagcttgagaaatgctcctgccccgggaggaggctcagcacagaaggaggaaggacagcacagctgacagccgtactcaggaagcttctggatcctaggcttatctccacagaggagaacacacaagcagcagagaccatggggcccctctcagcccctccctgcacacagcgcatcacctggaagggggtcctgctcacagcatcacttttaaacttctggaatccgcccacaactgcccaagtcacgattgaagcccagccacccaaagtttctgaggggaaggatgttcttctacttgtccacaatttgccccagaatcttgctggctacatttggtacaaagggcaaatgacatacctctaccattacattacatcatatgtagtagacggtcaaagaattatatatgggcctgcatacagtggaagagaaagagtatattccaatgcatccctgctgatccagaatgtcacgcaggaggatgcaggatcctacaccttacacatcataaagcgacgcgatgggactggaggagtaactggacatttcaccttcaccttacacctggagactcccaagccctccatctccagcagcaacttaaatcccagggaggccatggaggctgtgatcttaacctgtgatcctgcgactccagccgcaagctaccagtggtggatgaatggtcagagcctccctatgactcacaggttgcagctgtccaaaaccaacaggaccctctttatatttggtgtcacaaagtatattgcaggaccctatgaatgtgaaatacggaacccagtgagtgccagccgcagtgacccagtcaccctgaatctcctcccaaagctgtccaagccctacatcacaatcaacaacttaaaccccagagagaataaggatgtcttaaccttcacctgtgaacctaagagtaagaactacacctacatttggtggctaaatggtcagagcctccctgtcagtcccagggtaaagcgacccattgaaaacaggatcctcattctacccaatgtcacgagaaatgaaacaggaccttatcaatgtgaaatacgggaccgatatggtggcatccgcagtgacccagtcaccctgaatgtcctctatggtccagacctccccagcatttacccttcattcacctattaccgttcaggagaaaacctctacttgtcctgcttcgccgagtctaacccacgggcacaatattcttggacaattaatgggaagtttcagctatcaggacaaaagctctctatcccccaaataactacaaagcatagtgggctctatgcttgctctgttcgtaactcagccactggcaaggaaagctccaaatccatcacagtcaaagtctctgactggatattaccctgaattctactagttcctccaattccattttctcccatggaatcacgaagagcaagacccactctgttccagaagccctataagctggaggtggacaactcgatgtaaatttcatgggaaaacccttgtacctgacatgtgagccactcagaactcaccaaaatgttcgacaccataacaacagctactcaaactgtaaaccaggataacaagttgatgacttcacactgtggacagtttttccaaagatgtcagaacaagactccccatcatgataaggctcccacccctcttaaccgtccttgctcatgcctgcctctttcacttggcaggataatgcagtcattagaatttcacatgtagtagcttctgagggtaacaacagagtgtcagatatgtcatctcaacctcaaacttttacgtaacatctcaggggaaatgtggctctctccatcttgcatacagggctcccaatagaaatgaacacagagatattgcctgtgtgtttgcagagaagatggtttctataaagagtaggaaagctgaaattatagtagagtctcctttaaatgcacattgtgtggatggctctcaccatttcctaagagatacagtgtaaaacgtgacagtaatactgattctagcagaataaaacatgtaccacatttgctaa

SEQ ID NO: 23506 - DNA, 1774 bp, Homo sapiens
  source 1..1774: mol_type = unassigned DNA
gagaaatgctcctgccccgggaggaggctcagcacagaaggaggaaggacagcacagctgacagccgtactcaggaagcttctggatcctaggcttatctccacagaggagaacacacaagcagcagagaccatggggcccctctcagcccctccctgcacacagcgcatcacctggaagggggtcctgctcacagcatcacttttaaacttctggaatccgcccacaactgcccaagtcacgattgaagcccagccacccaaagtttctgaggggaaggatgttcttctacttgtccacaatttgccccagaatcttgctggctacatttggtacaaagggcaaatgacatacctctaccattacattacatcatatgtagtagacggtcaaagaattatatatgggcctgcatacagtggaagagaaagagtatattccaatgcatccctgctgatccagaatgtcacgcaggaggatgcaggatcctacaccttacacatcataaagcgacgcgatgggactggaggagtaactggacatttcaccttcaccttacacccaaagctgtccaagccctacatcacaatcaacaacttaaaccccagagagaataaggatgtcttaaccttcacctgtgaacctaagagtaagaactacacctacatttggtggctaaatggtcagagcctccctgtcagtcccagggtaaagcgacccattgaaaacaggatcctcattctacccaatgtcacgagaaatgaaacaggaccttatcaatgtgaaatacgggaccgatatggtggcatccgcagtgacccagtcaccctgaatgtcctctatggtccagacctccccagcatttacccttcattcacctattaccgttcaggagaaaacctctacttgtcctgcttcgccgagtctaacccacgggcacaatattcttggacaattaatgggaagtttcagctatcaggacaaaagctctctatcccccaaataactacaaagcatagtgggctctatgcttgctctgttcgtaactcagccactggcaaggaaagctccaaatccatcacagtcaaagtctctgactggatattaccctgaattctactagttcctccaattccattttctcccatggaatcacgaagagcaagacccactctgttccagaagccctataagctggaggtggacaactcgatgtaaatttcatgggaaaacccttgtacctgacatgtgagccactcagaactcaccaaaatgttcgacaccataacaacagctactcaaactgtaaaccaggataacaagttgatgacttcacactgtggacagtttttccaaagatgtcagaacaagactccccatcatgataaggctcccacccctcttaaccgtccttgctcatgcctgcctctttcacttggcaggataatgcagtcattagaatttcacatgtagtagcttctgagggtaacaacagagtgtcagatatgtcatctcaacctcaaacttttacgtaacatctcaggggaaatgtggctctctccatcttgcatacagggctcccaatagaaatgaacacagagatattgcctgtgtgtttgcagagaagatggtttctataaagagtaggaaagctgaaattatagtagagtctcctttaaatgcacattgtgtggatggctctcaccatttcctaagagatacagtgtaaaacgtgacagtaatactgattctagcagaataaaacatgtaccac

SEQ ID NO: 23507 - DNA, 1626 bp, Homo sapiens
  source 1..1626: mol_type = unassigned DNA
ccctggagagaggctcagcacagaaggaggaaggacagcacagcctacagccgtgctcaggaagtttctggatcctaggctcagctccacagaggagaacacgcaggcgcagagaccatggggcccctctcagcccctccctgcacacagcacatcacctggaaggggctcctgctcacagcatcacttttaaacttctggaacctgcctatcactgctcaagtcacgattgaagccctgccacccaaagtttccgaggggaaggatgttcttctacttgtccacaatttgcctcagaatcttgctggctacatctggtacaaaggacaactgatggacctctaccattacattacatcatatgtagtagacggtcaaataaatatatatgggcctgcatacactggacgagaaacagtatattccaatgcatccctgctgatccagaatgtcacccgggaagacgcaggatcctacaccttacacatcataaagcgaggtgataggactagaggagtaactggatatttcaccttcaacttatacctgaagctgcccaagccctacatcaccatcaacaactcaaaacccagggagaataaggatgtcttagccttcacctgtgaacctaagagtgagaactacacctacatttggtggctaaatggtcagagcctcccggtcagtcccagggtaaagcgacccattgaaaacaggatcctcattctacccagtgtcacgagaaatgaaacaggaccctatgaatgtgaaatacgggaccgagatggtggcatgcgcagtgacccagtcaccctgaatgtcctctatggtccagacctccccagcatttacccttcattcacctattaccgttcaggagaaaacctctacttgtcctgcttcgcggaatctaacccaccggcagagtatttttggacaattaatgggaagtttcagcaatcaggacaaaagctctctatcccccaaattactacaaagcatagagggctctatacttgctctgttcgtaactcagctactggcaaggaaagctccaaatccatgacagtcgaagtctctgctccttcaggaataggacgtcttcctctccttaatccaatatagcagccgtgaagtcatttctgtatttcaggaagactggcagacagttgctttgattcttcctcaaactacttacaatcacctacagtccaaaattgctttttcttcaaggagatttatggaaaagactctgacaaggactcttgaatacaagttcctgataacttcaagatcataccactggactaagaactttcaaaattttaatgaacaggctgataccttcatgaaattctagacaaagaagaaaaaaactccatgttattggactaaataatcaaaagcataatgttttcataattttctatttgaaaatgtgctgattctttgaatgttttattctccagatttatgaactttttttcttgagcaattggtaaagtatacttttgtaaacaaaaattgaaacatttgcttttgctctctatctgagtgccccagaattgggaaactattcatgagtattcatatgtttatggtaataaagttatctgcacaagttca

SEQ ID NO: 23508 - DNA, 1766 bp, Homo sapiens
  source 1..1766: mol_type = unassigned DNA
gagaagtgctcctgccctggagagaggctcagcacagaaggaggaaggacagcacagcctacagccgtgctcaggaagtttctggatcctaggctcagctccacagaggagaacacgcaggcgcagagaccatggggcccctctcagcccctccctgcacacagcacatcacctggaaggggctcctgctcacagcatcacttttaaacttctggaacctgcctatcactgctcaagtcacgattgaagccctgccacccaaagtttccgaggggaaggatgttcttctacttgtccacaatttgcctcagaatcttgctggctacatctggtacaaaggacaactgatggacctctaccattacattacatcatatgtagtagacggtcaaataaatatatatgggcctgcatacactggacgagaaacagtatattccaatgcatccctgctgatccagaatgtcacccgggaagacgcaggatcctacaccttacacatcataaagcgaggtgataggactagaggagtaactggatatttcaccttcaacttatacctgaagctgcccaagccctacatcaccatcaacaactcaaaacccagggagaataaggatgtcttagccttcacctgtgaacctaagagtgagaactacacctacatttggtggctaaatggtcagagcctcccggtcagtcccagggtaaagcgacccattgaaaacaggatcctcattctacccagtgtcacgagaaatgaaacaggaccctatgaatgtgaaatacgggaccgagatggtggcatgcgcagtgacccagtcaccctgaatgtcctctatggtccagacctccccagcatttacccttcattcacctattaccgttcaggagaaaacctctacttgtcctgcttcgcggaatctaacccaccggcagagtatttttggacaattaatgggaagtttcagcaatcaggacaaaagctctctatcccccaaattactacaaagcatagagggctctatacttgctctgttcgtaactcagctactggcaaggaaagctccaaatccatgacagtcgaagtctctgctccttcaggaataggacgtcttcctctccttaatccaatatagcagccgtgaagtcatttctgtatttcaggaagactggcagatggagtttcgctcttgttgcccatgctggagtgcaatggcacaatcttggctcaccgcaacctccgcctcctgtgttcaagtgattctcctgcttcagcctcccgagtactgggattacaggcatgcaccaacacgcccagctaattttgtattttcagtagagacagggtgtcttcatgttggtcaggctggtctcaaactcccgacctcaggtgatccgtacgcctcagcctctcaaagtactgggattacaggcctgagccaccgcacctggcccacacatttttacataccaagagatcctttaatccacccaaaggctgacgttagctgcatctgtaacacaactttttcctcaaatatatggagttttttttaggcttccacttctatacttccctattctcactccctgttttaatttaacatagacatgcaatgctagataatagaattgctctctaccagctgaacatttgggagcctgtgcagtttctggcccttcttgttgcacatagataaatacatccggtgttatagagactcagttgtaaaaatcaataaatgtgctgcctggttaaaatg

SEQ ID NO: 23509 - DNA, 1526 bp, Homo sapiens
  source 1..1526: mol_type = unassigned DNA
ggacagcacagcctacagccgtgctcaggaagtttctggatcctaggctcagctccacagaggagaacacgcaggcgcagagaccatggggcccctctcagcccctccctgcacacagcacatcacctggaaggggctcctgctcacagcatcacttttaaacttctggaacctgcctatcactgctcaagtcacgattgaagccctgccacccaaagtttccgaggggaaggatgttcttctacttgtccacaatttgcctcagaatcttgctggctacatctggtacaaaggacaactgatggacctctaccattacattacatcatatgtagtagacggtcaaataaatatatatgggcctgcatacactggacgagaaacagtatattccaatgcatccctgctgatccagaatgtcacccgggaagacgcaggatcctacaccttacacatcataaagcgaggtgataggactagaggagtaactggatatttcaccttcaacttatacctgaagctgcccaagccctacatcaccatcaacaactcaaaacccagggagaataaggatgtcttagccttcacctgtgaacctaagagtgagaactacacctacatttggtggctaaatggtcagagcctcccggtcagtcccagggtaaagcgacccattgaaaacaggatcctcattctacccagtgtcacgagaaatgaaacaggaccctatgaatgtgaaatacgggaccgagatggtggcatgcgcagtgacccagtcaccctgaatgtcctctatggtccagacctccccagcatttacccttcattcacctattaccgttcaggagaaaacctctacttgtcctgcttcgcggaatctaacccaccggcagagtatttttggacaattaatgggaagtttcagcaatcaggacaaaagctctctatcccccaaattactacaaagcatagagggctctatacttgctctgttcgtaactcagctactggcaaggaaagctccaaatccatgacagtcgaagtctctgctccttcaggaataggacgtcttcctctccttaatccaatatagcagccgtgaagtcatttctgtatttcaggaagactggcaggagatttatggaaaagactctgacaaggactcttgaatacaagttcctgataacttcaagatcataccactggactaagaactttcaaaattttaatgaacaggctgataccttcatgaaattctagacaaagaagaaaaaaactccatgttattggactaaataatcaaaagcataatgttttcataattttctatttgaaaatgtgctgattctttgaatgttttattctccagatttatgaactttttttcttgagcaattggtaaagtatacttttgtaaacaaaaattgaaacatttgcttttgctctctatctgagtgccccagaattgggaaactattcatgagtattcatatgtttatggtaataaagttatctgcacaagttca

SEQ ID NO: 23510 - DNA, 1674 bp, Homo sapiens
  source 1..1674: mol_type = unassigned DNA
ctgctcaggaagtctctggatcctaggctcatctccacaggggagaacacacagacagcagagaccatgggacccctctcagcccctccctgcactcagcacatcacctggaaggggctcctgctcacagcatcacttttaaacttctggaacctgcccaccactgcccaagtaataattgaagccaagccacccaaagtttccgaggggaaggatgttcttctacttgtccacaatttgccccagaatcttactggctacatctggtacaaagggcaaatgacggacctctaccattacattacatcatatgtagtacacggtcaaattatatatgggcctgcctacagtggacgagaaacagtatattccaatgcatccctgctgatccagaatgtcacacaggaggatgcaggatcctacaccttacacatcataaagcgaggcgatgggactggaggagtaactggatatttcactgtcaccttatactcggagactcccaagccctccatctccagcagcaacttaaaccccagggaggtcatggaggctgtgcgcttaatctgtgatcctgagactccggatgcaagctacctgtggttgctgaatggtcagaacctccctatgactcacaggttgcagctgtccaaaaccaacaggaccctctatctatttggtgtcacaaagtatattgcaggaccctatgaatgtgaaatacggaacccagtgagtgccagccgcagtgacccagtcaccctgaatctcctcccgaagctgcccatgccttacatcaccatcaacaacttaaaccccagggagaagaaggatgtgttagccttcacctgtgaacctaagagtcggaactacacctacatttggtggctaaatggtcagagcctcccggtcagtccgagggtaaagcgacccattgaaaacaggatactcattctacccagtgtcacgagaaatgaaacaggaccctatcaatgtgaaatacgggaccgatatggtggcatccgcagtaacccagtcaccctgaatgtcctctatggtccagacctccccagaatttacccttcattcacctattaccgttcaggagaaaacctcgacttgtcctgctttgcggactctaacccaccggcagagtattcttggacaattaatgggaagtttcagctatcaggacaaaagctctttatcccccaaattactacaaatcatagcgggctctatgcttgctctgttcgtaactcagccactggcaaggaaatctccaaatccatgatagtcaaagtctctggtccctgccatggaaaccagacagagtctcattaatggctgccacaatagagacactgagaaaaagaacaggttgataccttcatgaaattcaagacaaagaagaaaaaaactcaatgttattggactaaataatcaaaaggataatgttttcataattttttattggaaaatgtgctgattcttggaatgttttattctccagatttatgaactttttttcttcagcaattggtaaagtatacttttgtaaacaaaaattgaaacatttgcttttgctctctatctgagtgccccagaattgggaaactattcatgagtattcataggtttatggtaataaagttatttgcacaagttcagtaagaa

SEQ ID NO: 23511 - DNA, 1391 bp, Homo sapiens
  source 1..1391: mol_type = unassigned DNA
cctaggctcatctccacaggggagaacacacagacagcagagaccatgggacccctctcagcccctccctgcactcagcacatcacctggaaggggctcctgctcacagcatcacttttaaacttctggaacctgcccaccactgcccaagtaataattgaagccaagccacccaaagtttccgaggggaaggatgttcttctacttgtccacaatttgccccagaatcttactggctacatctggtacaaagggcaaatgacggacctctaccattacattacatcatatgtagtacacggtcaaattatatatgggcctgcctacagtggacgagaaacagtatattccaatgcatccctgctgatccagaatgtcacacaggaggatgcaggatcctacaccttacacatcataaagcgaggcgatgggactggaggagtaactggatatttcactgtcaccttatactcggagactcccaagccctccatctccagcagcaacttaaaccccagggaggtcatggaggctgtgcgcttaatctgtgatcctgagactccggatgcaagctacctgtggttgctgaatggtcagaacctccctatgactcacaggttgcagctgtccaaaaccaacaggaccctctatctatttggtgtcacaaagtatattgcaggaccctatgaatgtgaaatacggaacccagtgagtgccagccgcagtgacccagtcaccctgaatctcctcccgaagctgcccatgccttacatcaccatcaacaacttaaaccccagggagaagaaggatgtgttagccttcacctgtgaacctaagagtcggaactacacctacatttggtggctaaatggtcagagcctcccggtcagtccgagggtaaagcgacccattgaaaacaggatactcattctacccagtgtcacgagaaatgaaacaggaccctatcaatgtgaaatacgggaccgatatggtggcatccgcagtaacccagtcaccctgaatgtcctctatggtccagacctccccagaatttacccttcattcacctattaccgttcaggagaaaacctcgacttgtcctgctttgcggactctaacccaccggcagagtattcttggacaattaatgggaagtttcagctatcaggacaaaagctctttatcccccaaattactacaaatcatagcgggctctatgcttgctctgttcgtaactcagccactggcaaggaaatctccaaatccatgatagtcaaagtctctgagacagcatctccccaggttacctatgctggtccaaacacctggtttcaagaaatccttctgctgtgacctcccaaagtgctaggattaaaacatgacccaccatg

SEQ ID NO: 23512 - DNA, 1752 bp, Homo sapiens
  source 1..1752: mol_type = unassigned DNA
cagaaggaggcaggacagcactgctgagagctgtgctcaggaagcttctggatcctaggctcatctccacagaggagaacacacagacagcagagaccatggggctcctctcagcccctccctgcacacagcgcatcacctggaaggggctcctgctcacagcatcacttttaaacttctggaacccacccacgactgcccaagtcacgattgaagcccagccaaccaaagtttctgaggggaaggatgttcttctacttgtccacaatttgccccagaatcttactggctacatctggtacaaagggcaaatcagggacctctaccattacattacatcatatgtagtagacggtcaaataattatatatgggcctgcatacagtggacgagaaacaatatattccaatgcatccctgctgatccagaatgtcacccaggaagacgcaggatcctacaccttacacatcataatgggaggtgatgagaatagaggagtaactggacatttcaccttcaccttatatctggagactcccaagccctccatctccagcagcaaattaaaccccagggaggccatggaggctgtgagcttaacctgtgatcctgagactccggacgcaagctacctgtggtggatgaatggtcagagcctccctatgtctcacaggttgcagttgtctgaaaccaacaggaccctctttctattgggtgtcacaaagtacactgcaggaccctatgaatgtgaaatacggaacccagtgagtgccagccgcagtgacccattcaccctgaatctcctccatggtccagacctccccagaatttacccttcattcacctattaccgttcaggagaagtcctctacttgtcctgttctgcggactctaacccaccggcacagtattcttggacaattaatgggaagtttcagctatcaggacaaaagctctttatcccccaaattactacaaagcatagcgggctctatgcttgctctgttcgtaactcagccactggcaaggaaagctccaaatccatgacagtaaaagtctctgactggacattaccctgaattctactagttcctccaattccattttcttccatggaatcgctaagaaaaagacccactctgttccagaagccctataagctggaggtggacaactcaatgtaaatttcatgggaaaacccttgtacctgaagggtgagccactcagaactcactaaaatgttcgacaccataacaacagatgctcaaactgtaaaccaggacaacaagtggatgacttcacactgtggacagtttttcccaagatgtcagaacaagactccccatcatgatgaggctctcacccctcttaactgtccttgctcatgcctgcctctttcacttggcaggataatgcagtcattagaatttcacatgtagtagcttctgagggtaacaatagagtgtcagatatgtcatctcaacccaaacttttacataacatctcagggggaaatgtggctctctccaccttgcatacaggactcccaatagaaatgaacacagagatattgcccgtgtgtttgcagataagatggtttctatgaagaggtaggaaagctgaaattataatagagtcccctttaaatgcacattctgtggatggctctcgccatttcctaagagatacattgtaaaatgtgacagtaatactgattctagcagaataaaacatgtaccacatttgctaata

SEQ ID NO: 23513 - DNA, 1441 bp, Homo sapiens
  source 1..1441: mol_type = unassigned DNA
cagaaggaggcaggacagcactgctgagagctgtgctcaggaagcttctggatcctaggctcatctccacagaggagaacacacagacagcagagaccatggggctcctctcagcccctccctgcacacagcgcatcacctggaaggggctcctgctcacagcatcacttttaaacttctggaacccacccacgactgcccaagtcacgattgaagcccagccaaccaaagtttctgaggggaaggatgttcttctacttgtccacaatttgccccagaatcttactggctacatctggtacaaagggcaaatcagggacctctaccattacattacatcatatgtagtagacggtcaaataattatatatgggcctgcatacagtggacgagaaacaatatattccaatgcatccctgctgatccagaatgtcacccaggaagacgcaggatcctacaccttacacatcataatgggaggtgatgagaatagaggagtaactggacatttcaccttcaccttatatctggagactcccaagccctccatctccagcagcaaattaaaccccagggaggccatggaggctgtgagcttaacctgtgatcctgagactccggacgcaagctacctgtggtggatgaatggtcagagcctccctatgtctcacaggttgcagttgtctgaaaccaacaggaccctctttctattgggtgtcacaaagtacactgcaggaccctatgaatgtgaaatacggaacccagtgagtgccagccgcagtgacccattcaccctgaatctcctcccgaagctgcccaagccctacatcaccatcaacaacttaaaacccagggagaataaggatgtcttaaacttcacctgtgaacctaagagtgagaactacacctacatttggtggctaaatggtcagagcctcccggtcagtcccagggtaaagcgacccattgaaaacaggatcctcattctacccagtgtcacgagaaatgaaacaggaccctatcaatgtgaaataagggaccaatatggtggcatccgcagttacccagtcaccctgaatgtcctctatggtccagacctccccagaatttacccttcattcacctattaccgttcaggagaagtcctctacttgtcctgttctgcggactctaacccaccggcacagtattcttggacaattaatgggaagtttcagctatcaggacaaaagctctttatcccccaaattactacaaagcatagcgggctctatgcttgctctgttcgtaactcagccactggcaaggaaagctccaaatccatgacagtaaaagtctctggtaagcggatcccagtatccttggcaatagggatttaggtggagtctatctggccttcagggaagagtcaggaaaacatttttattcccagcctgcgtcc

SEQ ID NO: 23514 - DNA, 1379 bp, Homo sapiens
  source 1..1379: mol_type = unassigned DNA
cagaaggaggcaggacagcactgctgagagctgtgctcaggaagcttctggatcctaggctcatctccacagaggagaacacacagacagcagagaccatggggctcctctcagcccctccctgcacacagcgcatcacctggaaggggctcctgctcacagcatcacttttaaacttctggaacccacccacgactgcccaagtcacgattgaagcccagccaaccaaagtttctgaggggaaggatgttcttctacttgtccacaatttgccccagaatcttactggctacatctggtacaaagggcaaatcagggacctctaccattacattacatcatatgtagtagacggtcaaataattatatatgggcctgcatacagtggacgagaaacaatatattccaatgcatccctgctgatccagaatgtcacccaggaagacgcaggatcctacaccttacacatcataatgggaggtgatgagaatagaggagtaactggacatttcaccttcaccttatatctggagactcccaagccctccatctccagcagcaaattaaaccccagggaggccatggaggctgtgagcttaacctgtgatcctgagactccggacgcaagctacctgtggtggatgaatggtcagagcctccctatgtctcacaggttgcagttgtctgaaaccaacaggaccctctttctattgggtgtcacaaagtacactgcaggaccctatgaatgtgaaatacggaacccagtgagtgccagccgcagtgacccattcaccctgaatctcctcccgaagctgcccaagccctacatcaccatcaacaacttaaaacccagggagaataaggatgtcttaaacttcacctgtgaacctaagagtgagaactacacctacatttggtggctaaatggtcagagcctcccggtcagtcccagggtaaagcgacccattgaaaacaggatcctcattctacccagtgtcacgagaaatgaaacaggaccctatcaatgtgaaataagggaccaatatggtggcatccgcagttacccagtcaccctgaatgtcctctatggtccagacctccccagaatttacccttcattcacctattaccgttcaggagaagtcctctacttgtcctgttctgcggactctaacccaccggcacagtattcttggacaattaatgggaagtttcagctatcaggacaaaagctctttatcccccaaattactacaaagcatagcgggctctatgcttgctctgttcgtaactcagccactggcaaggaaagctccaaatccatgacagtaaaagtctctgcttatagcagttcaataaactataccgcagtttattga

SEQ ID NO: 23515 - DNA, 2031 bp, Homo sapiens
  source 1..2031: mol_type = unassigned DNA
agaaggaggcaggacagcactgctgagagctgtgctcaggaagcttctggatcctaggctcatctccacagaggagaacacacagacagcagagaccatggggctcctctcagcccctccctgcacacagcgcatcacctggaaggggctcctgctcacagcatcacttttaaacttctggaacccacccacgactgcccaagtcacgattgaagcccagccaaccaaagtttctgaggggaaggatgttcttctacttgtccacaatttgccccagaatcttactggctacatctggtacaaagggcaaatcagggacctctaccattacattacatcatatgtagtagacggtcaaataattatatatgggcctgcatacagtggacgagaaacaatatattccaatgcatccctgctgatccagaatgtcacccaggaagacgcaggatcctacaccttacacatcataatgggaggtgatgagaatagaggagtaactggacatttcaccttcaccttatatctggagactcccaagccctccatctccagcagcaaattaaaccccagggaggccatggaggctgtgagcttaacctgtgatcctgagactccggacgcaagctacctgtggtggatgaatggtcagagcctccctatgtctcacaggttgcagttgtctgaaaccaacaggaccctctttctattgggtgtcacaaagtacactgcaggaccctatgaatgtgaaatacggaacccagtgagtgccagccgcagtgacccattcaccctgaatctcctcccgaagctgcccaagccctacatcaccatcaacaacttaaaacccagggagaataaggatgtcttaaacttcacctgtgaacctaagagtgagaactacacctacatttggtggctaaatggtcagagcctcccggtcagtcccagggtaaagcgacccattgaaaacaggatcctcattctacccagtgtcacgagaaatgaaacaggaccctatcaatgtgaaataagggaccaatatggtggcatccgcagttacccagtcaccctgaatgtcctctatggtccagacctccccagaatttacccttcattcacctattaccgttcaggagaagtcctctacttgtcctgttctgcggactctaacccaccggcacagtattcttggacaattaatgggaagtttcagctatcaggacaaaagctctttatcccccaaattactacaaagcatagcgggctctatgcttgctctgttcgtaactcagccactggcaaggaaagctccaaatccatgacagtaaaagtctctgactggacattaccctgaattctactagttcctccaattccattttcttccatggaatcgctaagaaaaagacccactctgttccagaagccctataagctggaggtggacaactcaatgtaaatttcatgggaaaacccttgtacctgaagggtgagccactcagaactcactaaaatgttcgacaccataacaacagatgctcaaactgtaaaccaggacaacaagtggatgacttcacactgtggacagtttttcccaagatgtcagaacaagactccccatcatgatgaggctctcacccctcttaactgtccttgctcatgcctgcctctttcacttggcaggataatgcagtcattagaatttcacatgtagtagcttctgagggtaacaatagagtgtcagatatgtcatctcaacccaaacttttacataacatctcagggggaaatgtggctctctccaccttgcatacaggactcccaatagaaatgaacacagagatattgcccgtgtgtttgcagataagatggtttctatgaagaggtaggaaagctgaaattataatagagtcccctttaaatgcacattctgtggatggctctcgccatttcctaagagatacattgtaaaatgtgacagtaatactgattctagcagaataaaacatgtaccacatttgctaatac

SEQ ID NO: 23516 - DNA, 1610 bp, Homo sapiens
  source 1..1610: mol_type = unassigned DNA
gcactgctgagagctgtgctcaggaagcttctggatcctaggctcatctccacagaggagaacacacagacagcagagaccatggggctcctctcagcccctccctgcacacagcgcatcacctggaaggggctcctgctcacagtggagactcccaagccctccatctccagcagcaaattaaaccccagggaggccatggaggctgtgagcttaacctgtgatcctgagactccggacgcaagctacctgtggtggatgaatggtcagagcctccctatgtctcacaggttgcagttgtctgaaaccaacaggaccctctttctattgggtgtcacaaagtacactgcaggaccctatgaatgtgaaatacggaacccagtgagtgccagccgcagtgacccattcaccctgaatctcctcccgaagctgcccaagccctacatcaccatcaacaacttaaaacccagggagaataaggatgtcttaaacttcacctgtgaacctaagagtgagaactacacctacatttggtggctaaatggtcagagcctcccggtcagtcccagggtaaagcgacccattgaaaacaggatcctcattctacccagtgtcacgagaaatgaaacaggaccctatcaatgtgaaataagggaccaatatggtggcatccgcagttacccagtcaccctgaatgtcctctatggtccagacctccccagaatttacccttcattcacctattaccgttcaggagaagtcctctacttgtcctgttctgcggactctaacccaccggcacagtattcttggacaattaatgggaagtttcagctatcaggacaaaagctctttatcccccaaattactacaaagcatagcgggctctatgcttgctctgttcgtaactcagccactggcaaggaaagctccaaatccatgacagtaaaagtctctgactggacattaccctgaattctactagttcctccaattccattttcttccatggaatcgctaagaaaaagacccactctgttccagaagccctataagctggaggtggacaactcaatgtaaatttcatgggaaaacccttgtacctgaagggtgagccactcagaactcactaaaatgttcgacaccataacaacagatgctcaaactgtaaaccaggacaacaagtggatgacttcacactgtggacagtttttcccaagatgtcagaacaagactccccatcatgatgaggctctcacccctcttaactgtccttgctcatgcctgcctctttcacttggcaggataatgcagtcattagaatttcacatgtagtagcttctgagggtaacaatagagtgtcagatatgtcatctcaacccaaacttttacataacatctcagggggaaatgtggctctctccaccttgcatacaggactcccaatagaaatgaacacagagatattgcccgtgtgtttgcagataagatggtttctatgaagaggtaggaaagctgaaattataatagagtcccctttaaatgcacattctgtggatggctctcgccatttcctaagagatacattgtaaaatgtgacagtaatactg

SEQ ID NO: 23517 - DNA, 2073 bp, Homo sapiens
  source 1..2073: mol_type = unassigned DNA
cgtgctcagacagcttctggatcccaggctcatctccacagaggagaacacacaggcagcagagaccatggggcccctcccagccccttcctgcacacagcgcatcacctggaaggggctcctgctcacagcatcacttttaaacttctggaacccgcccaccactgccgaagtcacgattgaagcccagccacccaaagtttctgaggggaaggatgttcttctacttgtccacaatttgccccagaatcttcctggctacttctggtacaaaggggaaatgacggacctctaccattacattatatcgtatatagttgatggtaaaataattatatatgggcctgcatacagtggaagagaaacagtatattccaacgcatccctgctgatccagaatgtcacccggaaggatgcaggaacctacaccttacacatcataaagcgaggtgatgagactagagaagaaattcgacatttcaccttcaccttatacttggagactcccaagccctacatctccagcagcaacttaaaccccagggaggccatggaggctgtgcgcttaatctgtgatcctgagactctggacgcaagctacctatggtggatgaatggtcagagcctccctgtgactcacaggttgcagctgtccaaaaccaacaggaccctctatctatttggtgtcacaaagtatattgcaggaccctatgaatgtgaaatacggaacccagtgagtgccagtcgcagtgacccagtcaccctgaatctcctccatggtccagacctccccagaatttacccttcattcacctattaccgttcaggagaaaacctcgacttgtcctgcttcacggaatctaacccaccggcagagtatttttggacaattaatgggaagtttcagcaatcaggacaaaagctctttatcccccaaattactagaaatcatagcgggctctatgcttgctctgttcataactcagccactggcaaggaaatctccaaatccatgacagtcaaagtctctggtaagtggatcccagcatccttggcagtagggttttatgtggagtctatctggctttcagagaagagtcaggaaaacatttttattcccagcctgtgtcccatgggcacaagcaaatcccaaattctcctcctgaaccctcccaatttgtctctacagactctcttctccttgtttttctgttttcttatggctgaccttgtgtctggcctgaaaaaggtagggagggggctttatcagccctgagccctatgtggtagaagaggcttcagagagggacaagaaggagagtcctcaagatcaagttgcttctcgctgtcaccgacacatccccttctgccacgtcttttttttcttgtacctattccatgagctacaagggacagctgaggctttgaaacaagctcacacttttcccccagatgagaggaggaagccccttgggtgagggaggagcagctcagactctgcttcctgctctgctccgggctcctctggtgactggccctgcctcactcaacctggggtgggactagcgtgtgtgtagaaagggccctggtggcctgtcctgaatttggctaaattgagctgccagttgaagccaagcctcccccgggccaggctgcagggaaataagaagagagggagcctcagggcagactcctgagctgcgtcctggctctgaagtcaccagctgtatgaggctttgggcacagcacgtgggacacagcacggaggacagtgactgatgcagagctggaggaatagggagattcaccgttggggttattcatggcaggaaaggggcagtgccaaaaagtgtgtaattatagagagggtaagactaccagacactttatatatatctaatataagacttaccattaactatttctatgtgtgcaatttagtgttgtgtaaccatcacactatccatttccagaactttttcctcttaccatattaaacctctgtacccaataaacagtaactctcactccttcttcccctaacccttagcacccatcattctactttgtctc

SEQ ID NO: 23518 - DNA, 1705 bp, Homo sapiens
  source 1..1705: mol_type = unassigned DNA
agaaggaggaaggacagcacagctgacagccgtgctcagacagcttctggatcccaggctcatctccacagaggagaacacacaggcagcagagaccatggggcccctcccagccccttcctgcacacagcgcatcacctggaaggggctcctgctcacagcatcacttttaaacttctggaacccgcccaccactgccgaagtcacgattgaagcccagccacccaaagtttctgaggggaaggatgttcttctacttgtccacaatttgccccagaatcttcctggctacttctggtacaaaggggaaatgacggacctctaccattacattatatcgtatatagttgatggtaaaataattatatatgggcctgcatacagtggaagagaaacagtatattccaacgcatccctgctgatccagaatgtcacccggaaggatgcaggaacctacaccttacacatcataaagcgaggtgatgagactagagaagaaattcgacatttcaccttcaccttatacttggagactcccaagccctacatctccagcagcaacttaaaccccagggaggccatggaggctgtgcgcttaatctgtgatcctgagactctggacgcaagctacctatggtggatgaatggtcagagcctccctgtgactcacaggttgcagctgtccaaaaccaacaggaccctctatctatttggtgtcacaaagtatattgcaggaccctatgaatgtgaaatacggaacccagtgagtgccagtcgcagtgacccagtcaccctgaatctcctcccgaagctgcccatcccctacatcaccatcaacaacttaaaccccagggagaataaggatgtcttagccttcacctgtgaacctaagagtgagaactacacctacatttggtggctaaacggtcagagcctccccgtcagtcccggggtaaagcgacccattgaaaacaggatactcattctacccagtgtcacgagaaatgaaacaggaccctatcaatgtgaaatacgggaccgatatggtggcctccgcagtaacccagtcatcctaaatgtcctctatggtccagacctccccagaatttacccttcattcacctattaccgttcaggagaaaacctcgacttgtcctgcttcacggaatctaacccaccggcagagtatttttggacaattaatgggaagtttcagcaatcaggacaaaagctctttatcccccaaattactagaaatcatagcgggctctatgcttgctctgttcataactcagccactggcaaggaaatctccaaatccatgacagtcaaagtctctggtccctgccatggagacctgacagagtctcagtcatgactgcaacaactgagacactgagaaaaagaacaggctgataccttcatgaaattcaagacaaagaagaaaaaaactcaatgttattggactaaataatcaaaaggataatgttttcataattttttattggaaaatgtgctgattctttgaatgttttattctccagatttatgaactttttttcttcagcaattggtaaagtatacttttgtaaacaaaaattgaaatatttgcttttgctgtctatctgaatgccccagaattgtgaaactattcatgagtattcataggtttatggtaataaagttatttgcacatgttccgtaa

SEQ ID NO: 23519 - DNA, 1148 bp, Homo sapiens
  source 1..1148: mol_type = unassigned DNA
acagaaggaggaaggacagcacagctgacagccgtgctcagacagcttctggatcccaggctcatctccacagaggagaacacacaggcagcagagaccatggggcccctcccagccccttcctgcacacagcgcatcacctggaaggggctcctgctcacagcatcacttttaaacttctggaacccgcccaccactgccgaagtcacgattgaagcccagccacccaaagtttctgaggggaaggatgttcttctacttgtccacaatttgccccagaatcttcctggctacttctggtacaaaggggaaatgacggacctctaccattacattatatcgtatatagttgatggtaaaataattatatatgggcctgcatacagtggaagagaaacagtatattccaacgcatccctgctgatccagaatgtcacccggaaggatgcaggaacctacaccttacacatcataaagcgaggtgatgagactagagaagaaattcgacatttcaccttcaccttatactatggtccagacctccccagaatttacccttcattcacctattaccgttcaggagaaaacctcgacttgtcctgcttcacggaatctaacccaccggcagagtatttttggacaattaatgggaagtttcagcaatcaggacaaaagctctttatcccccaaattactagaaatcatagcgggctctatgcttgctctgttcataactcagccactggcaaggaaatctccaaatccatgacagtcaaagtctctggtccctgccatggagacctgacagagtctcagtcatgactgcaacaactgagacactgagaaaaagaacaggctgataccttcatgaaattcaagacaaagaagaaaaaaactcaatgttattggactaaataatcaaaaggataatgttttcataattttttattggaaaatgtgctgattctttgaatgttttattctccagatttatgaactttttttcttcagcaattggtaaagtatacttttgtaaacaaaaattgaaatatttgcttttgctgtctatctgaatgccccagaattgtgaaactattcatgagtattcataggtttatggtaataaagttatttgcacatgttccgta

SEQ ID NO: 23520 - DNA, 1389 bp, Homo sapiens
  source 1..1389: mol_type = unassigned DNA
aaggaggaaggacagcacagctgacagccgtgctcagacagcttctggatcccaggctcatctccacagaggagaacacacaggcagcagagaccatggggcccctcccagccccttcctgcacacagcgcatcacctggaaggggctcctgctcacagcatcacttttaaacttctggtacaaaggggaaatgacggacctctaccattacattatatcgtatatagttgatggtaaaataattatatatgggcctgcatacagtggaagagaaacagtatattccaacgcatccctgctgatccagaatgtcacccggaaggatgcaggaacctacaccttacacatcataaagcgaggtgatgagactagagaagaaattcgacatttcaccttcaccttatacttggagactcccaagccctacatctccagcagcaacttaaaccccagggaggccatggaggctgtgcgcttaatctgtgatcctgagactctggacgcaagctacctatggtggatgaatggtcagagcctccctgtgactcacaggttgcagctgtccaaaaccaacaggaccctctatctatttggtgtcacaaagtatattgcaggaccctatgaatgtgaaatacggaacccagtgagtgccagtcgcagtgacccagtcaccctgaatctcctcccgaagctgcccatcccctacatcaccatcaacaacttaaaccccagggagaataaggatgtcttagccttcacctgtgaacctaagagtgagaactacacctacatttggtggctaaacggtcagagcctccccgtcagtcccggggtaaagcgacccattgaaaacaggatactcattctacccagtgtcacgagaaatgaaacaggaccctatcaatgtgaaatacgggaccgatatggtggcctccgcagtaacccagtcatcctaaatgtcctctatggtccagacctccccagaatttacccttcattcacctattaccgttcaggagaaaacctcgacttgtcctgcttcacggaatctaacccaccggcagagtatttttggacaattaatgggaagtttcagcaatcaggacaaaagctctttatcccccaaattactagaaatcatagcgggctctatgcttgctctgttcataactcagccactggcaaggaaatctccaaatccatgacagtcaaagtctctggtccctgccatggagacctgacagagtctcagtcatgactgcaacaactgagacactgagaaaaagaacaggctgataccttcatgaaattcaagacaaagaagaaaaaaactcaatgttattggactaaataatcaaaaggataatgttttcataattttttattgg

SEQ ID NO: 23521 - DNA, 1398 bp, Homo sapiens
  source 1..1398: mol_type = unassigned DNA
agaaggaggaaggacagcacagctgacagccgtgctcagacagcttctggatcccaggctcatctccacagaggagaacacacaggcagcagagaccatggggcccctcccagccccttcctgcacacagcgcatcacctggaaggggctcctgctcacagcatcacttttaaacttctggaacccgcccaccactgccgaagtcacgattgaagcccagccacccaaagtttctgaggggaaggatgttcttctacttgtccacaatttgccccagaatcttcctggctacttctggtacaaaggggaaatgacggacctctaccattacattatatcgtatatagttgatggtaaaataattatatatgggcctgcatacagtggaagagaaacagtatattccaacgcatccctgctgatccagaatgtcacccggaaggatgcaggaacctacaccttacacatcataaagcgaggtgatgagactagagaagaaattcgacatttcaccttcaccttatactcgaagctgcccatcccctacatcaccatcaacaacttaaaccccagggagaataaggatgtcttagccttcacctgtgaacctaagagtgagaactacacctacatttggtggctaaacggtcagagcctccccgtcagtcccggggtaaagcgacccattgaaaacaggatactcattctacccagtgtcacgagaaatgaaacaggaccctatcaatgtgaaatacgggaccgatatggtggcctccgcagtaacccagtcatcctaaatgtcctctatggtccagacctccccagaatttacccttcattcacctattaccgttcaggagaaaacctcgacttgtcctgcttcacggaatctaacccaccggcagagtatttttggacaattaatgggaagtttcagcaatcaggacaaaagctctttatcccccaaattactagaaatcatagcgggctctatgcttgctctgttcataactcagccactggcaaggaaatctccaaatccatgacagtcaaagtctctggtccctgccatggagacctgacagagtctcagtcatgactgcaacaactgagacactgagaaaaagaacaggctgataccttcatgaaattcaagacaaagaagaaaaaaactcaatgttattggactaaataatcaaaaggataatgttttcataattttttattggaaaatgtgctgattctttgaatgttttattctccagatttatgaactttttttcttcagcaattggtaaagtatacttttgtaaacaaaaattgaaatatttgcttttgctgtctatctgaatgccccagaattgtgaaactattcatgagtattcataggtttatggt

SEQ ID NO: 23522 - DNA, 1508 bp, Homo sapiens
  source 1..1508: mol_type = unassigned DNA
ggggcgcgggcggggggcttggcgctgcggccactgcgcggcacgacgctgcggcacccgctccagacatgctgctgctgaagaaacacacggaggacatcagcagcgtctacgagatccgcgagaggctcggctcgggtgccttctccgaggtggtgctggcccaggagcggggctccgcacacctcgtggccctcaagtgcatccccaagaaggccctccggggcaaggaggccctggtggagaacgagatcgcagtgctccgtaggatcagtcaccccaacatcgtcgctctggaggatgtccacgagagcccttcccacctctacctggccatggaactggtgacgggtggcgagctgtttgaccgcatcatggagcgcggctcctacacagagaaggatgccagccatctggtgggtcaggtccttggcgccgtctcctacctgcacagcctggggatcgtgcaccgggacctcaagcccgaaaacctcctgtatgccacgccctttgaggactcgaagatcatggtctctgactttggactctccaaaatccaggctgggaacatgctaggcaccgcctgtgggacccctggatatgtggccccagagctcttggagcagaaaccctacgggaaggccgtagatgtgtgggccctgggcgtcatctcctacatcctgctgtgtgggtacccccccttctacgacgagagcgaccctgagctcttcagccagatcctgagggccagctatgagtttgactctcctttctgggatgacatctcagaatcagccaaagacttcatccggcaccttctggagcgagacccccagaagaggttcacctgccaacaggccttgcggcacctttggatctctggggacacagccttcgacagggacatcttaggctctgtcagtgagcagatccggaagaactttgctcggacacactggaagcgagccttcaatgccacctcgttcctgcgccacatccggaagctggggcagatcccagagggcgagggggcctctgagcagggcatggcccgccacagccactcaggcctccgtgctggccagccccccaagtggtgatgcccaggcagatgccgaggccaagtggactgacccccagatttccttcccttggatgctttcggtcccctcccccaacccctccccctggggctggcctctgctggattttgagatttgagggtgtggcgcatggcgctggggttggaatggggcacccccaagtctgtccccaggctctgccctgcctgggggcagtggctcccctcccctgttgcctctcccgcccctgccccccccgccccgccaaaagccgagggggtgctggcaggcgggcctcaggggctgtctttcctgcacggctgttgtgtgcttcgctgagtgtgggtggtcctgcttgtgtcatggtcatggccttccagccccctccagttttccccaaaccaataaagaaagatacagcaatgg

SEQ ID NO: 23523 - DNA, 1525 bp, Homo sapiens
  source 1..1525: mol_type = unassigned DNA
atgatctcaataaaaggaatgctctggctgctgggtagagaagaaagcgaggacatgctgctgctgaagaaacacacggaggacatcagcagcgtctacgagatccgcgagaggctcggctcgggtgccttctccgaggtggtgctggcccaggagcggggctccgcacacctcgtggccctcaagtgcatccccaagaaggccctccggggcaaggaggccctggtggagaacgagatcgcagtgctccgtaggatcagtcaccccaacatcgtcgctctggaggatgtccacgagagcccttcccacctctacctggccatggaactggtgacgggtggcgagctgtttgaccgcatcatggagcgcggctcctacacagagaaggatgccagccatctggtgggtcaggtccttggcgccgtctcctacctgcacagcctggggatcgtgcaccgggacctcaagcccgaaaacctcctgtatgccacgccctttgaggactcgaagatcatggtctctgactttggactctccaaaatccaggctgggaacatgctaggcaccgcctgtgggacccctggatatgccgagccagtgacactgagcggcatggctgcgtgtgtgcctgtgcgtgcgtctgtctgtctctggcccccagccccagagctcttggagcagaaaccctacgggaaggccgtagatgtgtgggccctgggcgtcatctcctacatcctgctgtgtgggtacccccccttctacgacgagagcgaccctgagctcttcagccagatcctgagggccagctatgagtttgactctcctttctgggatgacatctcagaatcagccaaagacttcatccggcaccttctggagcgagacccccagaagaggttcacctgccaacaggccttgcggcacctttggatctctggggacacagccttcgacagggacatcttaggctctgtcagtgagcagatccggaagaactttgctcggacacactggaagcgagccttcaatgccacctcgttcctgcgccacatccggaagctggggcagatcccagagggcgagggggcctctgagcagggcatggcccgccacagccactcaggcctccgtgctggccagccccccaagtggtgatgcccaggcagatgccgaggccaagtggactgacccccagatttccttcccttggatgctttcggtcccctcccccaacccctccccctggggctggcctctgctggattttgagatttgagggtgtggcgcatggcgctggggttggaatggggcacccccaagtctgtccccaggctctgccctgcctgggggcagtggctcccctcccctgttgcctctcccgcccctgccccccccgccccgccaaaagccgagggggtgctggcaggcgggcctcaggggctgtctttcctgcacggctgttgtgtgcttcgctgagtgtgggtggtcctgcttgtgtcatggtcatggccttccagccccctcc

SEQ ID NO: 23524 - DNA, 1455 bp, Homo sapiens
  source 1..1455: mol_type = unassigned DNA
agcagctgtaggcctgggatgtggaggcgtgtatgcggtggcctcgctgggaggcgtccgtctggggacatgctgctgctgaagaaacacacggaggacatcagcagcgtctacgagatccgcgagaggctcggctcgggtgccttctccgaggtggtgctggcccaggagcggggctccgcacacctcgtggccctcaagtgcatccccaagaaggccctccggggcaaggaggccctggtggagaacgagatcgcagtgctccgtaggatcagtcaccccaacatcgtcgctctggaggatgtccacgagagcccttcccacctctacctggccatggaactggtgacgggtggcgagctgtttgaccgcatcatggagcgcggctcctacacagagaaggatgccagccatctggtgggtcaggtccttggcgccgtctcctacctgcacagcctggggatcgtgcaccgggacctcaagcccgaaaacctcctgtatgccacgccctttgaggactcgaagatcatggtctctgactttggactctccaaaatccaggctgggaacatgctaggcaccgcctgtgggacccctggatatgtggccccagagctcttggagcagaaaccctacgggaaggccgtagatgtgtgggccctgggcgtcatctcctacatcctgctgtgtgggtacccccccttctacgacgagagcgaccctgagctcttcagccagatcctgagggccagctatgagtttgactctcctttctgggatgacatctcagaatcagccaaagacttcatccggcaccttctggagcgagacccccagaagaggttcacctgccaacaggccttgcggcacctttggatctctggggacacagccttcgacagggacatcttaggctctgtcagtgagcagatccggaagaactttgctcggacacactggaagcgagccttcaatgccacctcgttcctgcgccacatccggaagctggggcagatcccagagggcgagggggcctctgagcagggcatggcccgccacagccactcaggcctccgtgctggccagccccccaagtggtgatgcccaggcagatgccgaggccaagtggactgacccccagatttccttcccttggatgctttcggtcccctcccccaacccctccccctggggctggcctctgctggattttgagatttgagggtgtggcgcatggcgctggggttggaatggggcacccccaagtctgtccccaggctctgccctgcctgggggcagtggctcccctcccctgttgcctctcccgcccctgccccccccgccccgccaaaagccgagggggtgctggcaggcgggcctcaggggctgtctttcctgcacggctgttgtgtgcttcgctgagtgtgggtggtcctgcttgtgtcatggtcatgg

SEQ ID NO: 23525 - DNA, 1612 bp, Homo sapiens
  source 1..1612: mol_type = unassigned DNA
agcacacctgtcacgcctggcgcgccccctgcccgcacgcgctcggtccacgcagctcgggacgcgggcggcccaggctgccaggtccccctgctccgcggcgccgagggctgggctgcgtctgcggccgcgtgggtggccgcggtcttggcaggtggctgcgcgcgggggtcgcagacatgctgctgctgaagaaacacacggaggacatcagcagcgtctacgagatccgcgagaggctcggctcgggtgccttctccgaggtggtgctggcccaggagcggggctccgcacacctcgtggccctcaagtgcatccccaagaaggccctccggggcaaggaggccctggtggagaacgagatcgcagtgctccgtaggatcagtcaccccaacatcgtcgctctggaggatgtccacgagagcccttcccacctctacctggccatggaactggtgacgggtggcgagctgtttgaccgcatcatggagcgcggctcctacacagagaaggatgccagccatctggtgggtcaggtccttggcgccgtctcctacctgcacagcctggggatcgtgcaccgggacctcaagcccgaaaacctcctgtatgccacgccctttgaggactcgaagatcatggtctctgactttggactctccaaaatccaggctgggaacatgctaggcaccgcctgtgggacccctggatatgtggccccagagctcttggagcagaaaccctacgggaaggccgtagatgtgtgggccctgggcgtcatctcctacatcctgctgtgtgggtacccccccttctacgacgagagcgaccctgagctcttcagccagatcctgagggccagctatgagtttgactctcctttctgggatgacatctcagaatcagccaaagacttcatccggcaccttctggagcgagacccccagaagaggttcacctgccaacaggccttgcggcacctttggatctctggggacacagccttcgacagggacatcttaggctctgtcagtgagcagatccggaagaactttgctcggacacactggaagcgagccttcaatgccacctcgttcctgcgccacatccggaagctggggcagatcccagagggcgagggggcctctgagcagggcatggcccgccacagccactcaggcctccgtgctggccagccccccaagtggtgatgcccagatgccgaggccaagtggactgacccccagatttccttcccttggatgctttcggtcccctcccccaacccctccccctggggctggcctctgctggattttgagatttgagggtgtggcgcatggcgctggggttggaatggggcacccccaagtctgtccccaggctctgccctgcctgggggcagtggctcccctcccctgttgcctctcccgcccctgccccccccgccccgccaaaagccgagggggtgctggcaggcgggcctcaggggctgtctttcctgcacggctgttgtgtgcttcgctgagtgtgggtggtcctgcttgtgtcatggtcatggccttccagccccctccagttttccccaaaccaataaagaaagatacagcaa

SEQ ID NO: 23526 - DNA, 1939 bp, Homo sapiens
  source 1..1939: mol_type = unassigned DNA
gacttggattgacatagagagctgcaggagggtgacatgatctcaataaaaggaatgctctggctgctgggtagagaagaaagcgagggtgagggattaatggtggagccagagggagcccagtgagtgccgggagcccagggtggcagagctgtggtgcagggttgcagggtcctggagctaggcatggaggctgctttcgggcaagtggccgggtcagcctgtcctcggagaggcggtgaaggcagagactggaaggcagagagccttgccgacctgtggccgaagagctctccgggagacagccaccggtggtgcaaaggccctggggccggcccagccgggccgcagctccgggaggcggcgcgagcgagcagtgggctgggcggtggcggccggcacccgagccggatcccggcgattgccttacaagacatgctgctgctgaagaaacacacggaggacatcagcagcgtctacgagatccgcgagaggctcggctcgggtgccttctccgaggtggtgctggcccaggagcggggctccgcacacctcgtggccctcaagtgcatccccaagaaggccctccggggcaaggaggccctggtggagaacgagatcgcagtgctccgtaggatcagtcaccccaacatcgtcgctctggaggatgtccacgagagcccttcccacctctacctggccatggaactggtgacgggtggcgagctgtttgaccgcatcatggagcgcggctcctacacagagaaggatgccagccatctggtgggtcaggtccttggcgccgtctcctacctgcacagcctggggatcgtgcaccgggacctcaagcccgaaaacctcctgtatgccacgccctttgaggactcgaagatcatggtctctgactttggactctccaaaatccaggctgggaacatgctaggcaccgcctgtgggacccctggatatgccgagccagtgacactgagcggcatggctgcgtgtgtgcctgtgcgtgcgtctgtctgtctctggcccccagccccagagctcttggagcagaaaccctacgggaaggccgtagatgtgtgggccctgggcgtcatctcctacatcctgctgtgtgggtacccccccttctacgacgagagcgaccctgagctcttcagccagatcctgagggccagctatgagtttgactctcctttctgggatgacatctcagaatcagccaaagacttcatccggcaccttctggagcgagacccccagaagaggttcacctgccaacaggccttgcggcacctttggatctctggggacacagccttcgacagggacatcttaggctctgtcagtgagcagatccggaagaactttgctcggacacactggaagcgagccttcaatgccacctcgttcctgcgccacatccggaagctggggcagatcccagagggcgagggggcctctgagcagggcatggcccgccacagccactcaggcctccgtgctggccagccccccaagtggtgatgcccaggcagatgccgaggccaagtggactgacccccagatttccttcccttggatgctttcggtcccctcccccaacccctccccctggggctggcctctgctggattttgagatttgagggtgtggcgcatggcgctggggttggaatggggcacccccaagtctgtccccaggctctgccctgcctgggggcagtggctcccctcccctgttgcctctcccgcccctgccccccccgccccgccaaaagccgagggggtgctggcaggcgggcctcaggggctgtctttcctgcacggctgttgtgtgcttcgctgagtgtgggtggtcctgcttgtgtcatggtcatggccttccagccccctccagttttccccaaaccaataaagaaagatacagc

SEQ ID NO: 23527 - DNA, 561 bp, Homo sapiens
  source 1..561: mol_type = unassigned DNA
ctttctccccgctcctggcaggctgcagccgtctcctcccggtgctccctccttccttgagctctctccaccgctgcccactgggggctacagcttcccggctaccctggaagctggaggccgggaccagctcttcagacatgctgctgctgaagaaacacacggaggacatcagcagcgtctacgagatccgcgagaggctcggctcgggtgccttctccgaggtggtgctggcccaggagcggggctccgcacacctcgtggccctcaagtgcatccccaagaaggccctccggggcaaggaggccctggtggagaacgagatcgcagtgctccgtaggatcagtcaccccaacatcgtcgctctggaggatgtccacgagagcccttcccacctctacctggccatggaactgtgaggagggcctgggcaggctgtgggagccggggagggactgagcagtgagtggggctgaaggccaggctgagtgcctgggtcagccaaacccctggcacccccagggtgacgggtggcgagctgtttgaccgcatcatggagcg

SEQ ID NO: 23528 - DNA, 771 bp, Homo sapiens
  source 1..771: mol_type = unassigned DNA
ggctgaggcctgcctggcagggggtggaggaggaagctgcccttgcccccggcggggcggggagagacccccatcacctctcccctgcccctgcagacatgctgctgctgaagaaacacacggaggacatcagcagcgtctacgagatccgcgagaggctcggctcgggtgccttctccgaggtggtgctggcccaggagcggggctccgcacacctcgtggccctcaagtgcatccccaagaaggccctccggggcaaggaggccctggtggagaacgagatcgcagtgctccgtaggatcagtcaccccaacatcgtcgctctggaggatgtccacgagagcccttcccacctctacctggccatggaactggtgacgggtggcgagctgtttgaccgcatcatggagcgcggctcctacacagagaaggatgccagccatctggtgggtcaggtccttggcgccgtctcctacctgcacagcctggggatcgtgcaccgggacctcaagcccgaaaacctcctgtatgccacgccctttgaggactcgaagatcatggtctctgactttggactctccaaaatccaggctgggaacatgctaggcaccgcctgtgggacccctggatatgtggccccagagctcttggagcagaaaccctacgggaaggccgtagatgtgtgggccctgggcgtcatctcctacatcctgctgtgtgggtacccccccttctacgacgagagcgaccctgagctcttcagccagatcc

SEQ ID NO: 23529 - DNA, 448 bp, Homo sapiens
  source 1..448: mol_type = unassigned DNA
tctccccgctcctggcaggctgcagccgtctcctcccggtgctccctccttccttgagctctctccaccgctgcccactgggggctacagcttcccggctaccctggaagctggaggccgggaccagctcttcagggtcttctctggcccagcctttgactgaagctggtctggagacaggggcattagagaagtgactcatagatggcctaaagaagcggggccactcaaggacccaggacagagggaagagggccaacccagctggaccacaggcaaaccccattgcctttgagagaaagaagaggacccggtgaaacatgctgctgctgaagaaacacacggaggacatcagcagcgtctacgagatccgcgagaggctcggctcgggtgccttctccgaggtggtgctggcccaggagcggggctccgcacacctcgtggccct

SEQ ID NO: 23530 - DNA, 725 bp, Homo sapiens
  source 1..725: mol_type = unassigned DNA
ccccgctcctggcaggctgcagccgtctcctcccggtgctccctccttccttgagctctctccaccgctgcccactgggggctacagcttcccggctaccctggaagctggaggccgggaccagctcttcaggtgacaggcctctgtgtctccacagtgggcagaggggagcctgcctggctgatgagcaagcctcgactttgtcatcaaggcagagaaggggcccgggtaaatgaccccggcggcccccacccctgcctggcgtgagagtgggtaggggcttcggacttgaggggactggagcgggaacaaggcaaggctgccccctgcctttgactgaagctggtctggagacaggggcattagagaagtgactcatagatggcctaaagaagcggggccactcaaggacccaggacagagggaagagggccaacccagctggaccacaggcaaaccccattgcctttgagagaaagaagaggacccggtgaaacatgctgctgctgaagaaacacacggaggacatcagcagcgtctacgagatccgcgagaggctcggctcgggtgccttctccgaggtggtgctggcccaggagcggggctccgcacacctcgtggccctcaagtgcatccccaagaaggccctccggggcaaggaggccctggtggagaacgagatcgcagtgctccgtaggatcagtcaccccaacatcgtcgctctg

SEQ ID NO: 23531 - DNA, 311 bp, Homo sapiens
  source 1..311: mol_type = unassigned DNA
cggatgtgtggaggcagagaggcagcatccaggcgctggtcgccttcgggacatgctgctgctgaagaaacacacggaggacatcagcagcgtctacgagatccgcgagaggctcggctcgggtgccttctccgaggtggtgctggcccaggagcggggctccgcacacctcgtggccctcaagtgcatccccaagaaggccctccggggcaaggaggccctggtggagaacgagatcgcagtgctccgtaggatcagtcaccccaacatcgtcgctctggaggatgtccacgagagcccttcccacctct

SEQ ID NO: 23532 - DNA, 326 bp, Homo sapiens
  source 1..326: mol_type = unassigned DNA
gatctctggggacacagccttcgacagggacatcttaggctctgtcagtgagcagatccggaagaactttgctcggacacactggaagcgagccttcaatgccacctcgttcctgcgccacatccggaagctggggcagatcccagagggcgagggggcctctgagcagggcatggcccgccacagccactcaggcgggcctcaggggctgtctttcctgcacggctgttgtgtgcttcgctgagtgtgggtggtcctgcttgtgtcatggtcatggccttccagccccctccagttttccccaaaccaataaagaaagatacagc

SEQ ID NO: 23533 - DNA, 754 bp, Homo sapiens
  source 1..754: mol_type = unassigned DNA
ctggaaagcggccggatgtgtggaggcagagaggcagcatccaggcgctggtcgccttcggggtgcgggggaggacatgctgctgctgaagaaacacacggaggacatcagcagcgtctacgagatccgcgagaggctcggctcgggtgccttctccgaggtggtgctggcccaggagcggggctccgcacacctcgtggccctcaagtgcatccccaagaaggccctccggggcaaggaggccctggtggagaacgagatcgcagtgctccgtaggatcagtcaccccaacatcgtcgctctggaggatgtccacgagagcccttcccacctctacctggccatggaactggtgacgggtggcgagctgtttgaccgcatcatggagcgcggctcctacacagagaaggatgccagccatctggtgggtcaggtccttggcgccgtctcctacctgcacagcctggggatcgtgcaccgggacctcaagcccgaaaacctcctgtatgccacgccctttgaggactcgaagatcatggtctctgactttggactctccaaaatccaggctgggaacatgctaggcaccgcctgtgggacccctggatatgtggccccagagctcttggagcagaaaccctacgggaaggccgtagatgtgtgggccctgggcgtcatctcctacatcctgctgtgtgggtacccccccttctacgacgagagcgaccctgagctcttcagccagatcctgagg

SEQ ID NO: 23534 - DNA, 1585 bp, Homo sapiens
  source 1..1585: mol_type = unassigned DNA
gacttggattgacatagagagctgcaggagggtgacatgatctcaataaaaggaatgctctggctgctgggtagagaagaaagcgagggtgagggattaatggtggagccagagggagcccagtgagtgccgggagcccagggtggcagagctgtggtgcagggttgcagggtcctggagctaggcatggaggctgctttcgggcaagtggccgggtcagcctgtcctcggagaggcggtgaaggcagagactggaaggcagagagccttgccgacctgtggccgaagagctctccgggagacagccaccggtggtgcaaaggccctggggccggcccagccgggccgcagctccgggaggcggcgcgagcgagcagtgggctgggcggtggcggccggcacccgagccggatcccggcgattgccttacaagacatgctgctgctgaagaaacacacggaggacatcagcagcgtctacgagatccgcgagaggctcggctcgggtgccttctccgaggtggtgctggcccaggagcggggctccgcacacctcgtggccctcaagtgcatccccaagaaggccctccggggcaaggaggccctggtggagaacgagatcgcagtgctccgtaggatcagtcaccccaacatcgtcgctctggaggatgtccacgagagcccttcccacctctacctggccatggaactggtgacgggtggcgagctgtttgaccgcatcatggagcgcggctcctacacagagaaggatgccagccatctggtgggtcaggtccttggcgccgtctcctacctgcacagcctggggatcgtgcaccgggacctcaagcccgaaaacctcctgtatgccacgccctttgaggactcgaagatcatggtctctgactttggactctccaaaatccaggctgggaacatgctaggcaccgcctgtgggacccctggatatgtggccccagagctcttggagcagaaaccctacgggaaggccgtagatgtgtgggccctgggcgtcatctcctacatcctgctgtgtgggtacccccccttctacgacgagagcgaccctgagctcttcagccagatcctgagggccagctatgagtttgactctcctttctgggatgacatctcagaatcagccaaagacttcatccggcaccttctggagcgagacccccagaagaggttcacctgccaacaggccttgcggcacctttggatctctggggacacagccttcgacagggacatcttaggctctgtcagtgagcagatccggaagaactttgctcggacacactggaagcgagccttcaatgccacctcgttcctgcgccacatccggaagctggggcagatcccagagggcgagggggcctctgagcagggcatggcccgccacagccactcaggcctccgtgctggccagccccccaagtggtgatgcccaggcagatgccgaggccaagtggactgacccccagatttccttcccttggatgctttcggtcccctcccccaacccctccccctggggctggcctctgctggattttgagatt

SEQ ID NO: 23535 - DNA, 498 bp, Homo sapiens
  source 1..498: mol_type = unassigned DNA
ggaggcgcccggcccggccaccgagcggcagcggcggacgaggggcggccccgacccccgcgtgcccgggggccacccgttgcccggacttcacccctccgcggcggctccgggggtcgggcgggggccggcggcctgctgggggaggaggccgcggcgggcgggggaactcacctccgccgttcttgtagcacagacatgctgctgctgaagaaacacacggaggacatcagcagcgtctacgagatccgcgagaggctcggctcgggtgccttctccgaggtggtgctggcccaggagcggggctccgcacacctcgtggccctcaagtgcatccccaagaaggccctccggggcaaggaggccctggtggagaacgagatcgcagtgctccgtaggatcagtcaccccaacatcgtcgctctggaggatgtccacgagagcccttcccacctctacctggccatggaactgtgaggagggcctgggcaggctgtg

SEQ ID NO: 23536 - DNA, 10959 bp, Homo sapiens
  source 1..10959: mol_type = unassigned DNA
gggggagggaattcagcggatcagtcttaagaggagcttttttttggagcgagaaatcatataaaataaaatgaaataaaacaaggaggaaggcaaccagctgttaggggaaaaataaggcagataaaggagcggggagagaaattaattgccaaccaggaggagttgggctgtatttttcaaaggtggggagagtggagcacacaccttgaggaggaaagcgagaaagaaaagaaaaaagcaagtggaaaggggggctcgcccaagaagggtgaagaagcgaagaaagtcgaggcgccgaggctcccaaagctggcagctccgggtggcggtgcaggggcgaagggggggcggggggaaccgtcggacatgcggctctggagttgggtgctgcacctggggctgctgagcgccgcgctgggctgcgggctggccgagcgtccccgccgggcccggagagacccgcgggccggccgacccccgcgccccgccgccggcccggccacctgcgccacccgggcggcccgcggccgccgcgcctcgccgccgccgccgccgccgccgggcggtgcctgggaagccgtgcgcgtcccccggcggcggcagcagcgggaggcgaggggcgccaccgaggagccgagcccgccgagccgggcgctctatttcagcgggcgaggcgagcagctgcgcctccgggccgacctcgagctgccccgggacgcgttcacgctgcaagtgtggctgcgagcggaggggggccagaggtctccggcagtgatcacagggctgtatgacaaatgttcttatatctcacgtgaccgaggatgggtcgtgggcattcacaccatcagtgaccaagacaacaaagacccacgctactttttctccttgaagacagaccgagcccggcaagtgaccaccatcaatgcccaccgcagctacctcccaggccagtgggtatacctagctgccacctatgatgggcagttcatgaagctctatgtgaatggtgcccaggtggccacctctggggaacaagtgggtggcatattcagcccactgacccagaagtgcaaagtgctcatgttagggggcagtgccctgaatcacaactaccggggctacatcgagcacttcagtctgtggaaggtggccaggactcagcgggagatactgtctgacatggaaacccatggcgcccacactgctctacctcagctcctcctccaggagaactgggacaatgtgaagcatgcctggtcccccatgaaggatggcagcagccccaaagtggaattcagcaatgcccacggctttctgctggacacgagtctggagcctcctctgtgcggacagacattgtgtgacaacacagaggtcattgccagctacaatcagctctcaagtttccgccagcccaaggtggtgcgctaccgcgtggtcaacctctatgaagatgatcataagaacccgacggtgacgcgcgagcaggtggacttccagcaccatcagctggctgaggccttcaagcaatacaacatctcctgggagctggacgtgctggaggtgagcaactcctcccttcgccgccgcctcatcctggccaactgtgacatcagcaagattggggatgagaactgtgaccccgagtgcaaccacacgctgacgggccacgacggcggggattgccgccacctgcgccaccctgccttcgtgaagaagcagcacaacggggtgtgtgacatggactgcaactatgaacggttcaactttgatggtggagagtgctgtgaccctgaaatcaccaatgtcactcagacttgctttgaccccgactctccacacagagcctacttggatgttaatgagctgaagaacattcttaaattggatggatcaacacatctcaatattttctttgcaaaatcctcagaggaggagttggcaggagtagcaacttggccatgggacaaggaggccctgatgcacttaggtggcattgtcttgaacccatctttctatggcatgcctgggcacacccacaccatgatccatgagattggtcacagcctgggcctctatcacgtcttccgaggcatctcagaaatccagtcctgcagtgacccctgcatggagacagagccctccttcgagactggagacctctgcaatgataccaacccagcccctaaacacaagtcctgtggtgacccagggccaggaaatgacacctgtggctttcatagcttcttcaacactccttacaacaacttcatgagctatgcagatgacgactgtacggactccttcacgcccaatcaagtcgccagaatgcactgttacctggacctggtctaccagggctggcagccctccaggaaaccagcgcctgttgccctcgccccccaagttctgggccacacaacggactctgtgacactggagtggttcccacctatagatggccatttctttgaaagagaattgggatcagcatgtcatctttgcctggaagggagaatcctggtgcagtatgcttccaacgcttcctccccaatgccctgcagcccatcaggacactggagccctcgtgaagcagaaggtcatcctgatgttgaacagccctgtaagtccagtgtccgcacctggagcccaaattcagctgtcaacccacacacggttcctccagcctgccctgagcctcaaggctgctacctcgagctggagttcctctaccccttggtccctgagtctctgaccatttgggtgacctttgtctccactgactgggactctagtggagctgtcaatgacatcaaactgttggctgtcagtgggaagaacatctccctgggtcctcagaatgtcttctgtgatgtcccactgaccatcagactctgggacgtgggcgaggaggtgtatggcatccaaatctacacgctggatgagcacctggagatcgatgctgccatgttgacctccactgcagacaccccactctgtctacagtgtaagcccctgaagtataaggtggtccgggaccctcctctccagatggatgtggcctccatcctacatctcaataggaaattcgtagacatggatctaaatcttggcagtgtgtaccagtattgggtcataactatttcaggaactgaagagagtgagccatcacctgctgtcacatacatccatggaagtgggtactgtggcgatggcattatacaaaaagaccaaggtgaacaatgcgacgacatgaataagatcaatggtgatggctgctcccttttctgccgacaagaagtctccttcaattgtattgatgaacccagccggtgctatttccatgatggtgatggggtatgtgaggagtttgaacaaaaaaccagcattaaggactgtggtgtctacacgccccagggattcctggatcagtgggcatccaatgcttcagtatctcatcaagaccagcaatgcccaggctgggtcatcatcggacagccagcagcatcccaggtgtgtcgaaccaaggtgatagatctcagtgaaggcatttcccagcatgcctggtacccttgcaccatcagctacccatattcccagctggctcagaccactttttggctccgggcgtatttttctcaaccaatggttgccgcagctgtcattgtccacctggtgacggatgggacatattatggggaccaaaagcaggagaccatcagcgtgcagctgcttgataccaaagatcagagccacgatctaggcctccatgtcctgagctgcaggaacaatcccctgattatccctgtggtccatgacctcagccagcccttctaccacagccaggcggtacgtgtgagcttcagttcgcccctggtcgccatctcgggggtggccctccgttccttcgacaactttgaccccgtcaccctgagcagctgccagagaggggagacctacagccctgccgagcagagctgcgtgcacttcgcatgtgagaaaactgactgtccagagctggctgtggagaatgcttctctcaattgctccagcagcgaccgctaccacggtgcccagtgtactgtgagctgccggacaggctacgtgctccagatacggcgggatgatgagctgatcaagagccagacgggacccagcgtcacagtgacctgtacagagggcaagtggaataagcaggtggcctgtgagccagtcgactgcagcatcccagatcaccatcaagtctatgctgcctccttctcctgccctgagggcaccacctttggcagtcaatgttccttccagtgccgtcaccctgcacaattgaaaggcaacaacagcctcctgacctgcatggaggatgggctgtggtccttcccagaggccctgtgtgagctcatgtgcctcgctccaccccctgtgcccaatgcagacctccagaccgcccggtgccgagagaataagcacaaggtgggctccttctgcaaatacaaatgcaagcctggataccatgtgcctggatcctctcggaagtcaaagaaacgggccttcaagactcagtgtacccaggatggcagctggcaggagggagcttgtgttcctgtgacctgtgacccacctccaccaaaattccatgggctctaccagtgtactaatggcttccagttcaacagtgagtgtaggatcaagtgtgaagacagtgatgcctcccagggacttgggagcaatgtcattcattgccggaaagatggcacctggaacggctccttccatgtctgccaggagatgcaaggccagtgctcggttccaaacgagctcaacagcaacctcaaactgcagtgccctgatggctatgccatagggtcggagtgtgccacctcgtgcctggaccacaacagcgagtccatcatcctgccaatgaacgtgaccgtgcgtgacatcccccactggctgaaccccacacgggtagagagagttgtctgcactgctggtctcaagtggtatcctcaccctgctctgattcactgtgtcaaaggctgtgagcccttcatgggagacaattattgtgatgccatcaacaaccgagccttttgcaactatgacggtggggattgctgcacctccacagtgaagaccaaaaaggtcaccccattccctatgtcctgtgatctacaaggtgactgtgcttgtcgggacccccaggcccaagaacacagccggaaagacctccggggatacagccatggctaaggaaggacaagaagttgtcaaagaattcccaacgccaggacccacatccctttggtattgatttcacagtcagctgctcaacggaatggcctctccacaccagggatccttagcacccaaccggtctgcctttaattttacccaggaaggactcacattggggcgaatgaaccaagtttcgccatgctggatgatgaaatggattcccatcccaaagtctgagatggattgcatatacagtgtgcagtcccagagcctcctaaaattctagccatttgtcacacaaccacagcaagaaacgtgttctatatctagagtgtgcccatctgtgtttagtacacatgcatgcatacacacccatacaaacatctgtgtgagggcagttctggagatgagcagagagagaccggaataaactcaatcttttctttcccaagctcctagccaacactatccttgggagaaagaaatttgcagaaactgctaagaccaagtgtggagatgtcaagctagttcacactctgaggctcagaatatgtaggacatgcacaattgtgcagtcctttgggattggaagtgaaacagtctgtgatcccctaccttctagggaactaggacctaggaagaggtaaagattatcaggtatgcaaagcgccccaattcttctgctgccatgggggattttaccccaactccagggttcgaggccaatctgagaatggcttaggattgcaatgtcaaggtattatatcagccccttgcttgaggcttgaggtcataatatccctctaggacttacctgttcccccagatcttgccttgggaccacatttgctgctacttttcctgctgctctatcctatacattgaataatccaagatggtagaactaggttaggaaaaattccacacaaccaaacagtctgccttaaaagtgacccacatttttccatagctcctcactttttagcccttctgcaagagaaaaaccctcatgggtccacatggtgagaagttaagtttcctgtaagtgggcctctcaccctggaaaggagttgagggacatcagatgctggaaccctcactgaaagtccagaatgtctaagccagtgttagattttgtaaacaagtggaacagtgttaaatttctatgatgttggagccatccagagactactggaattgtcgagacttttggattattatccttatccttatcctaatcttcctagcccttcaggctagagtaggctttgatcctgagaaccttgctgttgctctgaggagatataattctgggagaaagaatcttttataagaacagtacagattgttctcaagagggccatcagaaggaagccaaagagttcacagcctcagcaccaacaactcaacatggtcatcatgttttctatatggtttttccagctagcagtactcccttccatacctgtgactgggcagtgcttttctctctcccatgtctagcctccaaaagttaagtgaaaattagtcaactgcacgtggaagcccccaccactttggggatctctttatttcttttcagccagggacctgtccactccctttgaattaatatgggaagaaattaatacaggatgaactggagagaagggttgagtgtggcatactttctgaaacctggagctgggaattgcggagaagggaaggtctagactagttacatcacatagggattactgtaaatcaagtcatctcaagtctagtgaagacagccaacagaaacaaaacctagcatagggatagaaaataccatgcacgtgtgcagccccacctaattcctgcatccaaggcaggtgttgttaatctatcatagcacttaaaaaaaaaaaaaaaaagagaccaaaaataactttaggaaccaccatattatatcactcccaatagcactgacctggtgatcaaaaacacttgagaagacatctattggccatctctggccaattacactaagaaacatatcaaggtgcttttggcacaggtgcccacaaatacggatgcagtgctgagatagtttatgagacttgtaccatttcacaaactctgaaattgggttccatattggcaaggctgccacagttgttaagaataatcctctatgtttcttcctcacaaaaccatatctcatttatatccagaccattacttcactataattacaaggacaaattattagcaagaaataagaatagtattagaagaattgatcctattttgaacccctctccagtatcttcacactcttgtcaactctccaggcctctctcttgccctgagttatcagcctgtgtggtgttaactaccttagaaggtacaagctaagaaatgtaacagtatcaaccctcccagttgcttaattatacccataggtaatacaaaaagctctgaagacccaaagatgacattactaatgatgtgatttcaggagccacagaagaaccttaccagcttccctcaaatcagtccttatcctctttctatcttcactcccatcatcatctattttcacactatccagctaagcaaagattcctggaggctgacttgtatcttcagactcacagagtgaattcagctcttctgaatcaagacccacccagtctctttcattcagacctgttgctaacaaatttatatttgccaaggatattaggcaaaagaggctacttgattggtggccaacctcgtgcccacatggaaggtatctttaatagggtcttttcaaaccttagtggaggagggtcagctcaatttgggcaatgcatttgttcccagtttcattttcttcctgggaattaactcgtcatttcattccttcagtcatcttctgtgtaggtgaccggagcactgagaggcagctctgatgcactattgtgtgtcagcagctcaaaggccctaaaacactgaaggttctgcatctgaagtattagattgttagcagcaaaatatgaaagatgaggtggacagtcctctaagccctatttagggaagcttttccaagccacaatcttaactacctacccaaaggatttgcattacccccagattctgtgccaacaaccttttaaggaaatacagtccttgggaaatgagttttgatggtgaattggggtgttaaggaagggaaagattgtcatagatggtagggctttgaaaatgcagggtatcagctgccactcctggcttcaacacattgagtcactgcctagacggttctcttggtcttattcccatcctggccaatgcttaaatactatttgttgaaaataattctttgagacagatttcagctacctcccttccaggttcgatttaacttggttgtaattgtcaatttgttgttataggtcttacctgtgtgaaagaaagaaaaagaaagaaagaaagaaagagaaaggaaattataaggtcaagttaacagttttgaggttttgtgtttttttctggaactacttcaagtgagaaaataaaaaaaaatggtgacaaagctgtacagatagagataatagaagacaaagagattaaaaggaaataaaaatgcatgattaaaaactaagaataaaaaacctatttttatgtttcctaaaggaaattgtttattctacagcctcagtaggtagacacaaacataaagatttccctagaagacatagagtgggatttgataacactgtctgttattttctgtacattgtggtaggtccaggaaatatgacattttcccccttgatgtgttattgttgttgttgggtggggtgggcattttgtttatttgtttggtggcaatcagtggtagtagggagtgggagggcttatattggtttttccagctattaaggggacatattgtgtcgttgtgcttttcacgttataaaatgtttatatttaccagtacagcactgggctttataaagactgcactcagaaccacactgcacagtccagttttttaaaaagctgctacatgacagacaggtaatcccactgagtgagttttgagaaacaaatcaaacgaagtaaacaagaaacataaaaaccaaatagcaaatgaataaaagcctgttcttgtaacttattcaacttttgccaaattcctaccaatcacttgctttttaaaagaaatgtataatagccaaaagagaaattatgtccctgttgtacagaagttagaatttttgactccaggcagcagtttgctcagtgatcttgaacaagttatccaattgcctctacatttgcatcagtttctctagctgcaaaatggggataatactatatacctacctcacagtgggagggcaggagattttgaggccctgaggttttaggtgggctgtgagggccaacgcttgacacaaagtccatgggttattattcaagaatgcacaggcccatcggccttttagaaagacaagacagggagtgcttgtttgatatttcaaggaataaagccggagctcctgaattgtagtccaccttaaaagagagacctgtattggagaatattttatttttttggcaaatttgatcttaccctttaccagttctataatttggttaaaagctgattatgtcctacaatgtcaaagtcagctaactgtcgtctacttaagacttctggtcatttccaacttatagaggaagggagtctctaaaatctcttcttcagaaggcacctcacttctcagacttaaaattccacatcaagtgttccattaaaagaagataaggcattctgagtgcaaacaaatgggggcttcttaaactacacaccagcagtcagtgaggaaaactttgaacaattattgagttgctttcttgggtctctataatcaataacctgtctgcagatatctatctatataaagatattatatataaatataaatttacatatatatgcacatgtatatatagttgtacatatatgtgtgtatatatatacttaaatgtaatatttacaaaataaaactgtgatctcgtctagagaaaatgtattcatattacaaactgctcttccatatttatgtaccatattatacctttttattattgttataattattatgggtatttctaattaatatgatgttgaaacctgtttggcaccttctggaagctaccaaaaaaatgacactccattgaagtgcttaaaagctgttctcataagaattcttctggcctattgtaaaaaagaaaaaaaaaaagaaaaagaagaaagacacaaagaaaataatctaaacaccaaaaactaaacacaattccaatcctttttctgtacctcacgcgcataaatttgctgctcctatttttttttctgtttatgtgtttttatggatctaagttaaatcttttggcaatatataaaaatgtaaatagtaaactttatttattaagaatgtcatcttttttaatttatatttacacaattgttcatctaatttattttttctatacagttttaaatactcagacatattttgctgttcatgatatttttatcctgttctcatggatttgttttcccatactgttttctctgatctcaattacaggttggatctcacaaataataatgtcagagacagaaatattttgccactgttgattactatactttaaagttctatattatgaaaatatataatagcttgtacgcttcag

SEQ ID NO: 23537 - DNA, 2135 bp, Homo sapiens
  source 1..2135: mol_type = unassigned DNA
aacccgacggtgacgcgcgagcaggtggacttccagcaccatcagctggctgaggccttcaagcaatacaacatctcctgggagctggacgtgctggaggtgagcaactcctcccttcgccgccgcctcatcctggccaactgtgacatcagcaagattggggatgagaactgtgaccccgagtgcaaccacacgctgacgggccacgacggcggggattgccgccacctgcgccaccctgccttcgtgaagaagcagcacaacggggtgtgtgacatggactgcaactatgaacggttcaactttgatggtggagagtgctgtgaccctgaaatcaccaatgtcactcagacttgctttgaccccgactctccacacagagcctacttggatgttaatgagctgaagaacattcttaaattggatggatcaacacatctcaatattttctttgcaaaatcctcagaggaggagttggcaggagtagcaacttggccatgggacaaggaggccctgatgcacttagatgacgactgtacggactccttcacgcccaatcaagtcgccagaatgcactgttacctggacctggtctaccagggctggcagccctccaggaaaccagcgcctgttgccctcgccccccaagttctgggccacacaacggactctgtgacactggagtggttcccacctatagatggccatttctttgaaagagaattgggatcagcatgtcatctttgcctggaagggagaatcctggtgcagtatgcttccaacgcttcctccccaatgccctgcagcccatcaggacactggagccctcgtgaagcagaaggtcatcctgatgttgaacagccctgtaagtccagtgtccgcacctggagcccaaattcagctgtcaacccacacacggttcctccagcctgccctgagcctcaaggctgctacctcgagctggagttcctctaccccttggtccctgagtctctgaccatttgggtgacctttgtctccactgactgggactctagtggagctgtcaatgacatcaaactgttggctgtcagtgggaagaacatctccctgggtcctcagaatgtcttctgtgatgtcccactgaccatcagactctgggacgtgggcgaggaggtgtatggcatccaaatctacacgctggatgagcacctggagatcgatgctgccatgttgacctccactgcagacaccccactctgtctacagtgtaagcccctgaagtataaggtggtccgggaccctcctctccagatggatgtggcctccatcctacatctcaataggaaattcgtagacatggatctaaatcttggcagtgtgtaccagtattgggtcataactatttcaggaactgaagagagtgagccatcacctgctgtcacatacatccatggaagtgggtactgtggcgatggcattatacaaaaagaccaaggtgaacaatgcgacgacatgaataagatcaatggtgatggctgctcccttttctgccgacaagaagtctccttcaattgtattgatgaacccagccggtgctatttccatgatggtgatggggtatgtgaggagtttgaacaaaaaaccagcattaaggactgtggtgtctacacgccccagggattcctggatcagtgggcatccaatgcttcagtatctcatcaagaccagcaatgcccaggctgggtcatcatcggacagccagcagcatcccaggtgtgtcgaaccaaggtgatagatctcagtgaaggcatttccgcatgcctggtacccttgcaccatcagctacccatattcccagctggctcagaccactttttggctccgggcgtatttttctcaaccaatggttgccgcagctgtcattgtccacctggtgacggatgggacatattatggggaccaaaagcaggagaccatcagcgtgcagctgcttgataccaaagatcagagccacgatctaggcctccatgtcctgagctgcaggaacaatcccctgattatccctgtggtccatgacctcagccagcccttctaccacagccaggcggtacgtgtgagcttcagttcgcccctggtcgccatctcgggggtgg

SEQ ID NO: 23538 - DNA, 2342 bp, Homo sapiens
  source 1..2342: mol_type = unassigned DNA
accaatgtcactcagacttgctttgaccccgactctccacacagggatctaaatcttggcagtgtgtaccagtattgggtcataactatttcaggaactgaagagagtgagccatcacctgctgtcacatacatccatggaagtgggtactgtggcgatggcattatacaaaaagaccaaggtgaacaatgcgacgacatgaataagatcaatggtgatggctgctcccttttctgccgacaagaagtctccttcaattgtattgatgaacccagccggtgctatttccatgatggtgatggggtatgtgaggagtttgaacaaaaaaccagcattaaggactgtggtgtctacacgccccagggattcctggatcagtgggcatccaatgcttcagtatctcatcaagaccagcaatgcccaggctgggtcatcatcggacagccagcagcatcccaggtgtgtcgaaccaaggtgatagatctcagtgaaggcatttcccagcatgcctggtacccttgcaccatcagctacccatattcccagctggctcagaccactttttggctccgggcgtatttttctcaaccaatggttgccgcagctgtcattgtccacctggtgacggatgggacatattatggggaccaaaagcaggagaccatcagcgtgcagctgcttgataccaaagatcagagccacgatctaggcctccatgtcctgagctgcaggaacaatcccctgattatccctgtggtccatgacctcagccagcccttctaccacagccaggcggtacgtgtgagcttcagttcgcccctggtcgccatctcgggggtggccctccgttccttcgacaactttgaccccgtcaccctgagcagctgccagagaggggagacctacagccctgccgagcagagctgcgtgcacttcgcatgtgagaaaactgactgtccagagctggctgtggagaatgcttctctcaattgctccagcagcgaccgctaccacggtgcccagtgtactgtgagctgccggacaggctacgtgctccagatacggcgggatgatgagctgatcaagagccagacgggacccagcgtcacagtgacctgtacagagggcaagtggaataagcaggtggcctgtgagccagtcgactgcagcatcccagatcaccatcaagtctatgctgcctccttctcctgccctgagggcaccacctttggcagtcaatgttccttccagtgccgtcaccctgcacaattgaaaggcaacaacagcctcctgacctgcatggaggatgggctgtggtccttcccagaggccctgtgtgagctcatgtgcctcgctccaccccctgtgcccaatgcagacctccagaccgcccggtgccgagagaataagcacaaggtgggctccttctgcaaatacaaatgcaagcctggataccatgtgcctggatcctctcggaagtcaaagaaacgggccttcaagactcagtgtacccaggatggcagctggcaggagggagcttgtgttcctgtgacctgtgacccacctccaccaaaattccatgggctctaccagtgtactaatggcttccagttcaacagtgagtgtaggatcaagtgtgaagacagtgatgcctcccagggacttgggagcaatgtcattcattgccggaaagatggcacctggaacggctccttccatgtctgccaggagatgcaaggccagtgctcggttccaaacgagctcaacagcaacctcaaactgcagtgccctgatggctatgccatagggtcggagtgtgccacctcgtgcctggaccacaacagcgagtccatcatcctgccaatgaacgtgaccgtgcgtgacatcccccactggctgaaccccacacgggtagagagagttgtctgcactgctggtctcaagtggtatcctcaccctgctctgattcactgtgtcaaaggctgtgagcccttcatgggagacaattattgtgatgccatcaacaaccgagccttttgcaactatgacggtggggattgctgcacctccacagtgaagaccaaaaaggtcaccccattccctatgtcctgtgatctacaaggtgactgtgcttgtcgggacccccaggcccaagaacacagccggaaagacctccggggatacagccatggctaaggaaggacaagaagttgtcaaagaattcccaacgccaggacccacatccctttggtattgatttcacagtcagctgctcaacggaatggcctctccacaccagggatccttagcacccaaccggtctgcctttaattttacccagg

SEQ ID NO: 23539 - DNA, 4610 bp, Homo sapiens
  source 1..4610: mol_type = unassigned DNA
ggacacaaccctgagatttatccctcacaatgcggaaagacagacttcttcatttatgtcttgtgctacttcttatcctgctttctgccagtgactcaaactctacagaaccgcagtatatggtgctggtcccctccctgctccacactgaggcccctaagaagggctgtgtccttctgagccacctgaatgagacagtgactgtaagtgcttccttggagtctggcagggaaaacaggagcctcttcactgacctggtggcggagaaggacttattccactgtgtctccttcactctcccaaggatctcagcctcttcagaggtggcattccttagcatccagataaaggggcctacgcaagatttcaggaagaggaacacagttctggtactgaacacccaaagtctggtctttgtccagacagacaaacccatgtataaaccaggacagacagtaagattccgtgttgtctccgtggatgaaaattttcgccctcgaaatgaactgattccactgatataccttgagaacccaagaagaaatcgaattgcacaatggcagagtctcaagctagaagctggcatcaatcagttgtcctttcccctctcatcagagcccattcagggctcctacagggtggtggtacagacagaatcaggtggaaggatacagcaccccttcaccgtggaggaatttgtgcttcccaagtttgaggtcaaagttcaggtgccaaagataatcagtatcatggatgaaaaagtgaacataacagtctgtggagaatacacttatgggaagcctgtcccaggacttgcaactgtgagcctgtgtagaaaattatctcgtgttcttaattgtgacaagcaggaggtctgtgaggaattcagtcaacagcttaacagcaatggctgcatcacccaacaagtacacaccaaaatgctccagattacaaatacgggctttgaaatgaagcttagagtggaagccaggatcagagaagaggggacagacctggaagtcactgcaaacaggatcagtgaaatcacaaacattgtatccaaactcaaattcgtgaaagtggattcacactttagacaaggaatccccttttttgcacaggtgcttctggtggatggaaaaggtgtgcccatccccaataaactcttcttcatctctgtgaatgacgccaattattactccaatgcaaccaccaatgagcagggtcttgcacagttttcaatcaatactaccagtatctcggttaataaactttttgtccgggttttcactgtgcatcccaacttgtgttttcactattcatgggtagcagaagaccaccagggtgctcagcacactgcaaatcgtgttttctccttaagtggaagttacattcacctggagcctgtggctggtaccctgccctgtggccacacggagactatcacggcacactatacactgaatagacaggccatgggagagttatcggagctcagtttccattacctgatcatggctaagggagtcatcgtcagatctggaacccacactctgcctgtggagtcaggagacatgaaaggcagttttgccttatccttccctgtggagtcagacgttgcccccattgcacgaatgttcatctttgccattttaccagatggagaagttgttggagactctgaaaaatttgagattgaaaactgtctagccaacaaggtggatttgagcttcagcccagcacaaagtcccccagcctcacatgcccacctgcaagtagcagctgctccgcagtccctctgtgcccttcgtgctgtggaccaaagtgtgctgctcatgaagcctgaggctgagctctctgtgtcctcagtatataatctgctaactgtgaaggatctcaccaattttcctgacaatgtggaccagcaggaggaagaacaaggacactgtccccgtcctttcttcattcataatggagccatctatgttcccttatcaagtaatgaagcagatatttatagcttcctcaaggggatgggattgaaggtgttcactaactcaaaaatccgaaaaccaaagtcgtgttcagtcatcccttccgtgtctgcaggagcagtaggtcaaggatactatggagcaggtctaggagtagtagagagaccatatgttcctcaattaggcacatataatgtgatacccttaaataatgaacaaagttcagggccagtccctgaaacggtgcgaagctattttcctgagacttggatctgggagttggtggcagtgaactcatcaggtgtggctgaggtaggagtaacagtccctgacaccatcaccgagtggaaggcaggggccttctgcctgtccgaagatgctggacttggtatctcttccactgcctctctccgagccttccagcccttctttgtggagctcacaatgccttactctgtgattcgtggagaggtcttcacactcaaggccacggtcctaaactaccttcccaaatgcatccgggtcagtgtgcagctgaaagcctctccagccttcctagcttcccaaaatacaaagggagaagaatcctattgtatctgtggaaatgagagacaaaccttgtcttggacagtgactcctaaaactctggggaatgtgaacttctcagtgagtgcagaggcaatgcagtccttagaactctgtggaaatgaggttgttgaggtccctgagattaaaagaaaagacacagtcatcaaaaccctgttggtggaggctgaaggtattgagcaagaaaagactttcagttctatgacctgtgcctcaggtgctaatgtgtctgagcagttgtccttgaagctcccatcaaatgtggtcaaagaatctgccagagcttctttctcagttctgggtgacatattaggttctgctatgcaaaatatacaaaatctcctccagatgccatatggctgtggagaacagaacatggtcctatttgctcctaacatctatgtcttgaactatctgaatgaaacccagcagctgacgcaggagatcaaggccaaggccgttggctatctcatcactggttaccagagacagctgaactacaaacaccaagatggctcctacagcacctttggggaacgatatggcaggaaccagggcaacacttggctcacagcttttgtactgaagactttcgcccaggctcgatcctacatcttcattgatgaagcacacattacccaatctctcacgtggctctcccagatgcagaaggacaatggctgtttcaggagctctgggtcactgctcaacaatgccataaagggaggtgtagaagatgaagcgaccctctccgcctatgttactattgcccttctggaaattcctctcccagtcactaaccctattgttcgcaatgccctgttctgcctggagtcagcctggaatgtagcaaaggaggggacccatgggagccatgtctacaccaaggcattgctggcctatgctttttccctactgggaaagcaaaatcagaatagagaaatactgaactcacttgataaggaagctgtgaaagaagacaacctcgtccattgggagcgccctcagagacccaaggcaccagtggggcatctttaccaaacccaggctccctctgctgaggtggagatgacatcctatgtgctcctcgcttatctcacggcccagccagcccccacctcaggggacctgacctctgcaactaacattgtgaagtggatcatgaagcagcagaacgcccaaggtggtttctcctccacccaggacacagtggtggctctccatgccctgtccaggtatggagcagccactttcaccagaactgagaaaactgcacaggtcaccgttcaggattcacagaccttttctacaaatttccaagtagacaacaacaacctcctattactgcagcagatctcattgccagagctccctggagaatatgtcataacagtaactggggaaagatgtgtgtatcttcagacatccatgaaatacaatattcttccagagaaagaggactccccatttgctttaaaagtgcagactgtgccccaaacttgcgatggacacaaagcccacaccagctttcagatctcactgaccatcagttacacaggaaaccgtcctgcttccaatatggtgattgttgatgtaaagatggtatctggttttattcccctgaaaccaacagtaaaaatgcttgaaagatctagctctgtgagccggacagaagtgagcaacaaccatgtcctcatttatgtggaacaggtgacaaatcagacgctaagtttttccttcatggttctgcaagacatcccagtaggagacttgaagccagcaattgttaaagtctatgattactatgagacagatgagtctgtggttgctgagtatatcgccccctgcagcacagatacagagcatggaaatgtttgaggaccatacaggctgtatattttggtggattctctgtcctatacatttacttagaaggaatggagttatttgtctctataaaatagacactaaaaatatttgctgaataaatatgtacttctggtcaaacta

SEQ ID NO: 23540 - DNA, 3938 bp, Homo sapiens
  source 1..3938: mol_type = unassigned DNA
atgtctgaatcttatcggagaactacttttccagtaagattccgtgttgtctccgtggatgaaaattttcgccctcgaaatgaactgattccactgatataccttgagaacccaagaagaaatcgaattgcacaatggcagagtctcaagctagaagctggcatcaatcagttgtcctttcccctctcatcagagcccattcagggctcctacagggtggtggtacagacagaatcaggtggaaggatacagcaccccttcaccgtggaggaatttgtgcttcccaagtttgaggtcaaagttcaggtgccaaagataatcagtatcatggatgaaaaagtgaacataacagtctgtggagaatacacttatgggaagcctgtcccaggacttgcaactgtgagcctgtgtagaaaattatctcgtgttcttaattgtgacaagcaggaggtctgtgaggaattcagtcaacagcttaacagcaatggctgcatcacccaacaagtacacaccaaaatgctccagattacaaatacgggctttgaaatgaagcttagagtggaagccaggatcagagaagaggggacagacctggaagtcactgcaaacaggatcagtgaaatcacaaacattgtatccaaactcaaattcgtgaaagtggattcacactttagacaaggaatccccttttttgcacaggtgcttctggtggatggaaaaggtgtgcccatccccaataaactcttcttcatctctgtgaatgacgccaattattactccaatgcaaccaccaatgagcagggtcttgcacagttttcaatcaatactaccagtatctcggttaataaactttttgtccgggttttcactgtgcatcccaacttgtgttttcactattcatgggtagcagaagaccaccagggtgctcagcacactgcaaatcgtgttttctccttaagtggaagttacattcacctggagcctgtggctggtaccctgccctgtggccacacggagactatcacggcacactatacactgaatagacaggccatgggagagttatcggagctcagtttccattacctgatcatggctaagggagtcatcgtcagatctggaacccacactctgcctgtggagtcaggagacatgaaaggcagttttgccttatccttccctgtggagtcagacgttgcccccattgcacgaatgttcatctttgccattttaccagatggagaagttgttggagactctgaaaaatttgagattgaaaactgtctagccaacaaggtggatttgagcttcagcccagcacaaagtcccccagcctcacatgcccacctgcaagtagcagctgctccgcagtccctctgtgcccttcgtgctgtggaccaaagtgtgctgctcatgaagcctgaggctgagctctctgtgtcctcagtatataatctgctaactgtgaaggatctcaccaattttcctgacaatgtggaccagcaggaggaagaacaaggacactgtccccgtcctttcttcattcataatggagccatctatgttcccttatcaagtaatgaagcagatatttatagcttcctcaaggggatgggattgaaggtgttcactaactcaaaaatccgaaaaccaaagtcgtgttcagtcatcccttccgtgtctgcaggagcagtaggtcaaggatactatggagcaggtctaggagtagtagagagaccatatgttcctcaattaggcacatataatgtgatacccttaaataatgaacaaagttcagggccagtccctgaaacggtgcgaagctattttcctgagacttggatctgggagttggtggcagtgaactcatcaggtgtggctgaggtaggagtaacagtccctgacaccatcaccgagtggaaggcaggggccttctgcctgtccgaagatgctggacttggtatctcttccactgcctctctccgagccttccagcccttctttgtggagctcacaatgccttactctgtgattcgtggagaggtcttcacactcaaggccacggtcctaaactaccttcccaaatgcatccgggctgaaggtattgagcaagaaaagactttcagttctatgacctgtgcctcaggtgctaatgtgtctgagcagttgtccttgaagctcccatcaaatgtggtcaaagaatctgccagagcttctttctcagttctgggtgacatattaggttctgctatgcaaaatatacaaaatctcctccagatgccatatggctgtggagaacagaacatggtcctatttgctcctaacatctatgtcttgaactatctgaatgaaacccagcagctgacgcaggagatcaaggccaaggccgttggctatctcatcactggttaccagagacagctgaactacaaacaccaagatggctcctacagcacctttggggaacgatatggcaggaaccagggcaacacttggctcacagcttttgtactgaagactttcgcccaggctcgatcctacatcttcattgatgaagcacacattacccaatctctcacgtggctctcccagatgcagaaggacaatggctgtttcaggagctctgggtcactgctcaacaatgccataaagggaggtgtagaagatgaagcgaccctctccgcctatgttactattgcccttctggaaattcctctcccagtcactaaccctattgttcgcaatgccctgttctgcctggagtcagcctggaatgtagcaaaggaggggacccatgggagccatgtctacaccaaggcattgctggcctatgctttttccctactgggaaagcaaaatcagaatagagaaatactgaactcacttgataaggaagctgtgaaagaagacaacctcgtccattgggagcgccctcagagacccaaggcaccagtggggcatctttaccaaacccaggctccctctgctgaggtggagatgacatcctatgtgctcctcgcttatctcacggcccagccagcccccacctcaggggacctgacctctgcaactaacattgtgaagtggatcatgaagcagcagaacgcccaaggtggtttctcctccacccaggacacagtggtggctctccatgccctgtccaggtatggagcagccactttcaccagaactgagaaaactgcacaggtcaccgttcaggattcacagaccttttctacaaatttccaagtagacaacaacaacctcctattactgcagcagatctcattgccagagctccctggagaatatgtcataacagtaactggggaaagatgtgtgtatcttcagacatccatgaaatacaatattcttccagagaaagaggactccccatttgctttaaaagtgcagactgtgccccaaacttgcgatggacacaaagcccacaccagctttcagatctcactgaccatcagttacacaggaaaccgtcctgcttccaatatggtgattgttgatgtaaagatggtatctggttttattcccctgaaaccaacagtaaaaatgcttgaaagatctagctctgtgagccggacagaagtgagcaacaaccatgtcctcatttatgtggaacaggtgacaaatcagacgctaagtttttccttcatggttctgcaagacatcccagtaggagacttgaagccagcaattgttaaagtctatgattactatgagacagatgagtctgtggttgctgagtatatcgccccctgcagcacagatacagagcatggaaatgtttgaggaccatacaggctgtatattttggtggattctctgtcctatacatttacttagaaggaatggagttatttgtctctataaaatagacactaaaaatatttgctgaataaatatgtacttctggtcaaact

SEQ ID NO: 23541 - DNA, 1261 bp, Homo sapiens
  source 1..1261: mol_type = unassigned DNA
actgtgtggctgcgccggaagtggcgcgcggccggacaactcatggcggcggcggcggcggcggcagctgcttgggcgcggtgcggtggtgactgagctacgagcctggcggcgggtgtgcgccgagccccggcccggcccggccctcgcgtgcctcccaggctccgcacccctgatgctgcgcgggtgctgagcccgcttcggccgggacgatggtgaagtatttcctgggccagagcgtgctccggagttcctgggaccaagtgttcgccgccttctggcagcggtacccgaatccctatagcaaacatgtcttgacggaagacatagtacaccgggaggtgacccctgaccagaaactgctgtcccggcgactcctgaccaagaccaacaggatgccacgctgggccgagcgactatttcctgccaatgttgctcactcggtgtacgtcctggaggactctattgtggacccacagaatcagaccatgactaccttcacctggaacatcaaccacgcccggctgatggtggtggaggaacgatgtgtttactgtgtgaactctgacaacagtggctggactgaaatccgccgggaagcctgggtctcctctagcttatttggtgtctccagagctgtccaggaatttggtcttgcccgattcaaaagcaacgtgaccaagactatgaagggttttgaatatatcttggctaagctgcaaggcgaggccccttccaaaacacttgttgagacagccaaggaagccaaggagaaggcaaaggagacggcactggcagctacagagaaggccaaggacctcgccagcaaggcggccaccaagaagcagcagcagcagcaacagtttgtgtagccagtctaccaccaccacagcaccccagacagctaggcttagcctctctgccctcccttcattgtactttatcattaaaaatcaacttccagccctgtctgctgtctacgtggtgggttgtggggatgcagtttggcatctgcagtacaccaagcacatgattcatgtctgagccaggtctgcttattctcccattgggcagctgaggaccgaggcacagaggtgcggtgacttgcccggggctccaggtagcctgcaggttaactggcggtaagtgctagactgtaagcccgacaagggcagggcttttggttttgttctctgatgtgtctcagtatctagcacataatagacactcaataaatacttgttgaattcagttggcccca

SEQ ID NO: 23542 - DNA, 3941 bp, Homo sapiens
  source 1..3941: mol_type = unassigned DNA
accatttcctggagcaatgtcacagggtggctccattttccatttgagctcaaatattttgctgcttcctctgtagctgccagacctgctcttgctgctgctcaggtagaacatctgggaggtcccttgctgaccactggaagaagatgagctcgagctattggagtgagacgagcagcagcagctgtggaacccagcagctcccagaggtgctgcagtgccagccccagcattaccactgctaccatcagtcaagccaagcccagcagcctccagaaaaaaatgtagtgtatgagcgagtgaggacctacagtgggcccatgaacaaggtggtgcaggccttggaccccttcaactcacgggaagtgctctcccctctcaaaaccacctcctcctaccaaaatttggtttggagcgaccattctcaggaactccattctccaactttaaaaatatctacatgtgccccaagtactctacatataacccaaaatactgaacaggaacttcattctccaacagtgaaacttactacatatccacagaccactattaggaaatatgtagtacaaaatcctgaacaggaaccactgtctcaattcctaagaggaagccatttcttcccaggaaacaatgttatttatgaaaaaacaataagaaaagtggagaagctaaatactgatcaggggtgccatcctcaggctcaatgccatcatcacattatccaacagccccaggtcatccactctgcacactggcaacaacctgattctagccagcaaatccaagccatcacaggaaataatccaatttctacacatattggaaatgaactgtgccatagtggatcaagccagatttgtgagcaggtgataattcaggatgatggccctgaaaaattggaccccagatattttggagagttgcttgctgatctgagccgtaagaatacggatctatatcactgcttattagaacatttgcagagaattggaggaagcaaacaggactttgagtctacagatgagtcggaagacattgaatcattgattcctaaaggattatcagagtttacaaaacagcaaatacgctacattctgcagatgaggggtatgtctgataagtcactccgactagtgctgtccacatttagcaacatacgggaggagcttggacatcttcaaaatgatatgacatcactggaaaatgacaagatgagacttgagaaagatttatcattcaaagacactcaattaaaagagtacgaagaactcttggcatcagtgagagcaaataatcaccagcagcagcaaggacttcaagactcaagttcaaaatgccaggcattggaagaaaacaatctctctcttcgacatacactatcagacatggaatacagactaaaagaactggaatattgtaaacgtaatttagagcaagagaatcaaaaccttagaatgcaggtttctgagacttgcacaggcccaatgttgcaggctaaaatggatgagattggcaaccactacacggagatggtaaaaaacttgagaatggagaaagatagagagatctgcagactgaggtcccaattaaaccagtaccataaagatgtttcaaagagagaaggaagttgtagtgacttccaatttaagcttcatgaactgacaagcttgctggaagagaaggattccctcataaagcgtcagtcagaggaactctccaagttgcggcaagaaatatattcctctcataaccaaccctccactggtggaaggactactattaccactaaaaagtacaggacacaatatccaatcctaggcctcctatatgatgactacgaatatataccaccaggtagtgaaacacagactattgtgattgagaaaacagaagacaaatacacttgtccatgaatggatccactttaaagtattacaactcaaagccgttttttttttgtgtgtgtgtctctgcattagtactttgttatttttccatcactaaaggccaatcagaatttggaaccatgctgctacccaagaaatctaatggaatgaattagttctgtagatgacaatttcttcacccatttatgagacctaaatcttttccataacactcatgtattcagtataacaacatactaactgaaagagggacctgattgtttaaagtttgattgcagacactgtagaacataactcattatgtttcagataaggtaactcctagatatcaaactaatttgttggggtagagattttacaagtcatgccattagaagattttctctgatattatatgtgcagttcagttacaagatgaaatcatgtttttttaacaaaagagataaaatacaattgaagcaaaaaataacagctagtatataatatatacagtctgtatttgcttttcacagtaggcctgatgactaaaagatatgctttattacacgctattttcacctcttgaaagtcaaaggtgatgattaatttcatttagcagggaagtggaataatatcttttgaaataactaagtccactaaattatacagtatgctattctggttctaagtacatattagtcccttggcaaatctgttctttcaaagcataccttccccaaatgagcctacctacttcttaaaaaacatataacacaatgtggtagtagtaggtgtaaggaaggtaagttttttcatagtggtatgcaaacatatcattgaaatattacatagatataaagacttagggaataaaaatagcagcaacaaatacttgatagatttatcctacttgggagaaatattttgtagcagagtatttagtatacttagaagttgatttagcaattaggctttaatgaccttacaaagtgaacataactgaacacaagtattttttcaatgcaagatgaggatgaaaattttacatttcaacccatctggctaaagttaagacttagcaaaaattaaaatgttgcctttgtccaagtatagattaaggcaacaaacatatttgggtgtgtaatttgaagttttggactgaaatatctttgcaagtatccacataaaattctgtaatgccttataattatattctaataattatgcattatactaagacaccattaagaacagttgaggcactacactaaatcaaaccataaatgaggaaaaaacttttaatgttcttttctagaagtgttcaaataggtcttgatatgaagctaaaagccttatttatattatcttaatatttcggctaaaatgttaagctccataacatgaattgatacaattccaattttatcaatattttgtgatagaaaaatgttaatattattcatgagctatacagtccttacattttttcccttggtgtaggaacaacggaggagtttctcctctgctaactattcatatatgtaactgtaacaaaagtgtactatgttatgcacacattacaaataatataaggggaagttttattagcttagtaggaaattgttattattaaggtttaaaaatgagaacaggtgtgagttttccaaaatacttaaaaataatagtgtcaaaaattcaggggcagttaaggagtcatggatggaactagaggtcactatattaagtgacataagccagaaacagacaaacattgcatgttctcaattatttgcgggatctaaaagtcaaaacaattgaactcatggatatagagagtagaaggatggttactagtggctgggaaaaggggtgtgcgaggggaactggggatgcttaatgtgtacaaaaactatgtagttagaaagtataaataagacctagtatttgatagcacaaccgggtgagtatagtcaataatagcttaattgtacaaataactaagagtataattggattgtttgtaacacaaataaatacttgagtggatggata

SEQ ID NO: 23543 - DNA, 1067 bp, Homo sapiens
  source 1..1067: mol_type = unassigned DNA
accatttcctggagcaatgtcacagggtggctccattttccatttgagctcaaatattttgctgcttcctctgtagctgccagacctgctcttgctgctgctcaggtagaacatctgggaggtcccttgctgaccactggaagaagatgagctcgagctattggagtgagacgagcagcagcagctgtggaacccagcagctcccagaggtgctgcagtgccagccccagcattaccactgctaccatcagtcaagccaagcccagcagcctccagaaaaaaatgtagtgtatgagcgagtgaggacctacagtgggcccatgaacaaggtggtgcaggccttggaccccttcaactcacgggaagtgctctcccctctcaaaaccacctcctcctaccaaaatttggtttggagcgaccattctcaggaactccattctccaactttaaaaatatctacatgtgccccaagtactctacatataacccaaaatactgaacaggaacttcattctccaacagtgaaacttactacatatccacagaccactattaggaaatatgtagtacaaaatcctgaacaggaaccactgtctcaattcctaagaggaagccatttcttcccaggaaacaatgttatttatgaaaaaacaataagaaaagtggagaagctaaatactgatcaggggtgccatcctcaggctcaatgccatcatcacattatccaacagccccaggtcatccactctgcacactggcaacaacctgattctagccagcaaatccaagccatcacaggaaataatccaatttctacacatattggaaatgaactgtgccatagtggatcaagccagatttgtgagcaggtgataattcaggatgatggccctgaaaaattggaccccagatattttggagagttgcttgctgatctgagccgtaagaatacggatctatatcactgcttattagaacatttgcagagaattggaagaaaacaatctctctcttcgacatacactatcagacatggaatacagactaaaagaactggaatattgtaa

SEQ ID NO: 23544 - DNA, 1972 bp, Homo sapiens
  source 1..1972: mol_type = unassigned DNA
gtggctccattttccatttgagctcaaatattttgctgcttcctctgtagctgccagacctgctcttgctgctgctcaggtagaacatctgggaggtcccttgctgaccactggaagaagatgagctcgagctattggagtgagacgagcagcagcagctgtggaacccagcagctcccagaggtgctgcagtgccagccccagcattaccactgctaccatcagtcaagccaagcccagcagcctccagaaaaaaatgtagtgtatgagcgagtgaggacctacagtgggcccatgaacaaggtggtgcaggccttggaccccttcaactcacgggaagtgctctcccctctcaaaaccacctcctcctaccaaaatttggtttggagcgaccattctcaggaactccattctccaactttaaaaatatctacatgtgccccaagtactctacatataacccaaaatactgaacaggaacttcattctccaacagtgaaacttactacatatccacagaccactattaggaaatatgtagtacaaaatcctgaacaggaaccactgtctcaattcctaagaggaagccatttcttcccaggaaacaatgttatttatgaaaaaacaataagaaaagtggagaagctaaatactgatcaggggtgccatcctcaggctcaatgccatcatcacattatccaacagccccaggtcatccactctgcacactggcaacaacctgattctagccagcaaatccaagccatcacaggaaataatccaatttctacacatattggaaatgaactgtgccatagtggatcaagccagatttgtgagcaggtgataattcaggatgatggccctgaaaaattggaccccagatattttggagagttgcttgctgatctgagccgtaagaatacggatctatatcactgcttattagaacatttgcagagaattggaggaagcaaacaggactttgagtctacagatgagtcggaagacattgaatcattgattcctaaaggattatcagagtttacaaaacagcaaatacgctacattctgcagatgaggggtatgtctgataagtcactccgactagtgctgtccacatttagcaacatacgggaggagcttggacatcttcaaaatgatatgacatcactggaaaatgacaagatgagacttgagaaagatttatcattcaaagacactcaattaaaagagtacgaagaactcttggcatcagtgagagcaaataatcaccagcagcagcaaggacttcaagactcaagttcaaaatgccaggcattggaagaaaacaatctctctcttcgacatacactatcagacatggaatacagactaaaagaactggaatattgtaaacgtaatttagagcaagagaatcaaaaccttagaatgcaggtttctgagacttgcacaggcccaatgttgcaggctaaaatggatgagattggcaaccactacacggagatggtaaaaaacttgagaatggagaaagatagagagatctgcagactgaggtcccaattaaaccagtaccataaagatgtttcaaagagagaaggaagttgtagtgacttccaatttaagcttcatgaactgacaagcttgctggaagagaaggattccctcataaagcgtcagtcagaggaactctccaagttgcggcaagaaatatattcctctcataaccaaccctccactggtggaaggactactattaccactaaaaagtacaggacacaatatccaatcctaggcctcctatatgatgactacgaatatataccaccaggtagtgaaacacagactattgtgattgagaaaacagaagacaaatacacttgtgtaagttcacttgggcatttttagccctattttgacgatatatgtacagccttttaaaattgaggtaaaatatcaaatgaactaaaaa

SEQ ID NO: 23545 - DNA, 1425 bp, Homo sapiens
  source 1..1425: mol_type = unassigned DNA
gccagaggcggagccgccgccctgccgcgactttcagactccgaccatggcctcgcgctggtggcggtggcggcgcggctgctcctggaagccggcggcgcggagccccgggcccggctcccccggccgtgcgggaccgttggggccgagcgccgctgccgaagtccgcgcgcaggttcataggcggaagggacttgacttgtctcagataccctatattaatcttgtgaagcatttaacatctgcctgtccaaatgtatgtcgtatatcacggtttcatcacacaaccccagacagtaaaacacacagtggtgaaaaatacaccgatcctttcaaactcggttggagagacttgaaaggtctgtatgaggacattagaaaggaactgcttatatcaacatcagaacttaaggaaatgtctgagtactactttgatgggaaagggaaagcctttcgaccaattattgtggcgctaatggcccgagcatgcaatattcatcataacaactcccgacatgtgcaagccagccagcgcgccatagccttaattgcagaaatgatccacactgctagtctggttcacgatgacgttattgacgatgcaagttctcgaagaggaaaacacacagttaataagatctggggtgaaaagaaggctgttcttgctggagatttaattctttctgcagcatctatagctctggcacgaattggaaatacaactgttatatctattttaacccaagttattgaagatttggtgcgtggtgaatttcttcagctcgggtcaaaagaaaatgagaatgaaagatttgcacactaccttgagaagacattcaagaagaccgccagcctgatagccaacagttgtaaagcagtatttcccagaaatgaatgctatgatcatgcgacggttcagtttgcctggagatgtagacagagctcgacagtatgtactacagagtgatggtgtgcaacaaacaacctacctcgcccagcagtactgccatgaagcaataagagagatcagtaaacttcgaccatccccagaaagagatgccctcattcagctttcagaaattgtactcacaagagataaatgacaactctttctgttctttctggcagctatcttaccagactgtgcctaaagaattttgtggaatacactttgtttgcttcatgtgcagataaccaaaaatcattttaaaagatatcaaacttattgatgggcaatttatttttttttattgcaaaagttttttcagaaaactttttaaatgtaattaataaaccacctgaatctgtcattctagtcctataaattataatcaaggtatcttgatggttatatgtggtattgtttacactgttaatatccacatgtaaggccattacacaaataaataaccaatgttaaaattc

SEQ ID NO: 23546 - DNA, 1626 bp, Homo sapiens
  source 1..1626: mol_type = unassigned DNA
atcgcgggccagaggcggagccgccgccctgccgcgactttcagactccgaccatggcctcgcgctggtggcggtggcggcgcggctgctcctggaagccggcggcgcggagccccgggcccggctcccccggccgtgcgggaccgttggggccgagcgccgctgccgaagtccgcgcgcaggttcataggcggaagggacttgacttgtctcagataccctatattaatcttgtgaagcatttaacatctgcctgtccaaatgtatgtcgtatatcacggtttcatcacacaaccccagacagtaaaacacacagtggtgaaaaatacaccgatcctttcaaactcggttggagagacttgaaaggtctgtatgaggacattagaaaggaactgcttatatcaacatcagaacttaaggaaatgtctgagtactactttgatgggaaagggaaagcctttcgaccaattattgtggcgctaatggcccgagcatgcaatattcatcataacaactcccgacatgtgcaagccagccagcgcgccatagccttaattgcagaaatgatccacactgctagtctggttcacgatgacgttattgacgatgcaagttctcgaagaggaaaacacacagttaataagatctggggtgaaaagaaggctgttcttgctggagatttaattctttctgcagcatctatagctctggcacgaattggaaatacaactgttatatctattttaacccaagttattgaagatttggtgcgtggtgaatttcttcagctcgggtcaaaagaaaatgagaatgaaagatttgcacactaccttgagaagacattcaagaagaccgccagcctgatagccaacagttgtaaagcagtctctgttctaggatgtcccgacccagtggtgcatgagatcgcctatcagtacggaaaaaatgtaggaatagcttttcagctaatagatgatgtattggacttcacctcgtgttctgaccagatgggcaaaccaacatcagctgatctgaagctcgggttagccactggtcctgtcctgtttgcctgtcagcagttcccagaaatgaatgctatgatcatgcgacggttcagtttgcctggagatgtagacagagctcgacagtatgtactacagagtgatggtgtgcaacaaacaacctacctcgcccagcagtactgccatgaagcaataagagagatcagtaaacttcgaccatccccagaaagagatgccctcattcagctttcagaaattgtactcacaagagataaatgacaactctttctgttctttctggcagctatcttaccagactgtgcctaaagaattttgtggaatacactttgtttgcttcatgtgcagataaccaaaaatcattttaaaagatatcaaacttattgatgggcaatttatttttttttattgcaaaagttttttcagaaaactttttaaatgtaattaataaaccacctgaatctgtcattctagtcctataaattataatcaaggtatcttgatggttatatgtggtattgtttacactgttaatatccacatgtaaggccattacacaaataaataaccaatgttaaaattcaaa

SEQ ID NO: 23547 - DNA, 1453 bp, Homo sapiens
  source 1..1453: mol_type = unassigned DNA
atgccagcccatgttcataggcggaagggacttgacttgtctcagataccctatattaatcttgtgaagcatttaacatctgcctgtccaaatgtatgtcgtatatcacggtttcatcacacaaccccagacagtaaaacacacagtggtgaaaaatacaccgatcctttcaaactcggttggagagacttgaaaggtctgtatgaggacattagaaaggaactgcttatatcaacatcagaacttaaggaaatgtctgagtactactttgatgggaaagggaaagcctttcgaccaattattgtggcgctaatggcccgagcatgcaatattcatcataacaactcccgacatgtgcaagccagccagcgcgccatagccttaattgcagaaatgatccacactgctagtctggttcacgatgacgttattgacgatgcaagttctcgaagaggaaaacacacagttaataagatctggggtgaaaagaaggctgttcttgctggagatttaattctttctgcagcatctatagctctggcacgaattggaaatacaactgttatatctattttaacccaagttattgaagatttggtgcgtggtgaatttcttcagctcgggtcaaaagaaaatgagaatgaaagatttgcacactaccttgagaagacattcaagaagaccgccagcctgatagccaacagttgtaaagcagtctctgttctaggatgtcccgacccagtggtgcatgagatcgcctatcagtacggaaaaaatgtaggaatagcttttcagctaatagatgatgtattggacttcacctcgtgttctgaccagatgggcaaaccaacatcagctgatctgaagctcgggttagccactggtcctgtcctgtttgcctgtcagcagttcccagaaatgaatgctatgatcatgcgacggttcagtttgcctggagatgtagacagagctcgacagtatgtactacagagtgatggtgtgcaacaaacaacctacctcgcccagcagtactgccatgaagcaataagagagatcagtaaacttcgaccatccccagaaagagatgccctcattcagctttcagaaattgtactcacaagagataaatgacaactctttctgttctttctggcagctatcttaccagactgtgcctaaagaattttgtggaatacactttgtttgcttcatgtgcagataaccaaaaatcattttaaaagatatcaaacttattgatgggcaatttatttttttttattgcaaaagttttttcagaaaactttttaaatgtaattaataaaccacctgaatctgtcattctagtcctataaattataatcaaggtatcttgatggttatatgtggtattgtttacactgttaatatccacatgtaaggccattacacaaataaataaccaatgttaaaattc

SEQ ID NO: 23548 - DNA, 1236 bp, Homo sapiens
  source 1..1236: mol_type = unassigned DNA
atgcctccaatatggcgtcctccacataggcagtggctgtggtttctaccccgggtggccgggggcagtgctgagctgggactgttgtttgcccagcctgggctgcagaaagcagcagttaaagttcgtttctggtcactgctccaggaagccaccttactctgagggtcaagaattgccgcttccttttagttactgtaagttcctcctctgcccctggtttgtttcccgcggcacttctggatacccccaggtcccagacccttccagactcaaaccatgaactttcggcagctgctgttgcacttgccacgttatcttggagcctcgggttccccgcgtcgcctgtggtggtccccgtccctcgacaccatctcctcggtgggctcttggcgtggtcggtcctccaagtccccggcccactggaatcaggtagtgtcagaggcggagaagatcgtggggtaccccacgtccttcatgagccttcgctgcctgctgagcgacgagctcagcaacatcgctatgcaggtgcggaagctggtgggcactcagcaccctctgcttaccacagccagggggcttgtacatgacagctggaatagcctccagttgaggggcttggtggtgctccttatctctaaagcagctgggcccagcagcgtgaacacttcatgtcagaactatgacatggtcagtgggatctactcatgtcaaagaagtttggcagagatcacggagctaattcatattgctctccttgtacatcgtgggatagtaaatttaaatgagttgcaatcatctgatggtccactgaaagacatgcaatttggaaataaaattgctatcctgagtggagactttcttctagcaaatgcctgcaatggactagctctgctacagaacaccaagtcattttcatttaatggacctattgctatatatcagatgggagactgtgagtcagcctggatcttgtctaaacacccaagagcattgtcatgatgtcactcctggaggttgttctattaagcattagtgatttatacttccggataaccagtggcacagatgtactctttacatagctgatgtatttccttatgttaactttgttttcctaaaggcgtaaatatgttgtttaaaatgaagtattttgtttgtacaaatatgctcaatttatgcatataaatctccctttacaccatctatatagtttaataaagatgctattgtcta

SEQ ID NO: 23549 - DNA, 1336 bp, Homo sapiens
  source 1..1336: mol_type = unassigned DNA
aatatggcgtcctccacataggcagtggctgtggtttctaccccgggtggccgggggcagtgctgagctgggactgttgtttgcccagcctgggctgcagaaagcagcagttaaagttcgtttctggtcactgctccaggaagccaccttactctgagggtcaagaattgccgcttccttttagttactgtaagttcctcctctgcccctggtttgtttcccgcggcacttctggatacccccaggtcccagacccttccagactcaaaccatgaactttcggcagctgctgttgcacttgccacgttatcttggagcctcgggttccccgcgtcgcctgtggtggtccccgtccctcgacaccatctcctcggtgggctcttggcgtggtcggtcctccaagtccccggcccactggaatcaggtagtgtcagaggcggagaagatcgtggggtaccccacgtccttcatgagccttcgctgcctgctgagcgacgagctcagcaacatcgctatgcaggtgcggaagctggtgggcactcagcaccctctgcttaccacagccagggggcttgtacatgacagctggaatagcctccagttgaggggcttggtggtgctccttatctctaaagcagctgggcccagcagcgtgaacacttcatgtcagaactatgacatggtcagtgggatctactcatgtcaaagaagtttggcagagatcacggagctaattcatattgctctccttgtacatcgtgggatagtaaatttaaatgagttgcaatcatctgatggtccactgaaagacatgcaatttggaaataaaattgctatcctgagtggagactttcttctagcaaatgcctgcaatggactagctctgctacagaacaccaaggttgtggaacttttagcaagtgctcttatggacttggtacaaggagtatatcatgaaaattctacttcaaaggaaagttatatcacagatgatattggaatatcgacttggaaggagcagacttttctctcccatggtgccttactagcaaagagctgccaagctgcaatggaattagcaaagcatgatgctgaggttcagaatatggcatttcagtatgggaagcacatggccatgagtcataagataaattctgatgtccagccttttattaaagaaaagaccagtgactccatgacttttaatctaaactcagctcctgtagtcttacatcaggaatttcttggaagagatttgtggattaaacagatcggagagtcttcaagtacagaagttcaactttctaactttcaacaaatgctactttcaacactc

SEQ ID NO: 23550 - DNA, 3540 bp, Homo sapiens
  source 1..3540: mol_type = unassigned DNA
tgcctccaatatggcgtcctccacataggcagtggctgtggtttctaccccgggtggccgggggcagtgctgagctgggactgttgtttgcccagcctgggctgcagaaagcagcagttaaagttcgtttctggtcactgctccaggaagccaccttactctgagggtcaagaattgccgcttccttttagttactgtaagttcctcctctgcccctggtttgtttcccgcggcacttctggatacccccaggtcccagacccttccagactcaaaccatgaactttcggcagctgctgttgcacttgccacgttatcttggagcctcgggttccccgcgtcgcctgtggtggtccccgtccctcgacaccatctcctcggtgggctcttggcgtggtcggtcctccaagtccccggcccactggaatcaggtagtgtcagaggcggagaagatcgtggggtaccccacgtccttcatgagccttcgctgcctgctgagcgacgagctcagcaacatcgctatgcaggtgcggaagctggtgggcactcagcaccctctgcttaccacagccagggggcttgtacatgacagctggaatagcctccagttgaggggcttggtggtgctccttatctctaaagcagctgggcccagcagcgtgaacacttcatgtcagaactatgacatggtcagtgggatctactcatgtcaaagaagtttggcagagatcacggagctaattcatattgctctccttgtacatcgtgggatagtaaatttaaatgagttgcaatcatctgatggtccactgaaagacatgcaatttggaaataaaattgctatcctgagtggagactttcttctagcaaatgcctgcaatggactagctctgctacagaacaccaaggttgtggaacttttagcaagtgctcttatggacttggtacaaggagtatatcatgaaaattctacttcaaaggaaagttatatcacagatgatattggaatatcgacttggaaggagcagacttttctctcccatggtgccttactagcaaagagctgccaagctgcaatggaattagcaaagcatgatgctgaggttcagaatatggcatttcagtatgggaagcacatggccatgagtcataagataaattctgatgtccagccttttattaaagaaaagaccagtgactccatgacttttaatctaaactcagctcctgtagtcttacatcaggaatttcttggaagagatttgtggattaaacagatcggagaggctcaagaaaaaggaagattggactatgctaagttgcgagaaagaatcaaagctggcaaaggtgtgacttcagctattgacctgtgtcgttaccatggaaacaaggcactggaggccctggagagctttcctccctcggaggccagatctgctttagaaaacattgtgtttgctgtgaccagattttcatgacatcaaattaaaaagacactattgttagttagctgaaaatcctagggaatgaggttgattgggagcgctttcacgatgcgttaatgacttttaaaacatatgcatttttccttccttttatcacattgctaaatgagttctgctttctttttggaactgctacaaacaaaattagaagaaaaaaaggtcaagcagttttcacttgtcacgccagaagcacacttgaggctgcagtcgcagaaataattaatgagattcgctcctgtgacctcagcaaatggacaggaaataagtccttattgattggaccgagccagggatggcgccagggcggtggcctgtggtttttcctgctagagaggacaaagcaagttggaagctgcaggtgtcaagagaaatgctctcaataccaaccagggaggattgtctaatcaaaaactagtgaccaatttgtcataatggagagtagttcaatggattgagaaaaatatgttttatttgttggcttgtaattatgtctctggattattattattttttttttagatgtagttttgctcttgttgcccaggctggagtgcaatggtgcagttttgactcactgcaacctccgcctcctgggttcaagtgattctcctgcctcagcctcccgagtagctggaattacaggcacctgccaccacgcctggctaattttgtatttttagtagagatggggtttcactatgttggtcaggctagtctcgaactcctgacctcaggtgatccgcctgcctcggcctcccaaagtgctgggattagaggcttgagccactgcacctggcctcatgtctctggatttataatgcagtatgaatatactttgtgctttatggtttttataatgtctttttggagaaattgccgaaaagttgccaaatacttgaagtaggagattaaaatgttatcaaatgttaaattggttatattaggaatagtctgtttttctttcctgaagatcagtttttttattcaaacacatttcaaagaaccaaattttttttttctttaaggaaaaaggagctttttttcaagtgaaatgtattcatttgtaatactttggtttaaggcatactttaatttttacgagtttcagaaacagaatttttgtactagggaattcattggtgagagtgttcttttaacctcagaatgtcaaattttggtcttgaaccacagacatccaattacagaaagaatataagcaatctcacaggcctgcaatcggacactgtctctgtgtggttcataggagatgatttttgaggtttgcactcatgcaatttgagaacaccgttgacaagaaggctgagtttacataaatgatctagattgaaactcagctacctttcttcctcatgtggtgtaattacagccctatctggagacagcgaatacagcaaacagattttattacctagttcgctcaaacactacatgaagttattttagttaaagccctcccccaaaagttataaaaccattttatcagggcccaacatgtggcatgcaatgaagagaaaatgtaaagctacagaggttaatgtattgtattataaaatattttaagtgtactcaaaatatcataattgtacagtttatgccaccataatttgaggcctatagatttagcttaagagaacactgttctgtttgaaatgctttctgtcactgaaattggcttaattagtaaccatggataagatgctttagatcagactaggttttaatcattaacttccacaaagaagtcatactttgcgttaggtgtgctggttggatgtgcaggaacttcagcaagcagtaggttttactaagcagatggtcgggcactgcagggcaccaggcaggatcctagggcgcctcttattctgcgttagcatctggtttgctgtatgaccttgcacaagtcacttccttctgagcctcaattttctcatctgtacaatgagattcaaaagttgacctgaaagtcaagtgtgaaaaaaaaaaagagattaaacaagataattatgaaattctt

SEQ ID NO: 23551 - DNA, 241 bp, Homo sapiens
  source 1..241: mol_type = unassigned DNA
gttcagaatatggcatttcagtatgggaagcacatggccatgagtcataagataaattctgatgtccagccttttattaaagaaaagaccagtgactccatgacttttaatctaaactcagctcctgtagtcttacatcaggaatttcttggaagagatttgtggattaaacagatcggagagtcttcaagtacagaagttcaactttctaactttcaacaaatgctactttcaacactct

SEQ ID NO: 23552 - DNA, 1338 bp, Homo sapiens
  source 1..1338: mol_type = unassigned DNA
aatatggcgtcctccacataggcagtggctgtggtttctaccccgggtggccgggggcagtgctgagctgggactgttgtttgcccagcctgggctgcagaaagcagcagttaaagttcgtttctggtcactgctccaggaagccaccttactctgagggtcaagaattgccgcttccttttagttactgtaagttcctcctctgcccctggtttgtttcccgcggcacttctggatacccccaggtcccagacccttccagactcaaaccatgaactttcggcagctgctgttgcacttgccacgttatcttggagcctcgggttccccgcgtcgcctgtggtggtccccgtccctcgacaccatctcctcggtgggctcttggcgtggtcggtcctccaagtccccggcccactggaatcaggtagtgtcagaggcggagaagatcgtggggtaccccacgtccttcatgagccttcgctgcctgctgagcgacgagctcagcaacatcgctatgcaggtgcggaagctggtgggcactcagcaccctctgcttaccacagccagggggcttgtacatgacagctggaatagcctccagttgaggggcttggtggtgctccttatctctaaagcagctgggcccagcagcgtgaacacttcatgtcagaactatgacatggtcagtgggatctactcatgtcaaagaagtttggcagagatcacggagctaattcatattgctctccttgtacatcgtgggatagtaaatttaaatgagttgcaatcatctgatggtccactgaaagacatgcaatttggaaataaaattgctatcctgagtggagactttcttctagcaaatgcctgcaatggactagctctgctacagaacaccaaggttgtggaacttttagcaagtgctcttatggacttggtacaaggagtatatcatgaaaattctacttcaaaggctcaagaaaaaggaagattggactatgctaagttgcgagaaagaatcaaagctggcaaaggtgtgacttcagctattgacctgtgtcgttaccatggaaacaaggcactggaggccctggagagctttcctccctcggaggccagatctgctttagaaaacattgtgtttgctgtgaccagattttcatgacatcaaattaaaaagacactattgttagttagctgaaaatcctagggaatgaggttgattgggagcgctttcacgatgcgttaatgacttttaaaacatatgcatttttccttccttttatcacattgctaaatgagttctgctttctttttggaactgctacaaacaaaatt

SEQ ID NO: 23553 - DNA, 2959 bp, Homo sapiens
  source 1..2959: mol_type = unassigned DNA
agagcttgtggaggccatggggcgcgtcgtcgcggagctcgtctcctcgctgctggggttgtggctgttgctgtgcagctgcggatgccccgagggcgccgagctgcgtgctccgccagataaaatcgcgattattggagccggaattggtggcacttcagcagcctattacctgcggcagaaatttgggaaagatgtgaagatagacctgtttgaaagagaagaggtcgggggccgcctggctaccatgatggtgcaggggcaagaatacgaggcaggaggttctgtcatccatcctttaaatctgcacatgaaacgttttgtcaaagacctgggtctctctgctgttcaggcctctggtggcctactggggatatataatggagagactctggtatttgaggagagcaactggttcataattaacgtgattaaattagtttggcgctatggatttcaatccctccgtatgcacatgtgggtagaggacgtgttagacaagttcatgaggatctaccgctaccagtctcatgactatgccttcagtagtgtcgaaaaattacttcatgctctaggaggagatgacttccttggaatgcttaatcgaacacttcttgaaaccttgcaaaaggccggcttttctgagaagttcctcaatgaaatgattgctcctgttatgagggtcaattatggccaaagcacggacatcaatgcctttgtgggggcggtgtcactgtcctgttctgattctggcctttgggcagtagaaggtggcaataaacttgtttgctcagggcttctgcaggcatccaaaagcaatcttatatctggctcagtaatgtacatcgaggagaaaacaaagaccaagtacacagtattgggattgtgccctctgtgagagaaaaggaagatcctgagccatcaacagatggaacatatgtttggaagatcttttcccaagaaactcttactaaagcacaaattttaaagctctttctgtcctatgattatgctgtgaagaagccatggcttgcatatcctcactataagcccccggagaaatgcccctctatcattctccatgatcgactttattacctcaatggcatagagtgtgcagcaagtgccatggagatgagtgccattgcagcccacaacgctgcactccttgcctatcaccgctggaacgggcacacagacatgattgatcaggatggcttatatgagaaacttaaaactgaactatgaagtgacacactcctttttcccctcctagttccaaatgactatcagtggcaaaaaagaacaaaatctgagcagagatgattttgaaccagatattttgccattatcattgtttaataaaagtaatccctgctggtcataggaaaacacacggttctaattaagtgtgaaggtatagctattgcacttatgccatctccaaaatttcttaagtattctttcactatccattaggagtttttcttaaacttgtctgataataagaatcacctggagttaggaggtggtggttgcagtgagccaatctcaccattgcacttcagcctgagcaacacgagcaaaactccgtctcaaaagtaaataaaaataatcacctggagtttgttaaaccatatggattctcaagctcctctcttgaagattctgattcagtaggtctgggagtggcgcgctggattttgatcaaaattgtagagcattttaaggtgagtacctgagggagaacttaaagacatcttagttggggagtagtccttttgaattttacagctagatataatcttcagtcagataaaatttatgggagctggtgtcttatgcctgactcttagtaatttcataccggtttgaagtacgtgtgcccatgcctaaagccttgactttcagaatgttgtcttttgattcttctgtcttgatttgattaggggtgaaatttagaagtcttagtaatgtaacttgaagatgttaaacaaaaatctcaagtaaaatgaaaagcaaatatgggctactgaattaagaaactggcattctagtattaaatcctcacttcaggagcttttaaaaatactgagacccccccataaccagagattcagattcaaagactgaggataggaccttagcattgtagctatttaaagtttctaatgtgcacccagggttgggaatcaccaatgtgggtgtgaaaatgcctacaaagggttttagtgccttagaagtcctaagaagcccaatctgtatcaaagcagatccattttgcaaggatctttcttttagaactttctcagttctcttagtaagaactttagaagtaatcttgataataagcacagacagcctaacagcagaggcaacttaaataactcctgagcagttggcactagaacagaatacttggaatgacaccaaagttaaccaagtccagcatatgtccaaagagttaagtgtttcatttactgtagcattctgggtgagaaattggttgctgaaatcttaagacagtggtctcaaccttggctgcacattggaatcacctgtagggttttaaagcatccaaatggtaattaacaggcagcaaaacttcagaactagttctgcatctactgtgcaaagatcatgattaactgtcaagacactggtagaacagaacaagcaaaagattaagagttcaaaagtaaatgcaaccaatttaacatgtagtgttattaaaaaattacaaaggcctagaccagcctgggcaacatggtgaaaccccatctctacaaaaaatttttaaaaagttggccaggcatggtaatgcgcgcctgtggtcccagctgctcgggaggctgaggtgggaggatcacttgagccttggaggtcaaggctgcagtgaatcatgatcatgccactgtactccagcctgggcaacagagaccatcttaaaaaaaaaaaa

SEQ ID NO: 23554 - DNA, 5345 bp, Homo sapiens
  source 1..5345: mol_type = unassigned DNA
gaggccagctgcagagcttgtggaggccatggggcgcgtcgtcgcggagctcgtctcctcgctgctggggttgtggctgttgctgtgcagctgcggatgccccgagggcgccgagctgcgtgctccgccagataaaatcgcgattattggagccggaattggtggcacttcagcagcctattacctgcggcagaaatttgggaaagatgtgaagatagacctgtttgaaagagaagaggtcgggggccgcctggctaccatgatggtgcaggggcaagaatacgaggcaggaggttctgtcatccatcctttaaatctgcacatgaaacgttttgtcaaagacctgggtctctctgctgttcaggcctctggtggcctactggggatatataatggagagactctggtatttgaggagagcaactggttcataattaacgtgattaaattagtttggcgctatggatttcaatccctccgtatgcacatgtgggtagaggacgtgttagacaagttcatgaggatctaccgctaccagtctcatgactatgccttcagtagtgtcgaaaaattacttcatgctctaggaggagatgacttccttggaatgcttaatcgaacacttcttgaaaccttgcaaaaggccggcttttctgagaagttcctcaatgaaatgattgctcctgttatgagggtcaattatggccaaagcacggacatcaatgcctttgtgggggcggtgtcactgtcctgttctgattctggcctttgggcagtagaaggtggcaataaacttgtttgctcagggcttctgcaggcatccaaaagcaatcttatatctggctcagtaatgtacatcgaggagaaaacaaagaccaagtacacaggaaatccaacaaagatgtatgaagtggtctaccaaattggaactgagactcgttcagacttctatgacatcgtcttggtggccactccgttgaatcgaaaaatgtcgaatattacttttctcaactttgatcctccaattgaggaattccatcaatattatcaacatatagtgacaactttagttaagggggaattgaatacatctatctttagctctagacccatagataaatttggccttaatacagttttaaccactgataattcagatttgttcattaacagtattgggattgtgccctctgtgagagaaaaggaagatcctgagccatcaacagatggaacatatgtttggaagatcttttcccaagaaactcttactaaagcacaaattttaaagctctttctgtcctatgattatgctgtgaagaagccatggcttgcatatcctcactataagcccccggagaaatgcccctctatcattctccatgatcgactttattacctcaatggcatagagtgtgcagcaagtgccatggagatgagtgccattgcagcccacaacgctgcactccttgcctatcaccgctggaacgggcacacagacatgattgatcaggatggcttatatgagaaacttaaaactgaactatgaagtgacacactcctttttcccctcctagttccaaatgactatcagtggcaaaaaagaacaaaatctgagcagagatgattttgaaccagatattttgccattatcattgtttaataaaagtaatccctgctggtcataggaaaacacacggttctaattaagtgtgaaggtatagctattgcacttatgccatctccaaaatttcttaagtattctttcactatccattaggagtttttcttaaacttgtctgataataagaatcacctggagttaggaggtggtggttgcagtgagccaatctcaccattgcacttcagcctgagcaacacgagcaaaactccgtctcaaaagtaaataaaaataatcacctggagtttgttaaaccatatggattctcaagctcctctcttgaagattctgattcagtaggtctgggagtggcgcgctggattttgatcaaaattgtagagcattttaaggtgagtacctgagggagaacttaaagacatcttagttggggagtagtccttttgaattttacagctagatataatcttcagtcagataaaatttatgggagctggtgtcttatgcctgactcttagtaatttcataccggtttgaagtacgtgtgcccatgcctaaagccttgactttcagaatgttgtcttttgattcttctgtcttgatttgattaggggtgaaatttagaagtcttagtaatgtaacttgaagatgttaaacaaaaatctcaagtaaaatgaaaagcaaatatgggctactgaattaagaaactggcattctagtattaaatcctcacttcaggagcttttaaaaatactgagacccccccataaccagagattcagattcaaagactgaggataggaccttagcattgtagctatttaaagtttctaatgtgcacccagggttgggaatcaccaatgtgggtgtgaaaatgcctacaaagggttttagtgccttagaagtcctaagaagcccaatctgtatcaaagcagatccattttgcaaggatctttcttttagaactttctcagttctcttagtaagaactttagaagtaatcttgataataagcacagacagcctaacagcagaggcaacttaaataactcctgagcagttggcactagaacagaatacttggaatgacaccaaagttaaccaagtccagcatatgtccaaagagttaagtgtttcatttactgtagcattctgggtgagaaattggttgctgaaatcttaagacagtggtctcaaccttggctgcacattggaatcacctgtagggttttaaagcatccaaatggtaattaacaggcagcaaaacttcagaactagttctgcatctactgtgcaaagatcatgattaactgtcaagacactggtagaacagaacaagcaaaagattaagagttcaaaagtaaatgcaaccaatttaacatgtagtgttattaaaaaattacaaaggcctagaccagcctgggcaacatggtgaaaccccatctctacaaaaaatttttaaaaagttggccaggcatggtaatgcgcgcctgtggtcccagctgctcgggaggctgaggtgggaggatcacttgagccttggaggtcaaggctgcagtgaatcatgatcatgccactgtactccagcctgggcaacagagaccatcttaaaaaaaaaaaatccttccattgaatagaaacttcaaagtccttcatcagatcatggcattagctactttagcaaaatagtgtaaactttggttctgagtaaaaatgacttcttccctaccacagttgtgaatgttaatatgctgataaaactgccaagatatatttgataggtaggggattaaactcatggtttgtcaaaagagtgtttttttctagttttattcttaacagatatgttgaggtattcatatttgtttccttttgtggttttaatgaagacaatttgtaaagtaatactgttatgtatatgctaaatgttggtaaatactaattaatttccatcatttgtagacttgttttgcaatgggatatatttttacttataataccaatttaggctgggcgcagtggctcacgcctgtaatcccagcactttgggaggccaaggcaaacggatcacgaggtcaggagatcaagaccatcctggccaacatggtgaaaccccatctctactgaatacacaaaaattggctggacatggtggcgcatgtctgtaatcccagctactgtaatctcagctacttgggaggctgaggcaggagaattgcctcaaccgggaggcggaggttgcagtgagccaagatcgcaccactgcactccagcctggcaacagagcgagactctgtctcagaaaaaaaaaacaaaaaccagtttaggctgggtatggtggctcaccagcactttgggaggctgaggcaggtggatctcttgaggtcgggagtttgagaccagcctggccaacatggtgaaaccctgtctttactaaaaatacaaaaattagccaggcatggtggcgtgtgccagtaatcccagctacttgggaggctgaggcgcgagaatcgcttgaaccctggagatggaggttgcagtgagcagagatcgcaccactgcactccagcctgggcaagagtgagactgtgtctcaaaaggaaaaaaaaaaaattaaaaatgttgctggtattacatcaaacctactctggataaattttccagtagggcatctgaaattgctttggcaaaagcaaaacaggttatcaatacaccaaggacatcaagtagttttaatgcaactacagtgttgagtgcttttttactgggagaaaaatcctagcagaacctgctactctgggcgcattaggtagttttatgcaactatagtattaagagttttattggaagaaaaaacactgtcagagcttactgctccagacctttttttttaatagaagagactggtaaaaatgatgcaggggctgaatgaaagccagctctgctccagtggctctctgagttgagcatgcatcagttaccttaagggcttgttaaaacatcgctaggctccaccctgtttattcaataagtttgttatgggatataagaagatgcattttattaagttccccagtgatgctgctgttctactataggaaccacacttgaagaactagttctacaattcagctgtatgttgtaaaggagtcaagtcaatgaaggagttataaagagttgctgaaaaatggagtaacagtgtatgggacttcacatcagttctccttattgattgttagtttgatccctcttgttcttttgttgtaaacattttctataattaggaaatgccatttaagagtgagagaggtatatatctatgagccattgtgtttggtgttttacaagaactttaccatactggtgtgtagtccattctgtacagtttaaaagtgattcacgatttgcaggctttttatcagatcacaaaaaaatcagtctttaagcatttgcttggtaaggtttcttaagattaggtttataatacaaccatctgtaatgtatctctcgtttgagcttgtgggccatacaattcattaactagatgaatacattgtggacagcatcctcactacccctctctactcactcacaaagaaccatgatacactggaatgtttttctctggaatcctctttctactcttgtattaaaatttttccccacttcatgattatattcaaaataaacaactacatcattacttctt

SEQ ID NO: 23555 - DNA, 1820 bp, Homo sapiens
  source 1..1820: mol_type = unassigned DNA
attctcctgcctcagcctcccgagtagctgggactacaggcgcccgccactatgccgagctaaatttttgtatttttagtagagacggggtttcaccgtgttagccaggatggtctcgatctcctgacctcatgatccacccacctcggcctcccaaagtgctgggattacaggcttgagccaccgcgcccggccagcttctgccttcgatgtcttctgaaggaggcgattattggagccggaattggtggcacttcagcagcctattacctgcggcagaaatttgggaaagatgtgaagatagacctgtttgaaagagaagaggtcgggggccgcctggctaccatgatggtgcaggggcaagaatacgaggcaggaggttctgtcatccatcctttaaatctgcacatgaaacgttttgtcaaagacctgggtctctctgctgttcaggcctctggtggcctactggggatatataatggagagactctggtatttgaggagagcaactggttcataattaacgtgattaaattagtttggcgctatggatttcaatccctccgtatgcacatgtgggtagaggacgtgttagacaagttcatgaggatctaccgctaccagtctcatgactatgccttcagtagtgtcgaaaaattacttcatgctctaggaggagatgacttccttggaatgcttaatcgaacacttcttgaaaccttgcaaaaggccggcttttctgagaagttcctcaatgaaatgattgctcctgttatgagggtcaattatggccaaagcacggacatcaatgcctttgtgggggcggtgtcactgtcctgttctgattctggcctttgggcagtagaaggtggcaataaacttgtttgctcagggcttctgcaggcatccaaaagcaatcttatatctggctcagtaatgtacatcgaggagaaaacaaagaccaagtacacaggaaatccaacaaagatgtatgaagtggtctaccaaattggaactgagactcgttcagacttctatgacatcgtcttggtggccactccgttgaatcgaaaaatgtcgaatattacttttctcaactttgatcctccaattgaggaattccatcaatattatcaacatatagtgacaactttagttaagggggaattgaatacatctatctttagctctagacccatagataaatttggccttaatacagttttaaccactgataattcagatttgttcattaacagtattgggattgtgccctctgtgagagaaaaggaagatcctgagccatcaacagatggaacatatgtttggaagatcttttcccaagaaactcttactaaagcacaaattttaaagctctttctgtcctatgattatgctgtgaagaagccatggcttgcatatcctcactataagcccccggagaaatgcccctctatcattctccatgatcgactttattacctcaatggcatagagtgtgcagcaagtgccatggagatgagtgccattgcagcccacaacgctgcactccttgcctatcaccgctggaacgggcacacagacatgattgatcaggatggcttatatgagaaacttaaaactgaactatgaagtgacacactcctttttcccctcctagttccaaatgactatcagtggcaaaaaagaacaaaatctgagcagagatgattttgaaccagatattttgccattatcattgtttaataaaagtaatccctgctggtcataggaaaacacacggttctaattaagtgtgaaggtatagctattgcacttat

SEQ ID NO: 23556 - DNA, 1873 bp, Homo sapiens
  source 1..1873: mol_type = unassigned DNA
attcacacttcagggcggctttcagctctggtcggaataggactgtgcattcccaggcgtggagagcgattattggagccggaattggtggcacttcagcagcctattacctgcggcagaaatttgggaaagatgtgaagatagacctgtttgaaagagaagaggtcgggggccgcctggctaccatgatggtgcaggggcaagaatacgaggcaggaggttctgtcatccatcctttaaatctgcacatgaaacgttttgtcaaagacctgggtctctctgctgttcaggcctctggtggcctactggggatatataatggagagactctggtatttgaggagagcaactggttcataattaacgtgattaaattagtttggcgctatggatttcaatccctccgtatgcacatgtgggtagaggacgtgttagacaagttcatgaggatctaccgctaccagtctcatgactatgccttcagtagtgtcgaaaaattacttcatgctctaggaggagatgacttccttggaatgcttaatcgaacacttcttgaaaccttgcaaaaggccggcttttctgagaagttcctcaatgaaatgattgctcctgttatgagggtcaattatggccaaagcacggacatcaatgcctttgtgggggcggtgtcactgtcctgttctgattctggcctttgggcagtagaaggtggcaataaacttgtttgctcagggcttctgcaggcatccaaaagcaatcttatatctggctcagtaatgtacatcgaggagaaaacaaagaccaagtacacaggaaatccaacaaagatgtatgaagtggtctaccaaattggaactgagactcgttcagacttctatgacatcgtcttggtggccactccgttgaatcgaaaaatgtcgaatattacttttctcaactttgatcctccaattgaggaattccatcaatattatcaacatatagtgacaactttagttaagggggaattgaatacatctatctttagctctagacccatagataaatttggccttaatacagttttaaccactgataattcagatttgttcattaacagtattgggattgtgccctctgtgagagaaaaggaagatcctgagccatcaacagatggaacatatgtttggaagatcttttcccaagaaactcttactaaagcacaaattttaaagctctttctgtcctatgattatgctgtgaagaagccatggcttgcatatcctcactataagcccccggagaaatgcccctctatcattctccatgatcgactttattacctcaatggcatagagtgtgcagcaagtgccatggagatgagtgccattgcagcccacaacgctgcactccttgcctatcaccgctggaacgggcacacagacatgattgatcaggatggcttatatgagaaacttaaaactgaactatgaagtgacacactcctttttcccctcctagttccaaatgactatcagtggcaaaaaagaacaaaatctgagcagagatgattttgaaccagatattttgccattatcattgtttaataaaagtaatccctgctggtcataggaaaacacacggttctaattaagtgtgaaggtatagctattgcacttatgccatctccaaaatttcttaagtattctttcactatccattaggagtttttcttaaacttgtctgataataagaatcacctggagttaggaggtggtggttgcagtgagccaatctcaccattgcacttcagcctgagcaacacgagcaaaactccgtctcaaaagtaaataaaaataatcacctggagtttgttaaaccatatggattctca

SEQ ID NO: 23557 - DNA, 2546 bp, Homo sapiens
  source 1..2546: mol_type = unassigned DNA
ggagagccgagcgccaacccgctagcgcctgaatccggcgtgctgcccgctcgccgcccgccatggcccgcgcagccccgctgctcgccgcgttgaccgcgctcctcgccgccgccgctgctggcggagatgccccgccgggcaaaatcgcggtggttggggctgggattgggggctctgctgtggcccattttctccagcagcactttggacctcgggtgcagatcgacgtgtacgagaagggaaccgtgggtggccgcttggccaccatctcagtcaacaagcagcactatgagagcggggctgcctccttccactccctgagcctgcacatgcaggacttcgtcaagctgctggggctgaggcaccggcgcgaggtggtgggcaggagcgccatcttcggcggggagcacttcatgctggaggagactgactggtacctgctgaacctcttccgcctctggtggcactatggcatcagcttcctgaggctgcagatgtgggtggaggaggtcatggagaagttcatgaggatctataagtaccaggcccacggctatgccttctcgggtgtggaggagctgctctactcactgggggagtccacctttgttaacatgacccagcactctgtggctgagtccctgctgcaggtgggcgtcacgcagcgctttattgatgatgtcgtttctgctgtcctgcgggccagctatggccagtcagcagcgatgcccgcctttgcaggagccatgtcactagccggggcccaaggcagcctgtggtctgtggaaggaggcaataagctggtttgttccggtttgctgaagctcaccaaggccaatgtgatccatgccacagtgacctctgtgaccctgcacagcacagaggggaaagccctgtaccaggtggcgtatgagaatgaggtaggcaacagctctgacttctatgacatcgtggtcatcgccacccccctgcacctggacaacagcagcagcaacttaacctttgcaggcttccacccgcccattgatgacgtgcagggctctttccagcccaccgtcgtctccttggtccacggctacctcaactcgtcctacttcggtttcccagaccctaagcttttcccctttgccaacatccttaccacagatttccccagcttcttctgcactctggacaacatctgccctgtcaacatctctgccagcttccggcgaaagcagccccaggaggcagctgtttggcgagtccagtcccccaagcccctctttcggacccagctaaagaccctgttccgttcctattactcagtgcagacagctgagtggcaggcccatcccctctatggctcccgccccacgctcccgaggtttgcactccatgaccagctcttctacctcaatgccctggagtgggcggccagctccgtggaggtgatggccgtggctgccaagaatgtggccttgctggcttacaaccgctggtaccaggacctagacaagattgatcaaaaagatttgatgcacaaggtcaagactgaactgtgagggctctagggagagcctgggaactttcatcccccactgaagatggatcatcccacagcagcccaggactgaataagccatgctcgcccaccaggcttctttctgacccctcatgtatcaagcatctccaggtgacctactgtctgcctatattaagggtccacacggcggctgctgcttttttttaagggggaaagtaagaaaagagaaggaaatccaagccagtatatttgttttatttattttttttaagaagaaaaaagttcatcttcacaaggtgcttcagacttggtttcttagctagaaaccagaagactacgggagggaatataaggcagagaactatgagtcttattttattactgtttttcactacctactcccacaatggacaatcaattgaggcaacctacaagaaaacatttacaaccagatggttacaaataaagtagaagggaagatcagaaaacctaagaaatgatcatagctcctggttactgtggacttgatggatttgaagtacctagttcagaactccctagtcaccatctccaagcctgtcaacatcactgcatattggaggagatgactgtggtaggacccaaggaagagatgtgtgcctgaatagtcgtcaccatatctccaagcttcctggcaaccagtgggaaaagaaacatgcgaggctgtaggaagagggaagctcttccttggcacctagaggaattagccattctcttccttatgcaaagattgaggaatgcaacaatataaagaagagaagtccccagatggtagagagcagtcatatcttacccctagatgttcatcccagcagaagaaagaagaaggtgttggggtaggattcttcagaggttagcctggtactttctcatcagacactagcttgaagtaagaggagaattatgcttttctttgctttttctacaaacccttaaaaatcacttgttttaaaaagaaagtaaaagcccttttcattcc

SEQ ID NO: 23558 - DNA, 1200 bp, Homo sapiens
  source 1..1200: mol_type = unassigned DNA
gccaggaaggcttgcaggttctgctgtttggttgctgaagggggtcagtgtgtgtatgtgtcatggaggtgggcagggaaggggagggctgtgcgtgggggagaggatatatatgctggtgtggctgagaaagcggaaccgagcctcgcatccatcggagggagccggggactgacagctctcagcacctgcttcctgctcctgcaccatgaaagtcctgctttgtgacctgctgctgctcagtctcttctccagtgtgttcagcagttgtcagagggactgtctcacatgccaggagaagctccacccagccctggacagcttcgacctggaggtgtgcatcctcgagtgtgaagagaaggtcttccccagccccctctggactccatgcaccaaggtcatggccaggagctcttggcagctcagccctgccgccccagagcatgtggcggctgctctctaccagccgagagcttcggagatgcagcatctgcggcgaatgccccgagtccggagcttgttccaggagcaggaagagcccgagcctggcatggaggaggctggtgagatggagcagaagcagctgcagaagagatttgggggcttcaccggggcccggaagtcggccaggaagttggccaatcagaagcggttcagtgagtttatgaggcaatacttggtcctgagcatgcagtccagccagcgccggcgcaccctgcaccagaatggtaatgtgtagccggaaggggcgctcctcccagctgtaccggccactgcaacccatgagcgtccaggtgatcccccaaacagcatgtgctcagccccagacctgccgcctgggaatcaggattccttcttccccaaggcactgagcgcctgcagatcccgcaggcttcgtttgcctccagaaccttcccgtctgattgttcctccccagccccctggcatgtttcaccacaaccctgttgctacatcagagtgtatttttgtaattcctctagctaccatttcaatagccccatctctcctgctcacccgcctcttgccccttctaggggcaggtgaaaggaataggaaattgaacctggggttttgacttgccactgccataacttgtttgtaaaagagctgttctttttgactgattgttttaaacaacgatttctccattaaacttctactgagcaaatggttaataaa

SEQ ID NO: 23559 - DNA, 554 bp, Homo sapiens
  source 1..554: mol_type = unassigned DNA
tcagtcctcacagagcctctggaagcacagggaaggcagctgtgggatcctggctgaacagagtccagcacctgcttcctgctcctgcaccatgaaagtcctgctttgtgacctgctgctgctcagtctcttctccagtgtgttcagcagttgtcagagggactgtctcacatgccaggagaagctccacccagccctggacagcttcgacctggaggtgtgcatcctcgagtgtgaagagaaggtcttccccagccccctctggactccatgcaccaaggtcatggccaggagctcttggcagctcagccctgccgccccagagcatgtggcggctgctctctaccagccgagagcttcggagatgcagcatctgcggcgaatgccccgagtccggagcttgttccaggagcaggaagagcccgagcctggcatggaggaggctggtgagatggagcagaagcagctgcagaagagatttgggggcttcaccggggcccggaagtcggccaggaagttggccaatcagaagcggttcagtgagtttatgaggc

SEQ ID NO: 23560 - DNA, 2590 bp, Homo sapiens
  source 1..2590: mol_type = unassigned DNA
tgggacaggcagctccggggtccgcggtttcacatcggaaacaaaacagcggctggtctggaaggaacctgagctacgagccgcggcggcagcggggcggcggggaagcgtatacctaatctgggagcctgcaagtgacaacagcctttgcggtccttagacagcttggcctggaggagaacacatgaaagaaagaacctcaagaggctttgttttctgtgaaacagtatttctatacagttgctccaatgacagagttacctgcaccgttgtcctacttccagaatgcacagatgtctgaggacaaccacctgagcaatactgtacgtagccagaatgacaatagagaacggcaggagcacaacgacagacggagccttggccaccctgagccattatctaatggacgaccccagggtaactcccggcaggtggtggagcaagatgaggaagaagatgaggagctgacattgaaatatggcgccaagcatgtgatcatgctctttgtccctgtgactctctgcatggtggtggtcgtggctaccattaagtcagtcagcttttatacccggaaggatgggcagctaatctataccccattcacagaagataccgagactgtgggccagagagccctgcactcaattctgaatgctgccatcatgatcagtgtcattgttgtcatgactatcctcctggtggttctgtataaatacaggtgctataaggtcatccatgcctggcttattatatcatctctattgttgctgttctttttttcattcatttacttgggggaagtgtttaaaacctataacgttgctgtggactacattactgttgcactcctgatctggaattttggtgtggtgggaatgatttccattcactggaaaggtccacttcgactccagcaggcatatctcattatgattagtgccctcatggccctggtgtttatcaagtacctccctgaatggactgcgtggctcatcttggctgtgatttcagtatatgatttagtggctgttttgtgtccgaaaggtccacttcgtatgctggttgaaacagctcaggagagaaatgaaacgctttttccagctctcatttactcctcaacaatggtgtggttggtgaatatggcagaaggagacccggaagctcaaaggagagtatccaaaaattccaagtataatgcagaaaggggagtaaaacttggattgggagatttcattttctacagtgttctggttggtaaagcctcagcaacagccagtggagactggaacacaaccatagcctgtttcgtagccatattaattggtttgtgccttacattattactccttgccattttcaagaaagcattgccagctcttccaatctccatcacctttgggcttgttttctactttgccacagattatcttgtacagccttttatggaccaattagcattccatcaattttatatctagcatatttgcggttagaatcccatggatgtttcttctttgactataacaaaatctggggaggacaaaggtgattttcctgtgtccacatctaacaaagtcaagattcccggctggacttttgcagcttccttccaagtcttcctgaccaccttgcactattggactttggaaggaggtgcctatagaaaacgattttgaacatacttcatcgcagtggactgtgtccctcggtgcagaaactaccagatttgagggacgaggtcaaggagatatgataggcccggaagttgctgtgccccatcagcagcttgacgcgtggtcacaggacgatttcactgacactgcgaactctcaggactaccgttaccaagaggttaggtgaagtggtttaaaccaaacggaactcttcatcttaaactacacgttgaaaatcaacccaataattctgtattaactgaattctgaacttttcaggaggtactgtgaggaagagcaggcaccagcagcagaatggggaatggagaggtgggcaggggttccagcttccctttgattttttgctgcagactcatcctttttaaatgagacttgttttcccctctctttgagtcaagtcaaatatgtagattgcctttggcaattcttcttctcaagcactgacactcattaccgtctgtgattgccatttcttcccaaggccagtctgaacctgaggttgctttatcctaaaagttttaacctcaggttccaaattcagtaaattttggaaacagtacagctatttctcatcaattctctatcatgttgaagtcaaatttggattttccaccaaattctgaatttgtagacatacttgtacgctcacttgccccagatgcctcctctgtcctcattcttctctcccacacaagcagtctttttctacagccagtaaggcagctctgtcgtggtagcagatggtcccattattctagggtcttactctttgtatgatgaaaagaatgtgttatgaatcggtgctgtcagccctgctgtcagaccttcttccacagcaaatgagatgtatgcccaaagacggtagaattaaagaagagtaaaatggctgttgaagc

SEQ ID NO: 23561 - DNA, 6078 bp, Homo sapiens
  source 1..6078: mol_type = unassigned DNA
cggtgagggttctcgggcggggcctgggacaggcagctccggggtccgcggtttcacatcggaaacaaaacagcggctggtctggaaggaacctgagctacgagccgcggcggcagcggggcggcggggaagcgtatacctaatctgggagcctgcaagtgacaacagcctttgcggtccttagacagcttggcctggaggagaacacatgaaagaaagaacctcaagaggctttgttttctgtgaaacagtatttctatacagttgctccaatgacagagttacctgcaccgttgtcctacttccagaatgcacagatgtctgaggacaaccacctgagcaatactgtacgtagccagaatgacaatagagaacggcaggagcacaacgacagacggagccttggccaccctgagccattatctaatggacgaccccagggtaactcccggcaggtggtggagcaagatgaggaagaagatgaggagctgacattgaaatatggcgccaagcatgtgatcatgctctttgtccctgtgactctctgcatggtggtggtcgtggctaccattaagtcagtcagcttttatacccggaaggatgggcagctaatctataccccattcacagaagataccgagactgtgggccagagagccctgcactcaattctgaatgctgccatcatgatcagtgtcattgttgtcatgactatcctcctggtggttctgtataaatacaggtgctataaggtcatccatgcctggcttattatatcatctctattgttgctgttctttttttcattcatttacttgggggaagtgtttaaaacctataacgttgctgtggactacattactgttgcactcctgatctggaattttggtgtggtgggaatgatttccattcactggaaaggtccacttcgactccagcaggcatatctcattatgattagtgccctcatggccctggtgtttatcaagtacctccctgaatggactgcgtggctcatcttggctgtgatttcagtatatgatttagtggctgttttgtgtccgaaaggtccacttcgtatgctggttgaaacagctcaggagagaaatgaaacgctttttccagctctcatttactcctcaacaatggtgtggttggtgaatatggcagaaggagacccggaagctcaaaggagagtatccaaaaattccaagtataatgcagaaagcacagaaagggagtcacaagacactgttgcagagaatgatgatggcgggttcagtgaggaatgggaagcccagagggacagtcatctagggcctcatcgctctacacctgagtcacgagctgctgtccaggaactttccagcagtatcctcgctggtgaagacccagaggaaaggggagtaaaacttggattgggagatttcattttctacagtgttctggttggtaaagcctcagcaacagccagtggagactggaacacaaccatagcctgtttcgtagccatattaattggtttgtgccttacattattactccttgccattttcaagaaagcattgccagctcttccaatctccatcacctttgggcttgttttctactttgccacagattatcttgtacagccttttatggaccaattagcattccatcaattttatatctagcatatttgcggttagaatcccatggatgtttcttctttgactataacaaaatctggggaggacaaaggtgattttcctgtgtccacatctaacaaagtcaagattcccggctggacttttgcagcttccttccaagtcttcctgaccaccttgcactattggactttggaaggaggtgcctatagaaaacgattttgaacatacttcatcgcagtggactgtgtccctcggtgcagaaactaccagatttgagggacgaggtcaaggagatatgataggcccggaagttgctgtgccccatcagcagcttgacgcgtggtcacaggacgatttcactgacactgcgaactctcaggactaccgttaccaagaggttaggtgaagtggtttaaaccaaacggaactcttcatcttaaactacacgttgaaaatcaacccaataattctgtattaactgaattctgaacttttcaggaggtactgtgaggaagagcaggcaccagcagcagaatggggaatggagaggtgggcaggggttccagcttccctttgattttttgctgcagactcatcctttttaaatgagacttgttttcccctctctttgagtcaagtcaaatatgtagattgcctttggcaattcttcttctcaagcactgacactcattaccgtctgtgattgccatttcttcccaaggccagtctgaacctgaggttgctttatcctaaaagttttaacctcaggttccaaattcagtaaattttggaaacagtacagctatttctcatcaattctctatcatgttgaagtcaaatttggattttccaccaaattctgaatttgtagacatacttgtacgctcacttgccccagatgcctcctctgtcctcattcttctctcccacacaagcagtctttttctacagccagtaaggcagctctgtcgtggtagcagatggtcccattattctagggtcttactctttgtatgatgaaaagaatgtgttatgaatcggtgctgtcagccctgctgtcagaccttcttccacagcaaatgagatgtatgcccaaagacggtagaattaaagaagagtaaaatggctgttgaagcactttctgtcctggtattttgtttttgcttttgccacacagtagctcagaatttgaacaaatagccaaaagctggtggttgatgaattatgaactagttgtatcaacacaaagcaagagttggggaaagccatatttaacttggtgagctgtgggagaacctggtggcagaaggagaaccaactgccaaggggaaagagaaggggcctccagcagcgaaggggatacagtgagctaatgatgtcaaggaggagtttcaggttattctcgtcagctccacaaatgggtgctttgtggtctctgcccgcgttacctttcctctcaatgtacctttgtgtgaactgggcagtggaggtgcctgctgcagttaccatggagttcaggctctgggcagctcagtcaggcaaaacacacaaacagccatcagcctgtgtgggctcagggcacctctggacaaaggcttgtggggcataaccttctttaccacagagagcccttagctatgctgatcagaccgtaagcgtttatgagaaacttagtttcctcctgtggctgaggaggggccagctttttcttcttttgcctgctgttttctctcccaatctatgatatgatatgacctggtttggggctgtctttggtgtttagaatatttgttttctgtcccaggatatttcttataagaacctaacttcaagagtagtgtgcgagtactgatctgaatttaaattaaaattggcttatattaggcagtcacagacaggaaaaataagagctatgcaaagaaagggggatttaaagtagtaggttctatcatctcaattcatttttttccatgaaatcccttcttccaagattcattccctctctcagacatgtgctagcatgggtattatcattgagaaagcacagctacagcaaagccacctgaatagcaatttgtgattggaagcattcttgagggatccctaatctagagtaatttatttgtgtaaggatcccaaatgtgttgcacctttcatgatacatttcttctctgaagagggtacgtggggtgtgtgtatttaaatccatcctatgtattactgattgtcctgtgtagaaagatggcaattattctgtctctttctccaagtttgagccacatctcagccacattgttagacagtgtacagagaacctatctttcctttttttttttttaaaggacaggattttgctgtgttgcccaggctagacttgaactcctgggctcaagtaatccacctcagcctgagtagctgagactacagcccatcttatttctttaaatcattcatctcaggcagagaacttttccctcaaacattctttttagaattagttcagtcattcctaaaacatccaaatgctagtcttccaccatgaaaaatagattgtcactggaaagaacagtagcaatttccataaggatgtgccttcactcacacgggacaggcggtggttatagagtcgggcaaaaccagcagtagagtatgaccagccaagccaatctgcttaataaaaagatggaagacagtaaggaaggaaagtagccactaagagtctgagtctgactgggctacagaataaagggtatttatggacagaatgtcattacatgcctatgggaataccaatcatatttggaagatttgcagattttttttcagagaggaaagactcaccttcctgtttttggttctcagtaggttcgtgtgtgttcctagaatcacagctctgactccaaatgactcaatttctcaattagaaaaagtagaagctttctaagcaacttggaagaaaacagtcataagtaagcaatttgttgattttactacagaagcaacaactgaagaggcagtgtttttactttcagactccgggattcccattctgtagtctctctgcttttaaaaaccctccttttgcaatagatgcccaaacagatgatgtttattacttgttatttacgtggcctcagacagtgtatgtattctcgatataacttgtagagtgtgaaatataagtttaactaccaaataaggtctcccagggttagatgactgcgggaagcctttgatcccaacccccaaggctttgtatatttgatcatttgtgatctaaccctggaagaaaaagagctcagaaaccactatgaaaaaatttgttcagtgttttctgtgttcccgtaggttctggagtctgaggatgcaaagatgaataagataaattctcagaatgtagttataatctcttgttttctggtatatgccatctttctttaacttctctaaaatattgggtatttgtcaaataaccacttttaacagttaccattactgagggcttatacattggtgttataaaagtgacttgattcagaaatcaatccattcagtaaagtactccttctctaaatttgctgttatgtctataaggaacagtttgacctgcccttctcctcacctcctcacctgccttccaacattgaatttggaaggagacgtgaaaattggacatttggttttgcccttgggctggaaactatcatataatcataagtttgagcctagaagtgatccttgtgatcttctcacctctttaaattcccacaacacaagagattaaaaacagaggtttcagctcttcatagtgcgttgtgaaatggctggccagagtgtaccaacaaagctgtcatcgggctcacagctcagagacatctgcatgtgatcatctgcatagtcctctcctctaacgggaaacacctcagatttgcatataaaaaagcaccctggtgctgaaatgaacccctttcttgaacatcaaagctgtctcccacagccttgggcagcagggtgcctcttagtggatgtgctgggtccaccctgagccctgacatgtggtggcagcattgccagttggtctgtgtgtctgtgtagcagggacgatttcccagaaagcaattttccttttgaaatacgtaattgttgagactaggcagtttcaaagtcagctgcatatagtagcaagtacaggactgtcttgtttttggtgtccttggaggtgctggggtgagggtttcagtgggatcatttactctcacatgttgtctgccttctgcttctgtggacactgctttgtacttaattcagacagactgtgaatacaccttttttataaatacctttcaaattcttggtaagatataattttgatagctgattgcagattttctgtatttgtcagattaataaagactgcatgaatcca

SEQ ID NO: 23562 - DNA, 2856 bp, Homo sapiens
  source 1..2856: mol_type = unassigned DNA
tgggacaggcagctccggggtccgcggtttcacatcggaaacaaaacagcggctggtctggaaggaacctgagctacgagccgcggcggcagcggggcggcggggaagcgtatacctaatctgggagcctgcaagtgacaacagcctttgcggtccttagacagcttggcctggaggagaacacatgaaagaaagaacctcaagaggctttgttttctgtgaaacagtatttctatacagttgctccaatgacagagttacctgcaccgttgtcctacttccagaatgcacagatgtctgaggacaaccacctgagcaatactgtacgtagccagaatgacaatagagaacggcaggagcacaacgacagacggagccttggccaccctgagccattatctaatggacgaccccagggtaactcccggcaggtggtggagcaagatgaggaagaagatgaggagctgacattgaaatatggcgccaagcatgtgatcatgctctttgtccctgtgactctctgcatggtggtggtcgtggctaccattaagtcagtcagcttttatacccggaaggatgggcagctaatctataccccattcacagaagataccgagactgtgggccagagagccctgcactcaattctgaatgctgccatcatgatcagtgtcattgttgtcatgactatcctcctggtggttctgtataaatacaggtgctataaggtcatccatgcctggcttattatatcatctctattgttgctgttctttttttcattcatttacttgggggaagtgtttaaaacctataacgttgctgtggactacattactgttgcactcctgatctggaattttggtgtggtgggaatgatttccattcactggaaaggtccacttcgactccagcaggcatatctcattatgattagtgccctcatggccctggtgtttatcaagtacctccctgaatggactgcgtggctcatcttggctgtgatttcagtatatgatttagtggctgttttgtgtccgaaaggtccacttcgtatgctggttgaaacagctcaggagagaaatgaaacgctttttccagctctcatttactcctcaacaatggtgtggttggtgaatatggcagaaggagacccggaagctcaaaggagagtatccaaaaattccaagtataatgcagaaagagcctgtctgcctcctgctgccatcaacctgctgtctatagctcccatggcacccaggctgttcatgccaaagggtgcctgcaggcccacggcacagaaagggagtcacaagacactgttgcagagaatgatgatggcgggttcagtgaggaatgggaagcccagagggacagtcatctagggcctcatcgctctacacctgagtcacgagctgctgtccaggaactttccagcagtatcctcgctggtgaagacccagaggaaaggggagtaaaacttggattgggagatttcattttctacagtgttctggttggtaaagcctcagcaacagccagtggagactggaacacaaccatagcctgtttcgtagccatattaattggtttgtgccttacattattactccttgccattttcaagaaagcattgccagctcttccaatctccatcacctttgggcttgttttctactttgccacagattatcttgtacagccttttatggaccaattagcattccatcaattttatatctagcatatttgcggttagaatcccatggatgtttcttctttgactataacaaaatctggggaggacaaaggtgattttcctgtgtccacatctaacaaagtcaagattcccggctggacttttgcagcttccttccaagtcttcctgaccaccttgcactattggactttggaaggaggtgcctatagaaaacgattttgaacatacttcatcgcagtggactgtgtccctcggtgcagaaactaccagatttgagggacgaggtcaaggagatatgataggcccggaagttgctgtgccccatcagcagcttgacgcgtggtcacaggacgatttcactgacactgcgaactctcaggactaccgttaccaagaggttaggtgaagtggtttaaaccaaacggaactcttcatcttaaactacacgttgaaaatcaacccaataattctgtattaactgaattctgaacttttcaggaggtactgtgaggaagagcaggcaccagcagcagaatggggaatggagaggtgggcaggggttccagcttccctttgattttttgctgcagactcatcctttttaaatgagacttgttttcccctctctttgagtcaagtcaaatatgtagattgcctttggcaattcttcttctcaagcactgacactcattaccgtctgtgattgccatttcttcccaaggccagtctgaacctgaggttgctttatcctaaaagttttaacctcaggttccaaattcagtaaattttggaaacagtacagctatttctcatcaattctctatcatgttgaagtcaaatttggattttccaccaaattctgaatttgtagacatacttgtacgctcacttgccccagatgcctcctctgtcctcattcttctctcccacacaagcagtctttttctacagccagtaaggcagctctgtcgtggtagcagatggtcccattattctagggtcttactctttgtatgatgaaaagaatgtgttatgaatcggtgctgtcagccctgctgtcagaccttcttccacagcaaatgagatgtatgcccaaagacggtagaattaaagaagagtaaaatggctgttgaagc

SEQ ID NO: 23563 - DNA, 2776 bp, Homo sapiens
  source 1..2776: mol_type = unassigned DNA
cggtgagggttctcgggcggggcctgggacaggcagctccggggtccgcggtttcacatcggaaacaaaacagcggctggtctggaaggaacctgagctacgagccgcggcggcagcggggcggcggggaagcgtatacctaatctgggagcctgcaagtgacaacagcctttgcggtccttagacagcttggcctggaggagaacacatgaaagaaagaacctcaagaggctttgttttctgtgaaacagtatttctatacagttgctccaatgacagagttacctgcaccgttgtcctacttccagaatgcacagatgtctgaggacaaccacctgagcaatactaatgacaatagagaacggcaggagcacaacgacagacggagccttggccaccctgagccattatctaatggacgaccccagggtaactcccggcaggtggtggagcaagatgaggaagaagatgaggagctgacattgaaatatggcgccaagcatgtgatcatgctctttgtccctgtgactctctgcatggtggtggtcgtggctaccattaagtcagtcagcttttatacccggaaggatgggcagctaatctataccccattcacagaagataccgagactgtgggccagagagccctgcactcaattctgaatgctgccatcatgatcagtgtcattgttgtcatgactatcctcctggtggttctgtataaatacaggtgctataaggtcatccatgcctggcttattatatcatctctattgttgctgttctttttttcattcatttacttgggggaagtgtttaaaacctataacgttgctgtggactacattactgttgcactcctgatctggaattttggtgtggtgggaatgatttccattcactggaaaggtccacttcgactccagcaggcatatctcattatgattagtgccctcatggccctggtgtttatcaagtacctccctgaatggactgcgtggctcatcttggctgtgatttcagtatatgatttagtggctgttttgtgtccgaaaggtccacttcgtatgctggttgaaacagctcaggagagaaatgaaacgctttttccagctctcatttactcctcaacaatggtgtggttggtgaatatggcagaaggagacccggaagctcaaaggagagtatccaaaaattccaagtataatgcagaaagcacagaaagggagtcacaagacactgttgcagagaatgatgatggcgggttcagtgaggaatgggaagcccagagggacagtcatctagggcctcatcgctctacacctgagtcacgagctgctgtccaggaactttccagcagtatcctcgctggtgaagacccagaggaaaggggagtaaaacttggattgggagatttcattttctacagtgttctggttggtaaagcctcagcaacagccagtggagactggaacacaaccatagcctgtttcgtagccatattaattggtttgtgccttacattattactccttgccattttcaagaaagcattgccagctcttccaatctccatcacctttgggcttgttttctactttgccacagattatcttgtacagccttttatggaccaattagcattccatcaattttatatctagcatatttgcggttagaatcccatggatgtttcttctttgactataacaaaatctggggaggacaaaggtgattttcctgtgtccacatctaacaaagtcaagattcccggctggacttttgcagcttccttccaagtcttcctgaccaccttgcactattggactttggaaggaggtgcctatagaaaacgattttgaacatacttcatcgcagtggactgtgtccctcggtgcagaaactaccagatttgagggacgaggtcaaggagatatgataggcccggaagttgctgtgccccatcagcagcttgacgcgtggtcacaggacgatttcactgacactgcgaactctcaggactaccgttaccaagaggttaggtgaagtggtttaaaccaaacggaactcttcatcttaaactacacgttgaaaatcaacccaataattctgtattaactgaattctgaacttttcaggaggtactgtgaggaagagcaggcaccagcagcagaatggggaatggagaggtgggcaggggttccagcttccctttgattttttgctgcagactcatcctttttaaatgagacttgttttcccctctctttgagtcaagtcaaatatgtagattgcctttggcaattcttcttctcaagcactgacactcattaccgtctgtgattgccatttcttcccaaggccagtctgaacctgaggttgctttatcctaaaagttttaacctcaggttccaaattcagtaaattttggaaacagtacagctatttctcatcaattctctatcatgttgaagtcaaatttggattttccaccaaattctgaatttgtagacatacttgtacgctcacttgccccagatgcctcctctgtcctcattcttctctcccacacaagcagtctttttctacagccagtaaggcagctctgtcgtggtagcagatggtcccattattctagggtcttactctttgtatgatgaaaagaatgtgttatgaatcggtgctgtcagccctgctgtcagaccttcttccacagcaaatgagatgtatgcccaaagacggtagaattaaagaagagtaaaatggctgttgaagc

SEQ ID NO: 23564 - DNA, 1249 bp, Homo sapiens
  source 1..1249: mol_type = unassigned DNA
cggtgagggttctcgggcggggcctgggacaggcagctccggggtccgcggtttcacatcggaaacaaaacagcggctggtctggaaggaacctgagctacgagccgcggcggcagcggggcggcggggaagcgtatacctaatctgggagcctgcaagtgacaacagcctttgcggtccttagacagcttggcctggaggagaacacatgaaagaaagaacctcaagaggctttgttttctgtgaaacagtatttctatacagttgctccaatgacagagttacctgcaccgttgtcctacttccagaatgcacagatgtctgaggacaaccacctgagcaatactgtacgtagccagaatgacaatagagaacggcaggagcacaacgacagacggagccttggccaccctgagccattatctaatggacgaccccagggtaactcccggcaggtggtggagcaagatgaggaagaagatgaggagctgacattgaaatatggcgccaagcatgtgatcatgctctttgtccctgtgactctctgcatggtggtggtcgtggctaccattaagtcagtcagcttttatacccggaaggatgggcagctaatctataccccattcacagaagataccgagactgtgggccagagagccctgcactcaattctgaatgctgccatcatgatcagtgtcattgttgtcatgactatcctcctggtggttctgtataaatacaggtgctataaggtgagcatgagacacagatctttgctttccaccctgttcttcttatggttgggtattcttgtcacagtaacttaactgatctaggaaagaaaaaatgttttgtcttctagagataagttaatttttagttttcttcctcctcactgtggaacattcaaaaaatacaaaaaggaagccaggtgcatgtgtaatgccaggctcagaggctgaggcaggaggatcacttgggcccaggagttcacaagcagcttgggcaacgtagcaagaccctgcctctattaaagaaaacaaaaaacaaatattggaagtattttatatgcatggaatctatatgtcatgaaaaaattagtgtaaaatatatatattatgattagttatcaagatttagtgataatttatgttattttggatttcaatgcctttttaggccattgtctcaaaaaataaaagcagaaaacaaaaaaagttgtaactgaaaaataaacatttccatataa

SEQ ID NO: 23565 - DNA, 3046 bp, Homo sapiens
  source 1..3046: mol_type = unassigned DNA
ggaaatgctgtttgctcgaagacgtctcagggcgcaggtgccttgggccgggattagtagccgtctgaactggagtggagtaggagaaagaggaagcgtcttgggctgggtctgcttgagcaactggtgaaactccgcgcctcacgccccgggtgtgtccttgtccaggggcgacgagcattctgggcgaagtccgcacgcctcttgttcgaggcggaagacggggtctgatgctttctccttggtcgggactgtctcgaggcatgcatgtccagtgactcttgtgtttgctgctgcttccctctcagattcttctcaccgttgtggtcagctctgctttaggcatattaatccatagtggaggctgggatgggtgagagaattgaggtgacttttccataattcagacctaatctgggagcctgcaagtgacaacagcctttgcggtccttagacagcttggcctggaggagaacacatgaaagaaagaacctcaagaggctttgttttctgtgaaacagtatttctatacagttgctccaatgacagagttacctgcaccgttgtcctacttccagaatgcacagatgtctgaggacaaccacctgagcaatactaatgacaatagagaacggcaggagcacaacgacagacggagccttggccaccctgagccattatctaatggacgaccccagggtaactcccggcaggtggtggagcaagatgaggaagaagatgaggagctgacattgaaatatggcgccaagcatgtgatcatgctctttgtccctgtgactctctgcatggtggtggtcgtggctaccattaagtcagtcagcttttatacccggaaggatgggcagctaatctataccccattcacagaagataccgagactgtgggccagagagccctgcactcaattctgaatgctgccatcatgatcagtgtcattgttgtcatgactatcctcctggtggttctgtataaatacaggtgctataaggtcatccatgcctggcttattatatcatctctattgttgctgttctttttttcattcatttacttgggggaagtgtttaaaacctataacgttgctgtggactacattactgttgcactcctgatctggaattttggtgtggtgggaatgatttccattcactggaaaggtccacttcgactccagcaggcatatctcattatgattagtgccctcatggccctggtgtttatcaagtacctccctgaatggactgcgtggctcatcttggctgtgatttcagtatatgatttagtggctgttttgtgtccgaaaggtccacttcgtatgctggttgaaacagctcaggagagaaatgaaacgctttttccagctctcatttactcctcaacaatggtgtggttggtgaatatggcagaaggagacccggaagctcaaaggagagtatccaaaaattccaagtataatgcagaaagcacagaaagggagtcacaagacactgttgcagagaatgatgatggcgggttcagtgaggaatgggaagcccagagggacagtcatctagggcctcatcgctctacacctgagtcacgagctgctgtccaggaactttccagcagtatcctcgctggtgaagacccagaggaaaggggagtaaaacttggattgggagatttcattttctacagtgttctggttggtaaagcctcagcaacagccagtggagactggaacacaaccatagcctgtttcgtagccatattaattggtttgtgccttacattattactccttgccattttcaagaaagcattgccagctcttccaatctccatcacctttgggcttgttttctactttgccacagattatcttgtacagccttttatggaccaattagcattccatcaattttatatctagcatatttgcggttagaatcccatggatgtttcttctttgactataacaaaatctggggaggacaaaggtgattttcctgtgtccacatctaacaaagtcaagattcccggctggacttttgcagcttccttccaagtcttcctgaccaccttgcactattggactttggaaggaggtgcctatagaaaacgattttgaacatacttcatcgcagtggactgtgtccctcggtgcagaaactaccagatttgagggacgaggtcaaggagatatgataggcccggaagttgctgtgccccatcagcagcttgacgcgtggtcacaggacgatttcactgacactgcgaactctcaggactaccgttaccaagaggttaggtgaagtggtttaaaccaaacggaactcttcatcttaaactacacgttgaaaatcaacccaataattctgtattaactgaattctgaacttttcaggaggtactgtgaggaagagcaggcaccagcagcagaatggggaatggagaggtgggcaggggttccagcttccctttgattttttgctgcagactcatcctttttaaatgagacttgttttcccctctctttgagtcaagtcaaatatgtagattgcctttggcaattcttcttctcaagcactgacactcattaccgtctgtgattgccatttcttcccaaggccagtctgaacctgaggttgctttatcctaaaagttttaacctcaggttccaaattcagtaaattttggaaacagtacagctatttctcatcaattctctatcatgttgaagtcaaatttggattttccaccaaattctgaatttgtagacatacttgtacgctcacttgccccagatgcctcctctgtcctcattcttctctcccacacaagcagtctttttctacagccagtaaggcagctctgtcgtggtagcagatggtcccattattctagggtcttactctttgtatgatgaaaagaatgtgttatgaatcggtgctgtcagccctgctgtcagaccttcttccacagcaaatgagatgtatgcccaaagacggtagaattaaagaagagtaaaatggctgttgaagc

SEQ ID NO: 23566 - DNA, 591 bp, Homo sapiens
  source 1..591: mol_type = unassigned DNA
aacggtgagggttctcgggcggggcctgggacaggcagctccggggtccgcggtttcacatcggaaacaaaacagcggctggtctggaaggaacctgagctacgagccgcggcggcagcggggcggcggggaagcgtatgatttaactaacaatggatgacctggtgaaatcctatttcagacctaatctgggagcctgcaagtgacaacagcctttgcggtccttagacagcttggcctggaggagaacacatgaaagaaagaacctcaagaggctttgttttctgtgaaacagtatttctatacagttgctccaatgacagagttacctgcaccgttgtcctacttccagaatgcacagatgtctgaggacaaccacctgagcaatactaatgacaatagagaacggcaggagcacaacgacagacggagccttggccaccctgagccattatctaatggacgaccccagggtaactcccggcaggtggtggagcaagatgaggaagaagatgaggagctgacattgaaatatggcgccaagcatgtgatcatgctctttgtccctgtgactctctgcatggtggtggt

SEQ ID NO: 23567 - DNA, 712 bp, Homo sapiens
  source 1..712: mol_type = unassigned DNA
caacggtgagggttctcgggcggggcctgggacaggcagctccggggtccgcggtttcacatcggaaacaaaacagcggctggtctggaaggaacctgagctacgagccgcggcggcagcggggcggcggggaagcacctaatctgggagcctgcaagtgacaacagcctttgcggtccttagacagcttggcctggaggagaacacatgaaagaaagaacctcaagaggctttgttttctgtgaaacagtatttctatacagttgctccaatgacagagttacctgcaccgttgtcctacttccagaatgcacagatgtctgaggacaaccacctgagcaatactaatgacaatagagaacggcaggagcacaacgacagacggagccttggccaccctgagccattatctaatggacgaccccagggtaactcccggcaggtggtggagcaagatgaggaagaagatgaggagctgacattgaaatatggcgccaagcatgtgatcatgctctttgtccctgtgactctctgcatggtggtggtcgtggctaccattaagtcagtcagcttttatacccggaaggatgggcagctaatctataccccattcacagaagataccgagactgtgggccagagagccctgcactcaattctgaatgctgccatcatgatcagtgtcattgttgtcatgactatcctcctggtg

SEQ ID NO: 23568 - DNA, 591 bp, Homo sapiens
  source 1..591: mol_type = unassigned DNA
ggtttcacatcggaaacaaaacagcggctggtctggaaggaacctgagctacgagccgcggcggcagcggggcggcggggaagcgtatgcatacaaatttattagcatgcagactgggagaaccacaagacctaatctgggagcctgcaagtgacaacagcctttgcggtccttagacagcttggcctggaggagaacacatgaaagaaagaacctcaagaggctttgttttctgtgaaacagtatttctatacagttgctccaatgacagagttacctgcaccgttgtcctacttccagaatgcacagatgtctgaggacaaccacctgagcaatactgtacgtagccagaatgacaatagagaacggcaggagcacaacgacagacggagccttggccaccctgagccattatctaatggacgaccccagggtaactcccggcaggtggtggagcaagatgaggaagaagatgaggagctgacattgaaatatggcgccaagcatgtgatcatgctctttgtccctgtgactctctgcatggtggtggtcgtggctaccattaagtcagtcagcttttatacccggaag

SEQ ID NO: 23569 - DNA, 754 bp, Homo sapiens
  source 1..754: mol_type = unassigned DNA
ttctcgggcggggcctgggacaggcagctccggggtccgcggtttcacatcggaaacaaaacagcggctggtctggaaggaacctgagctacgagccgcggcggcagcggggcggcggggaagcgtatacctaatctgggagcctgcaagtgacaacagcctttgcggtccttagacagcttggcctggaggagaacacatgaaagaaagttctgtttttctttcccttttcagaacctcaagaggctttgttttctgtgaaacagtatttctatacagttgctccaatgacagagttacctgcaccgttgtcctacttccagaatgcacagatgtctgaggacaaccacctgagcaatactgtacgtagccagaatgacaatagagaacggcaggagcacaacgacagacggagccttggccaccctgagccattatctaatggacgaccccagggtaactcccggcaggtggtggagcaagatgaggaagaagatgaggagctgacattgaaatatggcgccaagcatgtgatcatgctctttgtccctgtgactctctgcatggtggtggtcgtggctaccattaagtcagtcagcttttatacccggaaggatgggcagctaatctataccccattcacagaagataccgagactgtgggccagagagccctgcactcaattctgaatgctgccatcatgatcagtgtcattgttgtcatgactatcctcctggtggttctgtataaata

SEQ ID NO: 23570 - DNA, 612 bp, Homo sapiens
  source 1..612: mol_type = unassigned DNA
tgaatttggtcagcatagaaaaaggaatgttgagaacattccttaagattactcagctccctttgctggaaatcagaagtcattaagtatctttgtggttgaaaatgtttggtgtctcaggcggttctacttattgctaaagaggtctaccttgagcttatagtaaatttgtcagttagttgaaagtcgtgacaaattaatacattcctggtttacaaattggtcttataagtatttgattggtttaaatgaatttactaggatttaactaacaatggatgacctggtgaaatcctatttcagacctaatctgggagcctgcaagtgacaacagcctttgcggtccttagacagcttggcctggaggagaacacatgaaagaaagaacctcaagaggctttgttttctgtgaaacagtatttctatacagttgctccaatgacagagttacctgcaccgttgtcctacttccagaatgcacagatgtctgaggacaaccacctgagcaatactaatgacaatagagaacggcaggagcacaacgacagacggagccttggccaccctgagccattatctaatggacgaccccagggtaactcccggcaggtg

SEQ ID NO: 23571 - DNA, 550 bp, Homo sapiens
  source 1..550: mol_type = unassigned DNA
aaatgacgacaacggtgagggttctcgggcggggcctgggacaggcagctccggggtccgcggtttcacatcggaaacaaaacagcggctggtctggaaggaacctgagctacgagccgcggcggcagcggggcggcggggaagcgtatacctaatctgggagcctgcaagtgacaacagcctttgcggtccttagacagcttggcctggaggagaacacatgaaagaaaggctttgttttctgtgaaacagtatttctatacagttgctccaatgacagagttacctgcaccgttgtcctacttccagaatgcacagatgtctgaggacaaccacctgagcaatactaatgacaatagagaacggcaggagcacaacgacagacggagccttggccaccctgagccattatctaatggacgaccccagggtaactcccggcaggtggtggagcaagatgaggaagaagatgaggagctgacattgaaatatggcgccaagcatgtgatcatgctctttgtccctgtgactctctgcatggtggtggtcg

SEQ ID NO: 23572 - DNA, 574 bp, Homo sapiens
  source 1..574: mol_type = unassigned DNA
aaatgacgacaacggtgagggttctcgggcggggcctgggacaggcagctccggggtccgcggtttcacatcggaaacaaaacagcggctggtctggaaggaacctgagctacgagccgcggcggcagcggggcggcggggaagcgtatattcttctcaccgttgtggtcagctctgctttaggcatattaatccatagtggaggctgggatgggtgagagaattgaggtgacttttccataattcagacctaatctgggagcctgcaagtgacaacagcctttgcggtccttagacagcttggcctggaggagaacacatgaaagaaagaacctcaagaggctttgttttctgtgaaacagtatttctatacagttgctccaatgacagagttacctgcaccgttgtcctacttccagaatgcacagatgtctgaggacaaccacctgagcaatactaatgacaatagagaacggcaggagcacaacgacagacggagccttggccaccctgagccattatctaatggacgaccccagggtaactcccggcaggtggtggagcaagatgagga

SEQ ID NO: 23573 - DNA, 552 bp, Homo sapiens
  source 1..552: mol_type = unassigned DNA
aatgacgacaacggtgagggttctcgggcggggcctgggacaggcagctccggggtccgcggtttcacatcggaaacaaaacagcggctggtctggaaggaacctgagctacgagccgcggcggcagcggggcggcggggaagcacctaatctgggagcctgcaagtgacaacagcctttgcggtccttagacagcttggcctggaggagaacacatgaaagaaagaacctcaagaggctttgttttctgtgaaacagtatttctatacagttgctccaatgacagagttacctgcaccgttgtcctacttccagaatgcacagatgtctgaggacaaccacctgagcaatactaatgacaatagagaacggcaggagcacaacgacagacggagccttggccaccctgagccattatctaatggacgaccccagggtaactcccggcaggtggtggagcaagatgaggaagaagatgaggagctgacattgaaatatggcgccaagcatgtgatcatgctctttgtccctgtgactctctgcatggtggtg

SEQ ID NO: 23574 - DNA, 555 bp, Homo sapiens
  source 1..555: mol_type = unassigned DNA
gagctacgagccgcggcggcagcggggcggcggggaagcgtatattcttctcaccgttgtggtcagctctgctttaggcatattaatccatagtggaggctgggatgggtgagagaattgaggtgacttttccataattcaggcatacaaatttattagcatgcagactgggagaaccacaagcctgggtgacagagcaagactgtgtctcaaaataaagacaggaacaaagacctaatctgggagcctgcaagtgacaacagcctttgcggtccttagacagcttggcctggaggagaacacatgaaagaaagaacctcaagaggctttgttttctgtgaaacagtatttctatacagttgctccaatgacagagttacctgcaccgttgtcctacttccagaatgcacagatgtctgaggacaaccacctgagcaatactaatgacaatagagaacggcaggagcacaacgacagacggagccttggccaccctgagccattatctaatggacgaccccagggtaactcccggcaggtggtggagcaagatga

SEQ ID NO: 23575 - DNA, 576 bp, Homo sapiens
  source 1..576: mol_type = unassigned DNA
atgacgacaacggtgagggttctcgggcggggcctgggacaggcagctccggggtccgcggtttcacatcggaaacaaaacagcggctggtctggaaggaacctgagctacgagccgcggcggcagcggggcggcggggaagcacctaatctgggagcctgcaagtgacaacagcctttgcggtccttagacagcttggcctggaggagaacacatgaaagaaagaacctcaagaggctttgttttctgtgaaacagtatttctatacagttgctccaatgacagagttacctgcaccgttgtcctacttccagaatgcacagatgtctgaggacaaccacctgagcaatactgtacgtagccagaatgacaatagagaacggcaggagcacaacgacagacggagccttggccaccctgagccattatctaatggacgaccccagggtaactcccggcaggtggtggagcaagatgaggaagaagatgaggagctgacattgaaatatggcgccaagcatgtgatcatgctctttgtccctgtgactctctgcatggtggtggtcgtggctacca

SEQ ID NO: 23576 - DNA, 571 bp, Homo sapiens
  source 1..571: mol_type = unassigned DNA
aacgacgccagagccggaaatgacgacaacgacctaatctgggagcctgcaagtgacaacagcctttgcggtccttagacagcttggcctggaggagaacacatgaaagaaagaacctcaagaggctttgttttctgtgaaacagtatttctatacagttgctccaatgacagagttacctgcaccgttgtcctacttccagaatgcacagatgtctgaggacaaccacctgagcaatactaatgacaatagagaacggcaggagcacaacgacagacggagccttggccaccctgagccattatctaatggacgaccccagggtaactcccggcaggtggtggagcaagatgaggaagaagatgaggagctgacattgaaatatggcgccaagcatgtgatcatgctctttgtccctgtgactctctgcatggtggtggtcgtggctaccattaagtcagtcagcttttatacccggaaggatgggcagctaatctataccccattcacagaagataccgagactgtgggccagagagccctgcactcaattctgaatgctgccatcatg

SEQ ID NO: 23577 - DNA, 696 bp, Homo sapiens
  source 1..696: mol_type = unassigned DNA
gagggttctcgggcggggcctgggacaggcagctccggggtccgcggtttcacatcggaaacaaaacagcggctggtctggaaggaacctgagctacgagccgcggcggcagcggggcggcggggaagcgtatgtgcgtgatggggagtccgggcaagccaggaaggcaccgcggacatgggcggccgcgggcagggcccggccctttgtggccgcccgggccgcgaagccgacctaatctgggagcctgcaagtgacaacagcctttgcggtccttagacagcttggcctggaggagaacacatgaaagaaagaacctcaagaggctttgttttctgtgaaacagtatttctatacagttgctccaatgacagagttacctgcaccgttgtcctacttccagaatgcacagatgtctgaggacaaccacctgagcaatactaatgacaatagagaacggcaggagcacaacgacagacggagccttggccaccctgagccattatctaatggacgaccccagggtaactcccggcaggtggtggagcaagatgaggaagaagatgaggagctgacattgaaatatggcgccaagcatgtgatcatgctctttgtccctgtgactctctgcatggtggtggtcgtggctaccattaagtcagtcagcttttatacccggaaggatgggcagctgta

SEQ ID NO: 23578 - DNA, 2201 bp, Homo sapiens
  source 1..2201: mol_type = unassigned DNA
ggggcctgggccggcgccgggtccggccgggcgctcagccagctgcgtaaactccgctggagcgcggcggcagagcaggcatttccagcagtgaggagacagccagaagcaagcttttggagctgaaggaacctgagacagaagctagtcccccctctgaattttactgatgaagaaactgaggccacagagctaaagtgacttttcccaaggtcgcccagcgaggacgtgggacttctcagacgtcaggagagtgatgtgagggagctgtgtgaccatagaaagtgacgtgttaaaaaccagcgctgccctctttgaaagccagggagcatcattcatttagcctgctgagaagaagaaaccaagtgtccgggattcagacctctctgcggccccaagtgttcgtggtgcttccagaggcagggctatgctcacattcatggcctctgacagcgaggaagaagtgtgtgatgagcggacgtccctaatgtcggctgagagccccacgccgcgctcctgccaggagggcaggcagggcccagaggatggagagaacactgcccagtggagaagccaggagaacgaggaggacggtgaggaggaccctgaccgctatgtctgtagtggggttcccgggcggccgccaggcctggaggaagagctgaccctcaaatacggagcgaagcacgtgatcatgctgtttgtgcctgtcactctgtgcatgatcgtggtggtagccaccatcaagtctgtgcgcttctacacagagaagaatggacagctcatctacacgccattcactgaggacacaccctcggtgggccagcgcctcctcaactccgtgctgaacaccctcatcatgatcagcgtcatcgtggttatgaccatcttcttggtggtgctctacaagtaccgctgctacaagttcatccatggctggttgatcatgtcttcactgatgctgctgttcctcttcacctatatctaccttggggaagtgctcaagacctacaatgtggccatggactaccccaccctcttgctgactgtctggaacttcggggcagtgggcatggtgtgcatccactggaagggccctctggtgctgcagcaggcctacctcatcatgatcagtgcgctcatggccctagtgttcatcaagtacctcccagagtggtccgcgtgggtcatcctgggcgccatctctgtgtatgctgccatggtgtggacggttggcatggcgaagctggacccctcctctcagggtgccctccagctcccctacgacccggagatggaagaagactcctatgacagttttggggagccttcataccccgaagtctttgagcctcccttgactggctacccaggggaggagctggaggaagaggaggaaaggggcgtgaagcttggcctcggggacttcatcttctacagtgtgctggtgggcaaggcggctgccacgggcagcggggactggaataccacgctggcctgcttcgtggccatcctcattggcttgtgtctgaccctcctgctgcttgctgtgttcaagaaggcgctgcccgccctccccatctccatcacgttcgggctcatcttttacttctccacggacaacctggtgcggccgttcatggacaccctggcctcccatcagctctacatctgagggacatggtgtgccacaggctgcaagctgcagggaattttcattggatgcagttgtatagttttacactctagtgccatatatttttaagacttttctttccttaaaaaataaagtacgtgtttacttggtgaggaggaggcagaaccagctctttggtgccagctgtttcatcaccagactttggctcccgctttggggagcgcctcgcttcacggacaggaagcacagcaggtttatccagatgaactgagaaggtcagattagggcggggagaagagcatccggcatgagggctgagatgcgcaaagagtgtgctcgggagtggcccctggcacctgggtgctctggctggagaggaaaagccagttccctacgaggagtgttcccaatgctttgtccatgatgtccttgttattttattgcctttagaaactgagtcctgttcttgttacggcagtcacactgctgggaagtggcttaatagtaatatcaataaatagatgagtcctgttagaatcttgga

SEQ ID NO: 23579 - DNA, 2465 bp, Homo sapiens
  source 1..2465: mol_type = unassigned DNA
ccagcagtgaggagacagccagaagcaagcttttggagctgaaggaacctgagacagaagctagtcccccctctgaattttactgatgaagaaactgaggccacagagctaaagtgacttttcccaaggtcgcccagcgaggacgtgggacttctcagacgtcaggagagtgatgtgagggagctgtgtgaccatagaaagtgacgtgttaaaaaccagcgctgccctctttgaaagccagggagcatcattcatttagcctgctgagaagaagaaaccaagtgtccgggattcagacctctctgcggccccaagtgttcgtgggtgtgaagctcagccctgagggtctctggacagcgatcactcagcctctggacagcgatcactcagcctctggacagacagcgatcactcagcctctggacagcgatcactcagcctctggacagcgatcactcagcctctggacagcgataactcagcctctgtccccgtctgagatgttggcagggactgtcagatttgccaggcattgtttgaagttcttcccagcccagaaacctgcatgtgtagattttggtgcttccagaggcagggctatgctcacattcatggcctctgacagcgaggaagaagtgtgtgatgagcggacgtccctaatgtcggctgagagccccacgccgcgctcctgccaggagggcaggcagggcccagaggatggagagaacactgcccagtggagaagccaggagaacgaggaggacggtgaggaggaccctgaccgctatgtctgtagtggggttcccgggcggccgccaggcctggaggaagagctgaccctcaaatacggagcgaagcacgtgatcatgctgtttgtgcctgtcactctgtgcatgatcgtggtggtagccaccatcaagtctgtgcgcttctacacagagaagaatggacagctcatctacacgccattcactgaggacacaccctcggtgggccagcgcctcctcaactccgtgctgaacaccctcatcatgatcagcgtcatcgtggttatgaccatcttcttggtggtgctctacaagtaccgctgctacaagttcatccatggctggttgatcatgtcttcactgatgctgctgttcctcttcacctatatctaccttggggaagtgctcaagacctacaatgtggccatggactaccccaccctcttgctgactgtctggaacttcggggcagtgggcatggtgtgcatccactggaagggccctctggtgctgcagcaggcctacctcatcatgatcagtgcgctcatggccctagtgttcatcaagtacctcccagagtggtccgcgtgggtcatcctgggcgccatctctgtgtatgatctcgtggctgtgctgtgtcccaaagggcctctgagaatgctggtagaaactgcccaggagagaaatgagcccatattccctgccctgatatactcatctgccatggtgtggacggttggcatggcgaagctggacccctcctctcagggtgccctccagctcccctacgacccggagatggaagaagactcctatgacagttttggggagccttcataccccgaagtctttgagcctcccttgactggctacccaggggaggagctggaggaagaggaggaaaggggcgtgaagcttggcctcggggacttcatcttctacagtgtgctggtgggcaaggcggctgccacgggcagcggggactggaataccacgctggcctgcttcgtggccatcctcattggcttgtgtctgaccctcctgctgcttgctgtgttcaagaaggcgctgcccgccctccccatctccatcacgttcgggctcatcttttacttctccacggacaacctggtgcggccgttcatggacaccctggcctcccatcagctctacatctgagggacatggtgtgccacaggctgcaagctgcagggaattttcattggatgcagttgtatagttttacactctagtgccatatatttttaagacttttctttccttaaaaaataaagtacgtgtttacttggtgaggaggaggcagaaccagctctttggtgccagctgtttcatcaccagactttggctcccgctttggggagcgcctcgcttcacggacaggaagcacagcaggtttatccagatgaactgagaaggtcagattagggcggggagaagagcatccggcatgagggctgagatgcgcaaagagtgtgctcgggagtggcccctggcacctgggtgctctggctggagaggaaaagccagttccctacgaggagtgttcccaatgctttgtccatgatgtccttgttattttattgcctttagaaactgagtcctgttcttgttacggcagtcacactgctgggaagtggcttaatagtaatatcaataaatagatgagtcctgttagaa

SEQ ID NO: 23580 - DNA, 2302 bp, Homo sapiens
  source 1..2302: mol_type = unassigned DNA
gcgtggggcggggcctgggccggcgccgggtccggccgggcgctcagccagctgcgtaaactccgctggagcgcggcggcagagcaggcatttccagcagtgaggagacagccagaagcaagcttttggagctgaaggaacctgagacagaagctagtcccccctctgaattttactgatgaagaaactgaggccacagagctaaagtgacttttcccaaggtcgcccagcgaggacgtgggacttctcagacgtcaggagagtgatgtgagggagctgtgtgaccatagaaagtgacgtgttaaaaaccagcgctgccctctttgaaagccagggagcatcattcatttagcctgctgagaagaagaaaccaagtgtccgggattcagacctctctgcggccccaagtgttcgtggtgcttccagaggcagggctatgctcacattcatggcctctgacagcgaggaagaagtgtgtgatgagcggacgtccctaatgtcggctgagagccccacgccgcgctcctgccaggagggcaggcagggcccagaggatggagagaacactgcccagtggagaagccaggagaacgaggaggacggtgaggaggaccctgaccgctatgtctgtagtggggttcccgggcggccgccaggcctggaggaagagctgaccctcaaatacggagcgaagcacgtgatcatgctgtttgtgcctgtcactctgtgcatgatcgtggtggtagccaccatcaagtctgtgcgcttctacacagagaagaatggacagctcatctacacgccattcactgaggacacaccctcggtgggccagcgcctcctcaactccgtgctgaacaccctcatcatgatcagcgtcatcgtggttatgaccatcttcttggtggtgctctacaagtaccgctgctacaagttcatccatggctggttgatcatgtcttcactgatgctgctgttcctcttcacctatatctaccttggggaagtgctcaagacctacaatgtggccatggactaccccaccctcttgctgactgtctggaacttcggggcagtgggcatggtgtgcatccactggaagggccctctggtgctgcagcaggcctacctcatcatgatcagtgcgctcatggccctagtgttcatcaagtacctcccagagtggtccgcgtgggtcatcctgggcgccatctctgtgtatgatctcgtggctgtgctgtgtcccaaagggcctctgagaatgctggtagaaactgcccaggagagaaatgagcccatattccctgccctgatatactcatctgccatggtgtggacggttggcatggcgaagctggacccctcctctcagggtgccctccagctcccctacgacccggagatggaagaagactcctatgacagttttggggagccttcataccccgaagtctttgagcctcccttgactggctacccaggggaggagctggaggaagaggaggaaaggggcgtgaagcttggcctcggggacttcatcttctacagtgtgctggtgggcaaggcggctgccacgggcagcggggactggaataccacgctggcctgcttcgtggccatcctcattggcttgtgtctgaccctcctgctgcttgctgtgttcaagaaggcgctgcccgccctccccatctccatcacgttcgggctcatcttttacttctccacggacaacctggtgcggccgttcatggacaccctggcctcccatcagctctacatctgagggacatggtgtgccacaggctgcaagctgcagggaattttcattggatgcagttgtatagttttacactctagtgccatatatttttaagacttttctttccttaaaaaataaagtacgtgtttacttggtgaggaggaggcagaaccagctctttggtgccagctgtttcatcaccagactttggctcccgctttggggagcgcctcgcttcacggacaggaagcacagcaggtttatccagatgaactgagaaggtcagattagggcggggagaagagcatccggcatgagggctgagatgcgcaaagagtgtgctcgggagtggcccctggcacctgggtgctctggctggagaggaaaagccagttccctacgaggagtgttcccaatgctttgtccatgatgtccttgttattttattgcctttagaaactgagtcctgttcttgttacggcagtcacactgctgggaagtggcttaatagtaatatcaataaatagatgagtcctgttagaa

SEQ ID NO: 23581 - DNA, 1972 bp, Homo sapiens
  source 1..1972: mol_type = unassigned DNA
atgttggcagggactgtcagatttgccaggcattgtttgaagttcttcccagcccagaaacctgcatgtgtagattttggtgcttccagaggcagggctatgctcacattcatggcctctgacagcgaggaagaagtgtgtgatgagcggacgtccctaatgtcggctgagagccccacgccgcgctcctgccaggagggcaggcagggcccagaggatggagagaacactgcccagtggagaagccaggagaacgaggaggacggtgaggaggaccctgaccgctatgtctgtagtggggttcccgggcggccgccaggcctggaggaagagctgaccctcaaatacggagcgaagcacgtgatcatgctgtttgtgcctgtcactctgtgcatgatcgtggtggtagccaccatcaagtctgtgcgcttctacacagagaagaatggacagctcatctacacgccattcactgaggacacaccctcggtgggccagcgcctcctcaactccgtgctgaacaccctcatcatgatcagcgtcatcgtggttatgaccatcttcttggtggtgctctacaagtaccgctgctacaagttcatccatggctggttgatcatgtcttcactgatgctgctgttcctcttcacctatatctaccttggggaagtgctcaagacctacaatgtggccatggactaccccaccctcttgctgactgtctggaacttcggggcagtgggcatggtgtgcatccactggaagggccctctggtgctgcagcaggcctacctcatcatgatcagtgcgctcatggccctagtgttcatcaagtacctcccagagtggtccgcgtgggtcatcctgggcgccatctctgtgtatgatctcgtggctgtgctgtgtcccaaagggcctctgagaatgctggtagaaactgcccaggagagaaatgagcccatattccctgccctgatatactcatctgccatggtgtggacggttggcatggcgaagctggacccctcctctcagggtgccctccagctcccctacgacccggagatggaagaagactcctatgacagttttggggagccttcataccccgaagtctttgagcctcccttgactggctacccaggggaggagctggaggaagaggaggaaaggggcgtgaagcttggcctcggggacttcatcttctacagtgtgctggtgggcaaggcggctgccacgggcagcggggactggaataccacgctggcctgcttcgtggccatcctcattggcttgtgtctgaccctcctgctgcttgctgtgttcaagaaggcgctgcccgccctccccatctccatcacgttcgggctcatcttttacttctccacggacaacctggtgcggccgttcatggacaccctggcctcccatcagctctacatctgagggacatggtgtgccacaggctgcaagctgcagggaattttcattggatgcagttgtatagttttacactctagtgccatatatttttaagacttttctttccttaaaaaataaagtacgtgtttacttggtgaggaggaggcagaaccagctctttggtgccagctgtttcatcaccagactttggctcccgctttggggagcgcctcgcttcacggacaggaagcacagcaggtttatccagatgaactgagaaggtcagattagggcggggagaagagcatccggcatgagggctgagatgcgcaaagagtgtgctcgggagtggcccctggcacctgggtgctctggctggagaggaaaagccagttccctacgaggagtgttcccaatgctttgtccatgatgtccttgttattttattgcctttagaaactgagtcctgttcttgttacggcagtcacactgctgggaagtggcttaatagtaatatcaataaatagatgagtcctgttagaatcttgga

SEQ ID NO: 23582 - DNA, 1947 bp, Homo sapiens
  source 1..1947: mol_type = unassigned DNA
aaactccgctggagcgcggcggcagagcaggcatttccagcagtgaggagacagccagaagcaagcttttggagctgaaggaacctgagacagaagctagtcccccctctgaattttactgatgaagaaactgaggccacagagctaaagtgacttttcccaaggtcgcccagcgaggacgtgggacttctcagacgtcaggagagtgatgtgagggagctgtgtgaccatagaaagtgacgtgttaaaaaccagcgctgccctctttgaaagccagggagcatcattcatttagcctgctgagaagaagaaaccaagtgtccgggattcagacctctctgcggccccaagtgttcgtggtgcttccagaggcagggctatgctcacattcatggcctctgacagcgaggaagaagtgtgtgatgagcggacgtccctaatgtcggctgagagccccacgccgcgctcctgccaggagggcaggcagggcccagaggatggagagaacactgcccagtggagaagccaggagaacgaggaggacggtgaggaggaccctgaccgctatgtctgtagtggggttcccgggcggccgccaggcctggaggaagagctgaccctcaaatacggagcgaagcacgtgatcatgctgtttgtgcctgtcactctgtgcatgatcgtggtggtagccaccatcaagtctgtgcgcttctacacagagaagaatggacagctcatctacacgccattcactgaggacacaccctcggtgggccagcgcctcctcaactccgtgctgaacaccctcatcatgatcagcgtcatcgtggttatgaccatcttcttggtggtgctctacaagtaccgctgctacaagttcatccatggctggttgatcatgtcttcactgatgctgctgttcctcttcacctatatctaccttggggaagtgctcaagacctacaatgtggccatggactaccccaccctcttgctgactgtctggaacttcggggcagtgggcatggtgtgcatccactggaagggccctctggtgctgcagcaggcctacctcatcatgatcagtgcgctcatggccctagtgttcatcaagtacctcccagagtggtccgcgtgggtcatcctgggcgccatctctgtgtatgatctcgtggctgtgctgtgtcccaaagggcctctgagaatgctggtagaaactgcccaggagagaaatgagcccatattccctgccctgatatactcatctgccatggtgtggacggttggcatggcgaagctggacccctcctctcagggtgccctccagctcccctacgacccggagatggaagactcctatgacagttttggggagccttcataccccgaagtctttgagcctcccttgactggctacccaggggaggagctggaggaagaggaggaaaggggcgtgaagcttggcctcggggacttcatcttctacagtgtgctggtgggcaaggcggctgccacgggcagcggggactggaataccacgctggcctgcttcgtggccatcctcattggcttgtgtctgaccctcctgctgcttgctgtgttcaagaaggcgctgcccgccctccccatctccatcacgttcgggctcatcttttacttctccacggacaacctggtgcggccgttcatggacaccctggcctcccatcagctctacatctgagggacatggtgtgccacaggctgcaagctgcagggaattttcattggatgcagttgtatagttttacactctagtgccatatatttttaagacttttctttccttaaaaaataaagtacgtgtttacttggtgaggaggaggcagaaccagctctttggtgccagctgtttcatcaccagactttggctcccgctttggggagcgcctcgcttcacggacagga

SEQ ID NO: 23583 - DNA, 627 bp, Homo sapiens
  source 1..627: mol_type = unassigned DNA
gcgtaaactccgctggagcgcggcggcagagcagcgaggacgtgggacttctcagacgtcaggagagtgatgtgagggagctgtgtgaccatagaaagtgacgtgttaaaaaccagcgctgccctctttgaaagccagggagcatcattcatttagcctgctgagaagaagaaaccaagtgtccgggattcagacctctctgcggccccaagtgttcgtggtgcttccagaggcagggctatgctcacattcatggcctctgacagcgaggaagaagtgtgtgatgagcggacgtccctaatgtcggctgagagccccacgccgcgctcctgccaggagggcaggcagggcccagaggatggagagaacactgcccagtggagaagccaggagaacgaggaggacggtgaggaggaccctgaccgctatgtctgtagtggggttcccgggcggccgccaggcctggaggaagagctgaccctcaaatacggagcgaagcacgtgatcatgctgtttgtgcctgtcactctgtgcatgatcgtggtggtagccaccatcaagtctgtgcgcttctacacagagaagaatggacagctcatctacacgccattcactgaggacacaccc

SEQ ID NO: 23584 - DNA, 734 bp, Homo sapiens
  source 1..734: mol_type = unassigned DNA
aattttatgcagagctcctggtggctctgaagcgccctagggaacagaccaggaacattctcatggtgttagctcacattgggccattagtgctcctttaatgtgagaacaaccgggaggaggaggggatgtggacccaaaactacaagaaagagtgtcctcgaagcctatgtcctaccgccccacgctgctgccaggcccgcaggaagatgacaggcccggcctccactccttctaaggtcgtcgcttagttccgacgtcgggatgaccctgtcatccacgcggcgtgaaggccaccctccccgcgcgcccgggactccaggcatttccagcagtgaggagacagccagaagcaagcttttggagctgaaggaacctgagacagaagctagtcccccctctgaattttactgatgaagaaactgaggccacagagctaaagtgacttttcccaaggtcgcccagcgaggacgtgggacttctcagacgtcaggagagtgatgtgagggagctgtgtgaccatagaaagtgacgtgttaaaaaccagcgctgccctctttgaaagccagggagcatcattcatttagcctgctgagaagaagaaaccaagtgtccgggattcagacctctctgcggccccaagtgttcgtggtgcttccagaggcagggctatgctcacattcatggcctctgacagcgaggaagaagtgtgtgatgagcggacgtccctaatg

SEQ ID NO: 23585 - DNA, 1240 bp, Homo sapiens
  source 1..1240: mol_type = unassigned DNA
gggttggtaaggtcgggccatggtggggcagaggttgggaagatggcgtggcgaggctgggcgcagagaggctggggctgcggccaggcgtggggtgcgtcggtgggcggccgcagctgcgaggagctcactgcggtcctaaccccgccgcagctcctcggacgcaggtttaacttctttattcaacaaaaatgcggattcagaaaagcacccaggaaggttgaacctcgaagatcagacccagggacaagtggtgaagcatacaagagaagtgctttgattcctcctgtggaagaaacagtcttttatccttctccctatcctataaggagtctcataaaacctttattttttactgttgggtttacaggctgtgcatttggatcagctgctatttggcaatatgaatcactgaaatccagggtccagagttattttgatggtataaaagctgattggttggatagcataagaccacaaaaagaaggagacttcagaaaggagattaacaagtggtggaataacctaagtgatggccagcggactgtgacaggtattatagctgcaaatgtccttgtattctgtttatggagagtaccttctctgcagcggacaatgatcagatatttcacatcgaatccagcctcaagtgttatttccaattttgtcagttacgtgggtaaagttgccacaggaagatatggaccatcacttggtgcatctggtgccatcatgacagtcctcgcagctgtctgcactaagatcccagaagggaggcttgccattattttccttccgatgttcacgttcacagcagggaatgccctgaaagccattatcgccatggatacagcaggaatgatcctgggatggaaattttttgatcatgcggcacatcttgggggagctctttttggaatatggtatgttacttacggtcatgaactgatttggaagaacagggagccgctagtgaaaatctggcatgaaataaggactaatggccccaaaaaaggaggtggctctaagtaaaactgggattggacagtagtggtgcatctggtccttgccgcctgagagccccaggagacatcggctagagtgaccatggctatgctcccgtctggaagatgccagcatctggcctcccactgttttcagctgtgtcccccagtccgtgtctttttagaatgtgaatgatgataaagttgtgaaataaaggtttctatctagtttgtaa

SEQ ID NO: 23586 - DNA, 1414 bp, Homo sapiens
  source 1..1414: mol_type = unassigned DNA
ggaagtagttgcgcagctggggttggtaaggtcgggccatggtggggcagaggttgggaagatggcgtggcgaggctgggcgcagagaggctggggctgcggccaggcgtggggtgcgtcggtgggcggccgcagctgcgaggagctcactgcggtcctaaccccgccgcagctcctcggacgcaggtttaacttctttattcaacaaaaatgcggattcagaaaagcacccaggaaggttgaacctcgaagatcagacccagggacaagtggtgaagcatacaagagaagtgctttgattcctcctgtggaagaaacagtcttttatccttctccctatcctataaggagtctcataaaacctttattttttactgttgggtttacaggctgtgcatttggatcagctgctatttggcaatatgaatcactgaaatccagggtccagagttattttgatggtataaaagctgattggttggatagcataagaccacaaaaagaaggagacttcagaaaggagattaacaagtggtggaataacctaagtgatggccagcggactgtgacaggtattatagctgcaaatgtccttgtattctgtttatggagagtaccttctctgcagcggacaatgatcagatatttcacatcgaatccagcctcaaaggtcctttgttctccaatgttgctgtcaacattcagtcatttctccttatttcacatggcagcaaatatgtatgttttgtggagcttctcttccagcatagtgaacattctgggtcaagagcagttcatggcagtgtacctatctgcaggtgttatttccaattttgtcagttacgtgggtaaagttgccacaggaagatatggaccatcacttggtgcatctggtgccatcatgacagtcctcgcagctgtctgcactaagatcccagaagggaggcttgccattattttccttccgatgttcacgttcacagcagggaatgccctgaaagccattatcgccatggatacagcaggaatgatcctgggatggaaattttttgatcatgcggcacatcttgggggagctctttttggaatatggtatgttacttacggtcatgaactgatttggaagaacagggagccgctagtgaaaatctggcatgaaataaggactaatggccccaaaaaaggaggtggctctaagtaaaactgggattggacagtagtggtgcatctggtccttgccgcctgagagccccaggagacatcggctagagtgaccatggctatgctcccgtctggaagatgccagcatctggcctcccactgttttcagctgtgtcccccagtccgtgtctttttagaatgtgaatgatgataaagttgtgaaataaaggtttctatctagtttgtaagcaga

SEQ ID NO: 23587 - DNA, 665 bp, Homo sapiens
  source 1..665: mol_type = unassigned DNA
ctcgcccaaagaagactacaatctccagggaaacctggggcgtctcgcgcaaacgtccataactgaaagtagctaaggcaccccagccggaggaagtgagctctcctggggcgtggttgttcgtgatccttgcatctgttacttagggtcaaggcttgggtcttgccccgcagacccttgggacgacccggccccagcgcagctatgaacctggagcgagtgtccaatgaggagaaattgaacctgtgccggaagtactacctgggggggtttgctttcctgccttttctctggttggtcaacatcttctggttcttccgagaggccttccttgtcccagcctacacagaacagagccaaatcaaaggctatgtctggcgctcagctgtgggcttcctcttctgggtgatagtgctcacctcctggatcaccatcttccagatctaccggccccgctggggtgcccttggggactacctctccttcaccatacccctgggcaccccctgacaacttctgcacatactggggccctgcttattctcccaggacaggctccttaaagcagaggagcctgtcctgggagccccttctcaaactcctaagacttgttttcatgtcccacgttctctgctgacatcccccaataaaggaccctaactttc

SEQ ID NO: 23588 - DNA, 1144 bp, Homo sapiens
  source 1..1144: mol_type = unassigned DNA
ccgggtctcacctggctgaatgtcggcttgttgtgaagccgggagcaccggtccccgtgccggcagaccccgatcttaaagtaaaaagagcagttaaccctggaaaaggtgcaaagacaaaggtgaaccgagggccggggaagctgggcaccccagaaacaccgccccaccacccaggaccccagtaccccggccccgaccccccgagagtccactcccagcgcccgttctcacttgtccttctcagtcccgaatatcgaagctaaatattcagccatttttacccaagccctccaggtctggctgctcttacgtcacttccgttgcttaggagcactgggaagtgtagttcgttgccctctccaggcgcttaccaagcgctcggaaacgccccagggcgcttgcgcgtgggaggcgcgcgccctccccatagactccccggtaggagttcttttaacagcgcatgcgtgcagtgttgcctcgcccaaagaagactacaatctccagggaaacctggggcgtctcgcgcaaacgtccataactgaaagtagctaaggcaccccagccggaggaagtgagctctcctggggcgtggttgttcgtgatccttgcatctgttacttagggtcaaggcttgggtcttgccccgcagacccttgggacgacccggccccagcgcagctatgaacctggagcgagtgtccaatgaggagaaattgaacctgtgccggaagtactacctgggggggtttgctttcctgccttttctctggttggtcaacatcttctggttcttccgagaggccttccttgtcccagcctacacagaacagagccaaatcaaaggctatgtctggcgctcagctgtgggcttcctcttctgggtgatagtgctcacctcctggatcaccatcttccagatctaccggccccgctggggtgcccttggggactacctctccttcaccatacccctgggcaccccctgacaacttctgcacatactggggccctgcttattctcccaggacaggctccttaaagcagaggagcctgtcctgggagccccttctcaaactcctaagacttgttttcatgtcccacgttctctgctgacatcccccaataaaggaccctaactttc

SEQ ID NO: 23589 - DNA, 584 bp, Homo sapiens
  source 1..584: mol_type = unassigned DNA
ggcaatgcgcatgcccagcgccgtatcgcgcacgcgctctctgcggctttccttgacctctgacccgccgaccacgcttgatccccggccgcggggccaggaagtcggagtttgagccccggaggcagagcggctgccatggccaagtacctggcccagatcattgtgatgggcgtgcaggtggtgggcagggcctttgcacgggccttgcggcaggagtttgcagccagccgggccgcagctgatgcccgaggacgcgctggacaccggtctgcagccgcttccaacctctccggcctcagcctccaggaggcacagcagattctcaacgtgtccaagctgagccctgaggaggtccagaagaactatgaacacttatttaaggtgaatgataaatccgtgggtggctccttctacctgcagtcaaaggtggtccgcgcaaaggagcgcctggatgaggaactcaaaatccaggcccaggaggacagagaaaaagggcagatgccccatacgtgactgctcggctccccccgcccaccccgccgcctctaatttatagcttggtaataaatttcttttctgca

SEQ ID NO: 23590 - DNA, 3315 bp, Homo sapiens
  source 1..3315: mol_type = unassigned DNA
catgccagcctcgcgcagcctgcgctgacttccccgagacgcgccgcggtcggcacggagactttctgggctctggatggttcgtgcgctgctcaccctcgcccacccctgacgccgcggaccgcagctcctcagccccgcagccccgcagcccagcagccccgcagcggcgccgaggacagtgcagccgagttgcgtctccctcgcgcgagcagccattgtttgatgtcctgtgactgagaaaccaggctttaaactttatgcctttggagatggagcccaagatgagcaaactggcctttggctgtcagagaagttccacatcagatgatgactctggctgtgcattggaggagtacgcctgggtccccccgggcctgagaccagagcagatccagctctattttgcttgcttaccagaggaaaaagttccttacgttaacagccccggagagaagcatcggattaaacagcttttgtaccagttaccaccacatgataatgaggtacggtattgccagtctttgagtgaagaggagaaaaaagagttgcaggtgttcagtgctcagcggaagaaagaagcactgggaagaggaacaattaagcttctgtccagagcagtcatgcatgctgtgtgtgagcagtgtggtttgaagataaatggaggtgaagttgcagtgttcgcctcccgtgcgggccctggtgtgtgctggcacccatcctgttttgtctgtttcacgtgtaatgagctgctggtcgacctcatctatttttatcaggatggaaaaattcactgtggcaggcaccatgcagaactgctcaaaccacggtgctcagcatgtgacgagataatttttgctgatgagtgcacagaagctgagggtcgccattggcacatgaaacacttctgctgccttgagtgtgaaacggtcctgggaggacagaggtatatcatgaaggacggccgccccttctgctgtggctgttttgagtctctctatgcggagtactgtgaaacctgtggggaacatattggtgtggaccatgcacagatgacctatgacgggcagcactggcacgccacggaagcctgcttttcttgtgcccagtgtaaagcctctttgttgggatgtcccttccttcccaaacagggtcagatttactgctcaaaaacgtgcagtcttggtgaagacgtccatgcctctgattcttccgactctgcatttcagtcagctcgatcaagagactcccgaagaagtgtccgaatgggcaagagcagccggtcagcagatcagtgtagacagtctctcctcttatcgcctgctctgaactacaagtttcctggcctctcaggcaatgctgatgacaccctttctcgaaaattggatgatctgagtctctccagacaaggaacaagttttgccagtgaagaattttggaaaggcagagtagagcaggaaactccagaagaccctgaagaatgggctgatcatgaagattatatgacgcagctcctcctcaagtttggtgataaaagcctctttcagccacagcccaatgagatggatattcgagccagtgagcactggatatctgataacatggttaaaagtaagaccgagttaaagcaaaataaccagagccttgcaagtaaaaaataccagtctgatatgtactgggcacagtcacaagatggactgggcgattctgcttatggcagccacccaggccctgcaagcagtagaaggcttcaggaattggaactggaccatggggcttcagggtataatcatgatgaaacacagtggtatgaagattccctggagtgtctgtcagacctgaaaccagagcaaagtgttcgggattcgatggattctttggcattgtccaatatcacaggggcttcggtggatggagaaaacaagccaaggccatcattgtattctctgcaaaattttgaggagatggaaacagaagattgtgagaagatgagcaatatgggaactttgaactcttccatgctgcacaggagtgcagagtccttaaagagtctaagttcagagttgtgtccagagaaaatcctgcctgaagagaagccagtacatctgccagtgctcagaaggtccaagtctcaatccagaccccagcaggtcaagttttctgatgatgtcattgacaatgggaactatgacattgaaatccggcagcctccgatgagtgaaaggactcggagacgcgtctacaattttgaagagaggggatccaggtctcatcaccaccgccgccggagaagtagaaagtcccgctccgacaatgccctgaatcttgttacagaaagaaaatactctcccaaggacagactgcggctgtacacccccgataactatgagaaatttatacagaataaaagtgcccgggagatccaagcatacatccagaatgctgatctctacggacagtacgcccatgccacttccgattatggcctgcagaacccaggaatgaatcggtttctgggactctacggcgaggatgatgattcctggtgttcttcctcctcctcctcttccgactcggaagaagaaggatattttcttggacaaccaatccctcaaccccggccacagagatttgcctactatacagatgacctttctagtccaccatctgcacttcccacccctcagtttggtcagaggacaacaaaatccaagaagaaaaagggacacaagggcaaaaattgtattatttcttaaccaagtagtgatgcagagcatttgtttaaaacttagccattaaccgtctgaatcgtttccttttcttccgtaggaaagttgtgaaaatagtttaaagtgctttctttgcccatgtaaatgagaactcaactgctgtttacagtgtcagattaacatttgaaaggtgtgatttctccaatttaccctctttggatggtgccaggtggacgtgacatctcgtgcctgtccggtgcgggtgcgttacagatggacgtagctgctttggttttccagtcctcaagggaatactgaagatgctgactgaaggggattggatgttgattttagaagatggagaactccagccacctttgtaaagcactagtgtttgtcatttatgtaagtcaggtcggctcaggtcttgatagtccgtcttggtgtgaggcatgcctgtcacgatgacctagctaacactgtgcatcttattgtgaggccagcttgtcccctcgaaccctctttggccaggtaaacattgtattgtatcagcgccagctacagattgaaaaaaaaaaacaaaaaa

SEQ ID NO: 23591 - DNA, 4080 bp, Homo sapiens
  source 1..4080: mol_type = unassigned DNA
agaccagcctgtgggattacacgagacaggatcgagtccaaacgggtccccagctcggcaaggcgcgccggaaggaatctaacagccattgtttgatgtcctgtgactgagaaaccaggctttaaactttatgcctttggagatggagcccaagatgagcaaactggcctttggctgtcagagaagttccacatcagatgatgactctggctgtgcattggaggagtacgcctgggtccccccgggcctgagaccagagcagatccagctctattttgcttgcttaccagaggaaaaagttccttacgttaacagccccggagagaagcatcggattaaacagcttttgtaccagttaccaccacatgataatgaggtacggtattgccagtctttgagtgaagaggagaaaaaagagttgcaggtgttcagtgctcagcggaagaaagaagcactgggaagaggaacaattaagcttctgtccagagcagtcatgcatgctgtgtgtgagcagtgtggtttgaagataaatggaggtgaagttgcagtgttcgcctcccgtgcgggccctggtgtgtgctggcacccatcctgttttgtctgtttcacgtgtaatgagctgctggtcgacctcatctatttttatcaggatggaaaaattcactgtggcaggcaccatgcagaactgctcaaaccacggtgctcagcatgtgacgagataatttttgctgatgagtgcacagaagctgagggtcgccattggcacatgaaacacttctgctgccttgagtgtgaaacggtcctgggaggacagaggtatatcatgaaggacggccgccccttctgctgtggctgttttgagtctctctatgcggagtactgtgaaacctgtggggaacatattggtgtggaccatgcacagatgacctatgacgggcagcactggcacgccacggaagcctgcttttcttgtgcccagtgtaaagcctctttgttgggatgtcccttccttcccaaacagggtcagatttactgctcaaaaacgtgcagtcttggtgaagacgtccatgcctctgattcttccgactctgcatttcagtcagctcgatcaagagactcccgaagaagtgtccgaatgggcaagagcagccggtcagcagatcagtgtagacagtctctcctcttatcgcctgctctgaactacaagtttcctggcctctcaggcaatgctgatgacaccctttctcgaaaattggatgatctgagtctctccagacaaggaacaagttttgccagtgaagaattttggaaaggcagagtagagcaggaaactccagaagaccctgaagaatgggctgatcatgaagattatatgacgcagctcctcctcaagtttggtgataaaagcctctttcagccacagcccaatgagatggatattcgagccagtgagcactggatatctgataacatggttaaaagtaagaccgagttaaagcaaaataaccagagccttgcaagtaaaaaataccagtctgatatgtactgggcacagtcacaagatggactgggcgattctgcttatggcagccacccaggccctgcaagcagtagaaggcttcaggaattggaactggaccatggggcttcagggtataatcatgatgaaacacagtggtatgaagattccctggagtgtctgtcagacctgaaaccagagcaaagtgttcgggattcgatggattctttggcattgtccaatatcacaggggcttcggtggatggagaaaacaagccaaggccatcattgtattctctgcaaaattttgaggagatggaaacagaagattgtgagaagatgagcaatatgggaactttgaactcttccatgctgcacaggagtgcagagtccttaaagagtctaagttcagagttgtgtccagagaaaatcctgcctgaagagaagccagtacatctgccagtgctcagaaggtccaagtctcaatccagaccccagcaggtcaagttttctgatgatgtcattgacaatgggaactatgacattgaaatccggcagcctccgatgagtgaaaggactcggagacgcgtctacaattttgaagagaggggatccaggtctcatcaccaccgccgccggagaagtagaaagtcccgctccgacaatgccctgaatcttgttacagaaagaaaatactctcccaaggacagactgcggctgtacacccccgataactatgagaaatttatacagaataaaagtgcccgggagatccaagcatacatccagaatgctgatctctacggacagtacgcccatgccacttccgattatggcctgcagaacccaggaatgaatcggtttctgggactctacggcgaggatgatgattcctggtgttcttcctcctcctcctcttccgactcggaagaagaaggatattttcttggacaaccaatccctcaaccccggccacagagatttgcctactatacagatgacctttctagtccaccatctgcacttcccacccctcagtttggtcagaggacaacaaaatccaagaagaaaaagggacacaagggcaaaaattgtattatttcttaaccaagtagtgatgcagagcatttgtttaaaacttagccattaaccgtctgaatcgtttccttttcttccgtaggaaagttgtgaaaatagtttaaagtgctttctttgcccatgtaaatgagaactcaactgctgtttacagtgtcagattaacatttgaaaggtgtgatttctccaatttaccctctttggatggtgccaggtggacgtgacatctcgtgcctgtccggtgcgggtgcgttacagatggacgtagctgctttggttttccagtcctcaagggaatactgaagatgctgactgaaggggattggatgttgattttagaagatggagaactccagccacctttgtaaagcactagtgtttgtcatttatgtaagtcaggtcggctcaggtcttgatagtccgtcttggtgtgaggcatgcctgtcacgatgacctagctaacactgtgcatcttattgtgaggccagcttgtcccctcgaaccctctttggccaggtaaacattgtattgtatcagcgccagctacagattgaaaaaaaaaaacaaaaaacattgctatttataacttagtatttcatagacttaagtgtattcctaatttaacggtgcaaatattaatgtatatactgtacagttcagattttaaagctgatatttttatatccctgaattgtaagccgtttgttacgctgcagtgctagatttgccagggaaccagaatttatggatgaactgattgcttatattttagtcagggtttataaatgtagatggtcaaatttacattgcctagtgatggaaaattcaactttttttgatttttttttccaatattaaaaaaggctctgtatgcatggtggggctatgtaagtactctttaaaactatggccctattaatcttacaagtgttacttatgggtcaagcaatgtaaactgtataaatgtaaaaacaacccctccacacacataacccctggaatatatggtaaaaacaagtagaagctgtttcagcgagtgggttttttccccctgcctgcggggggtgcctttctcattttcagcaaggtgatgattatctcatgggaaatgacaaagatctgcttttgtggcagaggactttgtagatttgttattttaagagaggttattcctttttattccttccctcccactaatttgttggcctttaacagcaattttgaaaactgggtcttctggttatgtttttgttttaaaatctttaaattagaggatgctgtgccattgagtactgtaagttaatatgaggttctggttcaaggaaaacttacgttggatctgaaccaatgagcagatattttgatatgtgccactcttgcatatacatctcagtcctaactaaaggttctagtggcatccaggacctttagggaggcatttaataaacacttaataaataacaaaa

SEQ ID NO: 23592 - DNA, 4253 bp, Homo sapiens
  source 1..4253: mol_type = unassigned DNA
acttttgaagatcgccggccccaggcgggctcccggcgctgagcggagacgagtttttctccccgcagaggaggatcctggaaggacgcggagctggggcttgggggatgcagtggcctggacgaggtgactccaacccgggggagcagagtccgtcacgccggcagggaccgagggtctctgcggagctggaggaccttttgtgggatgcctcacggctgctgaggggctgcagcggcagccattgtttgatgtcctgtgactgagaaaccaggctttaaactttatgcctttggagatggagcccaagatgagcaaactggcctttggctgtcagagaagttccacatcagatgatgactctggctgtgcattggaggagtacgcctgggtccccccgggcctgagaccagagcagatccagctctattttgcttgcttaccagaggaaaaagttccttacgttaacagccccggagagaagcatcggattaaacagcttttgtaccagttaccaccacatgataatgaggtacggtattgccagtctttgagtgaagaggagaaaaaagagttgcaggtgttcagtgctcagcggaagaaagaagcactgggaagaggaacaattaagcttctgtccagagcagtcatgcatgctgtgtgtgagcagtgtggtttgaagataaatggaggtgaagttgcagtgttcgcctcccgtgcgggccctggtgtgtgctggcacccatcctgttttgtctgtttcacgtgtaatgagctgctggtcgacctcatctatttttatcaggatggaaaaattcactgtggcaggcaccatgcagaactgctcaaaccacggtgctcagcatgtgacgagataatttttgctgatgagtgcacagaagctgagggtcgccattggcacatgaaacacttctgctgccttgagtgtgaaacggtcctgggaggacagaggtatatcatgaaggacggccgccccttctgctgtggctgttttgagtctctctatgcggagtactgtgaaacctgtggggaacatattggtgtggaccatgcacagatgacctatgacgggcagcactggcacgccacggaagcctgcttttcttgtgcccagtgtaaagcctctttgttgggatgtcccttccttcccaaacagggtcagatttactgctcaaaaacgtgcagtcttggtgaagacgtccatgcctctgattcttccgactctgcatttcagtcagctcgatcaagagactcccgaagaagtgtccgaatgggcaagagcagccggtcagcagatcagtgtagacagtctctcctcttatcgcctgctctgaactacaagtttcctggcctctcaggcaatgctgatgacaccctttctcgaaaattggatgatctgagtctctccagacaaggaacaagttttgccagtgaagaattttggaaaggcagagtagagcaggaaactccagaagaccctgaagaatgggctgatcatgaagattatatgacgcagctcctcctcaagtttggtgataaaagcctctttcagccacagcccaatgagatggatattcgagccagtgagcactggatatctgataacatggttaaaagtaagaccgagttaaagcaaaataaccagagccttgcaagtaaaaaataccagtctgatatgtactgggcacagtcacaagatggactgggcgattctgcttatggcagccacccaggccctgcaagcagtagaaggcttcaggaattggaactggaccatggggcttcagggtataatcatgatgaaacacagtggtatgaagattccctggagtgtctgtcagacctgaaaccagagcaaagtgttcgggattcgatggattctttggcattgtccaatatcacaggggcttcggtggatggagaaaacaagccaaggccatcattgtattctctgcaaaattttgaggagatggaaacagaagattgtgagaagatgagcaatatgggaactttgaactcttccatgctgcacaggagtgcagagtccttaaagagtctaagttcagagttgtgtccagagaaaatcctgcctgaagagaagccagtacatctgccagtgctcagaaggtccaagtctcaatccagaccccagcaggtcaagttttctgatgatgtcattgacaatgggaactatgacattgaaatccggcagcctccgatgagtgaaaggactcggagacgcgtctacaattttgaagagaggggatccaggtctcatcaccaccgccgccggagaagtagaaagtcccgctccgacaatgccctgaatcttgttacagaaagaaaatactctcccaaggacagactgcggctgtacacccccgataactatgagaaatttatacagaataaaagtgcccgggagatccaagcatacatccagaatgctgatctctacggacagtacgcccatgccacttccgattatggcctgcagaacccaggaatgaatcggtttctgggactctacggcgaggatgatgattcctggtgttcttcctcctcctcctcttccgactcggaagaagaaggatattttcttggacaaccaatccctcaaccccggccacagagatttgcctactatacagatgacctttctagtccaccatctgcacttcccacccctcagtttggtcagaggacaacaaaatccaagaagaaaaagggacacaagggcaaaaattgtattatttcttaaccaagtagtgatgcagagcatttgtttaaaacttagccattaaccgtctgaatcgtttccttttcttccgtaggaaagttgtgaaaatagtttaaagtgctttctttgcccatgtaaatgagaactcaactgctgtttacagtgtcagattaacatttgaaaggtgtgatttctccaatttaccctctttggatggtgccaggtggacgtgacatctcgtgcctgtccggtgcgggtgcgttacagatggacgtagctgctttggttttccagtcctcaagggaatactgaagatgctgactgaaggggattggatgttgattttagaagatggagaactccagccacctttgtaaagcactagtgtttgtcatttatgtaagtcaggtcggctcaggtcttgatagtccgtcttggtgtgaggcatgcctgtcacgatgacctagctaacactgtgcatcttattgtgaggccagcttgtcccctcgaaccctctttggccaggtaaacattgtattgtatcagcgccagctacagattgaaaaaaaaaaacaaaaaacattgctatttataacttagtatttcatagacttaagtgtattcctaatttaacggtgcaaatattaatgtatatactgtacagttcagattttaaagctgatatttttatatccctgaattgtaagccgtttgttacgctgcagtgctagatttgccagggaaccagaatttatggatgaactgattgcttatattttagtcagggtttataaatgtagatggtcaaatttacattgcctagtgatggaaaattcaactttttttgatttttttttccaatattaaaaaaggctctgtatgcatggtggggctatgtaagtactctttaaaactatggccctattaatcttacaagtgttacttatgggtcaagcaatgtaaactgtataaatgtaaaaacaacccctccacacacataacccctggaatatatggtaaaaacaagtagaagctgtttcagcgagtgggttttttccccctgcctgcggggggtgcctttctcattttcagcaaggtgatgattatctcatgggaaatgacaaagatctgcttttgtggcagaggactttgtagatttgttattttaagagaggttattcctttttattccttccctcccactaatttgttggcctttaacagcaattttgaaaactgggtcttctggttatgtttttgttttaaaatctttaaattagaggatgctgtgccattgagtactgtaagttaatatgaggttctggttcaaggaaaacttacgttggatctgaaccaatgagcagatattttgatatgtgccactcttgcatatacatctcagtcctaactaaaggttctagtggcatccaggacctttagggaggcatttaataaacacttaataaataacaaaactacctttctgaatata

SEQ ID NO: 23593 - DNA, 456 bp, Homo sapiens
  source 1..456: mol_type = unassigned DNA
catgccagcctcgcgcagcctgcgctgacttccccgagacgcgccgcggtcggcacggagactttctgggctctggatgcagccattgtttgatgtcctgtgactgagaaaccaggctttaaactttatgcctttggagatggagcccaagatgagcaaactggcctttggctgtcagagaagttccacatcagatgatgactctggctgtgcattggaggagtacgcctgggtccccccgggcctgagaccagagcagatccagctctattttgcttgcttaccagaggaaaaagttccttacgttaacagccccggagagaagcatcggattaaacagcttttgtaccagttaccaccacatgataatgaggtacggtattgccagtctttgagtgaagaggagaaaaaagagttgcaggtgttcagtgctcagcggaagaaagaagcactggg

SEQ ID NO: 23594 - DNA, 3584 bp, Homo sapiens
  source 1..3584: mol_type = unassigned DNA
tttttctccccgcagaggaggatcctggaaggacgcggagctggggcttgggggatgcagtggcctggacgaggtgactccaacccgggggagcagagtccgtcacgccggcagggaccgagggtctctgcggagctggaggaccttttgtgggatgcctcacggctgctgaggggctgcagcggccattgtttgatgtcctgtgactgagaaaccaggctttaaactttatgcctttggagatggagcccaagatgagcaaactggcctttggctgtcagagaagttccacatcagatgatgactctggctgtgcattggaggagtacgcctgggtccccccgggcctgagaccagagcagatccagctctattttgcttgcttaccagaggaaaaagttccttacgttaacagccccggagagaagcatcggattaaacagcttttgtaccagttaccaccacatgataatgaggtacggtattgccagtctttgagtgaagaggagaaaaaagagttgcaggtgttcagtgctcagcggaagaaagaagcactgggaagaggaacaattaagcttctgtccagagcagtcatgcatgctgtgtgtgagcagtgtggtttgaagataaatggaggtgaagttgcagtgttcgcctcccgtgcgggccctggtgtgtgctggcacccatcctgttttgtctgtttcacgtgtaatgagctgctggtcgacctcatctatttttatcaggatggaaaaattcactgtggcaggcaccatgcagaactgctcaaaccacggtgctcagcatgtgacgagataatttttgctgatgagtgcacagaagctgagggtcgccattggcacatgaaacacttctgctgccttgagtgtgaaacggtcctgggaggacagaggtatatcatgaaggacggccgccccttctgctgtggctgttttgagtctctctatgcggagtactgtgaaacctgtggggaacatattggtgtggaccatgcacagatgacctatgacgggcagcactggcacgccacggaagcctgcttttcttgtgcccagtgtaaagcctctttgttgggatgtcccttccttcccaaacagggtcagatttactgctcaaaaacgtgcagtcttggtgaagacgtccatgcctctgattcttccgactctgcatttcagtcagctcgatcaagagactcccgaagaagtgtccgaatgggcaagagcagccggtcagcagatcagtgtagacagtctctcctcttatcgcctgctctgaactacaagtttcctggcctctcaggcaatgctgatgacaccctttctcgaaaattggatgatctgagtctctccagacaaggaacaagttttgccagtgaagaattttggaaaggcagagtagagcaggaaactccagaagaccctgaagaatgggctgatcatgaagattatatgacgcagctcctcctcaagtttggtgataaaagcctctttcagccacagcccaatgagatggatattcgagccagtgagcactggatatctgataacatggttaaaagtaagaccgagttaaagcaaaataaccagagccttgcaagtaaaaaataccagtctgatatgtactgggcacagtcacaagatggactgggcgattctgcttatggcagccacccaggccctgcaagcagtagaaggcttcaggaattggaactggaccatggggcttcagggtataatcatgatgaaacacagtggtatgaagattccctggagtgtctgtcagacctgaaaccagagcaaagtgttcgggattcgatggattctttggcattgtccaatatcacaggggcttcggtggatggagaaaacaagccaaggccatcattgtattctctgcaaaattttgaggagatggaaacagaagattgtgagaagatgagcaatatgggaactttgaactcttccatgctgcacaggagtgcagagtccttaaagagtctaagttcagagttgtgtccagagaaaatcctgcctgaagagaagccagtacatctgccagtgctcagaaggtccaagtctcaatccagaccccagcaggtcaagttttctgatgatgtcattgacaatgggaactatgacattgaaatccggcagcctccgatgagtgaaaggactcggagacgcgtctacaattttgaagagaggggatccaggtctcatcaccaccgccgccggagaagtagaaagtcccgctccgacaatgccctgaatcttgttacagaaagaaaatactctcccaaggacagactgcggctgtacacccccgataactatgagaaatttatacagaataaaagtgcccgggagatccaagcatacatccagaatgctgatctctacggacagtacgcccatgccacttccgattatggcctgcagaacccaggaatgaatcggtttctgggactctacggcgaggatgatgattcctggtgttcttcctcctcctcctcttccgactcggaagaagaaggatattttcttggacaaccaatccctcaaccccggccacagagatttgcctactatacagatgacctttctagtccaccatctgcacttcccacccctcagtttggtcagaggacaacaaaatccaagaagaaaaagggacacaagggcaaaaattgtattatttcttaaccaagtagtgatgcagagcatttgtttaaaacttagccattaaccgtctgaatcgtttccttttcttccgtaggaaagttgtgaaaatagtttaaagtgctttctttgcccatgtaaatgagaactcaactgctgtttacagtgtcagattaacatttgaaaggtgtgatttctccaatttaccctctttggatggtgccaggtggacgtgacatctcgtgcctgtccggtgcgggtgcgttacagatggacgtagctgctttggttttccagtcctcaagggaatactgaagatgctgactgaaggggattggatgttgattttagaagatggagaactccagccacctttgtaaagcactagtgtttgtcatttatgtaagtcaggtcggctcaggtcttgatagtccgtcttggtgtgaggcatgcctgtcacgatgacctagctaacactgtgcatcttattgtgaggccagcttgtcccctcgaaccctctttggccaggtaaacattgtattgtatcagcgccagctacagattgaaaaaaaaaaacaaaaaacattgctatttataacttagtatttcatagacttaagtgtattcctaatttaacggtgcaaatattaatgtatatactgtacagttcagattttaaagctgatatttttatatccctgaattgtaagccgtttgttacgctgcagtgctagatttgccagggaaccagaatttatggatgaactgattgcttatattttagtcagggtttataaatgtagatggtcaaatttacattgcctagtgatggaaaattcaactttttttgatttttttttccaatattaaaaaaggctctgt

SEQ ID NO: 23595 - DNA, 693 bp, Homo sapiens
  source 1..693: mol_type = unassigned DNA
gaggaggggttcgctcgctgcctctgcgtcctgagctcggcctctggctcctggggccggggacgcagagaggggctggagccggtcgacccacggcccagggcgccccctcgcggcctaagcagcggccgccgcctggagcgcagagtttgcggggcccagggggcgccgacgcccgctctgaggcgtctctgctgctgcggcggcggggatggggacgacccaggggaccccctgcagccatcactggcagccccatcaagaattggccggctgagttttcccaaacagccattgtttgatgtcctgtgactgagaaaccaggctttaaactttatgcctttggagatggagcccaagatgagcaaactggcctttggctgtcagagaagttccacatcagatgatgactctggctgtgcattggaggagtacgcctgggtccccccgggcctgagaccagagcagatccagctctattttgcttgcttaccagaggaaaaagttccttacgttaacagccccggagagaagcatcggattaaacagcttttgtaccagttaccaccacatgataatgaggtacggtattgccagtctttgagtgaagaggagaaaaaagagttgcaggtgttcagtgctcagcggaagaaagaagcactgggaagaggaacaattaagcttctgtccaga

SEQ ID NO: 23596 - DNA, 585 bp, Homo sapiens
  source 1..585: mol_type = unassigned DNA
tatttgcatcttagcggcttcactcactgggctcgggagaatggagcgggcgggcggcgcagccattgtttgatgtcctgtgactgagaaaccaggctttaaactttatgcctttggagatggagcccaagatgagcaaactggcctttggctgtcagagaagttccacatcagatgatgactctggctgtgcattggaggagtacgcctgggtccccccgggcctgagaccagagcagatccagctctattttgcttgcttaccagaggaaaaagttccttacgttaacagccccggagagaagcatcggattaaacagcttttgtaccagttaccaccacatgataatgaggtacggtattgccagtctttgagtgaagaggagaaaaaagagttgcaggtgttcagtgctcagcggaagaaagaagcactgggaagaggaacaattaagcttctgtccagagcagtcatgcatgctgtgtgtgagcagtgtggtttgaagataaatggaggtgaagttgcagtgttcgcctcccgtgcgggccctggtgtgtgctggcacccatcctgttttgtctgtttca

SEQ ID NO: 23597 - DNA, 3324 bp, Homo sapiens
  source 1..3324: mol_type = unassigned DNA
atgtagtggggacccggtgcttgctgccccaccctgctggggtctcctccggaaatgagtgggtgcgggtgactcgtagggcacccagccctctgttccttcgggagtcctccgctcccgctccgggccgccagcctccttcagacgcagagcgggcgggcggctagtgcgcgccgagggctcaggggccggcgccgcgaggggctgcaggccgcgctcggccgctgtccgggccgcagcagccattgtttgatgtcctgtgactgagaaaccaggctttaaactttatgcctttggagatggagcccaagatgagcaaactggcctttggctgtcagagaagttccacatcagatgatgactctggctgtgcattggaggagtacgcctgggtccccccgggcctgagaccagagcagatccagctctattttgcttgcttaccagaggaaaaagttccttacgttaacagccccggagagaagcatcggattaaacagcttttgtaccagttaccaccacatgataatgaggtacggtattgccagtctttgagtgaagaggagaaaaaagagttgcaggtgttcagtgctcagcggaagaaagaagcactgggaagaggaacaattaagcttctgtccagagcagtcatgcatgctgtgtgtgagcagtgtggtttgaagataaatggaggtgaagttgcagtgttcgcctcccgtgcgggccctggtgtgtgctggcacccatcctgttttgtctgtttcacgtgtaatgagctgctggtcgacctcatctatttttatcaggatggaaaaattcactgtggcaggcaccatgcagaactgctcaaaccacggtgctcagcatgtgacgagataatttttgctgatgagtgcacagaagctgagggtcgccattggcacatgaaacacttctgctgccttgagtgtgaaacggtcctgggaggacagaggtatatcatgaaggacggccgccccttctgctgtggctgttttgagtctctctatgcggagtactgtgaaacctgtggggaacatattggtgtggaccatgcacagatgacctatgacgggcagcactggcacgccacggaagcctgcttttcttgtgcccagtgtaaagcctctttgttgggatgtcccttccttcccaaacagggtcagatttactgctcaaaaacgtgcagtcttggtgaagacgtccatgcctctgattcttccgactctgcatttcagtcagctcgatcaagagactcccgaagaagtgtccgaatgggcaagagcagccggtcagcagatcagtgtagacagtctctcctcttatcgcctgctctgaactacaagtttcctggcctctcaggcaatgctgatgacaccctttctcgaaaattggatgatctgagtctctccagacaaggaacaagttttgccagtgaagaattttggaaaggcagagtagagcaggaaactccagaagaccctgaagaatgggctgatcatgaagattatatgacgcagctcctcctcaagtttggtgataaaagcctctttcagccacagcccaatgagatggatattcgagccagtgagcactggatatctgataacatggttaaaagtaagaccgagttaaagcaaaataaccagagccttgcaagtaaaaaataccagtctgatatgtactgggcacagtcacaagatggactgggcgattctgcttatggcagccacccaggccctgcaagcagtagaaggcttcaggaattggaactggaccatggggcttcagggtataatcatgatgaaacacagtggtatgaagattccctggagtgtctgtcagacctgaaaccagagcaaagtgttcgggattcgatggattctttggcattgtccaatatcacaggggcttcggtggatggagaaaacaagccaaggccatcattgtattctctgcaaaattttgaggagatggaaacagaagattgtgagaagatgagcaatatgggaactttgaactcttccatgctgcacaggagtgcagagtccttaaagagtctaagttcagagttgtgtccagagaaaatcctgcctgaagagaagccagtacatctgccagtgctcagaaggtccaagtctcaatccagaccccagcaggtcaagttttctgatgatgtcattgacaatgggaactatgacattgaaatccggcagcctccgatgagtgaaaggactcggagacgcgtctacaattttgaagagaggggatccaggtctcatcaccaccgccgccggagaagtagaaagtcccgctccgacaatgccctgaatcttgttacagaaagaaaatactctcccaaggacagactgcggctgtacacccccgataactatgagaaatttatacagaataaaagtgcccgggagatccaagcatacatccagaatgctgatctctacggacagtacgcccatgccacttccgattatggcctgcagaacccaggaatgaatcggtttctgggactctacggcgaggatgatgattcctggtgttcttcctcctcctcctcttccgactcggaagaagaaggatattttcttggacaaccaatccctcaaccccggccacagagatttgcctactatacagatgacctttctagtccaccatctgcacttcccacccctcagtttggtcagaggacaacaaaatccaagaagaaaaagggacacaagggcaaaaattgtattatttcttaaccaagtagtgatgcagagcatttgtttaaaacttagccattaaccgtctgaatcgtttccttttcttccgtaggaaagttgtgaaaatagtttaaagtgctttctttgcccatgtaaatgagaactcaactgctgtttacagtgtcagattaacatttgaaaggtgtgatttctccaatttaccctctttggatggtgccaggtggacgtgacatctcgtgcctgtccggtgcgggtgcgttacagatggacgtagctgctttggttttccagtcctcaagggaatactgaagatgctgactgaaggggattggatgttgattttagaagatggagaactccagccacctttgtaaagcactagtgtttgtcatttatgtaagtcaggtcggctcaggtcttgatagtccgtcttggtgtgaggcatgcctgtcacgatgacctagctaacactgtgcatcttattgtgaggccagcttgtcccctcgaaccctctttggccaggtaaacattgtattgtatcagcgccagctacagattg

SEQ ID NO: 23598 - DNA, 8305 bp, Homo sapiens
  source 1..8305: mol_type = unassigned DNA
gacttctcaggcaccaccagcagcgccaccgagagttattattattttttgaccaagcagcacatttcctggttcagtggcttgagctctgtgagcagctgactagtcaccccgggtctggctcaggatcagctggtgacgctgggctggagtctatgacttcttccttcagattgtcatgaagaaggggagttaagaggaaactgggggtcctccggaaggcgatctgagcactcaggctgatctagaggaagagtagaagtcatactttttttctcttgcttggtgaattccccagcagagtctggatccagcagtgctgttttccctgagggaatgtggagcagctcggcttgagtctgttgccagcttcaggaagggttcagactgaaaagggggtttgaggagaagatgctttggctgcctgaggtcctgcttgcgttcttagaagtcagatccagggagaaagtgaactgggacaattgacaagctccaagggtctggcagaagcttcctccgagactgggcatttcatcctccctggaggaagatctgcctgcactgcaagtgtccccaggaggagcacatggtgacagtgatgccgctggagatggagaagaccatcagcaaactcatgtttgactttcagaggaactcgacctcagatgatgactcaggctgtgctttggaagagtatgcctgggtcccgccgggtctgaagcctgaacaggtacaccagtactatagctgtctcccagaagagaaagtcccttatgtcaacagtcctggagagaaactgcgaatcaagcagctactacaccagctgccgccacatgacaatgaggttcgatattgcaactccctggatgaggaagagaagagggagctgaagcttttcagcagccagaggaaacgcgaaaacttgggccgcgggaatgtcaggcctttcccagtcaccatgacaggagctatttgtgaacagtgcggaggccagatcaatggtggagacatcgctgtgtttgcgtcacgcgctggccacggcgtttgctggcacccgccgtgcttcgtatgcactgtctgcaatgagctcctggtggatctgatctacttttaccaagatgggaagatatactgtggcaggcaccatgctgagtgcctgaagccgcgctgtgctgcctgcgatgagatcatctttgcagatgaatgcacagaagctgaggggcgacactggcacatgaaacacttttgctgcttcgagtgtgagacagtgctgggcggccagcgctacatcatgaaggagggaagaccctactgttgccactgcttcgagtccttgtatgcagaatattgtgacacctgtgcccaacatataggtatcgaccaaggtcaaatgacctatgatggccaacactggcatgccactgagacctgtttctgctgtgctcactgcaagaaatccctcctggggcggccattcctcccgaagcagggccagatattctgctcacgggcctgcagtgctggggaagaccccaatggttctgactcctctgattccgccttccagaacgccagggccaaggagtcccggcgcagtgccaaaattggcaagaacaagggcaagacggaggagcccatgctgaaccagcacagccagctgcaagtgagttctaaccggctgtcagccgacgtagaccccctgtcactgcagatggacatgctcagcctgtccagccagacacccagcctcaaccgggaccccatctggaggagccgggaagagccctaccattatgggaacaagatggagcagaaccagacccagagccctctgcagctcctcagccagtgcaacatcagaacttcctacagtccaggagggcaaggggctggggcccagcccgaaatgtggggcaagcacttcagcaaccccaaaaggagctcgtcactggccatgacaggacatgctggcagcttcatcaaggaatgccgagaagactattacccggggaggctgagatctcaggagagctacagtgatatgtctagtcagagtttcagtgagacccgaggcagcatccaagtccccaaatatgaggaggaagaggaagaggaagggggcttgtccactcagcagtgtcggacccgtcatcccatcagttccctgaaatacacagaggacatgacgcccacagagcagacccctcggggctccatggaatccctggccctgtctaatgcaacaggcctctctgctgatggtggtgccaagcgccaggagcacctatcccgattttccatgcctgacctcagcaaagactctggaatgaatgtgtctgagaagctgagcaacatgggcactcttaactcgtccatgcagttccggagcgcagagtcagttcgcagcctgctctctgcccagcagtaccaggagatggagggaaacctccaccagctcagcaaccccattggctacagagacctgcagtcccacggaaggatgcatcagagctttgattttgatggagggatggcgggcagcaagctgccagggcaggagggcgtgaggatccagcccatgagtgaacgcacccggagaagagctacttcacgcgacgacaaccgccgtttccgacctcacaggtccaggcgttcccgacgctctcgctccgacaacgccctccacctggccagcgaacgcgaggccatctcccggttaaaagataggccccctctgagagccagggaggactatgaccaatttatgcgccagcggagcttccaggagagcatggggcatgggtcccggagggacctgtacggccagtgccctaggactgtgtcggacctggctttgcagaatgcctttggggaccgctggggaccctacttcgccgagtatgattggtgttccacctgctcctcctcttcagagtctgacaacgagggctatttcctaggagaacccatcccccagccagcgcgcctgcgatacgtcacaagcgatgagctgctgcacaaatacagctcctacggcctccccaaatcttccacattaggtggcagaggacagttgcacagcaggaaaagacagaagagcaaaaactgtatcatttcttaatatgattgggatcagggaatgggagaagatgggagctaagaatgtaaagtcagaaacttgcactgttttaaatgttaaagcgcttttgggggtggcttatgggggagaaaagggaaaatgctgtcagtagatggaggcaaggttacaggttgactcaataggtagtcacagttcttggcatgttgaatattatttgcacatttcactttggaaacacagtagactctatcgaggccaggcttggtcacttccttcccatcagttctgtgttgagttgccatctctcaagatggtaaattgtttcctgctcgcttttatcctctctggttctcttacttttaggacccttttttcagtaagtaatttgtttattagccaggacccaagactaagttatttacatgtccattgtaaatgcaatgtaaatgagagttctgataaaatatttttgtattttgtaatatcaaaggaatttctatatcgtaggactcagtggggacttgcatgcacatccaccattgtctctgagtagtattgaaatgtggcccggtaccaccttttttttttttttttttttttctatacaaatttgttacatgtcagtgagacctttttcaaaggaacatattcaatttggctttttgtggctgaaaaaacataactgttagacccaaagcattttatgctccgttccatcttaaggagccatccttaagtctgctcccaccctcagtagaatttattttctacaaagtggtagtaatttttttttaaattgcaaatgtaatttttgccaattagagaaaccaaccggtgtcagtaaaattctgtgagaaatgccatccctgctgggaatgttgaagttacttaatgttgatctatcccttggggaaagtaaaagtgactgtgagtggtgccattgtgtgatgtcagcatgacgttgttttgaatgtggcattatgttctggtgctcatgtttcctggattgtattatctgctttcctttaccaaggcagacagaactgctgccttagcctgacaaccggttgtcctcaaagcaaatgaacttaagcatttgggattgagggacagaaggattctgagggggctctgcgagggacggtgtgtgacatgtcatgcctggagaaggaacaaggctatttgaaaacagaaggcaggtcaagggtagaagttaaaggagaatctgaaggcaggtcagggaaaagaagaactggaaatgaaacagaggacaggtgacaaccacctcgaagagctcccagagattgtagaaagagtccagtgtaaccagcttagtaaccagagtatctggattacccaggaaggttgagctgctgagatttcagtggtgcaatgtctttaaaaaaacaggctttgttgggagggtatttccattttgaactttgaggactgttggtcagaaaatgggctcaaaagtgagtttgcttaatgaagacatttaacggttgtgctgtttatagtaaaataaaactccctaccttgcttcagttaaaaatgaagcacttggtttcttccatcctcctcctccccttaatggattgtggcagttgaaataatccatcggatgacccacctgtagtgagatgtactgtcgatgtagtgcccggtgtatctcagtggccatctgccatggtgaggtgagcgtgatctcttttcagtatagtagttaacattttctagtattttttatggagagaatgtcaaaagtggcatttcagaccccgtcccagatgggtctgaggaaaggaaggctgtaaaggacatggtaatggcactccattcgggatgtattaaaataatttgcttttcaggtattaatatgacatttgtcattgtcactgatttttttaaaaaagcaatgcacatgttggttgtggctgttttccgcatgctatcttcatatctaaatgcttcattaattatccgagcctccggagaattaactctattacgtttgtatagtaagtttgtaaactgcttggcaaactgattaagaaataatttgcaataccgtgctactaaagtggcaggtttctggtagaaattgtgcgagtccaatttggagttttaagttccttgattgatgaaactaaaaaggcaattttggaaaaagagagggggaaaagtagatcacttatcttagcaaacggttgaaaatatgtctgtcctctgtggccccaaatccagtgaaagaaattctcccagtaaaagttgcttcctaactctgtttttctcagaatacctcttacctttctcaaagaaagcttcaaccaccatcatcagaaagaaggtggcctaaaaactgacacatggccagtgcccggaggggtctggaggcataagtctagatgcccagagagcatccaggcactgaactgctcagagcttgagatgaaatgacatacaagcttcagggtaaaactgtctactagcaagattacctccctcaattctaccattgcagatttcttctgaccccaaatgcaaccttacagagaatgctgaatgaggaaggccaattccttacaatgatggcagaacccccaagcgaatgccctattgaggagaaggacatcactgtatttggaattctgcctgctagtgatagctcacacatcacatcccagaatcccactcccaatgcattatttcctgaggcaagaacttaaggtcctcacctaattcctccatcacaaccattaactcttattggacaagctcctcctgtgagtagggcctgtactcacttcctcttagatcataattccatcttcaagagactgatttccagaatagtaatctttttccagcgttctctcttctccaatgccctggttgttatttttcccacctctcctaatattgatcttcttgtcttttggttagaactgcaacttcggagttgagttcatttcctattgctgctcaattcagtagcaacatagctggcttgttcccagacccaggaagtataagtcattgacagtttcctgagtggctctgccaatccataccacccttggtactgtgaaaaggcttcttggcagccaggtggcattgaggatggtattcagggcgctttccttctgtcatatagttgtgggatctctaccaagtgtgaaggtgaatgaggtaagggagatcagaaccatgcttcctggtttttcatacatccaaggaagaagtcctggtgtgggttgtttgacaccttctttccactttcaccttttattttttattccttcctttctacccccaaccagtcgagcaaatgagcaattttgtgtttctaatacaggatctggaagtagtgctttctaatcctcatttcctgtaggatgttcctgcactataacaagattatgttttcttccttctgcagcagctttctgcttcttgggtactactagctattgttcaattcaggtgaggcctgtgatgacatatatgtagcatgtgctctgcgctccctgcaagctgagcagatacaaccaatgcatcactgtatactcttgctgagaatgtggatgcagcctcacagatctttgcaacactccaaccagccaggaccagttgatcagaactgatcttattggtctgataaccaatcttatttgtgaactgattcatatctgtctttccactcttggttctcttgccgtagaacaaaaacagtttaggaagcataattacgaacatttaggaaccaatatgtataagtaattcggagactccaattcacctgcccctcccccatcccaggttgtggaggctcgaggaagctgacttcttaggctaaaggacaaaaaaatctctttacctccttggccattttcatgttctctgccaattactataggcagtcttcattttgcagaggtgaggtaagacttcatcttattcttcatgtaatcccaccttctaacaaaaaataaataaatatttaaattccaaggagaagtgttctttgtgtatttctagcagaaaacagatgcttaagcctaagaaggaagatccgtccatgacaaaggaaagtggaaaactgaaccagttatctgaatacttcatgccaggacagttgctattagcaactgttttgcaccttcagggctttaaaatgggctctgcagacagcatttgcatatgcaagactcagtagccaagcctccactgccaattgttgaaggcagtttcagatcgccaccttttgaggtacatttctttaagcacaagagaagtagaaatggcctttgccttgtctccagtggtttgtccctctggtgcctcagcagataccagagcttattcttatgaccatttggaagtagtcctcaaagtaaagatcaagaaaaaattggattctttttccattttctcataatagtagcctagtcaacacaagactcccataaaatatgactcactattgggagccatactattttataagcttacttcctgctgacaaaactagctttcctcaaggaaatataaaggaggggaaagtcacatagtgttaggaaaacattcctgtgttttgaatacgatgaatccataggatagagaaaaatctgcttgttctattctgagagttctctgagatatcccttcactctgcttggcatttggccattgatattcaacaggtcactgaccaagcttttctaaatttttcagagagagttacttaccagtaaggtctgttcttaaacctacctagttgattttcatatctttccataaagtgtcatgattctgtcatagaccctgacttaacattgtaaggactatgagtcctccattttttaattaatttttttttagcaaattaggacttcggcaggttttcctctcctaaactcattctttcctccacaggattgctttgtccatctcctgctttcatttcaagtgcataaacaaaacctcaaagggcctgggaaggtgaggcaggccagagtctgtgttctgtgttgagtgtcaagctatttgttaagaaggtctgcaacaggcctttggtgtgggctctgccagagactgttctgaacactttgcttgagatccgtgccctgtaaaatggatatgatgttttactgatgtctgtaatacatttgtaaacttccaataaaatttgaataaaagaaa

SEQ ID NO: 23599 - DNA, 573 bp, Homo sapiens
  source 1..573: mol_type = unassigned DNA
aaccccctttccccggctcccccgcagtttcccgggccggcagaggcgccgcagcgtcggagcaatgcaaggctaagccgggaagatctgcctgcactgcaagtgtccccaggaggagcacatggtgacagtgatgccgctggagatggagaagaccatcagcaaactcatgtttgactttcagaggaactcgacctcagatgatgactcaggctgtgctttggaagagtatgcctgggtcccgccgggtctgaagcctgaacaggtacaccagtactatagctgtctcccagaagagaaagtcccttatgtcaacagtcctggagagaaactgcgaatcaagcagctactacaccagctgccgccacatgacaatgaggttcgatattgcaactccctggatgaggaagagaagagggagctgaagcttttcagcagccagaggaaacgcgaaaacttgggccgcgggaatgtcaggcctttcccagtcaccatgacaggagctatttgtgaacagtgcggaggccagatcaatggtggagacatcgctgtgtttgcgtcacgcgctggcca

SEQ ID NO: 23600 - DNA, 1393 bp, Homo sapiens
  source 1..1393: mol_type = unassigned DNA
cctgtggtaatccttaccgtggcgagttccgcgctcaatggagacgtttgaccccaccgagctgcccgagctgcttaaactttattaccggaggctctttccctactctcagtactatcgctggctcaactacggtggagtgataaagaattactttcaacaccgtgaattttcattcacattgaaagatgatatttacattcgctaccaatccttcaacaaccagagtgatctggaaaaggagatgcagaaaatgaatccatacaagattgatataggcgcagtatattctcacagacccaatcaacacaatacagtgaagctgggagctttccaggctcaggaaaaagaactggtatttgacattgacatgacagactatgacgatgtgaggagatgttgtagttctgcagacatatgtcctaagtgctggaccctcatgacaatggccatacgcatcattgacagagcattgaaggaggactttggatttaagcatcgtctctgggtatattctggaaggagaggtgttcattgttgggtctgtgatgaatcagttagaaaactgtcttctgcagtacgttctgggatagttgagtatttgagccttgtaaagggtggtcaagacgttaaaaagaaagttcacctaagtgaaaaaattcacccttttatcagaaaatctataaacataataaaaaaatactttgaagaatatgccttggttaatcaagatattctcgaaaataaagaaagctgggataagattttagcccttgttcctgaaacaattcatgatgaacttcaacaaagcttccaaaagtctcacaattcacttcagcgttgggagcacttgaagaaagtagccagcagatatcagaataacatcaaaaatgacaaatatggaccctggctggagtgggagattatgctccagtactgttttccacggctggatatcaatgtcagcaaaggaatcaatcatctactgaagagcccttttagtgttcatcctaaaacaggtcgcatatctgtgcctattgatttgcagaaagtggaccagtttgatccatttactgttccgaccataagcttcatctgccgtgaattggatgccatttccactaatgaagaggaaaaagaggagaatgaagctgaatctgatgtcaaacatagaaccagagattataagaagaccagtctagcaccttatgtgaaagtttttgaacattttcttgaaaatctggataaatcccgaaaaggagaacttcttaagaagagtgatttacaaaaagatttctgaagacagagctcctcaaaccattgtggatatcttctgccttcaaccacagatcaaatacttcaagagccatttaataaatatggcagaactata

SEQ ID NO: 23601 - DNA, 1475 bp, Homo sapiens
  source 1..1475: mol_type = unassigned DNA
ccgccggccgtgctgttcccgccaattcctgtggtaatccttaccgtggcgagttccgcgctcaatggagacgtttgaccccaccgagctgcccgagctgcttaaactttattaccggaggctctttccctactctcagtactatcgctggctcaactacggtggagtgataaagaattactttcaacaccgtgaattttcattcacattgaaagatgatatttacattcgctaccaatccttcaacaaccagagtgatctggaaaaggagatgcagaaaatgaatccatacaagattgatataggcgcagtatattctcacagacccaatcaacacaatacagtgaagctgggagctttccaggctcaggaaaaagaactggtatttgacattgacatgacagactatgacgatgtgaggagatgttgtagttctgcagacatatgtcctaagtgctggaccctcatgacaatggccatacgcatcattgacagagcattgaagggcaaagactttggatttaagcatcgtctctgggtatattctggaaggagaggtgttcattgttgggtctgtgatgaatcagttagaaaactgtcttctgcagtacgttctgggatagttgagtatttgagccttgtaaagggtggtcaagacgttaaaaagaaagttcacctaagtgaaaaaattcacccttttatcagaaaatctataaacataataaaaaaatactttgaagaatatgccttggttaatcaagatattctcgaaaataaagaaagctgggataagattttagcccttatgggtctgttccttaatgacccatcaccaattcatgatgaacttcaacaaagcttccaaaagtctcacaattcacttcagcgttgggagcacttgaagaaagtagccagcagatatcagaataacatcaaaaatgacaaatatggaccctggctggagtgggagattatgctccagtactgttttccacggctggatatcaatgtcagcaaaggaatcaatcatctactgaagagcccttttagtgttcatcctaaaacaggtcgcatatctgtgcctattgatttgcagaaagtggaccagtttgatccatttactgttccgaccataagcttcatctgccgtgaattggatgccatttccactaatgaagaggaaaaagaggagaatgaagctgaatctgatgtcaaacatagaaccagagattataagaagaccagtctagcaccttatgtgaaagtttttgaacattttcttgaaaatctggataaatcccgaaaaggagaacttcttaagaagagtgatttacaaaaagatttctgaagacagagctcctcaaaccattgtggatatcttctgccttcaaccacagatcaaatacttcaagagccatttaataaatatggcagaactatatatgtgtcttaaacctcaaagtaaattttccttg

SEQ ID NO: 23602 - DNA, 2657 bp, Homo sapiens
  source 1..2657: mol_type = unassigned DNA
gaatctcaactcgttttttccggtgactcattcccggccctgcttggcagcgctgcaccctttaacttaaacctcggccggccgcccgccgggggcacagagtgtgcgccgggccgcgcggcaattggtccccgcgccgacctccgcccgcgagcgccgccgcttcccttccccgccccgcgtccctccccctcggccccgcgcgtcgcctgtcctccgagccagtcgctgacagccgcggcgccgcgagcttctcctctcctcacgaccgaggcagagcagtcattatggcgaaccttggctgctggatgctggttctctttgtggccacatggagtgacctgggcctctgcaagaagcgcccgaagcctggaggatggaacactgggggcagccgatacccggggcagggcagccctggaggcaaccgctacccacctcagggcggtggtggctgggggcagcctcatggtggtggctgggggcagcctcatggtggtggctgggggcagccccatggtggtggctggggacagcctcatggtggtggctggggtcaaggaggtggcacccacagtcagtggaacaagccgagtaagccaaaaaccaacatgaagcacatggctggtgctgcagcagctggggcagtggtggggggccttggcggctacatgctgggaagtgccatgagcaggcccatcatacatttcggcagtgactatgaggaccgttactatcgtgaaaacatgcaccgttaccccaaccaagtgtactacaggcccatggatgagtacagcaaccagaacaactttgtgcacgactgcgtcaatatcacaatcaagcagcacacggtcaccacaaccaccaagggggagaacttcaccgagaccgacgttaagatgatggagcgcgtggttgagcagatgtgtatcacccagtacgagagggaatctcaggcctattaccagagaggatcgagcatggtcctcttctcctctccacctgtgatcctcctgatctctttcctcatcttcctgatagtgggatgaggaaggtcttcctgttttcaccatctttctaatctttttccagcttgagggaggcggtatccacctgcagcccttttagtggtggtgtctcactctttcttctctctttgtcccggataggctaatcaatacccttggcactgatgggcactggaaaacatagagtagacctgagatgctggtcaagccccctttgattgagttcatcatgagccgttgctaatgccaggccagtaaaagtataacagcaaataaccattggttaatctggacttatttttggacttagtgcaacaggttgaggctaaaacaaatctcagaacagtctgaaatacctttgcctggatacctctggctccttcagcagctagagctcagtatactaatgccctatcttagtagagatttcatagctatttagagatattttccattttaagaaaacccgacaacatttctgccaggtttgttaggaggccacatgatacttattcaaaaaaatcctagagattcttagctcttgggatgcaggctcagcccgctggagcatgagctctgtgtgtaccgagaactggggtgatgttttacttttcacagtatgggctacacagcagctgttcaacaagagtaaatattgtcacaacactgaacctctggctagaggacatattcacagtgaacataactgtaacatatatgaaaggcttctgggacttgaaatcaaatgtttgggaatggtgcccttggaggcaacctcccattttagatgtttaaaggaccctatatgtggcattcctttctttaaactataggtaattaaggcagctgaaaagtaaattgccttctagacactgaaggcaaatctcctttgtccatttacctggaaaccagaatgattttgacatacaggagagctgcagttgtgaaagcaccatcatcatagaggatgatgtaattaaaaaatggtcagtgtgcaaagaaaagaactgcttgcatttctttatttctgtctcataattgtcaaaaaccagaattaggtcaagttcatagtttctgtaattggcttttgaatcaaagaatagggagacaatctaaaaaatatcttaggttggagatgacagaaatatgattgatttgaagtggaaaaagaaattctgttaatgttaattaaagtaaaattattccctgaattgtttgatattgtcacctagcagatatgtattacttttctgcaatgttattattggcttgcactttgtgagtattctatgtaaaaatatatatgtatataaaatatatattgcataggacagacttaggagttttgtttagagcagttaacatctgaagtgtctaatgcattaacttttgtaaggtactgaatacttaatatgtgggaaacccttttgcgtggtccttaggcttacaatgtgcactgaatcgtttcatgtaagaatccaaagtggacaccattaacaggtctttgaaatatgcatgtactttatattttctatatttgtaactttgcatgttcttgttttgttatataaaaaaattgtaaatgtttaatatctgactgaaattaaacgagcgaagatgagcaccacc

SEQ ID NO: 23603 - DNA, 806 bp, Homo sapiens
  source 1..806: mol_type = unassigned DNA
agtcgctgacagccgcggcgccgcgagcttctcctctcctcacgaccgaggcagtcattatggcgaaccttggctgctggatgctggttctctttgtggccacatggagtgacctgggcctctgcaagaagcgcccgaagcctggaggatggaacactgggggcagccgatacccggggcagggcagccctggaggcaaccgctacccacctcagggcggtggtggctgggggcagcctcatggtggtggctgggggcagcctcatggtggtggctgggggcagccccatggtggtggctggggacagcctcatggtggtggctggggtcaaggaggtggcacccacagtcagtggaacaagccgagtaagccaaaaaccaacatgaagcacatggctggtgctgcagcagctggggcagtggtggggggccttggcggctacatgctgggaagtgccatgagcaggcccatcatacatttcggcagtgactatgaggaccgttactatcgtgaaaacatgcaccgttaccccaaccaagtgtactacaggcccatggatgagtacagcaaccagaacaactttgtgcacgactgcgtcaatatcacaatcaagcagcacacggtcaccacaaccaccaagggggagaacttcaccgagaccgacgttaagatgatggagcgcgtggttgagcagatgtgtatcacccagtacgagagggaatctcaggcctattaccagagaggatcgagcatggtcctcttctcctctccacctgtgatcctcctgatctctttcctcatcttc

SEQ ID NO: 23604 - DNA, 2539 bp, Homo sapiens
  source 1..2539: mol_type = unassigned DNA
cgcgcggcaattggtccccgcgccgacctccgcccgcgagcgccgccgcttcccttccccgccccgcgtccctccccctcggccccgcgcgtcgcctgtcctccgagccagtcgctgacagccgcggcgccgcgagcttctcctctcctcacgaccgagagcagtcattatggcgaaccttggctgctggatgctggttctctttgtggccacatggagtgacctgggcctctgcaagaagcgcccgaagcctggaggatggaacactgggggcagccgatacccggggcagggcagccctggaggcaaccgctacccacctcagggcggtggtggctgggggcagcctcatggtggtggctgggggcagcctcatggtggtggctgggggcagccccatggtggtggctggggacagcctcatggtggtggctggggtcaaggaggtggcacccacagtcagtggaacaagccgagtaagccaaaaaccaacatgaagcacatggctggtgctgcagcagctggggcagtggtggggggccttggcggctacatgctgggaagtgccatgagcaggcccatcatacatttcggcagtgactatgaggaccgttactatcgtgaaaacatgcaccgttaccccaaccaagtgtactacaggcccatggatgagtacagcaaccagaacaactttgtgcacgactgcgtcaatatcacaatcaagcagcacacggtcaccacaaccaccaagggggagaacttcaccgagaccgacgttaagatgatggagcgcgtggttgagcagatgtgtatcacccagtacgagagggaatctcaggcctattaccagagaggatcgagcatggtcctcttctcctctccacctgtgatcctcctgatctctttcctcatcttcctgatagtgggatgaggaaggtcttcctgttttcaccatctttctaatctttttccagcttgagggaggcggtatccacctgcagcccttttagtggtggtgtctcactctttcttctctctttgtcccggataggctaatcaatacccttggcactgatgggcactggaaaacatagagtagacctgagatgctggtcaagccccctttgattgagttcatcatgagccgttgctaatgccaggccagtaaaagtataacagcaaataaccattggttaatctggacttatttttggacttagtgcaacaggttgaggctaaaacaaatctcagaacagtctgaaatacctttgcctggatacctctggctccttcagcagctagagctcagtatactaatgccctatcttagtagagatttcatagctatttagagatattttccattttaagaaaacccgacaacatttctgccaggtttgttaggaggccacatgatacttattcaaaaaaatcctagagattcttagctcttgggatgcaggctcagcccgctggagcatgagctctgtgtgtaccgagaactggggtgatgttttacttttcacagtatgggctacacagcagctgttcaacaagagtaaatattgtcacaacactgaacctctggctagaggacatattcacagtgaacataactgtaacatatatgaaaggcttctgggacttgaaatcaaatgtttgggaatggtgcccttggaggcaacctcccattttagatgtttaaaggaccctatatgtggcattcctttctttaaactataggtaattaaggcagctgaaaagtaaattgccttctagacactgaaggcaaatctcctttgtccatttacctggaaaccagaatgattttgacatacaggagagctgcagttgtgaaagcaccatcatcatagaggatgatgtaattaaaaaatggtcagtgtgcaaagaaaagaactgcttgcatttctttatttctgtctcataattgtcaaaaaccagaattaggtcaagttcatagtttctgtaattggcttttgaatcaaagaatagggagacaatctaaaaaatatcttaggttggagatgacagaaatatgattgatttgaagtggaaaaagaaattctgttaatgttaattaaagtaaaattattccctgaattgtttgatattgtcacctagcagatatgtattacttttctgcaatgttattattggcttgcactttgtgagtattctatgtaaaaatatatatgtatataaaatatatattgcataggacagacttaggagttttgtttagagcagttaacatctgaagtgtctaatgcattaacttttgtaaggtactgaatacttaatatgtgggaaacccttttgcgtggtccttaggcttacaatgtgcactgaatcgtttcatgtaagaatccaaagtggacaccattaacaggtctttgaaatatgcatgtactttatattttctatatttgtaactttgcatgttcttgttttgttatataaaaaaattgtaaatgtttaatatctgactgaaattaaacgagcgaagatgagcaccacc

SEQ ID NO: 23605 - DNA, 1431 bp, Homo sapiens
  source 1..1431: mol_type = unassigned DNA
agtcgctgacagccgcggcgccgcgagcttctcctctcctcacgaccgaggcagagcagtcattatggcgaaccttggctgctggatgctggttctctttgtggccacatggagtgacctgggcctctgcaagaagcgcccgaagcctggaggatggaacactgggggcagcctcatggtggtggctgggggcagccccatggtggtggctggggacagcctcatggtggtggctggggtcaaggaggtggcacccacagtcagtggaacaagccgagtaagccaaaaaccaacatgaagcacatggctggtgctgcagcagctggggcagtggtggggggccttggcggctacatgctgggaagtgccatgagcaggcccatcatacatttcggcagtgactatgaggaccgttactatcgtgaaaacatgcaccgttaccccaaccaagtgtactacaggcccatggatgagtacagcaaccagaacaactttgtgcacgactgcgtcaatatcacaatcaagcagcacacggtcaccacaaccaccaagggggagaacttcaccgagaccgacgttaagatgatggagcgcgtggttgagcagatgtgtatcacccagtacgagagggaatctcaggcctattaccagagaggatcgagcatggtcctcttctcctctccacctgtgatcctcctgatctctttcctcatcttcctgatagtgggatgaggaaggtcttcctgttttcaccatctttctaatctttttccagcttgagggaggcggtatccacctgcagcccttttagtggtggtgtctcactctttcttctctctttgtcccggataggctaatcaatacccttggcactgatgggcactggaaaacatagagtagacctgagatgctggtcaagccccctttgattgagttcatcatgagccgttgctaatgccaggccagtaaaagtataacagcaaataaccattggttaatctggacttatttttggacttagtgcaacaggttgaggctaaaacaaatctcagaacagtctgaaatacctttgcctggatacctctggctccttcagcagctagagctcagtatactaatgccctatcttagtagagatttcatagctatttagagatattttccattttaagaaaacccgacaacatttctgccaggtttgttaggaggccacatgatacttattcaaaaaaatcctagagattcttagctcttgggatgcaggctcagcccgctggagcatgagctctgtgtgtaccgagaactggggtgatgttttacttttcacagtatgggctacacagcagctgttcaacaagagtaaatattgtcacaacactgaacctctggctagaggacatattcacagtgaacataactgtaacatatatg

SEQ ID NO: 23606 - DNA, 855 bp, Homo sapiens
  source 1..855: mol_type = unassigned DNA
gggggcaggggagccgcgggggccgagtgaggaccccgggcctcgggtcccaggcgcaagggtgcccggccgggcggggtcgggaccccagtgaggaggggccgggggctgccccgcgggcgcgtgacgcgtctcgggcctgcccggctgcgctggtctccgctcgggtgaggcggcttggcttcgcttttcagagcagtcattatggcgaaccttggctgctggatgctggttctctttgtggccacatggagtgacctgggcctctgcaagaagcgcccgaagcctggaggatggaacactgggggcagccgatacccggggcagggcagccctggaggcaaccgctacccacctcagggcggtggtggctgggggcagcctcatggtggtggctgggggcagcctcatggtggtggctgggggcagccccatggtggtggctggggacagcctcatggtggtggctggggtcaaggaggtggcacccacagtcagtggaacaagccgagtaagccaaaaaccaacatgaagcacatggctggtgctgcagcagctggggcagtggtggggggccttggcggctacatgctgggaagtgccatgagcaggcccatcatacatttcggcagtgactatgaggaccgttactatcgtgaaaacatgcaccgttaccccaaccaagtgtactacaggcccatggatgagtacagcaaccagaacaactttgtgcacgactgcgtcaatatcacaatcaagcagcacacggtcaccacaaccaccaagggggagaacttcaccgagaccgacgttaagatgatggagcgcgtggttgagcagatgtgtatcacccag

SEQ ID NO: 23607 - DNA, 3980 bp, Homo sapiens
  source 1..3980: mol_type = unassigned DNA
gggtgtgctgggggactgtgcagctcgaggctccagaggcacactccagagagagccaaggttctgacgcgatgaggaagcacctgagctggtggtggctggccactgtctgcatgctgctcttcagccacctctctgcggtccagacgaggggcatcaagcacagaatcaagtggaaccggaaggccctgcccagcactgcccagatcactgaggcccaggtggctgagaaccgcccgggagccttcatcaagcaaggccgcaagctcgacattgacttcggagccgagggcaacaggtactacgaggccaactactggcagttccccgatggcatccactacaacggctgctctgaggctaatgtgaccaaggaggcatttgtcaccggctgcatcaatgccacccaggcggcgaaccagggggagttccagaagccagacaacaagctccaccagcaggtgctctggcggctggtccaggagctctgctccctcaagcattgcgagttttggttggagaggggcgcaggacttcgggtcaccatgcaccagccagtgctcctctgccttctggctttgatctggctcacggtgaaataagcttgccaggaggctggcagtacagagtgcagcagcgagcaaatcctggcaagtgacccagctcttctcccccaaacccacgcgtgttctgaaggtgcccaggagcggcgatgcactcgcactgcaaatgccgctctcacgtatgcgccctggtatgtgcctgcgttctgatagatgggggactgtggcttctccgtcactccattctcagcccctagcagagcgtctggcacactagattagtagtaaatgcttgatgagaagaacacatcaggcactgcgccacctgcttcacagtacttcccaacaactcttagaggtaggtgtattcccgttttacagataaggaaactgaggcccagagagctgaagtactgcacccagcatcaccagctagaaagtggcagagccaggattcaaccctggcttgtctaaccccaggttttctgctctgtccaattccagagctgtctggtgatcactttatgtctcacagggacccacatccaaacatgtatctctaatgaaattgtgaaagctccatgtttagaaataaatgaaaacacctgagctggtggctgtgtactttgactggtacatggaggctattttaatccttctaactaaactaaaatagattaaaggaattaaactaaaatacaagtaaagctagacaaaggcccagaaatcatactgtaaggaaatgttattggaagctgattcccagagcagaccacatatacagcaggatgtgcctgtggcatgaagattttctttctcttttttttttttttttagatggagttttactcttgttgcccaggctggagtgcaacggcatgattttggctcactgcagcctctgcctcccaggctcaagcacttttcctgtctcagccttccgagtagctgggattacaggtgtgtgccatcatgcctgactaattttgtatttttagtagagacagggtttcaccatgttggccaggctggtcttgaactcctgacctcaggtgatccacccacctgggcctcccatagtgctgggattcaattttttttttttttttttcaaaagaagggtaagtgcttgctgttcccatccctgaaacattgcatgtatttaagaaaaacaaaatgttagtggcatatttgcttctaatgttcccctaaccctacatgcatgttttatgtgcactcatatgagtatctttaaatataatccctttacatctgtgttctatgcaaagtctctcatttctttcaagacagcctaatgaaggccatcatctctgtaaaccacttgtcactacaaaaatacaattactcaccaaaaagctttaaaaaataaagctgtgtctttagggagacccaataaagaatgcaatccatgccataagcaggagttgatacaccaccttattagctaaaaatatatataacacaatatgagtaatgtttaagatctgttttaaatttaaaacaatgaattgaatgctctaagaggctcctacaggcgctccaggccactctcagagactcccaggagttgttgaactatatttggagaaaacagccactgaatattatcatttctcctttaaagagagtttgtaaggggggaacatgcattttatcagacaatttatccaaagcattgcagaacatgagtgctgatgagggcacctcttgtgctgagtcccctcagctatcagtgttcttctcaaggacacatttggaaggttttaacattgaaagtgagcggaggacttgggggcagagcagcacaaagaaacagccttacactgggcacatggaggagacgtccaccctgcagccaggactggggttcacgtcactgccagagctacactcgccttctgcttccacggtcctgttaattctagatcagagagcaagaaaaaagtacagaacatatcctctacggttatttcctgctttctaattaaaaaaataataaccatggcaagagagaaagaaagagaaagtactcagaggctgacactgacatttcacttcctcgctctcctaagtttaattacaacagcacgtgcagccacgtcagccaaatgacttcatttctgatgtgaaaacgcttaggccatgatgtcgttcattttctgtaattgctgccttttctcattctgttaatagtcccggcaaccagatttcagtggggcatgacgtgaatgtgtatatggtgattcaaatgcaaaatttgtttatggggcttttaatcgaacgcgtgtgtgcctgaacattcttgctcaagttgatgaatcatggggtggaataaaggctgagtttagtttttcactttagcaaaggggcaatggggtgcctactatgtgcgagacattgggaggggcttctgaattattctggatatcgtcattttgcagtgtgcataattttgccaaccgttgctttcgtagcccctgctaagtgttgactttttaaaatataagtttattgtaaaagtgacatgaaaattacaacagatattccagaccaaaataatacaacaatcccagcatctgattgagtcagtgtttgctgtttcccctgcactttcctagttcttaagcatttgcgtatgtaaacattcatatttgcaataaaaaagtgagcttttatattctaaatttttacttaacttaattcaatgctttctactcatttttctatacttttttttttgaggcagagtctcattctgttgcccaggctggagtgcagtggcgtgatcttggctcactacaacctccaccttccaggcttaagcgattctcatgcctcatcctcccaagtaggtgggattacaggtgcccaccaccaagccctgcaaatttttttgtatttttagtagagacagtgttttgccatgttggccaggctggtctcgaactcctgacatcaggtgatccacctgcctcggcctcccaaagtgctgggattacaggtgtgagccaccacgccctgcctactctttgttttctttcctccccacccattttcccccgtcctgtcccctccttccagcctgagatgtaggctccaccttaactgtgctcagatacacaagtgagggctttttaacttgattatgccttttaaaaatactatgtatgtaaaatatttattcatctgcaatttggcttccctaacttaacattgcatcatgaaactctttggaacaacagctatctagatagctgactcattcttttggattgctacgtaatctcacttaatacagatgtatcatgattgattgaatcattgccttgttgatgggccttcagattatttccagttttttgccactgcaaacaataaacatccttgtacatacta

SEQ ID NO: 23608 - DNA, 9129 bp, Homo sapiens
  source 1..9129: mol_type = unassigned DNA
ttttccgctcgtgcttcggcgccgctcggctcccttcccgcccctggctccctccctccctccctccctccttcttctccctccctcctgtcctgggattgcctggagctccgcaccgcgagtttgccgcggcactttccgcgcggcggaagagcgcgcgccagcttcggcacacctgggagccggatcccagccctacgcctcgtcccctacaagctcctccaagccccgccggctgctgtgggagcggcggccgtccctctcctggaggtcgtctcctggcatcctcggggccgcaggaaggaagaggaggcagcggccggagccctggtgggcggcctgaggtgagagcccgaccggcccctttgggaatatggcgaccggtggctaccggaccagcagcggcctcggcggcagcaccacagacttcctggaggagtggaaggcgaaacgcgagaagatgcgcgccaagcagaaccccccgggcccggcccccccgggagggggcagcagcgacgccgctgggaagccccccgcgggggctctgggcaccccggcggccgccgctgccaacgagctcaacaacaacctcccgggcggcgcgccggccgcacctgccgtccccggtcccgggggcgtgaactgcgcggtcggctccgccatgctgacgcgggcggcccccggcccgcggcggtcggaggacgagcccccagccgcctctgcctcggctgcaccgccgccccagcgtgacgaggaggagccggacggcgtcccagagaagggcaagagctcgggccccagtgccaggaaaggcaaggggcagatcgagaagaggaagctgcgggagaagcggcgctccaccggcgtggtcaacatccctgccgcagagtgcttagatgagtacgaagatgatgaagcagggcagaaagagcggaaacgagaagatgcaattacacaacagaacactattcagaatgaagctgtaaacttactagatccaggcagttcctatctgctacaggagccacctagaacagtttcaggcagatataaaagcacaaccagtgtctctgaagaagatgtctcaagtagatattctcgaacagatagaagtgggttccctagatataacagggatgcaaatgtttcaggtactctggtttcaagtagcacactggaaaagaaaattgaagatcttgaaaaggaagtagtaagagaaagacaagaaaacctaagacttgtgagactgatgcaagataaagaggaaatgattggaaaactcaaagaagaaattgatttattaaatagagacctagatgacatagaagatgaaaatgaacagctaaagcaggaaaataaaactcttttgaaagttgtgggtcagctgaccaggtagaggattcaagactcaatgtggaaaaaatattttaaactactgattgaatgttaatggtcaatgctagcacaatattcctatgctgcaatacattaaaataactaagcaagtatatttatttctagcaaacagatgtttgttttcaaaatacttctttttcattattggttttaaaaaagcattatccttttatctcacaaataagtaatatctttcagttattaaatgatagataatgcctttttggttttgtgtggtattcaactaatacatggtttaaagtcacagccgtttgaatatattttatcttggtagtacattttctcccttaggaatatacatagtctttgtttacatgagttcaaatacttttgggatgttaccttcacatgtcctattactgatgtgtgcaaccttttatgtgttgatgactcactcataaaggtttttgtctactgtcatttgttctttccacttattctaagcatttagagtaatagagtcatacttttttataacagcaaccttttaaaaggaaagctcttataaagtcactgtcatgttttagttgactaaatataaatttaagagaatacttgaattgtgctatagtaaataaaaatttactattttgtgtttgaatattgaaaaattgaatcactttaactcctgaaaaacatacaattgtaatttcaatgtaaaatttcttatgtaggtactacctttttttatcgttccaaggtttgctagtgaacacaggatattttaaaagttttttattcttcgggcctggaaagtgtacaaagtcagtgtaggagaaaaaaatccatatttttatattagcatgcacactaaaaaccaaaatattattcatacttaaaacattcatacaaaacaatatgtaagcagaaatagtactaaaatactttgcctaatttctaagttgaagaataacactgggacacagttttttcatatgagagaatattccgctatttcaaatttaagggattttcttcctaacattgaaattttaaaaacagagttacttctaaataattatacagattttttcttctattaaatattattatttagaattgtttttgtattacatattcatgttaagaaccccgtcttcccttaaaatacattaaaattatgacatttttgctttgtgattgaatttcaaatagcagtatggtatccttttatctagttaatatatgaaagtggcttgaatatagtcaaatccattttaggtactctactgactttttccttcacttgccaagcccttttattgttcactgttagaaaaatagagaaggtgagacagctgggggaaaatgtggagtaaatgataatcaaatgttgaattctaaaagtctctacatttacctaggttggctttctcccccagttcagaagtttccagcttggccaatcatcagaatcacttgaggaacttagaaagaactccctggctgtagctcctatgtaggtttaggttgagactctggattccacaatttttaaaggttaccatctgaggtttctgatcatagtctacttttgaagcagctgctgctgtttctttattccattgaacaccctggaattgacataattttatctatcagcatttctccccttttagtttatttaataattaacccggtctccagggcagttttcatatgaccatgtgtatattcactgctcacgaaaaagtttaatgttagattaccaaatttaatatagttacagaattactgcataagggcttcccttcttggagactcttacccagcatgggaacagtgatctgcccacatgacagggtggtatgccaggcatagttaactgcttttggttgtgaggtactcatcttcctttagttacccttagttatgtggcacacatgtccttattgcctagttcgtcatccacactttggatcttgtgaaaatgctgttagtatccaaccttaaaatatattagtatatgggtttttattaaaagaattactttgaattttctatttaattcatatgtaaataaaggaacatttcatttcacttaaaaaaattatatcagttattaggctgggtgcagtggctcatgcctgtaatcccagcactttgggaggccaaggcgggtggattaccagagttcgggagtttgagaccagcttgaccaacatggagaaaccccgtctctactaaaaatacaaaattagccaggtgtggtggcgcatgcctgtaatcctggctactcaggaggctgaggcaggagaatcgcttgaaaacccaggagacagaggttgcggtgagctgagattgcgccattgtactccagcctgggcaagaagagcgaaactctgtctccaaaaaaaaaaaaaaaaaaattattaatacttttaaagactgagctgtttaagaattttttggggaacatttctagcagtgatttttttggcctttaatgatagcgtaaagacaggagccttacaacttaggcaaagcatttcacatgcagtccttcttccatctcaaaatatgtacttattttacatacagaattttacactaaccattgaaaaataaagtaggatctgctacagtttcacctgaaaatttataaaaagtgttgagattggtagaaggtagtttttaagtacatgtgcactaccctaaaagacttgtctattgtcaataaagtgttagtatttgtgaaattattattcctgttcagaaatactatttcttaaatctcctgggaatttgtggcataataaagcacattcaaagttctaatgtatttatgagctcattttcaaaatagtaagtttgtcatctttaaaatgaacatgacttgcctccttgatttctgaaatgaattaattgaagattgctatagtaatctttatttcatctttctagagttgttgacaattttattatacaacagttaccattagagaaggagggaagggcttttgggtgtgtatttataggtactaagggatttactaaatatagtagattagcactgtcacacttgttcaagtagtttcaaacatagaaaattaagtatcaggtatgtggagcaatgtagtttttttttttcttcagtttaaaaaatttttaattgtggtagaagcaatgtattcttaaggtgaaaaacctacctcggttacatgtggtttgtgttttttggattaatctggattttataattagaaataaaaatgtaagattttgaatccacttaatttcttgaaaatagtacaagtcagtgtaatagagaagcattcatatattcaacactgtaagacaaaacagcagagaccttggatttgataattgatctgatatcctggacagtattcatatgtacagtgataggtatctttctttggagttttttttttgtgcatatgtgtatagttttatgggttctgagttggtgaccagtaagttgcatgtagtgctggcacttacttaataactattcatgatattgttaataacttgttataggattgtattcccaattacagtctctaagattgtaattgatattatctgagaggtagtgtgacaactttcttttgttgttacattaagccgaaaacataatactaatagacaactaacagtttgcttatcaggcacatcaactaaggcacctccccccatgctaagtttctcctggatatatggaagttgattgtttcccagtttaaaaacttgaactaatatctcctaagaaaatctgagtccatattgtttttattttacttagctagaatctcatagcatgttaaagtcatatccttatccccactaaaaataactatgtctatgtgagaggaatatagtatgtgggagctgtattaaatactattacaggtgttacagaatctttaaataaatggacatggaccaactttccatctagtagtgtacgatctatatagtgcatgtcagtagcacaaaatgcagtcttagcattagcctgtctaatctgaatagtttactcaaaagtacttctttgtgttaagtattcagccactgtttttagatctagttaataggttctatttaatttgctacaacatttactgaatggtggagtgaaaaaactgatgcatactgggaaatatctaccattttttaaagataatgttaattaggaaaagaacacttttaaggaatttatagcagtgatgaaatgaattcagttatatcagatacaccaaactgttgatggtatttaaatgtgacttcaagttagtatttctgtatatattattgattactggtttgtttttagatatgtaagtctgttctaatctacagttcacatatcgacagttactctggtaataatagaatgttagtgatgatcacttggtggatgttgattaagtgcctgtgttttgtttcctcctctggataccaaataggtgtatgctacttttttggtgaacttatttcttggaagatttggctatgctattcagggtttttattcttatgtttttcttctaaatttaagtagcatcctgctgctaccatattaaagctaaaatttaacttttgctgaagaatcagctaattcaggtaatccaaatatttgtggaaaaacatctggataatttattgaacacattagtattgtgttagacagctttgatcattcccatttcataggtttttattgtggaatagtcaacttaatatagattcactttcaatttgcatgtataaagtaatactcaataaaatttttttcatttatttttcaacagtggttattttttttcttcctgtactatcagtaaaatcctgactatgagttttacttttgaagctaaaggataatgctggtaatctaattatgtacctcttacagaaaccatatgcagcactttaaaaatctttatttggtatattattttaggtggacaatgatttaagactcaaagccatcatattaaggtctaaatacattagtggtggggtttctcgaataaatgaggaagtgcacaaaagttcagcctgactgaaaattttaattgtgttttaaaactacatgaataatttcttgattcaaaatcagaactcttataaactaaatctgatggtgtccaaagaatttcaggtccttcaaagtttgtaaaagataagtaggggcctaggaatataaaaatttagacttttttagtaaatggtttacataaccttttgtcttaatttgtcattcttcatacacaggcacaagctaatcagtcttctctacttctagaactctaaatcttctcagtaatgtcatacaagtctaacaagaggaaaagcatccttaagtcagtctatttagataaactcttcaagtccctatataaggacgtattccactagcaagccagtaaatttttccaaggtcacataatcttacatgaaatggaacctttcatcttagacttcatcaaactcaattttttcccttctagattcactttgtgtttatgcatgcatgcacgcgtgcacacaattctatcagcagctgtaaactacccacatattttcttaatctcattttttcagtttttcttcatctttaaaagaggttacatttcattcctggtcaactcttaaaaagaattatgtaatgttgggccttcatattaaagagagagactggttataagatcctttacagtccattcattttattctgatgtctaaccagatagacactagcaagcaaaacttccctcttaatcctggaccaaatgcataattttactgtcactttcaaaaatctgttatgactgaatcaaaatccttttaaagaaaggaaaaagctccttttgtgtcaaatagttgaacaacatgaaaacagtatgagccggttaaagatagattgaatttttactttacacatatgaaaaacagtaagttttgactgctgtgtatgttattcatgttaatatgtgctcagttattcactattgttaatccacatataatcagttgctatccctggttagacacactatggaacttgaaatgcacaatatttacattgttagaggcttctatccaaatatctgcattcctttaaaatgtgaactatttgctgtgattaaccaaaggtagattatgtcatcagtggacattttagctttatggaaacaaattattaagaaatgaatagaaaggtgtctttttctttgtgtagtgcaaaagcctaaagctatcagtcaaaggcctaagaaatccacatttgaaaaacgtaaatcatgattggtaagaatacattcatctgatagtattgagaaaagttgaaaaactgttagccttccataacacattaaacattttatgtatggatggctgaaagtattgagaaaagctgaaaaactgttagccttccataacacattaaacgttttgtgtatggatggcttaggacaataaacaacatcattaaagtaaaattatgtcagtctgttcatattaacttatttaaatcaatgaaaattttgatgagatgactaaatggatgctttggaaatgcaggattataggaggcctaaaagtgcatcttgtttcttgtaacccttttaaaaccaatatgcctggctaggtgcagtggctcatgcctgtaataccaacggggtaacacagggttatgccgtctatacaaaaaaataaatgagctgggcaagatggcatgcacctgtagtcccagctgcttggtaggctgagggggaaggattgcttgagcctgggaggtcgagactgcagtgagccaagatcacaccactgcactccagcctgggtgacagagcaagactctacctcaaaaataaaaataatcaatatagtttcaatgaagcaaagcatctcaggtaacaatttgagcataactttaaccataacttatgatagcataataacattcattagtaattcagtagccgtatgtgccaggctgtgttaggtgctttatatattgtttaatttttaaaaacttgtggagtgtacagattggtaaggtgacattgtatcacaaagctagtctttgagtccaaagttttgtggttttatgttatgatatacttttatcatggaattgtcttattaaatgttttgccagtggttcttaaagtgtgtttctgacaccagtagcattgacttcacttagaaacctgttagaaatacaaattatttggccccacccaacacttgagtcacaaactttgcagatggggctcaatctgttttaacaagcgcttcatgtaattttgatgcaggcctaagtttttgagccactgcagtatgcatttctatttttaagcaaagatcttggtctttctttttggacattgtagaaataacatgaacttgttttttgtttgtttttgttttgttttgttttaagctcctgatctttgttggttatgttgcaaaagattgtatcaggagaagcctcagcatggacattggcatcctgacataacccccattaatttagtattctttctgaaactcaaatggattctcaagtccaagagactatggaataaaatcattgtttgtctgtgttaagttttatctctgttattgcctgaagacttttggtaacaataatgcgctttcatcaaacttttaagacttgattggaaaaaataaatgtatgtttcatcagttatacaa

SEQ ID NO: 23609 - DNA, 494 bp, Homo sapiens
  source 1..494: mol_type = unassigned DNA
gcctcctctgcgaaccggctaggagctccgcgcctcgccttgggagtggggttgtagctgacggggacctcggaccggcggtggctagagcgcggagcaggcgatacgacgagccgacagccccgccggctgctgtgggagcggcggccgtccctctcctggaggtcgtctcctggcatcctcggggccgcaggaaggaagaggaggcagcggccggagccctggtgggcggcctgaggtgagagcccgaccggcccctttgggaatatggcgaccggtggctaccggaccagcagcggcctcggcggcagcaccacagacttcctggaggagtggaaggcgaaacgcgagaagatgcgcgccaagcagaaccccccgggcccggcccccccgggagggggcagcagcgacgccgctgggaagccccccgcgggggctctgggcaccccggcggccgccgctgccaacgagctcaacaacaacctcccgggcgg

SEQ ID NO: 23610 - DNA, 364 bp, Homo sapiens
  source 1..364: mol_type = unassigned DNA
ggcgatcgtcggggtccgtactgtagccccgccggctgctgtgggagcggcggccgtccctctcctggaggtcgtctcctggcatcctcggggccgcaggaaggaagaggaggcagcggccggagccctggtgggcggcctgaggtgagagcccgaccggcccctttgggaatatggcgaccggtggctaccggaccagcagcggcctcggcggcagcaccacagacttcctggaggagtggaaggcgaaacgcgagaagatgcgcgccaagcagaaccccccgggcccggcccccccgggagggggcagcagcgacgccgctgggaagccccccgcgggggctctgggcaccccggcggccgc

SEQ ID NO: 23611 - DNA, 3385 bp, Homo sapiens
  source 1..3385: mol_type = unassigned DNA
gtttgctttttaaaaaatattttaggctgggcgcagtggctcacccctgtaatctcagcactttgggaggccgaggcgggtggatcatgagatcaggagttcgagaccaacctgaccaacatggtaaaaccctgtctctactaaaaatacaaaaattagctgggcgtggtggtgtgtgcctgtaatctcagctactcaggaggctgaggcaggagaatcacttcaacctaggaggcagaggttgcagtgagccgagatcacaccattgcactccagcctggacaacacagcaagactccgtctcaaaaaaaaaaatattttaatgatgaaggaactatgttgtaattgcaactcaaggacgacccaccccaccaccatcagggaattcgaggggagactggcagttatccagggatcccagaaggagtcaactgggagttaagagtcctaacaaccctagaaaaaaactttcaaagacacaggtcttctcattaatctccataatcacagaggtcttgcctaaaagggccccccttgagtacacagctctgaaactggctaacatcttctgctgtctcatttgattttaaagttcacatttgtgaagggctctattgtacaacatggtgactatagttaataacagtgaatttcagttaataacctgaatttcactgagagtaggtctgaagtgttctcatcacaaaatgagtgtattagcatcgctcatagctcatttagccattacacaatgtatacacatttcaaaccatattgtataccataaatacatacaattcttattggttaattttaaaaataataaaagttctctatcagtcccataaattacaattttcaggcatctgcaaaggcagcatgttttggtttaaatgtggtctttccaaattttatacgtataaaataaatgcataagtgtactacatatgcaaaaactaatacataaattttataaagtcaatgcacgcggggtcactgggatgaaccaatttcagtgcctgcagtctaatgtttaaaatcaaaatggtacaaggtcaccaccaaagaaattgtttaagccaatgtttctcaaactaaaacctttggacatactcccagaatcccctgtaaagaaatgtatactgtactcaaagttgagaaccactgacttagcataaagggaccgtatttcttttctctcccacccagcacaggcccagtgctcagcagaaattggggctccacagttctgcccaacactgggtcactgctgagaagtctgcaccaggccttcctgcacctttccactgagcaatggagtttgtttattcatttatttatttatatggaatttatttatttattttggagacagggtctcactctgtcacccaggctggagtgcagtagcgcaatccaggttcactgcagccctaaactccttgggctcaactgatcctcccacctcagatacccgagtagttgggactacaagcacgcaccaccacgcctggataattttttttaaatgttttgtagagatggggtctcccgatgttgcccaggctggtctcgaactcctgggctcaagagatcctcccgcctgcgcctcccacggtgtgagccacctttgatcttattgctatgatttttttattgataaaaactaataaatattctgagtctcaagaaagctttctgaaactatcaaagggacccaggcggcgcatcactacctgtgaggccgaccccactcacagcacagactgcaagtgaggcttacagatgggaagtgccctaagcgaggttaaacagctagttagcagcagacacggaactagaacctaagcctgctgtcccagcttcggtgcccgtgctcacagcggaagctgcctcggctcatccgtaagggcgctgattagggacgacaaagacctcaccccaccgtccccgtcccatttccgccctcccagatccccaacctccttcgagtcctctccaagtcgcctcgcctcgctccactccaggccttagcaagcattccacatgcctttaccccaaccctactgcctgtcccccaaaagatgcaggcggaaaagaccccaggaagcgagcccactcctccccactgctcagcaacaccgcctacgacgttctcagtagccgaatccctttccaggcgcatgcgcccccgaggtgggcgagcgccggtgatgtcacgcatagcgccatctccgagctccgagagtctgcgacagcagctgccagtgcgtcatcagagagcgccggaagcggtccgagaatgaagagtgtgatctaccatgcattgtctcagaaagaggcgaatgactccgatgtccagccttcaggagcacagcgggccgaggccttcgtgagggccttcctgaagcgcagcacgccccgcatgagcccgcaggcccgcgaggaccagctgcagcgcaaggcggtggtcctggagtacttcacccgccacaagcgcaaggagaagaagaagaaagccaaaggcctctctgccaggcaaaggagggagctgcggctctttgacattaaaccagagcagcagagatacagccttttcctccctctccatgaactctggaaacagtacatcagggacctgtgcagtgggctcaagccagacacgcagccacagatgattcaggccaagctcttaaaggcagatcttcacggggctattatttcagtgacaaaatccaaatgcccctcttatgtgggtattacaggaatccttctacaggaaacaaagcacattttcaaaattatcaccaaagaagaccgcctgaaagttatccccaagctaaactgcgtgttcactgtggaaaccgatggctttatttcctacatttacgggagcaaattccagcttcggtcaagtgaacggtctgcgaagaagttcaaagcgaagggaacgattgacctgtgaattctttgccgtctaaggcagttgtttatgacagctgaaaactggacactccctaaatgtccacctttcagtgaagagatagttaagccaattccatttatagaccacctccagccagtgacgctccgagttgaggatgttgaacaacatgggaaggtcgcagcgtactaagtgaagaagtcagaggacagaggaatttctctttctaggagattttcattttgtgtgactcccatggggaggaacagactggcaggaagcacaccggggttaacactggttgacttgaataggattattcgatttttaaaaatacttttccatgttttctgagtgctctatgataaatcagttgcatctgtgataatacagtacatatgtggacataaacagggatcaaataaaggaggtattgctgca

SEQ ID NO: 23612 - DNA, 2594 bp, Homo sapiens
  source 1..2594: mol_type = unassigned DNA
agtctgcgacagcagctgccagtgcgtcatcagagagcgccggaagcggtccgagaatgaagagtgtgatctaccatgcattgtctcagaaagaggcgaatgactccgatgtccagccttcaggagcacagcgggccgaggccttcgtgagggccttcctgaagcgcagcacgccccgcatgagcccgcaggcccgcgaggaccagctgcagcgcaaggcggtggtcctggagtacttcacccgccacaagcgcaaggagaagaagaagaaagccaaaggcctctctgccaggcaaaggagggagctgcggctctttgacattaaaccagagcagcagagatacagccttttcctccctctccatgaactctggaaacagtacatcagggacctgtgcagtgggctcaagccagacacgcagccacagatgattcaggccaagctcttaaaggcagatcttcacggggctattatttcagtgacaaaatccaaatgcccctcttatgtgggtattacaggaatccttctacaggaaacaaagcacattttcaaaattatcaccaaagaagaccgcctgaaagttatccccaagctaaactgcgtgttcactgtggaaaccgatggctttatttcctacatttacgggagcaaattccagcttcggtcaagtgaacggtctgcgaagaagttcaaagcgaagggaacgattgacctgtgaattctttgccgtctaaggcagttgtttatgacagctgaaaactggacactccctaaatgtccacctttcagtgaagagatagttaagccaattccatttatagaccacctccagccagtgacgctccgagttgaggatgttgaacaacatgggaaggtcgcagcgtactaagtgaagaagtcagaggacagaggaatttctctttctaggagattttcattttgtgtgactcccatggggaggaacagactggcaggaagcacaccggggttaacactggttgacttgaataggattattcgatttttaaaaatacttttccatgttttctgagtgctctatgataaatcagttgcatctgtgataatacagtacatatgtggacataaacagggatcaaataaaggaggtattgctgcagtccagccaggttgaaagggaaggggggtccccaaaggtccattggatggcaggtgtctacagaggctcgcctttgggtggaactctgacccacctaaggtttactttgctatttcaggaaggttgaagaggattgaagggtgagttgctaagtgacttagggtttattcacttcaggaatcatagctggggtggaccccaggagcagagtactgcatgcagctgtgcccatgcatggttgccccagcgtagtgagatgggacctgccgcagcatgcccactcctgagctgccaggctgagccatggaggactgaaaggaggtcgcccggcatcacctcccgaggtgagacctgctgcaaaagccaagccagcagcattgacgccctttgatatcttcgccatttttgctgctgaaagacttggcttttcagtctgaccctggccctctgtgaccatgtgtctgtaaagccagtgggtcaggcccttccatgcagggccagaggaaaagcgggcccagggctgcagtgagagcggggcaggggaccagcctaccagatgggttggaaacatggctcagaaggaccaactaccccttccctttgaggagcaagtctctgccgatcagcaaggcaaggccaggagccctcctggcgaaaggcaggccacaaatctgttctcccccaggagaagtagcagtgccagggctttgcgtttctggtaacttccacccaaaccacaccagagagaaacaccgtagtggagaagggaagtgggagcgctgactgctgtgtgccaggagagtagaaaggcccaggtctgtgccaccacccctccccaaagctcagtgcacccagagtctcacagggaccaacacggtgcctcggtcctgcttccatccatgcaagtgtcctccgctcaccagggtgttctgaggcagctcaagtgctctcccccaagcagcacgcagtcaccgctgccagtgatgaacacacgcacgggctaggcacatggagcccaagcacactgccacctcggacacgggccccggcccagcgactgccttgtggtgtggccgtcctcatctgccacaggaagacagacttcgagggacctcttgcctaaggcctcgctgactcaagggtagattgagatttggacctaataggctccagaactgtgctttgagctacagggtggctgcaggatgagacggatgcagttcaaagtgcaggatgtgctgcctttattacctgctttcccgctgagcaaatccctgtcttgagtgggaagtggcatctattcccccagccatctgaaaatgctgtgttcataaccaaataggtgctgtagcttcctagccatcccgctcttacccgcccctctgcaatgtaaaaggcgtccactgttgtgtaaatacacagttgctttccagaaaagttgtaggtaccacttgc

SEQ ID NO: 23613 - DNA, 854 bp, Homo sapiens
  source 1..854: mol_type = unassigned DNA
agcgccggaagcggtccgagaatgaagagtgtgatctaccatgcattgtctcagaaagaggcgaatgactccgatgtccagatacagccttttcctccctctccatgaactctggaaacagtacatcagggacctgtgcagtgggctcaagccagacacgcagccacagatgattcaggccaagctcttaaaggcagatcttcacggggctattatttcagtgacaaaatccaaatgcccctcttatgtgggtattacaggaatccttctacaggaaacaaagcacattttcaaaattatcaccaaagaagaccgcctgaaagttatccccaagctaaactgcgtgttcactgtggaaaccgatggctttatttcctacatttacgggagcaaattccagcttcggtcaagtgaacggtctgcgaagaagttcaaagcgaagggaacgattgacctgtgaattctttgccgtctaaggcagttgtttatgacagctgaaaactggacactccctaaatgtccacctttcagtgaagagatagttaagccaattccatttatagaccacctccagccagtgacgctccgagttgaggatgttgaacaacatgggaaggtcgcagcgtactaagtgaagaagtcagaggacagaggaatttctctttctaggagattttcattttgtgtgactcccatggggaggaacagactggcaggaagcacaccggggttaacactggttgacttgaataggattattcgatttttaaaaatacttttccatgttttctgagtgctctatgataaatcagttgcatctgtgataatacagtacatatgtggacataaacagg

SEQ ID NO: 23614 - DNA, 913 bp, Homo sapiens
  source 1..913: mol_type = unassigned DNA
agagcgcggaggcagccatggtgcggttcaagcacaggtacctgctctgcgaactggtgtctgacgacccccgctgccgcctaagcctcgatgaccgagttctgagcagcctcgtacgggacacgatcgccagggtgcacggaactttcggcgcagccgcctgctccatcggcttcgcgggtacaataagaacatgtcagaagttcctaattcagtacaacaggagacagctgttgatcttgttgcagaactgcactgatgaaggagagcgggaagctatccagaagtctgtgacaagaagctgcttattagaggaggaggaggagtcaggtgaggaggctgcagaagcaatggagtgaacctctgctccccacacagctggctacactgctcaggcttcaggcccacttgttgaacagaacaatctgggtagcaacagcatcttccacagttttccaaactggatagctgccaaccagcagacattacccacttgaaatggagtactcagttaaactgaagttgcctttacctagcattccctggtgaagtgttgcaggttgtgaactctgtagacatctttattgcttggctaagagtagatttaataaatgtatctggtttccgtggcatttagcatacttatattacagaaagggcttatggagtccatgcttggccaagtctctgttctctctctatccctagccttggtgggaagactgactccctatgtggtactagttaaacttttttttttgagacagtctcagtctatcacccaggctggagtgtagtggcccagtatcggctcactgcaacctccgcctcctgggttcaagcaattctcccacctcagccttccaagtaactgggattacagacgtgcaccaccacgtctggctaatttttg

SEQ ID NO: 23615 - DNA, 801 bp, Homo sapiens
  source 1..801: mol_type = unassigned DNA
ggtttgcacgccggaccggagagcgcggaggcagccatggtgcggttcaagcacaggtacctgctctgcgaactggtgtctgacgacccccgctgccgcctaagcctcgatgaccgagttctgagcagcctcgtacgggacacgatcgccagggtgcacggaactttcggcgcagccgcctgctccatcggcttcgcggttcgatatctcaatgcctatactggaatagtgctacttcgatgcagaaaagaattctatcagcttgtgtggtcagctcttcccttcatcacatacttggagaacaaaggacaccgttacccatgctttttcaacacattacatgtgggaggtacaataagaacatgtcagaagttcctaattcagtacaacaggagacagctgttgatcttgttgcagaactgcactgatgaaggagagcgggaagctatccagaagtctgtgacaagaagctgcttattagaggaggaggaggagtcaggtgaggaggctgcagaagcaatggagtgaacctctgctccccacacagctggctacactgctcaggcttcaggcccacttgttgaacagaacaatctgggtagcaacagcatcttccacagttttccaaactggatagctgccaaccagcagacattacccacttgaaatggagtactcagttaaactgaagttgcctttacctagcattccctggtgaagtgttgcaggttgtgaactctgtagacatctttattgcttggctaagagtagatttaataaatgtatctggtttccgtggca

SEQ ID NO: 23616 - DNA, 927 bp, Homo sapiens
  source 1..927: mol_type = unassigned DNA
ggaaggggcggggcgaacggaagccgggaaggcgattcatagctcgcggggtacgggcgcgcgtgcgcactccgcagcccgttcaggaccccggcgcgggcagggcgcccacgagctggctggctgcttgcacccacatccttctttctctgggacctggggtcgcggttacttgggctggccggcgaacccttgagtggcctggcggggagcgggcctcgcgcgcctggagggccctgtggaacgaagagaggcacacagcatggcagaaaaccgagagccccgcggtgctgtggaggctgaactggatccagtggaatacacccttaggaaaaggcttcccagccgcctgccccggagacccaatgacatttatgtcaacatgaagacggactttaaggcccagctggcccgctgccagaagctgctggacggaggggcccggggtcagaacgcgtgctctgagatctacattcacggcttgggcctggccatcaaccgcgccatcaacatcgcgctgcagctgcaggcgggcagcttcgggtccttgcaggtggctgccaatacctccaccgtggagcttgttgatgagctggagccagagaccgacacacgggagccactgactcggatccgcaacaactcagccatccacatccgagtcttcagggtcacacccaagtaattgaaaagacactcctccacttatcccctccgtgatatggctcttcgcatgctgagtactggacctcggaccagagccatgtaagaaaaggcctgttccctggaagcccaaaggactctgcattgagggtgggggtaattgtctcttggtgggcccagttagtgggccttcctgagtgtgtgtatgcggtctgtaactattgccatataaataaaaaatcctgttgcactagtgtcctgcca

SEQ ID NO: 23617 - DNA, 483 bp, Homo sapiens
  source 1..483: mol_type = unassigned DNA
agtttgagggcgacgcgatgaatgaatcggaacggggggtggggagacgcgggatctggagggcacacagcatggcagaaaaccgagagccccgcggtgctgtggaggctgaactggatccagtggaatacacccttaggaaaaggcttcccagccgcctgccccggagacccaatgacatttatgtcaacatgaagacggactttaaggcccagctggcccgctgccagaagctgctggacggaggggcccggggtcagaacgcgtgctctgagatctacattcacggcttgggcctggccatcaaccgcgccatcaacatcgcgctgcagctgcaggcgggcagcttcgggtccttgcaggtggctgccaatacctccaccgtggagcttgttgatgagctggagccagagaccgacacacgggagccactgactcggatccgcaacaactcagccatccacatccgagtcttcagggtca

SEQ ID NO: 23618 - DNA, 1702 bp, Homo sapiens
  source 1..1702: mol_type = unassigned DNA
gatgacgttacttgaggcctgggagacggcctctgcccctcactgctcctccccctcctaaggtcaacatttatgtgtcctagacctagagaggtcccaggacacgccactgtcccgccttccccattgcccgccccactggccagtccccacgcccacacacccaaggctgccccatctggcgctgattatcctgctgctgccgccaccgctgctgctgctctgcaaaattcagctgctgcctctgtcttgaggaccccagcgcctttcccccggggccatgctgcctgcagccacagcctccctcctggggcccctcctcactgcctgcgccctgctgccttttgcccagggccagacccccaactacaccagacccgtgttcctgtgcggaggggatgtgaagggggaatcaggttacgtggcaagtgaggggttccccaacctctacccccctaataaggagtgcatctggaccataacggtccccgagggccagactgtgtccctctcattccgagtcttcgacctggagctgcaccccgcctgccgctacgatgctctggaggtcttcgctgggtctgggacttccggccagcggctcggacgcttttgtgggaccttccggcctgcgcccctagtcgcccccggcaaccaggtgaccctgaggatgacgacggatgagggcacaggaggacgaggcttcctgctctggtacagcgggcgggccacctcgggcactgagcaccaattttgcggggggcggctggagaaggcccagggaaccctgaccacgcccaactggcccgagtccgattaccccccgggcatcagctgttcctggcacatcatcgcgcccccggaccaggtcatcgcgctgaccttcgagaagtttgacctggagccggacacctactgccgctatgactcggtcagcgtgttcaacggagccgtgagcgacgactcccggaggctggggaagttctgcggcgacgcagtcccgggctccatctcctccgaagggaatgaactcctcgtccagttcgtctcagatctcagtgtcaccgctgatggcttctcagcctcctacaagaccctgccgcggggcactgccaaagaagggcaagggcccggccccaaacggggaactgagcctaaagtcaagctgccccccaagtcccaacctccggagaaaacagaggaatctccttcagcccctgatgcacccacctgcccaaagcagtgccgccggacaggcaccttgcagagcaacttctgtgccagcagccttgtggtgactgcgacagtgaagtccatggttcgggagccaggggagggccttgccgtgactgtcagtcttattggtgcttataaaactggaggactggacctgccttctccacccactggtgcctccctgaagttttacgtgccttgcaagcagtgcccccccatgaagaaaggagtcagttatctgctgatgggccaggtagaagagaacagaggccccgtccttcctccagagagctttgtggttctccaccggcccaaccaggaccagatcctcaccaacctaagcaagaggaagtgcccctctcaacctgtgcgggctgctgcgtcccaggactgagacgcaggccagccccggcccctagccctcaggccttctttcttatccaaataaatgtttcttaatgaggaa

SEQ ID NO: 23619 - DNA, 2021 bp, Homo sapiens
  source 1..2021: mol_type = unassigned DNA
gaacaaacgggatattcagcagtggcctgtggctgccagagcagctcctcaggggaaactaagcgtcgagtcagacggcaccataatcgcctttaaaagtgcctccgccctgccggccgcgtatcccccggctacctgggccgccccgcggcggtgcgcgcgtgagagggagcgcgcgggcagccgagcgccggtgtgagccagcgctgctgccagtgtgagcggcggtgtgagcgcggtgggtgcggaggggcgtgtgtgccggcgcgcgcgccgtggggtgcaaaccccgagcgtctacgctgccatgaggggcgcgaacgcctgggcgccactctgcctgctgctggctgccgccacccagctctcgcggcagcagtccccagagagacctgttttcacatgtggtggcattcttactggagagtctggatttattggcagtgaaggttttcctggagtgtaccctccaaatagcaaatgtacttggaaaatcacagttcccgaaggaaaagtagtcgttctcaatttccgattcatagacctcgagagtgacaacctgtgccgctatgactttgtggatgtgtacaatggccatgccaatggccagcgcattggccgcttctgtggcactttccggcctggagcccttgtgtccagtggcaacaagatgatggtgcagatgatttctgatgccaacacagctggcaatggcttcatggccatgttctccgctgctgaaccaaacgaaagaggggatcagtattgtggaggactccttgacagaccttccggctcttttaaaacccccaactggccagaccgggattaccctgcaggagtcacttgtgtgtggcacattgtagccccaaagaatcagcttatagaattaaagtttgagaagtttgatgtggagcgagataactactgccgatatgattatgtggctgtgtttaatggcggggaagtcaacgatgctagaagaattggaaagtattgtggtgatagtccacctgcgccaattgtgtctgagagaaatgaacttcttattcagtttttatcagacttaagtttaactgcagatgggtttattggtcactacatattcaggccaaaaaaactgcctacaactacagaacagcctgtcaccaccacattccctgtaaccacgggtttaaaacccaccgtggccttgtgtcaacaaaagtgtagacggacggggactctggagggcaattattgttcaagtgactttgtattagccggcactgttatcacaaccatcactcgcgatgggagtttgcacgccacagtctcgatcatcaacatctacaaagagggaaatttggcgattcagcaggcgggcaagaacatgagtgccaggctgactgtcgtctgcaagcagtgccctctcctcagaagaggtctaaattacattattatgggccaagtaggtgaagatgggcgaggcaaaatcatgccaaacagctttatcatgatgttcaagaccaagaatcagaagctcctggatgccttaaaaaataagcaatgttaacagtgaactgtgtccatttaagctgtattctgccattgcctttgaaagatctatgttctctcagtagaaaaaaaaatacttataaaattacatattctgaaagaggattccgaaagatgggactggttgactcttcacatgatggaggtatgaggcctccgagatagctgagggaagttctttgcctgctgtcagaggagcagctatctgattggaaacctgccgacttagtgcggtgataggaagctaaaagtgtcaagcgttgacagcttggaagcgtttatttatacatctctgtaaaaggatattttagaattgagttgtgtgaagatgtcaaaaaaagattttagaagtgcaatatttatagtgttatttgtttcaccttcaagcctttgccctgaggtgttacaatcttgtcttgcgttttctaaatcaatgcttaataaaatatttttaaaggattaca

SEQ ID NO: 23620 - DNA, 2940 bp, Homo sapiens
  source 1..2940: mol_type = unassigned DNA
cggccgatcgtcccccatacctcggccatgcggcccctgctgctactggccctgctgggctggctgctgctggccgaagcgaagggcgacgccaagccggaggacaaccttttagtcctcacggtggccactaaggagaccgagggattccgtcgcttcaagcgctcagctcagttcttcaactacaagatccaggcgcttggcctaggggaggactggaatgtggagaaggggacgtcggcaggtggagggcagaaggtccggctgctgaagaaagctctggagaagcacgcagacaaggaggatctggtcattctcttcgcagacagctatgacgtgctgtttgcatcggggccccgggagctcctgaagaagttccggcaggccaggagccaggtggtcttctctgctgaggagctcatctacccagaccgcaggctggagaccaagtatccggtggtgtccgatggcaagaggttcctgggctctggaggcttcatcggttatgcccccaacctcagcaaactggtggccgagtgggagggccaggacagcgacagcgatcagctgttttacaccaagatcttcttggacccggagaagagggagcagatcaatatcaccctggaccaccgctgccgtatcttccagaacctggatggagccttggatgaggtcgtgctcaagtttgaaatgggccatgtgagagcgaggaacctggcctatgacaccctcccggtcctgatccatggcaacgggccaaccaagctgcagttgaactacctgggcaactacatcccgcgcttctggaccttcgaaacaggctgcaccgtgtgtgacgaaggcttgcgcagcctcaagggcattggggatgaagctctgcccacggtcctggtcggcgtgttcatcgaacagcccacgccgtttgtgtccctgttcttccagcggctcctgcggctccactacccccagaaacacatgcgacttttcatccacaaccacgagcagcaccacaaggctcaggtggaagagttcctggcacagcatggcagcgagtaccagtctgtgaagctggtgggccctgaggtgcggatggcgaatgcagatgccaggaacatgggcgcagacctgtgccggcaggaccgcagctgcacctactacttcagcgtggatgctgacgtggccctgaccgagcccaacagcctgcggctgctgatccaacagaacaagaacgtcattgccccgctgatgacccggcatgggaggctgtggtcgaacttctggggggctctcagtgcagatggctactatgcccgttccgaggactacgtggacattgtgcaggggcggcgtgttggtgtctggaatgtgccctatatttcaaacatctacttgatcaagggcagtgccctgcggggtgagctgcagtcctcagatctcttccaccacagcaagctggaccccgacatggccttctgtgccaacatccggcagcaggatgtgttcatgttcctgaccaaccggcacacccttggccatctgctctccctagacagctaccgcaccacccacctgcacaacgacctctgggaggtgttcagcaaccccgaggactggaaggagaagtacatccaccagaactacaccaaagccctggcagggaagctggtggagacgccctgcccggatgtctattggttccccatcttcacggaggtggcctgtgatgagctggtggaggagatggagcactttggccagtggtctctgggcaacaacaaggacaaccgcatccagggtggctacgagaacgtgccgactattgacatccacatgaaccagatcggctttgagcgggagtggcacaaattcctgctggagtacattgcgcccatgacggagaagctctaccccggctactacaccagggcccagtttgacctggcctttgtcgtccgctacaagcctgatgagcagccctcactgatgccacaccatgatgcctccaccttcaccatcaacatcgccctgaaccgagtcggggtggattacgagggcgggggctgtcggttcctgcgctacaactgttccatccgagccccaaggaagggctggaccctcatgcaccctggacgactcacgcattaccatgaggggctccccaccaccaggggcacccgctacatcgcagtctccttcgtcgatccctaattggccaggcctgaccctcttggacctttcttctttgccgacaaccactgcccagcagcctctgggacctcggggtcccagggaacccagtccagcctcctggctgttgacttcccattgctcttggagccaccaatcaaagagattcaaagagattcctgcaggccagaggcggaacacacctttatggctggggctctccgtggtgttctggacccagcccctggagacaccattcacttttactgctttgtagtgactcgtgctctccaacctgtcttcctgaaaaaccaaggcccccttcccccacctcttccatggggtgagacttgagcagaacaggggcttccccaagttgcccagaaagactgtctgggtgagaagccatggccagagcttctcccaggcacaggtgttgcaccagggacttctgcttcaagttttggggtaaagacacctggatcagactccaagggctgccctgagtctgggacttctgcctccatggctggtcatgagagcaaaccgtagtcccctggagacagcgactccagagaacctcttgggagacagaagaggcatctgtgcacagctcgatcttctacttgcctgtggggaggggagtgacaggtccacacaccacactgggtcaccctgtcctggatgcctctgaagagagggacagaccgtcagaaactggagagtttctattaaaggtcatttaaacca

SEQ ID NO: 23621 - DNA, 819 bp, Homo sapiens
  source 1..819: mol_type = unassigned DNA
cctgcgagcgccgccgggtcggccgatcgtcccccatacctcggccatgcggcccctgctgctactggccctgctgggctggctgctgctggccgaagcgaagggcgacgccaagccggaggacaaccttttagtcctcacggtggccactaaggagaccgagggattccgtcgcttcaagcgctcagctcagttcttcaactacaagatccaggcgcttggcctaggggaggactggaatgtggagaaggggacgtcggcaggtggagggcagaaggtccggctgctgaagaaagctctggagaagcacgcagacaaggaggatctggtcattctcttcgcagacagctatgacgtgctgtttgcatcggggccccgggagctcctgaagaagttccggcaggccaggagccaggtggtcttctctgctgaggagctcatctacccagaccgcaggctggagaccaagtatccggtggtgtccgatggcaagaggttcctgggctctggaggcttcatcggttatgcccccaacctcagcaaactggtggccgagtgggagggccaggacagcgacagcgatcagctgttttacaccaagatcttcttggacccggagaagagggtgagccggctgcattcttagattccttccagttcagagtccctggttttctgtgagtagagccactagactgtagaccccaggagcttggctgctggccttctctgggcacctagctgccctgatgtgacgtggcagagtcggtgtggggaatgagggctgaacttggggacagattccccacactgggtgag

SEQ ID NO: 23622 - DNA, 2655 bp, Homo sapiens
  source 1..2655: mol_type = unassigned DNA
ctgcgagcgccgccgggtcggccgatcgtcccccatacctcggccatgcggcccctgctgctactggccctgctgggctggctgctgctggccgaagcgaagggcgacgccaagccggaggccccctgttgccaagagggcctcagagctggtggctctggttctcttcacctggggagagacttcaccgtcctggcaggagctcgggggagcccttccccaagtgtgagcagcatccctcgtttctggatcccaggttcagacaaccttttagtcctcacggtggccactaaggagaccgagggattccgtcgcttcaagcgctcagctcagttcttcaactacaagatccaggcgcttggcctaggggaggactggaatgtggagaaggggacgtcggcaggtggagggcagaaggtccggctgctgaagaaagctctggagaagcacgcagacaaggaggatctggtcattctcttcgcagacagctatgacgtgctgtttgcatcggggccccgggagctcctgaagaagttccggcaggccaggagccaggtggtcttctctgctgaggagctcatctacccagaccgcaggctggagaccaagtatccggtggtgtccgatggcaagaggttcctgggctctggaggcttcatcggttatgcccccaacctcagcaaactggtggccgagtgggagggccaggacagcgacagcgatcagctgttttacaccaagatcttcttggacccggagaagagggagcagatcaatatcaccctggaccaccgctgccgtatcttccagaacctggatggagccttggatgaggtcgtgctcaagtttgaaatgggccatgtgagagcgaggaacctggcctatgacaccctcccggtcctgatccatggcaacgggccaaccaagctgcagttgaactacctgggcaactacatcccgcgcttctggaccttcgaaacaggctgcaccgtgtgtgacgaaggcttgcgcagcctcaagggcattggggatgaagctctgcccacggtcctggtcggcgtgttcatcgaacagcccacgccgtttgtgtccctgttcttccagcggctcctgcggctccactacccccagaaacacatgcgacttttcatccacaaccacgagcagcaccacaaggctcaggtggaagagttcctggcacagcatggcagcgagtaccagtctgtgaagctggtgggccctgaggtgcggatggcgaatgcagatgccaggaacatgggcgcagacctgtgccggcaggaccgcagctgcacctactacttcagcgtggatgctgacgtggccctgaccgagcccaacagcctgcggctgctgatccaacagaacaagaacgtcattgccccgctgatgacccggcatgggaggctgtggtcgaacttctggggggctctcagtgcagatggctactatgcccgttccgaggactacgtggacattgtgcaggggcggcgtgttggtgtctggaatgtgccctatatttcaaacatctacttgatcaagggcagtgccctgcggggtgagctgcagtcctcagatctcttccaccacagcaagctggaccccgacatggccttctgtgccaacatccggcagcaggatgtgttcatgttcctgaccaaccggcacacccttggccatctgctctccctagacagctaccgcaccacccacctgcacaacgacctctgggaggtgttcagcaaccccgaggactggaaggagaagtacatccaccagaactacaccaaagccctggcagggaagctggtggagacgccctgcccggatgtctattggttccccatcttcacggaggtggcctgtgatgagctggtggaggagatggagcactttggccagtggtctctgggcaacaacaaggacaaccgcatccagggtggctacgagaacgtgccgactattgacatccacatgaaccagatcggctttgagcgggagtggcacaaattcctgctggagtacattgcgcccatgacggagaagctctaccccggctactacaccagggcccagtttgacctggcctttgtcgtccgctacaagcctgatgagcagccctcactgatgccacaccatgatgcctccaccttcaccatcaacatcgccctgaaccgagtcggggtggattacgagggcgggggctgtcggttcctgcgctacaactgttccatccgagccccaaggaagggctggaccctcatgcaccctggacgactcacgcattaccatgaggggctccccaccaccaggggcacccgctacatcgcagtctccttcgtcgatccctaattggccaggcctgaccctcttggacctttcttctttgccgacaaccactgcccagcagcctctgggacctcggggtcccagggaacccagtccagcctcctggctgttgacttcccattgctcttggagccaccaatcaaagagattcaaagagattcctgcaggccagaggcggaacacacctttatggctggggctctccgtggtgttctggacccagcccctggagacaccattcacttttactgctttgtagtgactcgtgctctccaacctgtcttcctg

SEQ ID NO: 23623 - DNA, 1500 bp, Homo sapiens
  source 1..1500: mol_type = unassigned DNA
agtttccagccctgcgagcgccgccgggtcggccgatcgtcccccatacctcggccatgcggcccctgctgctactggccctgctgggctggctgctgctggccgaagcgaagggcgacgccaagccggaggacaaccttttagtcctcacggtggccactaaggagaccgagggattccgtcgcttcaagcgctcagctcagttcttcaactacaagatccaggcgcttggcctaggggaggactggaatgtggagaaggggacgtcggcaggtggagggcagaaggtccggctgctgaagaaagctctggagaagcacgcagacaaggaggatctggtcattctcttcgcagacagctatgacgtgctgtttgcatcggggccccgggagctcctgaagaagttccggcaggccaggagccaggtggtcttctctgctgaggagctcatctacccagaccgcaggctggagaccaagtatccggtggtgtccgatggcaagaggttcctgctggaggatgtgttcatgttcctgaccaaccggcacacccttggccatctgctctccctagacagctaccgcaccacccacctgcacaacgacctctgggaggtgttcagcaaccccgaggactggaaggagaagtacatccaccagaactacaccaaagccctggcagggaagctggtggagacgccctgcccggatgtctattggttccccatcttcacggaggtggcctgtgatgagctggtggaggagatggagcactttggccagtggtctctgggcaacaacaaggacaaccgcatccagggtggctacgagaacgtgccgactattgacatccacatgaaccagatcggctttgagcgggagtggcacaaattcctgctggagtacattgcgcccatgacggagaagctctaccccggctactacaccagggcccagtttgacctggcctttgtcgtccgctacaagcctgatgagcagccctcactgatgccacaccatgatgcctccaccttcaccatcaacatcgccctgaaccgagtcggggtggattacgagggcgggggctgtcggttcctgcgctacaactgttccatccgagccccaaggaagggctggaccctcatgcaccctggacgactcacgcattaccatgaggggctccccaccaccaggggcacccgctacatcgcagtctccttcgtcgatccctaattggccaggcctgaccctcttggacctttcttctttgccgacaaccactgcccagcagcctctgggacctcggggtcccagggaacccagtccagcctcctggctgttgacttcccattgctcttggagccaccaatcaaagagattcaaagagattcctgcaggccagaggcggaacacacctttatggctggggctctccgtggtgttctggacccagcccctggagacaccattcacttttactgctttgtagtgactcgtgctc

SEQ ID NO: 23624 - DNA, 887 bp, Homo sapiens
  source 1..887: mol_type = unassigned DNA
gccgccgggtcggccgatcgtcccccatacctcggccatgcggcccctgctgctactggccctgctgggctggctgctgctggccgaagcgaagggcgacgccaagccggaggacaaccttttagtcctcacggtggccactaaggagaccgagggattccgtcgcttcaagcgctcagctcagttcttcaactacaagatccaggcgcttggcctaggggaggactggaatgtggagaaggggacgtcggcaggtggagggcagaaggtccggctgctgaagaaagctctggagaagcacgcagacaaggaggatctggtcattctcttcgcagacagctatgacgtgctgtttgcatcggggccccgggagctcctgaagaagttccggcaggccaggagccaggtggtcttctctgctgaggagctcatctacccagaccgcaggctggagaccaagtatccggtggtgtccgatggcaagaggttcctgggctctggaggcttcatcggttatgcccccaacctcagcaaactggtggccgagtgggagggccaggacagcgacagcgatcagctgttttacaccaagatcttcttggacccggagaagagggagcagatcaatatcaccctggaccaccgctgccgtatcttccagaacctggatggagccttggtgtctccctggggccagggccaccttcctggggcctgctatgaactcactgcctctgtcctcacatctgagctcagcgtgatgccttcttttcctgctgtggtgctgcagttgaactacctgggcaactacatcccgcgcttctggaccttcgaaacaggctgcaccgtgtgtgacgaaggcttgcgcagcctcaagggcattgggg

SEQ ID NO: 23625 - DNA, 762 bp, Homo sapiens
  source 1..762: mol_type = unassigned DNA
gtggcagcgggacctgcggccccgtcgcgaagtttccagccctgcgagcgccgccgggtcggccgatcgtcccccatacctcggccatgcggcccctgctgctactggccctgctgggctggctgctgctggccgaagcgaagggcgacgccaagccggaggccccctgttgccaagagggcctcagagctggtggctctggttctcttcacctggggagagacttcaccgtcctggcaggagctcgggggagcccttccccaagtgtgagcagcatccctcgtttctggatcccaggttcagacaaccttttagtcctcacggtggccactaaggagaccgagggattccgtcgcttcaagcgctcagctcagttcttcaactacaagatccaggcgcttggcctaggggaggactggaatgtggagaaggggacgtcggcaggtggagggcagaaggtccggctgctgaagaaagctctggagaagcacgcagacaaggaggatctggtcattctcttcgcagacagctatgacgtgctgtttgcatcggggccccgggagctcctgaagaagttccggcaggccaggagccaggtggtcttctctgctgaggagctcatctacccagaccgcaggctggagaccaagtatccggtggtgtccgatggcaagaggttcctgggctctggaggcttcatcggttatgcccccaacctcagcaaactggtggccgagtgggagggccaggacagcgacagcg

SEQ ID NO: 23626 - DNA, 3732 bp, Homo sapiens
  source 1..3732: mol_type = unassigned DNA
ccgacgacctcactcagctgcgttacgcgccgctccggctgccggccgcgcgccttgcccgccggctcccgcccgcaatcggcggctcagggcggacccgggtctctgcgttctcgcgagaagcgcggcgctgcggggccgtgggcgcctgagcccgcgcggccctcgagggccgaatatggggggatgcacggtgaagcctcagctgctgctcctggcgctcgtcctccacccctggaatccctgtctgggtgcggactcggagaagccctcgagcatccccacagataaattattagtcataactgtagcaacaaaagaaagtgatggattccatcgatttatgcagtcagccaaatatttcaattatactgtgaaggtccttggtcaaggagaagaatggagaggtggtgatggaattaatagtattggagggggccagaaagtgagattaatgaaagaagtcatggaacactatgctgatcaagatgatctggttgtcatgtttactgaatgctttgatgtcatatttgctggtggtccagaagaagttctaaaaaaattccaaaaggcaaaccacaaagtggtctttgcagcagatggaattttgtggccagataaaagactagcagacaagtatcctgttgtgcacattgggaaacgctatctgaattcaggaggatttattggctatgctccatatgtcaaccgtatagttcaacaatggaatctccaggataatgatgatgatcagctcttttacactaaagtttacattgatccactgaaaagggaagctattaacatcacattggatcacaaatgcaaaattttccagaccttaaatggagctgtagatgaagttgttttaaaatttgaaaatggcaaagccagagctaagaatacattttatgaaacattaccagtggcaattaatggaaatggacccaccaagattctcctgaattattttggaaactatgtacccaattcatggacacaggataatggctgcactctttgtgaattcgatacagtcgacttgtctgcagtagatgtccatccaaacgtatcaataggtgtttttattgagcaaccaaccccttttctacctcggtttctggacatattgttgacactggattacccaaaagaagcacttaaactttttattcataacaaagaagtttatcatgaaaaggacatcaaggtattttttgataaagctaagcatgaaatcaaaactataaaaatagtaggaccagaagaaaatctaagtcaagcggaagccagaaacatgggaatggacttttgccgtcaggatgaaaagtgtgattattactttagtgtggatgcagatgttgttttgacaaatccaaggactttaaaaattttgattgaacaaaacagaaagatcattgctcctcttgtaactcgtcatggaaagctgtggtccaatttctggggagcattgagtcctgatggatactatgcacgatctgaagattatgtggatattgttcaagggaatagagtaggagtatggaatgtcccatatatggctaatgtgtacttaattaaaggaaagacactccgatcagagatgaatgaaaggaactattttgttcgtgataaactggatcctgatatggctctttgccgaaatgctagagaaatgactttacaaagggaaaaagactcccctactccggaaacattccaaatgctcagccccccaaagggtgtatttatgtacatttctaatagacatgaatttggaaggctattatccactgctaattacaatacttcccattataacaatgacctctggcagatttttgaaaatcctgtggactggaaggaaaagtatataaaccgtgattattcaaagattttcactgaaaatatagttgaacagccctgtccagatgtcttttggttccccatattttctgaaaaagcctgtgatgaattggtagaagaaatggaacattacggcaaatggtctgggggaaaacatcatgatagccgtatatctggtggttatgaaaatgtcccaactgatgatatccacatgaagcaagttgatctggagaatgtatggcttcattttatccgggagttcattgcaccagttacactgaaggtctttgcaggctattatacgaagggatttgcactactgaattttgtagtaaaatactcccctgaacgacagcgttctcttcgtcctcatcatgatgcttctacatttaccataaacattgcacttaataacgtgggagaagactttcagggaggtggttgcaaatttctaaggtacaattgctctattgagtcaccacgaaaaggctggagcttcatgcatcctgggagactcacacatttgcatgaaggacttcctgttaaaaatggaacaagatacattgcagtgtcatttatagatccctaagttatttacttttcattgaattgaaatttattttggatgaatgactggcatgaacacgtctttgaagttgtggctgagaagatgagaggaatatttaaataacatcaacagaacaacttcactttgggccaaacatttgaaaaactttttataaaaaattgtttgatatttcttaatgtctgctctgagccttaaaacacagattgaagaagaaaagaaagaaaaaacttaaatatttatttctatgctttgttgcctctgagaataatgacaatttatgaatttgtgtttcaaattgataaaatatttaggtacaaataacaagactaataatattttcttatttaaaaaaagcatgggaagatttttatttatcaaaatatagaggaaatgtagacaaaatggatataaatgaaaattaccatgttgtaaaaccttgaaaatcagattctaactggatttgtatgcaactaagtatttttctgaacacctatgcaggtcttatttacagtagttactaagggaacacacaaagaattacacaacgttttcctcaagaaaatggtacaaaacacaaccgaggagcgtatacagttgaaaacatttttgttttgattggaaggcagattattttatattagtattaaaaatcaaaccctatgtttctttcagatgaatcttccaaagtggattatattaagcaggtattagatttaggaaaacctttccatttcttaaagtattatcaagtgtcaagatcagcaagtgtccttaagtcaaacaggttttttttgttgttgtttttgctttgtttccttttttagaaagttctagaaaataggaaaacgaaaaatttcattgagatgagtagtgcatttaattattttttaaaaaactttttaagtacttgaattttatatcaggaaaacaaagttgttgagccttgcttcttccgttttgccctttgtctcgctccttattctttttttggggggagggttatttgcttttttatcttcctggcataatttccattttattcttctgagtgtctatgttaacttccctctatcccgcttataaaaaaattctccaacaaaaatacttgttgacttgatgttttatcacttctctaagtaaggttgaaatatccttattgtagctactgtttttaatgtaaaggttaaacttgaaaagaaattcttaatcacggtgccaaaattcattttctaacaccatgtgttagaaaattataaaaaataaaataattttagaaa

SEQ ID NO: 23627 - DNA, 3665 bp, Homo sapiens
  source 1..3665: mol_type = unassigned DNA
ccgacgacctcactcagctgcgttacgcgccgctccggctgccggccgcgcgccttgcccgccggctcccgcccgcaatcggcggctcagggcggacccgggtctctgcgttctcgcgagaagcgcggcgctgcggggccgtgggcgcctgagcccgcgcggccctcgagggccgaatatggggggatgcacggtgaagcctcagctgctgctcctggcgctcgtcctccacccctggaatccctgtctgggtgcggactcggagaagccctcgagcatccccacagataaattattagtcataactgtagcaacaaaagaaagtgatggattccatcgatttatgcagtcagccaaatatttcaattatactgtgaaggtccttggtcaaggagaagaatggagaggtggtgatggaattaatagtattggagggggccagaaagtgagattaatgaaagaagtcatggaacactatgctgatcaagatgatctggttgtcatgtttactgaatgctttgatgtcatatttgctggtggtccagaagaagttctaaaaaaattccaaaaggcaaaccacaaagtggtctttgcagcagatggaattttgtggccagataaaagactagcagacaagtatcctgttgtgcacattgggaaacgctatctgaattcaggaggatttattggctatgctccatatgtcaaccgtatagttcaacaatggaatctccaggataatgatgatgatcagctcttttacactaaagtttacattgatccactgaaaagggaagctattaacatcacattggatcacaaatgcaaaattttccagaccttaaatggagctgtagatgaagttgttttaaaatttgaaaatggcaaagccagagctaagaatacattttatgaaacattaccagtggcaattaatggaaatggacccaccaagattctcctgaattattttggaaactatgtacccaattcatggacacaggataatggctgcactctttgtgaattcgatacagtcgacttgtctgcagtagatgtccatccaaacgtatcaataggtgtttttattgagcaaccaaccccttttctacctcggtttctggacatattgttgacactggattacccaaaagaagcacttaaactttttattcataacaaagaagtttatcatgaaaaggacatcaaggtattttttgataaagctaagcatgaaatcaaaactataaaaatagtaggaccagaagaaaatctaagtcaagcggaagccagaaacatgggaatggacttttgccgtcaggatgaaaagtgtgattattactttagtgtggatgcagatgttgttttgacaaatccaaggactttaaaaattttgattgaacaaaacagaaagatcattgctcctcttgtaactcgtcatggaaagctgtggtccaatttctggggagcattgagtcctgatggatactatgcacgatctgaagattatgtggatattgttcaagggaatagagtaggagtatggaatgtcccatatatggctaatgtgtacttaattaaaggaaagacactccgatcagagatgaatgaaaggaactattttgttcgtgataaactggatcctgatatggctctttgccgaaatgctagagaaatgggtgtatttatgtacatttctaatagacatgaatttggaaggctattatccactgctaattacaatacttcccattataacaatgacctctggcagatttttgaaaatcctgtggactggaaggaaaagtatataaaccgtgattattcaaagattttcactgaaaatatagttgaacagccctgtccagatgtcttttggttccccatattttctgaaaaagcctgtgatgaattggtagaagaaatggaacattacggcaaatggtctgggggaaaacatcatgatagccgtatatctggtggttatgaaaatgtcccaactgatgatatccacatgaagcaagttgatctggagaatgtatggcttcattttatccgggagttcattgcaccagttacactgaaggtctttgcaggctattatacgaagggatttgcactactgaattttgtagtaaaatactcccctgaacgacagcgttctcttcgtcctcatcatgatgcttctacatttaccataaacattgcacttaataacgtgggagaagactttcagggaggtggttgcaaatttctaaggtacaattgctctattgagtcaccacgaaaaggctggagcttcatgcatcctgggagactcacacatttgcatgaaggacttcctgttaaaaatggaacaagatacattgcagtgtcatttatagatccctaagttatttacttttcattgaattgaaatttattttggatgaatgactggcatgaacacgtctttgaagttgtggctgagaagatgagaggaatatttaaataacatcaacagaacaacttcactttgggccaaacatttgaaaaactttttataaaaaattgtttgatatttcttaatgtctgctctgagccttaaaacacagattgaagaagaaaagaaagaaaaaacttaaatatttatttctatgctttgttgcctctgagaataatgacaatttatgaatttgtgtttcaaattgataaaatatttaggtacaaataacaagactaataatattttcttatttaaaaaaagcatgggaagatttttatttatcaaaatatagaggaaatgtagacaaaatggatataaatgaaaattaccatgttgtaaaaccttgaaaatcagattctaactggatttgtatgcaactaagtatttttctgaacacctatgcaggtcttatttacagtagttactaagggaacacacaaagaattacacaacgttttcctcaagaaaatggtacaaaacacaaccgaggagcgtatacagttgaaaacatttttgttttgattggaaggcagattattttatattagtattaaaaatcaaaccctatgtttctttcagatgaatcttccaaagtggattatattaagcaggtattagatttaggaaaacctttccatttcttaaagtattatcaagtgtcaagatcagcaagtgtccttaagtcaaacaggttttttttgttgttgtttttgctttgtttccttttttagaaagttctagaaaataggaaaacgaaaaatttcattgagatgagtagtgcatttaattattttttaaaaaactttttaagtacttgaattttatatcaggaaaacaaagttgttgagccttgcttcttccgttttgccctttgtctcgctccttattctttttttggggggagggttatttgcttttttatcttcctggcataatttccattttattcttctgagtgtctatgttaacttccctctatcccgcttataaaaaaattctccaacaaaaatacttgttgacttgatgttttatcacttctctaagtaaggttgaaatatccttattgtagctactgtttttaatgtaaaggttaaacttgaaaagaaattcttaatcacggtgccaaaattcattttctaacaccatgtgttagaaaattataaaaaataaaataatttta

SEQ ID NO: 23628 - DNA, 3043 bp, Homo sapiens
  source 1..3043: mol_type = unassigned DNA
aagtgctgactgggaccgacagtgagggaggggagcccagagggaagttgataacccaaatgtcatctggtatctccagttgttcattccttgatattgctgatgataatgttacaaactgtaccagggaaagcaaacatagtcactgcccctggtaagaaggcaggggaataactatcttagaaaatttgatgaaaatcaagtttgtaaaatattaatacctgaaaagtcatatacttacatctccaacattcatttaaaactgagttgtgggatatgtaagttgcatttgtgtgcatgtgtatgtatgtatgtatgtatgcagaaacattttgatttgtggatgttttatgccttaaaatatttactggcttgaaaatatattttaactggcttaaaattttagaggtgagctccctgtgaatatccgtgttaaattgaccattttgaaatttaagacaatatatatatcgtttcagatattgttccactattttgatcagaaaagtatgctagagaaccatattttacataaaagaatatatatattaacatttttcagtcagcagatatttattttatgtcatgcccatttcattttctttttcactgttagggacttttgccgtcaggatgaaaagtgtgattattactttagtgtggatgcagatgttgttttgacaaatccaaggactttaaaaattttgattgaacaaaacagaaagatcattgctcctcttgtaactcgtcatggaaagctgtggtccaatttctggggagcattgagtcctgatggatactatgcacgatctgaagattatgtggatattgttcaagggaatagagtaggagtatggaatgtcccatatatggctaatgtgtacttaattaaaggaaagacactccgatcagagatgaatgaaaggaactattttgttcgtgataaactggatcctgatatggctctttgccgaaatgctagagaaatgactttacaaagggaaaaagactcccctactccggaaacattccaaatgctcagccccccaaagggtgtatttatgtacatttctaatagacatgaatttggaaggctattatccactgctaattacaatacttcccattataacaatgacctctggcagatttttgaaaatcctgtggactggaaggaaaagtatataaaccgtgattattcaaagattttcactgaaaatatagttgaacagccctgtccagatgtcttttggttccccatattttctgaaaaagcctgtgatgaattggtagaagaaatggaacattacggcaaatggtctgggggaaaacatcatgatagccgtatatctggtggttatgaaaatgtcccaactgatgatatccacatgaagcaagttgatctggagaatgtatggcttcattttatccgggagttcattgcaccagttacactgaaggtctttgcaggctattatacgaagggatttgcactactgaattttgtagtaaaatactcccctgaacgacagcgttctcttcgtcctcatcatgatgcttctacatttaccataaacattgcacttaataacgtgggagaagactttcagggaggtggttgcaaatttctaaggtacaattgctctattgagtcaccacgaaaaggctggagcttcatgcatcctgggagactcacacatttgcatgaaggacttcctgttaaaaatggaacaagatacattgcagtgtcatttatagatccctaagttatttacttttcattgaattgaaatttattttggatgaatgactggcatgaacacgtctttgaagttgtggctgagaagatgagaggaatatttaaataacatcaacagaacaacttcactttgggccaaacatttgaaaaactttttataaaaaattgtttgatatttcttaatgtctgctctgagccttaaaacacagattgaagaagaaaagaaagaaaaaacttaaatatttatttctatgctttgttgcctctgagaataatgacaatttatgaatttgtgtttcaaattgataaaatatttaggtacaaataacaagactaataatattttcttatttaaaaaaagcatgggaagatttttatttatcaaaatatagaggaaatgtagacaaaatggatataaatgaaaattaccatgttgtaaaaccttgaaaatcagattctaactggatttgtatgcaactaagtatttttctgaacacctatgcaggtcttatttacagtagttactaagggaacacacaaagaattacacaacgttttcctcaagaaaatggtacaaaacacaaccgaggagcgtatacagttgaaaacatttttgttttgattggaaggcagattattttatattagtattaaaaatcaaaccctatgtttctttcagatgaatcttccaaagtggattatattaagcaggtattagatttaggaaaacctttccatttcttaaagtattatcaagtgtcaagatcagcaagtgtccttaagtcaaacaggttttttttgttgttgtttttgctttgtttccttttttagaaagttctagaaaataggaaaacgaaaaatttcattgagatgagtagtgcatttaattattttttaaaaaactttttaagtacttgaattttatatcaggaaaacaaagttgttgagccttgcttcttccgttttgccctttgtctcgctccttattctttttttggggggagggttatttgcttttttatcttcctggcataatttccattttattcttctgagtgtctatgttaacttccctctatcccgcttataaaaaaattctccaacaaaaatacttgttgacttgatgttttatcacttctctaagtaaggttgaaatatccttattgtagctactgtttttaatgtaaaggttaaacttgaaaagaaattcttaatcacggtgccaaaattcattttctaacaccatgtgttagaaaattataaaaaataaaataattttagaaa

SEQ ID NO: 23629 - DNA, 2908 bp, Homo sapiens
  source 1..2908: mol_type = unassigned DNA
aatatggggggatgcacggtgaagcctcagctgctgctcctggcgctcgtcctccacccctggaatccctgtctgggtgcggactcggagaagccctcgagcatccccacaggtgagcaccccgcggtccgccgctgtcccgcgaggctcggccggcgggggggcagttcattcatccaccagcccttccgcggggctggccagataaattattagtcataactgtagcaacaaaagaaagtgatggattccatcgatttatgcagtcagccaaatatttcaattatactgtgaaggtccttggtcaaggagaagaatggagaggtggtgatggaattaatagtattggagggggccagaaagtgagattaatgaaagaagtcatggaacactatgctgatcaagatgatctggttgtcatgtttactgaatgctttgatgtcatatttgctggtggtccagaagaagttctaaaaaaattccaaaaggcaaaccacaaagtggtctttgcagcagatggaattttgtggccagataaaagactagcagacaagtatcctgttgtgcacattgggaaacgctatctgaattcaggaggatttattggctatgctccatatgtcaaccgtatagttcaacaatggaatctccaggataatgatgatgatcagctcttttacactaaagtttacattgatccactgaaaagggaagctattaacatcacattggatcacaaatgcaaaattttccagaccttaaatggagctgtagatgaagttgttttaaaatttgaaaatggcaaagccagagctaagaatacattttatgaaacattaccagtggcaattaatggaaatggacccaccaagattctcctgaattattttggaaactatgtacccaattcatggacacaggataatggctgcactctttgtgaattcgatacagtcgacttgtctgcagtagatgtccatccaaacgtatcaataggtgtttttattgagcaaccaaccccttttctacctcggtttctggacatattgttgacactggattacccaaaagaagcacttaaactttttattcataacaaagaagtttatcatgaaaaggacatcaaggtattttttgataaagctaagcatgaaatcaaaactataaaaatagtaggaccagaagaaaatctaagtcaagcggaagccagaaacatgggaatggacttttgccgtcaggatgaaaagtgtgattattactttagtgtggatgcagatgttgttttgacaaatccaaggactttaaaaattttgattgaacaaaacagaaagatcattgctcctcttgtaactcgtcatggaaagctgtggtccaatttctggggagcattgagtcctgatggatactatgcacgatctgaagattatgtggatattgttcaagggaatagagtaggagtatggaatgtcccatatatggctaatgtgtacttaattaaaggaaagacactccgatcagagatgaatgaaaggaactattttgttcgtgataaactggatcctgatatggctctttgccgaaatgctagagaaatgactttacaaagggaaaaagactcccctactccggaaacattccaaatgctcagccccccaaagggtgtatttatgtacatttctaatagacatgaatttggaaggctattatccactgctaattacaatacttcccattataacaatgacctctggcagatttttgaaaatcctgtggactggaaggaaaagtatataaaccgtgattattcaaagattttcactgaaaatatagttgaacagccctgtccagatgtcttttggttccccatattttctgaaaaagcctgtgatgaattggtagaagaaatggaacattacggcaaatggtctgggggaaaacatcatgatagccgtatatctggtggttatgaaaatgtcccaactgatgatatccacatgaagcaagttgatctggagaatgtatggcttcattttatccgggagttcattgcaccagttacactgaaggtctttgcaggctattatacgaagggatttgcactactgaattttgtagtaaaatactcccctgaacgacagcgttctcttcgtcctcatcatgatgcttctacatttaccataaacattgcacttaataacgtgggagaagactttcagggaggtggttgcaaatttctaaggtacaattgctctattgagtcaccacgaaaaggctggagcttcatgcatcctgggagactcacacatttgcatgaaggacttcctgttaaaaatggaacaagatacattgcagtgtcatttatagatccctaagttatttacttttcattgaattgaaatttattttggatgaatgactggcatgaacacgtctttgaagttgtggctgagaagatgagaggaatatttaaataacatcaacagaacaacttcactttgggccaaacatttgaaaaactttttataaaaaattgtttgatatttcttaatgtctgctctgagccttaaaacacagattgaagaagaaaagaaagaaaaaacttaaatatttatttctatgctttgttgcctctgagaataatgacaatttatgaatttgtgtttcaaattgataaaatatttaggtacaaataacaagactaataatattttcttatttaaaaaaagcatgggaagatttttatttatcaaaatatagaggaaatgtagacaaaatggatataaatgaaaattaccatgttgtaaaaccttgaaaatcagattctaactggatttgtatgcaactaagtatttttctgaacacctatgcaggtcttatttacagtagttactaagggaacacacaaaga

SEQ ID NO: 23630 - DNA, 2920 bp, Homo sapiens
  source 1..2920: mol_type = unassigned DNA
actctctgggcagggctgcggccaggacccgcccccgcgtcccgcccgaccctccgccaggggtcacttcccctgtccaggtttcagcttccacatgtgtcaagcggctggctcagcccagagtccctgtctcccgcccgccggcccgagccgccgcccctcccccgcctcccgtgcgcccgggacaatcctcgccttgtctgtggcgccggcatctggagctttctgtagcctccggatacgcctttttttcagggcgtagccccagccaagctgctccccgcggcggccgcacagcagcccgagcgccccctttccagagctcccctccggagctgggatccaggcgcgtagcggagatcccaggatcctgggtgctgtctgggcccgctccccaccatgacctcctcggggcctggaccccggttcctgctgctgctgccgctgctgctgccccctgcggcctcagcctccgaccggccccggggccgagacccggtcaacccagagaagctgctggtgatcactgtggccacagctgaaaccgaggggtacctgcgtttcctgcgctctgcggagttcttcaactacactgtgcggaccctgggcctgggagaggagtggcgagggggtgatgtggctcgaacagttggtggaggacagaaggtccggtggttaaagaaggaaatggagaaatacgctgaccgggaggatatgatcatcatgtttgtggatagctacgacgtgattctggccggcagccccacagagctgctgaagaagttcgtccagagtggcagccgcctgctcttctctgcagagagcttctgctggcccgagtgggggctggcggagcagtaccctgaggtgggcacggggaagcgcttcctcaattctggtggattcatcggttttgccaccaccatccaccaaatcgtgcgccagtggaagtacaaggatgatgacgacgaccagctgttctacacacggctctacctggacccaggactgagggagaaactcagccttaatctggatcataagtctcggatctttcagaacctcaacggggctttagatgaagtggttttaaagtttgatcggaaccgtgtgcgtatccggaacgtggcctacgacacgctccccattgtggtccatggaaacggtcccactaagctgcagctcaactacctgggaaactacgtccccaatggctggactcctgagggaggctgtggcttctgcaaccaggaccggaggacactcccgggggggcagcctcccccccgggtgtttctggccgtgtttgtggaacagcctactccgtttctgccccgcttcctgcagcggctgctactcctggactatccccccgacagggtcacccttttcctgcacaacaacgaggtcttccatgaaccccacatcgctgactcctggccgcagctccaggaccacttctcagctgtgaagctcgtggggccggaggaggctctgagcccaggcgaggccagggacatggccatggacctgtgtcggcaggaccccgagtgtgagttctacttcagcctggacgccgacgctgtcctcaccaacctgcagaccctgcgtatcctcattgaggagaacaggaaggtgatcgcccccatgctgtcccgccacggcaagctgtggtccaacttctggggcgccctgagccccgatgagtactacgcccgctccgaggactacgtggagctggtgcagcggaagcgagtgggtgtgtggaatgtaccatacatctcccaggcctatgtgatccggggtgataccctgcggatggagctgccccagagggatgtgttctcgggcagtgacacagacccggacatggccttctgtaagagctttcgagacaagggcatcttcctccatctgagcaatcagcatgaatttggccggctcctggccacttccagatacgacacggagcacctgcaccccgacctctggcagatcttcgacaaccccgtcgactggaaggagcagtacatccacgagaactacagccgggccctggaaggggaaggaatcgtggagcagccatgcccggacgtgtactggttcccactgctgtcagaacaaatgtgtgatgagctggtggcagagatggagcactacggccagtggtcaggcggccggcatgaggattcaaggctggctggaggctacgagaatgtgcccaccgtggacatccacatgaagcaggtggggtacgaggaccagtggctgcagctgctgcggacgtatgtgggccccatgaccgagagcctgtttcccggttaccacaccaaggcgcgggcggtgatgaactttgtggttcgctaccggccagacgagcagccgtctctgcggccacaccacgactcatccaccttcaccctcaacgttgccctcaaccacaagggcctggactatgagggaggtggctgccgcttcctgcgctacgactgtgtgatctcctccccgaggaagggctgggcactcctgcaccccggccgcctcacccactaccacgaggggctgccaacgacctggggcacacgctacatcatggtgtcctttgtcgacccctgacactcaaccactctgccaaacctgccctgccattgtgcctttttagggggcctggcccccgtcctgggagttgggggatgggtctctctgtctccccacttcctgagttcatgttccgcgtgcctgaactgaatatgtcaccttgctcccaagacacggccctctcaggaagctcccggagtccccgcctctctcctccgcccacaggggttcgtgggcacagggcttctggggactccccgcgtgataaattattaatgttccgcagtctcactctgaataaaggacagtttgtaagtcttga

SEQ ID NO: 23631 - DNA, 563 bp, Homo sapiens
  source 1..563: mol_type = unassigned DNA
atgcttgcagttccagccactccggaggctgaggtgggaggatggtttgatcccaggaaatcgaggctgcagtgagctatgactatgccactgcactccagcctaggcgaaagagcgagaccaaaaaagaggaatgactagatgctgtgatcacaaaggcagcccctggagcttctccgggcagaagaggagggcgtagccccagccaagctgctccccgcggcggccgcacagcagcccgagcgccccctttccagagctcccctccggagctgggatccaggcgcgtagcggagatcccaggatcctgggtgctgtctgggcccgctccccaccatgacctcctcggggcctggaccccggttcctgctgctgctgccgctgctgctgccccctgcggcctcagcctccgaccggccccggggccgagacccggtcaacccagagaagctgctggtgatcactgtggccacagctgaaaccgaggggtacctgcgtttcctgcgctctgcggagttcttcaactacactgtgcggaccctgggcctgggagaggagtggcg

SEQ ID NO: 23632 - DNA, 1415 bp, Homo sapiens
  source 1..1415: mol_type = unassigned DNA
agcttccacatgtgtcaagcggctggctcagcccagagtccctgtctcccgcccgccggcccgagccgccgcccctcccccgcctcccgtgcgcccgggacaatcctcgccttgtctgtggcgccggcatctggagctttctgtagcctccggatacgcctttttttcagggcgtagccccagccaagctgctgctgccccctgcggcctcagcctccgaccggccccggggccgagacccggtcaacccagagaagctgctggtgatcactgtggccacagctgaaaccgaggggtacctgcgtttcctgcgctctgcggagttcttcaactacactgtgcggaccctgggcctgggagaggagtggcgagggggtgatgtggctcgaacagttggtggaggacagaaggtccggtggttaaagaaggaaatggagaaatacgctgaccgggaggatatgatcatcatgtttgtggatagctacgacgtgattctggccggcagccccacagagctgctgaagaagttcgtccagagtggcagccgcctgctcttctctgcagagagcttctgctggcccgagtgggggctggcggagcagtaccctgaggtgggcacggggaagcgcttcctcaattctggtggattcatcggttttgccaccaccatccaccaaatcgtgcgccagtggaagtacaaggatgatgacgacgaccagctgttctacacacggctctacctggacccaggactgagggagaaactcagccttaatctggatcataagtctcggatctttcagaacctcaacggggctttagatgaagtggttttaaagtttgatcggaaccgtgtgcgtatccggaacgtggcctacgacacgctccccattgtggtccatggaaacggtcccactaagctgcagctcaactacctgggaaactacgtccccaatggctggactcctgagggaggctgtggcttctgcaaccaggaccggaggacactcccggggggtccagcctcccccccgggtgtttctggccgtgtttgtggaacagcctactccgtttctgccccgcttcctgcagcggctgctactcctggactatccccccgacagggtcacccttttcctgcacaacaacgaggtcttccatgaaccccacatcgctgactcctggccgcagctccaggaccacttctcagctgtgaagctcgtggggccggaggaggctctgagcccaggcgaggccagggacatggccatggacctgtgtcggcaggaccccgagtgtgagttctacttcagcctggacgccgacgctgtcctcaccaacctgcagaccctgcgtatcctcattgaggagaacaggaaggtgatcgcccccatgctgtcccgccacggcaagct

SEQ ID NO: 23633 - DNA, 2555 bp, Homo sapiens
  source 1..2555: mol_type = unassigned DNA
atttgaaggggctttggtggtgttcacagctgcctctttggcacctcctcccaagccggagtcaaggaggcccctgagccttggaccagccactgccacctccgacctgctcggccagaagctgcccagggacaaagcagagtgcaggtcatttatcttcaggctttgagatctgcgtggggggagctgttgcagcagcccaagccgcaggaattgctgagacaggatggcctggcaggggctggtcctggctgcctgcctcctcatgttcccctccaccacagcggactgcctgtcgcggtgctccttgtgtgctgtaaagacccaggatggtcccaaacctatcaatcccctgatttgctccctgcaatgccaggctgccctgctgccctctgaggaatgggagagatgccagagctttctgtcttttttcaccccctccacccttgggctcaatgacaaggaggacttggggagcaagtcggttggggaagggccctacagtgagctggccaagctctctgggtcattcctgaaggagctggagaaaagcaagtttctcccaagtatctcaacaaaggagaacactctgagcaagagcctggaggagaagctcaggggtctctctgacgggtttagggagggagcagagtctgagctgatgagggatgcccagctgaacgatggtgccatggagactggcacactctatctcgctgaggaggaccccaaggagcaggtcaaacgctatgggggctttttgcgcaaataccccaagaggagctcagaggtggctggggagggggacggggatagcatgggccatgaggacctgtacaaacgctatgggggcttcttgcggcgcattcgtcccaagctcaagtgggacaaccagaagcgctatggcggttttctccggcgccagttcaaggtggtgactcggtctcaggaagatccgaatgcttactctggagagctttttgatgcataagcacctcttttcatggagtagagtcaggagaaacccctgacaccttttcaggttggagtgcattcattcatcctcttatatgtgccccttccccatgctcagctcagcattgtgtacaaaatatccaagcccagcctatctctcttctgcgtgggagtatgttatttctctggggtctgtgatggggaagggtggatgtcccttccccacaataggcttagtgcttggctcagacacctagactctaaaactatcagcagcggcagcagcagcagcagcagcagtttgtgatctgtccttccaacctgttcacgtgactcctcaattccagggaaccagagcgatgtgttctttgtacctgtaggtctatgatgtccaaacttaacagatcacatgcccctcttagaagaaatatgagcatgctccctcatgcagatagtatacacatcataaacaaagagtagaactttaaaagaaggtaaataatcatacacagaaatcctaacattatattcccaaatctcaaaagatctcctgtgcacctgactttggagacgatgctttaggtaaaaagcttaaacattgccttatattggatcaggaacccttacagtagagggtccagtcttctagtgggtttaatgtttagtcagtgtactctgagtcctcattgttcagaaaagcacctcttgaagaactgacttcctgaactcccagtcatgttggtaccctggacagtgcctaactccttacagaagggagtgaaaacctctttcggaaatgattgagagcagcctcttgaatgcttaaatgatcaaggagggagaaaggcaaaccaatttgttctgtgcaacaaactcaaaatgtggaccagttccctcagccctcattaaactaattaaactgatgggtatcatgcttctactccatggtgaactgaagcagagtcaagctgatgaagttaagcacaaccatgttcttgagcagctgaattggctgccaagagtccaagccatctggcccaacatacgcactgggcattgggtaagggactccagaagcagcagctagaaagagaaaaagccctcttcaatccccataatgcttctttcctcttaatgtctcaaaataaaaccagaaagaggaataaaatgattaagtgcttgaggccaaatgagttcccttgattcaaataaccctgaatcagaggcagagacctcctgatgtcttggtttccatcaaagccctccctgtctgtctgtctctcttttgctctctcattcccaggcactctcttttggtttgtgggtccaggagatgaggctggataggagaggaaaaggcttgagtctggataatttgtataagatgctgctgagcacatctcttcatgcgcagtccccaggtatctgatgatgttctgaaatggatagattgttttagagttattttgtgtcctttaaaaaaatcccatttatgcaatttacttggaatttgcttagcctttaataggcttgtgtaatttcctgctcctccagtacaataaataaaagaaagatgctga

SEQ ID NO: 23634 - DNA, 2526 bp, Homo sapiens
  source 1..2526: mol_type = unassigned DNA
aaaaggggggaagaggcaccagaactgccatttgaaggggctttggtggtgttcacagctgcctctttggcacctcctcccaagccggagtcaaggaggcccctgagccttggaccagccactgccacctccgacctgctcggccagaagctgcccagggacaaagcagagtgcagcaggaattgctgagacaggatggcctggcaggggctggtcctggctgcctgcctcctcatgttcccctccaccacagcggactgcctgtcgcggtgctccttgtgtgctgtaaagacccaggatggtcccaaacctatcaatcccctgatttgctccctgcaatgccaggctgccctgctgccctctgaggaatgggagagatgccagagctttctgtcttttttcaccccctccacccttgggctcaatgacaaggaggacttggggagcaagtcggttggggaagggccctacagtgagctggccaagctctctgggtcattcctgaaggagctggagaaaagcaagtttctcccaagtatctcaacaaaggagaacactctgagcaagagcctggaggagaagctcaggggtctctctgacgggtttagggagggagcagagtctgagctgatgagggatgcccagctgaacgatggtgccatggagactggcacactctatctcgctgaggaggaccccaaggagcaggtcaaacgctatgggggctttttgcgcaaataccccaagaggagctcagaggtggctggggagggggacggggatagcatgggccatgaggacctgtacaaacgctatgggggcttcttgcggcgcattcgtcccaagctcaagtgggacaaccagaagcgctatggcggttttctccggcgccagttcaaggtggtgactcggtctcaggaagatccgaatgcttactctggagagctttttgatgcataagcacctcttttcatggagtagagtcaggagaaacccctgacaccttttcaggttggagtgcattcattcatcctcttatatgtgccccttccccatgctcagctcagcattgtgtacaaaatatccaagcccagcctatctctcttctgcgtgggagtatgttatttctctggggtctgtgatggggaagggtggatgtcccttccccacaataggcttagtgcttggctcagacacctagactctaaaactatcagcagcggcagcagcagcagcagcagcagtttgtgatctgtccttccaacctgttcacgtgactcctcaattccagggaaccagagcgatgtgttctttgtacctgtaggtctatgatgtccaaacttaacagatcacatgcccctcttagaagaaatatgagcatgctccctcatgcagatagtatacacatcataaacaaagagtagaactttaaaagaaggtaaataatcatacacagaaatcctaacattatattcccaaatctcaaaagatctcctgtgcacctgactttggagacgatgctttaggtaaaaagcttaaacattgccttatattggatcaggaacccttacagtagagggtccagtcttctagtgggtttaatgtttagtcagtgtactctgagtcctcattgttcagaaaagcacctcttgaagaactgacttcctgaactcccagtcatgttggtaccctggacagtgcctaactccttacagaagggagtgaaaacctctttcggaaatgattgagagcagcctcttgaatgcttaaatgatcaaggagggagaaaggcaaaccaatttgttctgtgcaacaaactcaaaatgtggaccagttccctcagccctcattaaactaattaaactgatgggtatcatgcttctactccatggtgaactgaagcagagtcaagctgatgaagttaagcacaaccatgttcttgagcagctgaattggctgccaagagtccaagccatctggcccaacatacgcactgggcattgggtaagggactccagaagcagcagctagaaagagaaaaagccctcttcaatccccataatgcttctttcctcttaatgtctcaaaataaaaccagaaagaggaataaaatgattaagtgcttgaggccaaatgagttcccttgattcaaataaccctgaatcagaggcagagacctcctgatgtcttggtttccatcaaagccctccctgtctgtctgtctctcttttgctctctcattcccaggcactctcttttggtttgtgggtccaggagatgaggctggataggagaggaaaaggcttgagtctggataatttgtataagatgctgctgagcacatctcttcatgcgcagtccccaggtatctgatgatgttctgaaatggatagattgttttagagttattttgtgtcctttaaaaaaatcccatttatgcaatttacttggaatttgcttagcctttaataggcttgtgtaatttcctgctcctccagtacaataaataaaagaaagatgctgatg

SEQ ID NO: 23635 - DNA, 2472 bp, Homo sapiens
  source 1..2472: mol_type = unassigned DNA
agaccagtgagagactgctctttggactctccctttctgcacagtcctggcttaaacaggtggtcatttatcttcaggctttgagatctgcgtggggggagctgttgcagcagcccaagccgcaggaattgctgagacaggatggcctggcaggggctggtcctggctgcctgcctcctcatgttcccctccaccacagcggactgcctgtcgcggtgctccttgtgtgctgtaaagacccaggatggtcccaaacctatcaatcccctgatttgctccctgcaatgccaggctgccctgctgccctctgaggaatgggagagatgccagagctttctgtcttttttcaccccctccacccttgggctcaatgacaaggaggacttggggagcaagtcggttggggaagggccctacagtgagctggccaagctctctgggtcattcctgaaggagctggagaaaagcaagtttctcccaagtatctcaacaaaggagaacactctgagcaagagcctggaggagaagctcaggggtctctctgacgggtttagggagggagcagagtctgagctgatgagggatgcccagctgaacgatggtgccatggagactggcacactctatctcgctgaggaggaccccaaggagcaggtcaaacgctatgggggctttttgcgcaaataccccaagaggagctcagaggtggctggggagggggacggggatagcatgggccatgaggacctgtacaaacgctatgggggcttcttgcggcgcattcgtcccaagctcaagtgggacaaccagaagcgctatggcggttttctccggcgccagttcaaggtggtgactcggtctcaggaagatccgaatgcttactctggagagctttttgatgcataagcacctcttttcatggagtagagtcaggagaaacccctgacaccttttcaggttggagtgcattcattcatcctcttatatgtgccccttccccatgctcagctcagcattgtgtacaaaatatccaagcccagcctatctctcttctgcgtgggagtatgttatttctctggggtctgtgatggggaagggtggatgtcccttccccacaataggcttagtgcttggctcagacacctagactctaaaactatcagcagcggcagcagcagcagcagcagcagtttgtgatctgtccttccaacctgttcacgtgactcctcaattccagggaaccagagcgatgtgttctttgtacctgtaggtctatgatgtccaaacttaacagatcacatgcccctcttagaagaaatatgagcatgctccctcatgcagatagtatacacatcataaacaaagagtagaactttaaaagaaggtaaataatcatacacagaaatcctaacattatattcccaaatctcaaaagatctcctgtgcacctgactttggagacgatgctttaggtaaaaagcttaaacattgccttatattggatcaggaacccttacagtagagggtccagtcttctagtgggtttaatgtttagtcagtgtactctgagtcctcattgttcagaaaagcacctcttgaagaactgacttcctgaactcccagtcatgttggtaccctggacagtgcctaactccttacagaagggagtgaaaacctctttcggaaatgattgagagcagcctcttgaatgcttaaatgatcaaggagggagaaaggcaaaccaatttgttctgtgcaacaaactcaaaatgtggaccagttccctcagccctcattaaactaattaaactgatgggtatcatgcttctactccatggtgaactgaagcagagtcaagctgatgaagttaagcacaaccatgttcttgagcagctgaattggctgccaagagtccaagccatctggcccaacatacgcactgggcattgggtaagggactccagaagcagcagctagaaagagaaaaagccctcttcaatccccataatgcttctttcctcttaatgtctcaaaataaaaccagaaagaggaataaaatgattaagtgcttgaggccaaatgagttcccttgattcaaataaccctgaatcagaggcagagacctcctgatgtcttggtttccatcaaagccctccctgtctgtctgtctctcttttgctctctcattcccaggcactctcttttggtttgtgggtccaggagatgaggctggataggagaggaaaaggcttgagtctggataatttgtataagatgctgctgagcacatctcttcatgcgcagtccccaggtatctgatgatgttctgaaatggatagattgttttagagttattttgtgtcctttaaaaaaatcccatttatgcaatttacttggaatttgcttagcctttaataggcttgtgtaatttcctgctcctccagtacaataaataaaagaaagatgctgatg

SEQ ID NO: 23636 - DNA, 1199 bp, Homo sapiens
  source 1..1199: mol_type = unassigned DNA
cggcgagggtcctgccgagggaccccgttctgcgcccaggcaggctcgaagcacgcgtccctctctcctcgcagtccatggcgcggttcctgacactttgcacttggctgctgttgctcggccccgggctcctggcgaccgtgcgggccgaatgcagccaggattgcgcgacgtgcagctaccgcctagtgcgcccggccgacatcaacttcctggcttgcgtaatggaatgtgaaggtaaactgccttctctgaaaatttgggaaacctgcaaggagctcctgcagctgtccaaaccagagcttcctcaagatggcaccagcaccctcagagaaaatagcaaaccggaagaaagccatttgctagccaaaaggtatgggggcttcatgaaaaggtatggaggcttcatgaagaaaatggatgagctttatcccatggagccagaagaagaggccaatggaagtgagatcctcgccaagcggtatgggggcttcatgaagaaggatgcagaggaggacgactcgctggccaattcctcagacctgctaaaagagcttctggaaacaggggacaaccgagagcgtagccaccaccaggatggcagtgataatgaggaagaagtgagcaagagatatgggggcttcatgagaggcttaaagagaagcccccaactggaagatgaagccaaagagctgcagaagcgatatgggggcttcatgagaagagtaggtcgcccagagtggtggatggactaccagaaacggtatggaggtttcctgaagcgctttgccgaggctctgccctccgacgaagaaggcgaaagttactccaaagaagttcctgaaatggaaaaaagatacggaggatttatgagattttaatatcttttcccactagtggccccaggccccagcaagcctccctccatcctccagtgggaaactgttgatggtgttttattgtcatgtgttgcttgccttgtatagttgacttcattgtctggataactatacaacctgaaaactgtcatttcaggttctgtgctctttttggagtctttaagctcagtattagtctattgcagctatctcgttttcatgctaaaatagtttttgttatcttgtctcttatttttgacaaacatcaataaatgcttacttgtatatagagataataaacctattaccccaagtgcataa

SEQ ID NO: 23637 - DNA, 1029 bp, Homo sapiens
  source 1..1029: mol_type = unassigned DNA
ctgcgtcagctgcagcccgccggcgattggggcgcgcgcgcctccttcggtttggggctaattataaagtggctccagcagccgttaagccccgggacggcgaggcaggcgctcagagccccgcagcctggcccgtgaccccgcagagacgctgaggaccgcgacgagtcgtgtctgaacccggcttttccaattggcctgctccatccgaacagcgtcaactccatggcgcggttcctgacactttgcacttggctgctgttgctcggccccgggctcctggcgaccgtgcgggccgaatgcagccaggattgcgcgacgtgcagctaccgcctagtgcgcccggccgacatcaacttcctggcttgcgtaatggaatgtgaaggtaaactgccttctctgaaaatttgggaaacctgcaaggagctcctgcagctgtccaaaccagagcttcctcaagatggcaccagcaccctcagagaaaatagcaaaccggaagaaagccatttgctagccaaaaggtatgggggcttcatgaaaaggtatggaggcttcatgaagaaaatggatgagctttatcccatggagccagaagaagaggccaatggaagtgagatcctcgccaagcggtatgggggcttcatgaagaaggatgcagaggaggacgactcgctggccaattcctcagacctgctaaaagagcttctggaaacaggggacaaccgagagcgtagccaccaccaggatggcagtgataatgaggaagaagtgagcaagagatatgggggcttcatgagaggcttaaagagaagcccccaactggaagatgaagccaaagagctgcagaagcgatatgggggcttcatgagaagagtaggtcgcccagagtggtggatggactaccagaaacggtatggaggtttcctgaagcgctttgccgaggctctgccctccgacgaagaaggcgaaagttactccaaagaagttcctgaaatggaaaaaagatacggaggatttatgagattttaa

SEQ ID NO: 23638 - DNA, 467 bp, Homo sapiens
  source 1..467: mol_type = unassigned DNA
gacggtgaggccctacgtccgccagcacacccgggcccgcttctccccgacgcccgccctcctcacacttgccttcttctcttccctctagagtcgtgtctgaacccggcttttccaattggcctgctccatccgaacagcgtcaactccatggcgcggttcctgacactttgcacttggctgctgttgctcggccccgggctcctggcgaccgtgcgggccgaatgcagccaggattgcgcgacgtgcagctaccgcctagtgcgcccggccgacatcaacttcctggcttgcgtaatggaatgtgaaggtaaactgccttctctgaaaatttgggaaacctgcaaggagctcctgcagctgtccaaaccagagcttcctcaagatggcaccagcaccctcagagaaaatagcaaaccggaagaaagccatttgctagccaaaaggtatgggggcttcatgaaaag

SEQ ID NO: 23639 - DNA, 781 bp, Homo sapiens
  source 1..781: mol_type = unassigned DNA
gcagcccgccggcgattggggcgcgcgcgcctccttcggtttggggctaattataaagtggctccagcagccgttaagccccgggacggcgaggcaggcgctcagagccccgcagcctggcccgtgaccccgcagagacgctgaggaccgcgacgagtcgtgtctgaacccggcttttccaattggcctgctccatccgaacagcgtcaactccatggcgcggttcctgacactttgcacttggctgctgttgctcggccccgggctcctggcgaccgtgcgggccgaatgcagccaggattgcgcgacgtgcagctaccgcctagtgcgcccggccgacatcaacttcctggcttgcgtaatggaatgtgaaggtaaactgccttctctgaaaatttgggaaacctgcaaggagctcctgcagctgtccaaaccagagcttcctcaagatggcaccagcaccctcagagaaaatagcaaaccggaagaaagccatttgctagccaaaaggtatgggggcttcatgaaaaggtatggaggcttcatgaagaaaatggatgagctttatcccatggagccagaagaagaggccaatggaagtgagatcctcgccaagcggtatgggggcttcatgaagaaggatgcagaggaggacgactcgctggccaattcctcagacctgctaaaagagcttctggaaacaggggacaaccgagagcgtagccaccaccaggatggcagtgataatgaggaagaaaaaaaaaaaaaaaaaagaaaagaa

SEQ ID NO: 23640 - DNA, 2261 bp, Homo sapiens
  source 1..2261: mol_type = unassigned DNA
gccgctggtttgtcagccccgcggctgcgggcggccgggcggccgagcgcgctctgaggttcgtccctcatcgctgaacccgcgtcctcccgccgcagctcctcggggaggggggcggtcggtgcctgcgcagagccgcctcctccccgcccccgccccgcctccccccgcgccgccgccgcccgctaccgccgccgccgccgctgcgcctgctgctcctcgccgtccgcgctgcagtgcgaagggctcgaagatggccggttggcagagctacgtggataacctgatgtgcgatggctgctgccaggaggccgccattgtcggctactgcgacgccaaatacgtctgggcagccacggccgggggcgtctttcagagcattacgccaatagaaatagatatgattgtaggaaaagaccgggaaggtttctttaccaacggtttgactcttggcgcgaagaaatgctcagtgatcagagatagtctatacgtcgatggtgactgcacaatggacatccggacaaagagtcaaggtggggagccaacatacaatgtggctgtcggcagagctggtagagtcttggtctttgtaatgggaaaagaaggggtccatggaggcggattgaataagaaggcatactcaatggcaaaatacttgagagactctgggttctagctgctaggcagactgttaagtattaggggaaaattgctcttaaactttcctagctataagcttaagtcttaattctggaaattttattagcaatgcagggtgatggggtatgaacctgtgtctcctttgtatccctctgttggtggggaaaggtgtctttctttctgccctccccccccaaaataattctgttcacttttgttttgtttccttgtgtactccagcattggttatagtcatgggaaaggaaggtgtccacggaggcacacttaacaagaaagcatatgaactcgctttatacctgaggaggtctgatgtgtaagcagcctctccccatctacctagcaactgtcttcatcaacaaccctaattatggtcacaatgctaccaaactgtagatggtagctaatttttctttacctattttctaatgtcatgattcctgtttgcccaatggatcatttgtatgttaaccactgtatgtaaccaacccttatctggcaacataattgcagcacaataatgatttgcatgataccttgaaattggggggagggggcatgccaagttgggcatcactttgtcttagcaattaatgggatattgattactaaaataagttaatattaagcaaggtgccggttgtacaatctctgatcagtgtcttttcagcactttgagcatttacttggctcatttagtcttccttttgtagcgcatggttgggaggaaaaagtgcatgcatcattccttcactcttctctttttcccgccccccctcccttcgcacataggcatttggtttgcttccatctttttttatgcagtgcctgtttttttttaaccaattaaaatcccttttgttgatgagctattgagagctgcagtagtttgcttttagtattgttgttgcacttgagcagagacaaacctttattcatagtgtctacaggacatatgaagagtgcaatggcaaaacaagagcaaaaagcacttcctcccatgaccttacagtaaccatactgattgaatccccagggacattccatcattgcaatagctcagatttttcttcctttttctttgcacaccagctctactctttagtaaaattgtaaaaggctgccattatggacattaggtatcccaacataaccatctggagtgtgtccagtttgttcttcataggaccaatttttatttgcagcttgagtttttatatgaagttgcattattgtggacttggctgtcttgtgatgaatttttttcatatgtattctgtgccatactattgttaaaatgaactgttgctattgtgagatggattttaactgacctattaagggtttctttcgaatggcactactttagggacattctagtatttgcttctattgtttgggccttgtggataatgtacagatttaaaaacaaatcttgttgctgatttgtccatttctttccctgcactttgttacatctgggatacagtctaactcatctgatttaatatgcatttaaaaaaatgccataactattaaacaccttgtttacagacagatgaaataaatttattccaaccaaa

SEQ ID NO: 23641 - DNA, 1780 bp, Homo sapiens
  source 1..1780: mol_type = unassigned DNA
gcctccccccgcgccgccgccgcccgctaccgccgccgccgccgctgcgcctgctgctcctcgccgtccgcgctgcagtgcgaagggctcgaagatggccggttggcagagctacgtggataacctgatgtgcgatggctgctgccaggaggccgccattgtcggctactgcgacgccaaatacgtctgggcagccacggccgggggcgtctttcagagcattacgccaatagaaatagatatgattgtaggaaaagaccgggaaggtttctttaccaacggtttgactcttggcgcgaagaaatgctcagtgatcagagatagtctatacgtcgatggtgactgcacaatggacatccggacaaagagtcaaggtggggagccaacatacaatgtggctgtcggcagagctggtagagcattggttatagtcatgggaaaggaaggtgtccacggaggcacacttaacaagaaagcatatgaactcgctttatacctgaggaggtctgatgtgtaagcagcctctccccatctacctagcaactgtcttcatcaacaaccctaattatggtcacaatgctaccaaactgtagatggtagctaatttttctttacctattttctaatgtcatgattcctgtttgcccaatggatcatttgtatgttaaccactgtatgtaaccaacccttatctggcaacataattgcagcacaataatgatttgcatgataccttgaaattggggggagggggcatgccaagttgggcatcactttgtcttagcaattaatgggatattgattactaaaataagttaatattaagcaaggtgccggttgtacaatctctgatcagtgtcttttcagcactttgagcatttacttggctcatttagtcttccttttgtagcgcatggttgggaggaaaaagtgcatgcatcattccttcactcttctctttttcccgccccccctcccttcgcacataggcatttggtttgcttccatctttttttatgcagtgcctgtttttttttaaccaattaaaatcccttttgttgatgagctattgagagctgcagtagtttgcttttagtattgttgttgcacttgagcagagacaaacctttattcatagtgtctacaggacatatgaagagtgcaatggcaaaacaagagcaaaaagcacttcctcccatgaccttacagtaaccatactgattgaatccccagggacattccatcattgcaatagctcagatttttcttcctttttctttgcacaccagctctactctttagtaaaattgtaaaaggctgccattatggacattaggtatcccaacataaccatctggagtgtgtccagtttgttcttcataggaccaatttttatttgcagcttgagtttttatatgaagttgcattattgtggacttggctgtcttgtgatgaatttttttcatatgtattctgtgccatactattgttaaaatgaactgttgctattgtgagatggattttaactgacctattaagggtttctttcgaatggcactactttagggacattctagtatttgcttctattgtttgggccttgtggataatgtacagatttaaaaacaaatcttgttgctgatttgtccatttctttccctgcactttgttacatctgggatacagtctaactcatctgatttaatatgcatttaaaaaaatgccataactattaaacaccttgtttacagacagatgaaataaatttattccaaccaaa

SEQ ID NO: 23642 - DNA, 530 bp, Homo sapiens
  source 1..530: mol_type = unassigned DNA
cgcgtggcgcctctatatttccccgagaggtgcgaggcggctgggcgcactcggagcgcgatgggcgactggaaggtctacatcagtgcagtgctgcgggaccagcgcatcgacgacgtggccatcgtgggccatgcggacaacagctgcgtgtgggcttcgcggcccgggggcctgctggcggccatctcgccgcaggaggtgggcgtgctcacggggccggacaggcacaccttcctgcaggcgggcctgagcgtggggggccgccgctgctgcgtcatccgcgaccacctgctggccgagggtgacggcgtgctggacgcacgcaccaaggggctggacgcgcgcgccgtgtgcgtgggccgtgcgccgcgcgcgctcctggtgctaatgggccgacgcggcgtacatgggggcatcctcaacaagacggtgcacgaactcatacgcgggctgcgcatgcagggcgcctagccggccagccaggccgcccactggtagcgcgggccaaataaactgtgacctgggcg

SEQ ID NO: 23643 - DNA, 1371 bp, Homo sapiens
  source 1..1371: mol_type = unassigned DNA
actccactgcgactgcagaactcagagctgctcttcctctgtggccagttggggaccagcatcatgaagtggatggtggtggtcttggtctgcctccagctcttggaggcagcagtggtcaaagtgcccctgaagaaatttaagtctatccgtgagaccatgaaggagaagggcttgctgggggagttcctgaggacccacaagtatgatcctgcttggaagtaccgctttggtgacctcagcgtgacctacgagcccatggcctacatggatgctgcctactttggtgagatcagcatcgggactccaccccagaacttcctggtcctttttgacaccggctcctccaacttgtgggtgccctctgtctactgccagagccaggcctgcaccagtcactcccgcttcaaccccagcgagtcgtccacctactccaccaatgggcagaccttctccctgcagtatggcagtggcagcctcaccggcttctttggctatgacaccctgactgtccagagcatccaggtccccaaccaggagttcggcttgagtgagaatgagcctggtaccaacttcgtctatgcgcagtttgatggcatcatgggcctggcctaccctgctctgtccgtggatgaggccaccacagctatgcagggcatggtgcaggagggcgccctcaccagccccgtcttcagcgtctacctcagcaaccagcagggctccagcgggggagcggttgtctttgggggtgtggatagcagcctgtacacggggcagatctactgggcgcctgtcacccaggaactctactggcagattggcattgaagagttcctcatcggcggccaggcctccggctggtgttctgagggttgccaggccatcgtggacacaggcacctctctgctcactgtgccccagcagtacatgagtgctcttctgcaggccacaggggcccaggaggatgagtatggacagtttctcgtgaactgtaacagcattcagaatctgcccagcttgaccttcatcatcaatggtgtggagttccctctgccaccttcctcctatatcctcagtaacaacggctactgcaccgtgggagtcgagcccacctacctgtcctcccagaacggccagcccctgtggatcctcggggatgtcttcctcaggtcctactattccgtctacgacttgggcaacaacagagtaggctttgccactgccgcctagacttgctgcctcgacacgtgggctcccctcttcctcttgaccctgcaccctcctagggcattgtatctgtctttccactctggattcagccttctttttctggactctggactttctctaataataaatagttcttcttta

SEQ ID NO: 23644 - DNA, 382 bp, Homo sapiens
  source 1..382: mol_type = unassigned DNA
cttcactccactgcgactgcagaactcagagctgctcttcctctgtggccagttggggaccagcatcatgaagtggatggtggtggtcttggtctgcctccagctcttggaggcagcagtggtcaaagtgcccctgaagaaatttaagtctatccgtgagaccatgaaggagaagggcttgctgggggagttcctgaggacccacaagtatgatcctgcttggaagtaccgctttggtgacctcagcgtgacctacgagcccatggcctacatggatgctgcctactttggtgagatcagcatcgggactccaccccagaacttcctggtcctttttgacaccggctcctcccctcttcctcttgaccctgcaccctcctag

SEQ ID NO: 23645 - DNA, 1137 bp, Homo sapiens
  source 1..1137: mol_type = unassigned DNA
cttcactccactgcgactgcagaactcagagctgctcttcctctgtggccagttggggaccagcatcatgaagtggatggtggtggtcttggtctgcctccagctcttggaggcagcagtggtcaaagtgcccctgaagaaatttaagtctatccgtgagaccatgaaggagaagggcttgctgggggagttcctgaggacccacaagtatgatcctgcttggaagtaccgctttggtgacctcagcgtgacctacgagcccatggcctacatggatgtccagagcatccaggtccccaaccaggagttcggcttgagtgagaatgagcctggtaccaacttcgtctatgcgcagtttgatggcatcatgggcctggcctaccctgctctgtccgtggatgaggccaccacagctatgcagggcatggtgcaggagggcgccctcaccagccccgtcttcagcgtctacctcagcaaccagcagggctccagcgggggagcggttgtctttgggggtgtggatagcagcctgtacacggggcagatctactgggcgcctgtcacccaggaactctactggcagattggcattgaagagttcctcatcggcggccaggcctccggctggtgttctgagggttgccaggccatcgtggacacaggcacctctctgctcactgtgccccagcagtacatgagtgctcttctgcaggccacaggggcccaggaggatgagtatggacagtttctcgtgaactgtaacagcattcagaatctgcccagcttgaccttcatcatcaatggtgtggagttccctctgccaccttcctcctatatcctcagtaacaacggctactgcaccgtgggagtcgagcccacctacctgtcctcccagaacggccagcccctgtggatcctcggggatgtcttcctcaggtcctactattccgtctacgacttgggcaacaacagagtaggctttgccactgccgcctagacttgctgcctcgacacgtgggctcccctcttcctcttgaccctgcaccctcctagggcattgtatctgtctttccactctggattcagccttctttttctggactctggactttctctaataataaatagttcttcttt

SEQ ID NO: 23646 - DNA, 1152 bp, Homo sapiens
  source 1..1152: mol_type = unassigned DNA
cttcactccactgcgactgcagaactcagagctgctcttcctctgtggccagttggggaccagcatcatgaagtggatggtggtggtcttggtctgcctccagctcttggaggcagcagtggtcaaagtgcccctgaagaaatttaagtctatccgtgagaccatgaaggagaagggcttgctgggggagttcctgaggacccacaagtatgatcctgcttggaagtaccgctttggtgacctcagcgtgacctacgagcccatggcctacatggatgctgcctactttggtgagatcagcatcgggactccaccccagaacttcctggtcctttttgacaccggctcctccaacttgtgggtgccctctgtctactgccagagccaggcctgcaccagtcactcccgcttcaaccccagcgagtcgtccacctactccaccaatgggcagaccttctccctgcagtatggcagtggcagcctcaccggcttctttggctatgacaccctgactgtccagagcatccaggtccccaaccaggagttcggcttgagtgagaatgagcctggtaccaacttcgtctatgcgcagtttgatggcatcatgggcctggcctaccctgctctgtccgtggatgaggccaccacagctatgcagggcatggtgcaggagggcgccctcaccagccccgtcttcagcgtctacctcagcaacctggtcctggagtcttctggtctaggtccactgctgacccctagcagagcagctccacccagctccacactccagctaccagagaagcctctggaacaaacatggaatatccttacccccttcaccaagaccctacctgtctccaatctcagcagaaaagtaacaagctgggccggggtggggatcccggtgacatgtctaccagaggcaggaagcggaggggagaggagagcagagtgtgggctgggggtcccaaccactaggggaccccccagaagtcagcatcattcgggagcctgaggcgctgggaattccaaggcctggccagaaagccccagtctaagggacgcatcccagtccccagggagccccaatctaagggatacagccccatcctcagggagccccagtctgagggagacacagactcgtcctca

SEQ ID NO: 23647 - DNA, 821 bp, Homo sapiens
  source 1..821: mol_type = unassigned DNA
ctcagagccacccacagccgcagccatgctgtgcctcctgctcaccctgggcgtggccctggtctgtggtgtcccggccatggacatcccccagaccaagcaggacctggagctcccaaagttggcagggacctggcactccatggccatggcgaccaacaacatctccctcatggcgacactgaaggcccctctgagggtccacatcacctcactgttgcccacccccgaggacaacctggagatcgttctgcacagatgggagaacaacagctgtgttgagaagaaggtccttggagagaagactgagaatccaaagaagttcaagatcaactatacggtggcgaacgaggccacgctgctcgatactgactacgacaatttcctgtttctctgcctacaggacaccaccacccccatccagagcatgatgtgccagtacctggccagagtcctggtggaggacgatgagatcatgcagggattcatcagggctttcaggcccctgcccaggcacctatggtacttgctggacttgaaacagatggaagagccgtgccgtttctaggtgagctcctgcctggtcctgcctcctggctcacctccgcctccaggaagaccagactcccacccttccacacctccagagcagtgggacttcctcctgccctttcaaagaataaccacagctcagaagacgatgacgtggtcatctgtgtcgccatccccttcctgctgcacacctgcaccacggccatggggaggctgctccctgggggcagagtctctggcagaggttattaataaacccttggagcatg

SEQ ID NO: 23648 - DNA, 302 bp, Homo sapiens
  source 1..302: mol_type = unassigned DNA
catccctctggctccagagctcagagccacccacagccgcagccatgctgtgcctcctgctcaccctgggcgtggccctggtctgtggtgtcccggccatggacatcccccagaccaagcaggacctggagctcccaaaggacaccaccacccccatccagagcatgatgtgccagtacctggccagagtcctggtggaggacgatgagatcatgcagggattcatcagggctttcaggcccctgcccaggcacctatggtacttgctggacttgaaacagatggaagccccctgctggctc

SEQ ID NO: 23649 - DNA, 850 bp, Homo sapiens
  source 1..850: mol_type = unassigned DNA
ggctccagagctcagagccacccacagccgcagccatgctgtgcctcctgctcaccctgggcgtggccctggtctgtggtgtcccggccatggacatcccccagaccaagcaggacctggagctcccaaagttggcagggacctggcactccatggccatggcgaccaacaacatctccctcatggcgacactgaaggcccctctgagggtccacatcacctcactgttgcccacccccgaggacaacctggagatcgttctgcacagatgggagaacaacagctgtgttgagaagaaggtccttggagagaagactgagaatccaaagaagttcaagatcaactatacggtggcgaacgaggccacgctgctcgatactgactacgacaatttcctgtttctctgcctacaggacaccaccacccccatccagagcatgatgtgccagtacctggccagagtcctggtggaggacgatgagatcatgcagggattcatcagggctttcaggcccctgcccaggcacctatggtacttgctggacttgaaacagatggaagagccgtgccgtttctaggtgagctcctgcctggtcctgcctcctggtgacctgtaaacccaacagctcacctccgcctccaggaagaccagactcccacccttccacacctccagagcagtgggacttcctcctgccctttcaaagaataaccacagctcagaagacgatgacgtggtcatctgtgtcgccatccccttcctgctgcacacctgcaccacggccatggggaggctgctccctgggggcagagtctctggcagaggttattaataaacccttggagcatg

SEQ ID NO: 23650 - DNA, 735 bp, Homo sapiens
  source 1..735: mol_type = unassigned DNA
catccctctggctccagagctcagagccacccacagccgcagccatgctgtgcctcctgctcaccctgggcgtggccctggtctgtggtgtcccggccatggacatcccccagaccaagcaggacctggagctcccaaaggcccctctgagggtccacatcacctcactgttgcccacccccgaggacaacctggagatcgttctgcacagatgggagaacaacagctgtgttgagaagaaggtccttggagagaagactgagaatccaaagaagttcaagatcaactgcaaggcctctggagctccccagctctcatggaagccccaggggcccaggactgacccagcctcttccacagccagagtcctggtggaggacgatgagatcatgcagggattcatcagggctttcaggcccctgcccaggcacctatggtacttgctggacttgaaacagatggaagagccgtgccgtttctaggtgagctcctgcctggtcctgcctcctggctcacctccgcctccaggaagaccagactcccacccttccacacctccagagcagtgggacttcctcctgccctttcaaagaataaccacagctcagaagacgatgacgtggtcatctgtgtcgccatccccttcctgctgcacacctgcaccacggccatggggaggctgctccctgggggcagagtctctggcagaggttattaataaacccttggagcatg

SEQ ID NO: 23651 - DNA, 465 bp, Homo sapiens
  source 1..465: mol_type = unassigned DNA
ctcatggcgacactgaaggcccctctgagggtccacatcacctcactgttgcccacccccgaggacaacctggagatcgttctgcacagatgggagaacaacagctgtgttgagaagaaggtccttggagagaagactgagaatccaaagaagttcaagatcaactatacggtggcgaacgaggccacgctgctcgatactgactacgacaatttcctgtttctctgcctacaggacaccaccacccccatccagagcatgatgtgccagtacctggccagagtcctggtggaggacgatgagatcatgcagggattcatcagggctttcaggcccctgcccaggcacctatggtacttgctggacttgaaacagatggaagagccgtgccgtttctaggtgagctcctgcctggtcctgcctcctggatggagtctcgctctgtcaccaggctggagtgcagtg

SEQ ID NO: 23652 - DNA, 826 bp, Homo sapiens
  source 1..826: mol_type = unassigned DNA
tgtcccggccatggacatcccccagaccaagcaggacctggagctcccaaaggcccctctgagggtccacatcacctcactgttgcccacccccgaggacaacctggagatcgttctgcacagatgggagaacaacagctgtgttgagaagaaggtccttggagagaagactgagaatccaaagaagttcaagatcaactgcaaggcctctggagctccccagctctcatggaagccccaggggcccaggactgacccagcctcttccacagccagagtcctggtggaggacgatgagatcatgcagggattcatcagggctttcaggcccctgcccaggcacctatggtacttgctggacttgaaacagatggaagagccgtgccgtttctaggtgagctcctgcctggtcctgcctcctggctcacctccgcctccaggaagaccagactcccacccttccacacctccagagcagtgggacttcctcctgccctttcaaagaataaccacagctcagaagacgatgacgtggtcatctgtgtcgccatccccttcctgctgcacacctgcaccacggccatggggaggctgctccctgggggcagagtctctggcagaggttattaataaacccttggagcatgtcctgtctggatgcgcagccactgctgggtgtgggattcagggacgagggcctggggtcggggcaggcccaggccaccgcctggcagaaccggagctcctacagacccatgggcagcttctggtggagaaaatacctcaagtttcttatctacaaaacaaaagggtccactttcacaaa

SEQ ID NO: 23653 - DNA, 629 bp, Homo sapiens
  source 1..629: mol_type = unassigned DNA
ccctctgagggtccacatcacctcactgttgcccacccccgaggacaacctggagatcgttctgcacagatgggagaacaacagctgtgttgagaagaaggtccttggagagaagactgagaatccaaagaagttcaagatcaactatacggtggcgaacgaggccacgctgctcgatactgactacgacaatttcctgtttctctgcctacaggacaccaccacccccatccagagcatgatgtgccagtacctggccagagtcctggtggaggacgatgagatcatgcagggattcatcagggctttcaggcccctgcccaggcacctatggtacttgctggacttgaaacagatggaagagccgtgccgtttctagtgacctgtaaacccaacagctcacctccgcctccaggaagaccagactcccacccttccacacctccagagcagtgggacttcctcctgccctttcaaagaataaccacagctcagaagacgatgacgtggtcatctgtgtcgccatccccttcctgctgcacacctgcaccacggccatggggaggctgctccctgggggcagagtctctggcagaggttattaataaacccttggagcatgtcctgtc

SEQ ID NO: 23654 - DNA, 575 bp, Homo sapiens
  source 1..575: mol_type = unassigned DNA
tgagatcatgcagggattcatcagggctttcaggcccctgcccaggcacctatggtacttgctggacttgaaacagatggaagagccgtgccgtttctagatggagtctcgctctgtcaccaggctggagtgcagtggcacaatctcagctcactgcaacctcgacctcctgggttcaagcgattctcctgcctcaaccccccgagttgctggaaccacaggcgtgtgccaccatgcccagctaatttttgtatttttaatagaaacggggtttcaccatgttggccacgatggtctcaatctcttgacctcatgatccccccgctttagcctcccaaagtgctgggatttcagtgccacattcttaagggggtgtcctcaagcccaccacatccttccagggctcccccgaaacaccctgctcttcctccctctacttaagtgacctgtaaacccaacagctcacctccgcctccaggaagaccagactcccacccttccacacctccagagcagtgggacttcctcctgccctttcaaagaataaccacagctcagaagacgatgacgtggtc

SEQ ID NO: 23655 - DNA, 990 bp, Homo sapiens
  source 1..990: mol_type = unassigned DNA
catccctctggctccagagctcagagccacccacagccgcagccatgctgtgcctcctgctcaccctgggcgtggccctggtctgtggtgtcccggccatggacatcccccagaccaagcaggacctggagctcccaaagttggcagggacctggcactccatggccatggcgaccaacaacatctccctcatggcgacactgaaggcccctctgagggtccacatcacctcactgttgcccacccccgaggacaacctggagatcgttctgcacagatgggagaacaacagctgtgttgagaagaaggtccttggagagaagactgagaatccaaagaagttcaagatcaactatacggtggcgaacgaggccacgctgctcgatactgactacgacaatttcctgtttctctgcctacaggacaccaccacccccatccagagcatgatgtgccagtacctggccagagtcctggtggaggacgatgagatcatgcagggattcatcagggctttcaggcccctgcccaggcacctatggtacttgctggacttgaaacagatggaagagccgtgccgtttctagctcacctccgcctccaggaagaccagactcccacccttccacacctccagagcagtgggacttcctcctgccctttcaaagaataaccacagctcagaagacgatgacgtggtcatctgtgtcgccatccccttcctgctgcacacctgcaccacggccatggggaggctgctccctgggggcagagtctctggcagaggttattaataaacccttggagcatgtcctgtctggatgcgcagccactgctgggtgtgggattcagggacgagggcctggggtcggggcaggcccaggccaccgcctggcagaaccggagctcctacagacccatgggcagcttctggtggagaaaatacctcaagtttcttatctacaaaacaaaagggtccactttcacaaa

SEQ ID NO: 23656 - DNA, 838 bp, Homo sapiens
  source 1..838: mol_type = unassigned DNA
agcatccctctggctccagagctcagagccacccacagccgcagccatgctgtgcctcctgctcaccctgggcgtggccctggtctgtggtgtcccggccatggacatcccccagaccaagcaggacctggagctcccaaagttggcagggacctggcactccatggccatggcgaccaacaacatctccctcatggcgacactgaaggcccctctgagggtccacatcacctcactgttgcccacccccgaggacaacctggagatcgttctgcacagatgggagaacaacagctgtgttgagaagaaggtccttggagagaagactgagaatccaaagaagttcaagatcaactatacggtggcgaacgaggccacgctgctcgatactgactacgacaatttcctgtttctctgcctacaggacaccaccacccccatccagagcatgatgtgccagtacctggagtcctggtggaggacgatgagatcatgcagggattcatcagggctttcaggcccctgcccaggcacctatggtacttgctggacttgaaacagatggaagagccgtgccgtttctaggtgagctcctgcctggtcctgcctcctggctcacctccgcctccaggaagaccagactcccacccttccacacctccagagcagtgggacttcctcctgccctttcaaagaataaccacagctcagaagacgatgacgtggtcatctgtgtcgccatccccttcctgctgcacacctgcaccacggccatggggaggctgctccctgggggcagagtctctggcagaggttattaataaacccttggagcatg

SEQ ID NO: 23657 - DNA, 3146 bp, Homo sapiens
  source 1..3146: mol_type = unassigned DNA
gtggcctaggcggggcttccttctggacgccacctcacaacgtgtgttgctttccgctcctcggaacatccgggagagttgacttccggcggcttgtgggagtgctggttctgtcctccttgcgggtgcggagatggttgtcttggttacgggtcctaacggtcccctgccttgaaatcccttgttgagggcctgcaaccttgtgcttccgaccggagacgcctttggtccctcggtgtctgcactggctgctggtcaaggcttcagtgtggagtaattgacactttcgagaatattaaaatcaaattagagaagaaaactgatccataataataaaaatgtctcgaaaaatttcaaaggagtcaaaaaaagtgaacatctctagttctctggaatctgaagatattagtttagaaacaacagttcctacggatgatatttcctcatcagaagagcgagagggcaaagtcagaatcaccaggcagctaattgaacgaaaagaactacttcataatattcagttactaaaaattgagctatcccagaaaactatgatgatcgacaatttgaaagtggattatcttacaaagattgaagaattggaggagaaacttaatgatgcacttcaccagaagcagctactaacattgagattagacaaccaattggcttttcaacagaaagatgccagcaaatatcaagaattaatgaaacaagaaatggaaaccattttgttgagacagaaacaactagaagagacaaatcttcagctaagagaaaaagctggagatgttcgtcgaaacctgcgtgactttgagttgacagaagagcaatatattaaattaaaagcttttcctgaagatcagctttctattcctgaatatgtatctgttcgcttctatgagctagtgaatccattaagaaaggaaatctgtgaactacaagtgaaaaagaatatcctagcagaagaattaagtacaaacaaaaaccaactgaagcagctgacagagacatatgaggaagatcgaaaaaactactctgaagttcaaattagatgtcaacgtttggccttagaattagcagacacaaaacagttaattcagcaaggtgactaccgtcaagagaactatgataaagtcaagagtgaacgtgatgcacttgaacaggaagtaattgagcttaggagaaaacatgaaatacttgaagcctctcacatgattcaaacaaaagaacgaagtgaattatcaaaagaggtagtcaccttagagcaaactgttactttactgcaaaaggataaagaatatcttaatcgccaaaacatggagcttagtgttcgctgtgctcatgaagaggatcgccttgaaagacttcaagctcaactggaagaaagcaaaaaggctagagaagagatgtatgaaaaatatgtagcatccagagaccattataaaacagaatatgaaaataaactacatgatgaactagaacaaatcagattgaaaaccaaccaagaaattgatcaacttcgaaatgcctctagggaaatgtatgaacgagaaaacagaaatctccgagaagcaagggataatgctgtggctgaaaaggaacgagcagtgatggctgaaaaggatgctttagaaaaacacgatcagctcttagacaggtacagagaactacaacttagtacagaaagcaaagtaacagaatttctccatcaaagtaaattaaaatcttttgaaagtgagcgtgttcaacttctgcaagaggaaacagcaagaaatctcacacagtgtcaattggaatgtgaaaaatatcagaaaaaattggaggttttaaccaaagaattttatagtctccaagcctcttctgaaaaacgcattactgaacttcaagcacagaactcagagcatcaagcaaggctagacatttatgagaaactggaaaaagagcttgatgaaataataatgcaaactgcagaaattgaaaatgaagatgaggctgaaagggttcttttttcctacggctatggtgctaatgttcccacaacagccaaaagacgactaaagcaaagtgttcacttggcaagaagagtgcttcaattagaaaaacaaaactcgctgattttaaaagatctggaacatcgaaaggaccaagtaacacagctttcacaagagcttgacagagccaattcgctattaaaccagactcaacagccttacaggtatctcattgaatcagtgcgtcagagagattctaagattgattcactgacggaatctattgcacaacttgagaaagatgtcagcaacttaaataaagaaaagtcagctttactacagacgaagaatcaaatggcattagatttagaacaacttctaaatcatcgtgaggaattggcagcaatgaaacagattctcgttaagatgcatagtaaacattctgagaacagcttacttctcactaaaacagaaccaaaacatgtgacagaaaatcagaaatcaaagactttgaatgtgcctaaagagcatgaagacaatatatttacacctaaaccaacactctttactaaaaaagaagcacctgagtggtctaagaaacaaaagatgaagacctagtgttttggatgggaagcacctgtagaccattatatactcctgaagttctttttctgatggaaaacaaaattcagcttaatcgtgtactcagcattttttaaataacaatgtttatttgaactaatattaaattaacaaattcagtgtaatcaaaatgtgtaaagaacaatcaatatactttatttttttttctattttataaaataaatatatatgctatgctttaaattttggagctttcataaatgttcaatgcattttaagtgtgtggcttataaatattttggtatttttctatactacgtaaattctgagtttaaatgtcatacacaaatactaagacactttgcatttttaaaaattaagaatcatttgtgaagtccactacgaggtacttcaaaagcccagtaatggtggtcagataccatgtagatggatacagattgttgactcttttgaagttgtttttttcttatattttatattaccattaaccaataaaatctggcagaaagtctgctattccattggtaa

SEQ ID NO: 23658 - DNA, 1186 bp, Homo sapiens
  source 1..1186: mol_type = unassigned DNA
tttcgcacagcaaaagttgaaaatgaagatgaggctgaaagggttcttttttcctacggctatggtgctaatgttcccacaacagccaaaagacgactaaagcaaagtgttcacttggcaagaagagtgcttcaattagaaaaacaaaactcgctgattttaaaagatctggaacatcgaaaggaccaagtaacacagctttcacaagagcttgacagagccaattcgctattaaaccagactcaacagccttacaggtatctcattgaatcagtgcgtcagagagattctaagattgattcactgacggaatctattgcacaacttgagaaagatgtcagcaacttaaataaagaaaagtcagctttactacagacgaagaatcaaatggcattagatttagaacaacttctaaatcatcgtgaggaattggcagcaatgaaacagattctcgttaagatgcatagtaaacattctgagaacagcttacttctcactaaaacagaaccaaaacatgtgacagaaaatcagaaatcaaagactttgaatgtgcctaaagagcatgaagacaatatatttacacctaaaccaacactctttactaaaaaagaagcacctgagtggtctaagaaacaaaagatgaagacctagtgttttggatgggaagcacctgtagaccattatatactcctgaagttctttttctgatggaaaacaaaattcagcttaatcgtgtactcagcattttttaaataacaatgtttatttgaactaatattaaattaacaaattcagtgtaatcaaaatgtgtaaagaacaatcaatatactttatttttttttctattttataaaataaatatatatgctatgctttaaattttggagctttcataaatgttcaatgcattttaagtgtgtggcttataaatattttggtatttttctatactacgtaaattctgagtttaaatgtcatacacaaatactaagacactttgcatttttaaaaattaagaatcatttgtgaagtccactacgaggtacttcaaaagcccagtaatggtggtcagataccatgtagatggatacagattgttgactcttttgaagttgtttttttcttatattttatattaccattaaccaataaaatctggcagaaagtctgctattccattggtaaa

SEQ ID NO: 23659 - DNA, 1547 bp, Homo sapiens
  source 1..1547: mol_type = unassigned DNA
ctcacaacgtgtgttgctttccgctcctcggaacatccgggagagttgacttccggcggcttgtgggagtgctggttctgtcctccttgcgggtgcggagatggttgtcttggttacgggtcctaacggtcccctgccttgaaatcccttgttgagggcctgcaaccttgtgcttccgaccggagacgcctttggtccctcggtgtctgcactggctgctggtcaaggcttcagtgtggagtaattgacactttcgagaatattaaaatcaaattagagaagaaaactgatccataataataaaaatgtctcgaaaaatttcaaaggagtcaaaaaaagtgaacatctctagttctctggaatctgaagatattagtttagaaacaacagttcctacggatgatatttcctcatcagaagagcgagagggcaaagtcagaatcaccaggcagctaattgaacgaaaagaactacttcataatattcagttactaaaaattgagctatcccagaaaactatgatgatcgacaatttgaaagtggattatcttacaaagattgaagaattggaggagaaacttaatgatgcacttcaccagaagcagctactaacattgagattagacaaccaattggcttttcaacagaaagatgccagcaaatatcaagaattaatgaaacaagaaatggaaaccattttgttgagacagaaacaactagaagagacaaatcttcagctaagagaaaaagctggagatgttcgtcgaaacctgcgtgactttgagttgacagaagagcaatatattaaattaaaagcttttcctgaagatcagctttctattcctgaatatgtatctgttcgcttctatgagctagtgaatccattaagaaaggaaatctgtgaactacaagtgaaaaagaatatcctagcagaagaattaagtacaaacaaaaaccaactgaagcagctgacagagacatatgaggaagatcgaaaaaactactctgaagttcaaattagatgtcaacgtttggccttagaattagcagacacaaaacagttaattcagcaaggtgactaccgtcaagagaactatgataaagtcaagagtgaacgtgatgcacttgaacaggaagtaattgagcttaggagaaaacatgaaatacttgaagcctctcacatgattcaaacaaaagaacgaagtgaattatcaaaagaggtagtcaccttagagcaaactgttactttactgcaaaaggataaagaatatcttaatcgccaaaacatggagcttagtgttcgctgtgctcatgaagaggatcgccttgaaagacttcaagctcaactggaagaaagcaaaaaggctagagaagagatgtatgaaaaatatgtagcatccagagaccattataaaacagaatatgaaaataaactacatgatgaactagaacaaatcagattgaaaaccaaccaagaaattgatcaacttcgaaatgcctctagggaaatgtatgaacgagaaaacagaaaaaaaagaaaaaagaaa

SEQ ID NO: 23660 - DNA, 1911 bp, Homo sapiens
  source 1..1911: mol_type = unassigned DNA
tagtctttggccgccgccgaaccccgcgcgccactcgctcgctcagagggaggagaaagtggcgagttccggatccctgcctagcgcggcccaacctttactccagagatcatggctgccgaggatgtggtggcgactggcgccgacccaagcgatctggagagcggcgggctgctgcatgagattttcacgtcgccgctcaacctgctgctgcttggcctctgcatcttcctgctctacaagatcgtgcgcggggaccagccggcggccagcggcgacagcgacgacgacgagccgccccctctgccccgcctcaagcggcgcgacttcacccccgccgagctgcggcgcttcgacggcgtccaggacccgcgcatactcatggccatcaacggcaaggtgttcgatgtgaccaaaggccgcaaattctacgggcccgaggggccgtatggggtctttgctggaagagatgcatccaggggccttgccacattttgcctggataaggaagcactgaaggatgagtacgatgacctttctgacctcactgctgcccagcaggagactctgagtgactgggagtctcagttcactttcaagtatcatcacgtgggcaaactgctgaaggagggggaggagcccactgtgtactcagatgaggaagaaccaaaagatgagagtgcccggaaaaatgattaaagcattcagtggaagtatatctatttttgtattttgcaaaatcatttgtaacagtccactctgtctttaaaacatagtgattacaatatttagaaagttttgagcacttgctataagttttttaattaacatcactagtgacactaataaaattaacttcttagaatgcatgatgtgtttgtgtgtcacaaatccagaaagtgaactgcagtgctgtaatacacatgttaatactgtttttcttctatctgtagttagtacaggatgaatttaaatgtgtttttcctgagagacaaggaagacttgggtatttcccaaaacaggtaaaaatcttaaatgtgcaccaagagcaaaggatcaacttttagtcatgatgttctgtaaagacaacaaatccctttttttttctcaattgacttaactgcatgatttctgttttatctacctctaaagcaaatctgcagtgttccaaagactttggtatggattaagcgctgtccagtaacaaaatgaaatctcaaaacagagctcagctgcaaaaaagcatattttctgtgtttctggactgcactgttgtccttgccctcacatagacactcagacaccctcacaaacacagtagtctatagttaggattaaaataggatctgaacattcaaaagaaagctttggaaaaaaagagctggctggcctaaaaacctaaatatatgatgaagattgtaggactgtcttcccaagccccatgttcatggtggggcaatggttatttggttattttactcaattggttactctcatttgaaatgagggagggacatacagaataggaacaggtgtttgctctcctaagagccttcatgcacacccctgaaccacgaggaaacagtacagtcgctagtcaagtggtttttaaagtaaagtatattcataaggtaacagttattctgttgttataaaactatacccactgcaaaagtagtagtcaagtgtctaggtctttgatattgctcttttggttaacactaagcttaagtagactatacagttgtatgaatttgtaaaagtatatgaacacctagtgagatttcaaacttgtaattgtggttaaatagtcattgtattttcttgtgaactgtgttttatgattttacctcaaatcagaaaacaaaatgatgtgctttggtcagttaataaaaatggttttacccacta

SEQ ID NO: 23661 - DNA, 1682 bp, Homo sapiens
  source 1..1682: mol_type = unassigned DNA
atccctgcctagcgcggcccaacctttactccagagatcatggctgccgaggatgtggtggcgactggcgccgacccaagcgatctggagagcggcgggctgctgcatgagattttcacgtcgccgctcaacctgctgctgcttggcctctgcatcttcctgctctacaagatcgtgcgcggggaccagccggcggccagcggcgacagcgacgacgacgagccgccccctctgccccgcctcaagcggcgcgacttcacccccgccgagctgcggcgcttcgacggcgtccaggacccgcgcatactcatggccatcaacggcaaggtgttcgatgtgaccaaaggccgcaaattctacgggcccgtcaagtatcatcacgtgggcaaactgctgaaggagggggaggagcccactgtgtactcagatgaggaagaaccaaaagatgagagtgcccggaaaaatgattaaagcattcagtggaagtatatctatttttgtattttgcaaaatcatttgtaacagtccactctgtctttaaaacatagtgattacaatatttagaaagttttgagcacttgctataagttttttaattaacatcactagtgacactaataaaattaacttcttagaatgcatgatgtgtttgtgtgtcacaaatccagaaagtgaactgcagtgctgtaatacacatgttaatactgtttttcttctatctgtagttagtacaggatgaatttaaatgtgtttttcctgagagacaaggaagacttgggtatttcccaaaacaggtaaaaatcttaaatgtgcaccaagagcaaaggatcaacttttagtcatgatgttctgtaaagacaacaaatccctttttttttctcaattgacttaactgcatgatttctgttttatctacctctaaagcaaatctgcagtgttccaaagactttggtatggattaagcgctgtccagtaacaaaatgaaatctcaaaacagagctcagctgcaaaaaagcatattttctgtgtttctggactgcactgttgtccttgccctcacatagacactcagacaccctcacaaacacagtagtctatagttaggattaaaataggatctgaacattcaaaagaaagctttggaaaaaaagagctggctggcctaaaaacctaaatatatgatgaagattgtaggactgtcttcccaagccccatgttcatggtggggcaatggttatttggttattttactcaattggttactctcatttgaaatgagggagggacatacagaataggaacaggtgtttgctctcctaagagccttcatgcacacccctgaaccacgaggaaacagtacagtcgctagtcaagtggtttttaaagtaaagtatattcataaggtaacagttattctgttgttataaaactatacccactgcaaaagtagtagtcaagtgtctaggtctttgatattgctcttttggttaacactaagcttaagtagactatacagttgtatgaatttgtaaaagtatatgaacacctagtgagatttcaaacttgtaattgtggttaaatagtcattgtattttcttgtgaactgtgttttatgattttacctcaaatcagaaaacaaaatgatgtgctttggtcagttaataaaaatggttttacccact

SEQ ID NO: 23662 - DNA, 3783 bp, Homo sapiens
  source 1..3783: mol_type = unassigned DNA
cacactagaatttcaaggtgtgagaggctaaaagacgtccaagtacatgaaacagaacctgcaaataagagtgaatgacgaatagaaagaccacctcaacctgtccacttccctacggccgcagaagttatgattcaaggaataatgagactctaaatcctttaaaattctacaagagcagcctttgccaaacccagcggggagtggctgctcggtgccagcgcgaggagcacgtagactgccgatgccagagaagcccggtgcgggttccgtgctttctctccgttccaggaagaccccagctcgtggccaaatcttcttgccgcttcccggtctgcgcgcctacgctgccggtttcccgacaaaagcgacggcgccctggtgaaaagcagacgcccctcatcggtttgcgccttgcagctcaactatgccccagcctcccacaagccacctgcccgcgtcctccgccaggcgtccagcccggacctgcccccgcggccgccaaggcgcacgtgaagctcccgggcggggggagcgcaaggaggcgggagtttgcggacgcgaacgcaggcctaggaagggaagcgattccagggcgcacgcgcagagcctggagactgggcggggcgtgcctcccgcaggggttacgaacgaaaggcgagcgcgtggcgctcaggagcccgcgcacgcgctgtggtctcgccccgcccatgagcgtccgcgcggccgtcgtagcatcttttcttcagacccgcccggctcgtctacttaacctagcggaggcttggagtgagagcagggaagtgtggggcgaggtgggcggggcgttgcacgcgtgcgcggccagcgaaagaagggagggggcgggagatccgagacaacgttaccccgtcaacacccaatcaggagccggcctgaccccgccccctcttctcacgttattggctgagaggcccccagatgggcggggccggccgtggggttggggagggcagggggcggggaggaggaggaaggcgctggcgggcagtgatggcggctggtgatggggacgtgaagctaggcaccctggggagtggcagcgagagcagcaacgacggcggcagcgagagtccaggcgacgcgggagcggcagcggaagggggaggctgggcggcggcggcgttggcgcttctgacggggggcggggaaatgctgctgaacgtggcgctggtggctctggtgctgctgggggcctaccggctgtgggtgcgctgggggcggcggggtctgggggccggggccggggcgggcgaggagagccccgccacctctctgcctcgcatgaagaagcgggacttcagcttggagcagctgcgccagtacgacggctcccgcaacccgcgcatcctgctcgcggtcaatgggaaagtcttcgacgtgaccaaaggcagcaagttctacggcccggcgggtccatatggaatatttgctggtagggatgcctccagaggactggccacattttgcctagataaagatgcacttagagatgaatatgatgatctctcagatttgaatgcagtacaaatggagagtgttcgagaatgggaaatgcagtttaaagaaaaatatgattatgtaggcagactcctaaaaccaggagaagaaccatcagaatatacagatgaagaagataccaaggatcacaataaacaggattgaactttgtaaacaaccaaagtcaggggccttcagaactgcaattcttactccctttcacagactgtccggagtctttgggtttgattcacctgctgcgaaaaacattcaacaaattgtgtacaagataaattaatctcactatgaagatttgaataactagacattatttatgctgccaaactcatttgttgcagttgtttgtaatgtctagtggggcttcatcatcctgaaaagaaggagacagggatttttttaaagagcaagaaagtcacaatattacttctttccttccttttttccttctttcctttcttctttctctttctttctttttaaaatatattgaagacaaccagatatgtatttgctactcaagtgtacagatctcctcaagaaacatcaagggactcctgtgtcacatactgtgtttttattttaacatgggtgagggaggcgacctgatcaggggaggtgggggtacacatcaatttgagttgttcaggctactgaaacattaaaatgtgaattcccaaacttttctttttggctttgtcagggaaaagaaaaatatctttataaagaaatctttggaaattaggagaaggaatttcaggtgggtttaagtcagagctagttccccaacagaaagatcatttgaaaccagtttttatcccttctctttccttccctttccctaaatcaaatcaatattaattgtgccttatttcacttaacatagacttgaattatttttagggaaagcccctataatgaattcagaaatcactacaagcagcattaagactgaagttggaatattctgttgaccataaaaccttgatatcattctgtgtatatagaatgtaaaaggaatattacagtgttaactgccatatatgtaatatacacaaactcaattagcattgtaatggccaaatgcattcccccatgcttttctgttttcaaaaaaattgaaaaacaaatcaactcttatccccaacagctgcctaattttaggagtctgaccctccacatctcactggtgtgggtgcatggggctgtggagtgggtgtcagtatggatgtgtctgaatgtgtgaggccttggaagggactctttctgcagatactgtaaatacaagtaccattttaataaagcatgtacaataaaccaaaataagcttgagttggactttatatacagaactgtaagccagtgcattatgatacagttgtaagattgtgcatttgattcaagataaggaaaaatcttggaaatgaaaagcaggcactggttaaccaagttgtacacattgtaccacattcagcataactttaggaagaaattccactttgtggaacattctccagaaatccaagattattcaggtaagaattggtatattaaatgtacatctttttactttctattttgatgccaactgattatactagacaattagcactccaggtggttattgaacacaaaacagtaaaagaatattgcactgatagatactaaattattattttattaggttgaaaaagcccttactaaaagcccctcatatatcaattactttatttcattatgactacttaggttccgggctggggacaagttcacttaaaaaggcaatgttatttaacaggtcaccagttaagacttctgctttgtagatacatgcagaagccatcaaacaagggggagcttttaactgcaacaataagctaaagtatgtaaaatactacattctattcagtcttggagtgttttgtagaaagttatcttcagccaaatctttgctgaagactggttgtggagtgttggtaaatgctttgtgtttttatgtaaaatattttctaaacaaaaaatgttaaaagtacatgtcctctgtagtaaactgatatctatatatatgaatcattcaagcctaaagtctagtaataaactgtacttgtgaatagagaaaccctaaatattcatgcagaaaaaattatgcggtctgttaagaaaaatgagtaatttgtgttttggacttgaaataaacagtgttctgtagataattcctcaacttca

SEQ ID NO: 23663 - DNA, 2708 bp, Homo sapiens
  source 1..2708: mol_type = unassigned DNA
gaaggcgctggcgggcagtgatggcggctggtgatggggacgtgaagctaggcaccctggggagtggcagcgagagcagcaacgacggcggcagcgagagtccaggcgacgcgggagcggcagcggaagggggaggctgggcggcggcggcgttggcgcttctgacggggggcggggaaatgctgctgaacgtggcgctggtggctctggtgctgctgggggcctaccggctgtgggtgcgctgggggcggcggggtctgggggccggggccggggcgggacttcagcttggagcagctgcgccagtacgacggctcccgcaacccgcgcatcctgctcgcggtcaatgggaaagtcttcgacgtgaccaaaggcagcaagttctacggcccggcgggtccatatggaatatttgctggtagggatgcctccagaggactggccacattttgcctagataaagatgcacttagagatgaatatgatgatctctcagatttgaatgcagtacaaatggagagtgttcgagaatgggaaatgcagtttaaagaaaaatatgattatgtaggcagactcctaaaaccaggagaagaaccatcagaatatacagatgaagaagataccaaggatcacaataaacaggattgaactttgtaaacaaccaaagtcaggggccttcagaactgcaattcttactccctttcacagactgtccggagtctttgggtttgattcacctgctgcgaaaaacattcaacaaattgtgtacaagataaattaatctcactatgaagatttgaataactagacattatttatgctgccaaactcatttgttgcagttgtttgtaatgtctagtggggcttcatcatcctgaaaagaaggagacagggatttttttaaagagcaagaaagtcacaatattacttctttccttccttttttccttctttcctttcttctttctctttctttctttttaaaatatattgaagacaaccagatatgtatttgctactcaagtgtacagatctcctcaagaaacatcaagggactcctgtgtcacatactgtgtttttattttaacatgggtgagggaggcgacctgatcaggggaggtgggggtacacatcaatttgagttgttcaggctactgaaacattaaaatgtgaattcccaaacttttctttttggctttgtcagggaaaagaaaaatatctttataaagaaatctttggaaattaggagaaggaatttcaggtgggtttaagtcagagctagttccccaacagaaagatcatttgaaaccagtttttatcccttctctttccttccctttccctaaatcaaatcaatattaattgtgccttatttcacttaacatagacttgaattatttttagggaaagcccctataatgaattcagaaatcactacaagcagcattaagactgaagttggaatattctgttgaccataaaaccttgatatcattctgtgtatatagaatgtaaaaggaatattacagtgttaactgccatatatgtaatatacacaaactcaattagcattgtaatggccaaatgcattcccccatgcttttctgttttcaaaaaaattgaaaaacaaatcaactcttatccccaacagctgcctaattttaggagtctgaccctccacatctcactggtgtgggtgcatggggctgtggagtgggtgtcagtatggatgtgtctgaatgtgtgaggccttggaagggactctttctgcagatactgtaaatacaagtaccattttaataaagcatgtacaataaaccaaaataagcttgagttggactttatatacagaactgtaagccagtgcattatgatacagttgtaagattgtgcatttgattcaagataaggaaaaatcttggaaatgaaaagcaggcactggttaaccaagttgtacacattgtaccacattcagcataactttaggaagaaattccactttgtggaacattctccagaaatccaagattattcaggtaagaattggtatattaaatgtacatctttttactttctattttgatgccaactgattatactagacaattagcactccaggtggttattgaacacaaaacagtaaaagaatattgcactgatagatactaaattattattttattaggttgaaaaagcccttactaaaagcccctcatatatcaattactttatttcattatgactacttaggttccgggctggggacaagttcacttaaaaaggcaatgttatttaacaggtcaccagttaagacttctgctttgtagatacatgcagaagccatcaaacaagggggagcttttaactgcaacaataagctaaagtatgtaaaatactacattctattcagtcttggagtgttttgtagaaagttatcttcagccaaatctttgctgaagactggttgtggagtgttggtaaatgctttgtgtttttatgtaaaatattttctaaacaaaaaatgttaaaagtacatgtcctctgtagtaaactgatatctatatatatgaatcattcaagcctaaagtctagtaataaactgtacttgtgaatagagaaaccctaaatattcatgcagaaaaaattatgcggtctgttaagaaaaatgagtaatttgtgttttggacttgaaataaacagtgttctgt

SEQ ID NO: 23664 - DNA, 3785 bp, Homo sapiens
  source 1..3785: mol_type = unassigned DNA
actttttcacactagaatttcaaggtgtgagaggctaaaagacgtccaagtacatgaaacagaacctgcaaataagagtgaatgacgaatagaaagaccacctcaacctgtccacttccctacggccgcagaagttatgattcaaggaataatgagactctaaatcctttaaaattctacaagagcagcctttgccaaacccagcggggagtggctgctcggtgccagcgcgaggagcacgtagactgccgatgccagagaagcccggtgcgggttccgtgctttctctccgttccaggaagaccccagctcgtggccaaatcttcttgccgcttcccggtctgcgcgcctacgctgccggtttcccgacaaaagcgacggcgccctggtgaaaagcagacgcccctcatcggtttgcgccttgcagctcaactatgccccagcctcccacaagccacctgcccgcgtcctccgccaggcgtccagcccggacctgcccccgcggccgccaaggcgcacgtgaagctcccgggcggggggagcgcaaggaggcgggagtttgcggacgcgaacgcaggcctaggaagggaagcgattccagggcgcacgcgcagagcctggagactgggcggggcgtgcctcccgcaggggttacgaacgaaaggcgagcgcgtggcgctcaggagcccgcgcacgcgctgtggtctcgccccgcccatgagcgtccgcgcggccgtcgtagcatcttttcttcagacccgcccggctcgtctacttaacctagcggaggcttggagtgagagcagggaagtgtggggcgaggtgggcggggcgttgcacgcgtgcgcggccagcgaaagaagggagggggcgggagatccgagacaacgttaccccgtcaacacccaatcaggagccggcctgaccccgccccctcttctcacgttattggctgagaggcccccagatgggcggggccggccgtggggttggggagggcagggggcggggaggaggaggaaggcgctggcgggcagtgatggcggctggtgatggggacgtgaagctaggcaccctggggagtggcagcgagagcagcaacgacggcggcagcgagagtccaggcgacgcgggagcggcagcggaagggggaggctgggcggcggcggcgttggcgcttctgacggggggcggggaaatgctgctgaacgtggcgctggtggctctggtgctgctgggggcctaccggctgtgggtgcgctgggggcggcggggtctgggggccggggccggggcgggcgaggagagccccgccacctctctgcctcgcatgaagaagcgggacttcagcttggagcagctgcgccagtacgacggctcccgcaacccgcgcatcctgctcgcggtcaatgggaaagtcttcgacgtgaccaaaggcagcaagttctacggcccggcgggtccatatggaatatttgctggtagggatgcctccagaggactggccacattttgcctagataaagatgcacttagagatgaatatgatgatctctcagatttgaatgcagtacaaatggagagtgttcgagaatgggaaatgcagtttaaagaaaaatatgattatgtaggcagactcctaaaaccaggagaagaaccatcagaatatacagatgaagaagataccaaggatcacaataaacaggattgaactttgtaaacaaccaaagtcaggggccttcagaactgcaattcttactccctttcacagactgtccggagtctttgggtttgattcacctgctgcgaaaaacattcaacaaattgtgtacaagataaattaatctcactatgaagatttgaataactagacattatttatgctgccaaactcatttgttgcagttgtttgtaatgtctagtggggcttcatcatcctgaaaagaaggagacagggatttttttaaagagcaagaaagtcacaatattacttctttccttccttttttccttctttcctttcttctttctctttctttctttttaaaatatattgaagacaaccagatatgtatttgctactcaagtgtacagatctcctcaagaaacatcaagggactcctgtgtcacatactgtgtttttattttaacatgggtgagggaggcgacctgatcaggggaggtgggggtacacatcaatttgagttgttcaggctactgaaacattaaaatgtgaattcccaaacttttctttttggctttgtcagggaaaagaaaaatatctttataaagaaatctttggaaattaggagaaggaatttcaggtgggtttaagtcagagctagttccccaacagaaagatcatttgaaaccagtttttatcccttctctttccttccctttccctaaatcaaatcaatattaattgtgccttatttcacttaacatagacttgaattatttttagggaaagcccctataatgaattcagaaatcactacaagcagcattaagactgaagttggaatattctgttgaccataaaaccttgatatcattctgtgtatatagaatgtaaaaggaatattacagtgttaactgccatatatgtaatatacacaaactcaattagcattgtaatggccaaatgcattcccccatgcttttctgttttcaaaaaaattgaaaaacaaatcaactcttatccccaacagctgcctaattttaggagtctgaccctccacatctcactggtgtgggtgcatggggctgtggagtgggtgtcagtatggatgtgtctgaatgtgtgaggccttggaagggactctttctgcagatactgtaaatacaagtaccattttaataaagcatgtacaataaaccaaaataagcttgagttggactttatatacagaactgtaagccagtgcattatgatacagttgtaagattgtgcatttgattcaagataaggaaaaatcttggaaatgaaaagcaggcactggttaaccaagttgtacacattgtaccacattcagcataactttaggaagaaattccactttgtggaacattctccagaaatccaagattattcaggtaagaattggtatattaaatgtacatctttttactttctattttgatgccaactgattatactagacaattagcactccaggtggttattgaacacaaaacagtaaaagaatattgcactgatagatactaaattattattttattaggttgaaaaagcccttactaaaagcccctcatatatcaattactttatttcattatgactacttaggttccgggctggggacaagttcacttaaaaaggcaatgttatttaacaggtcaccagttaagacttctgctttgtagatacatgcagaagccatcaaacaagggggagcttttaactgcaacaataagctaaagtatgtaaaatactacattctattcagtcttggagtgttttgtagaaagttatcttcagccaaatctttgctgaagactggttgtggagtgttggtaaatgctttgtgtttttatgtaaaatattttctaaacaaaaaatgttaaaagtacatgtcctctgtagtaaactgatatctatatatatgaatcattcaagcctaaagtctagtaataaactgtacttgtgaatagagaaaccctaaatattcatgcagaaaaaattatgcggtctgttaagaaaaatgagtaatttgtgttttggacttgaaataaacagtgttctgtagataattcctcaa

SEQ ID NO: 23665 - DNA, 3297 bp, Homo sapiens
  source 1..3297: mol_type = unassigned DNA
tgaattcaaaacagttactctgaatggtctttgctaagaacaatttaatgattaagtaaggtcagtgtccttggaagtccaaactctagccagatttccctggtctacacccctagggataaggtaaatgtttaagcacacagtgaacttcctgaggcccccaaatctaatggaactagctattgagggctaaaagaggatggtttttttagaaaactcgaagcaaatctctcaggctggggatatttcaaagactactactattattattaataacaattgcaatatttgttgagtccctaaatgaagctaaaactttgttctaataaatttaatctttacagcaacctatgaggtagataatattgtcattcccatgagggagctaaggatcagagaaggtaagtcacttgtctaaggtcacatagctagcatgttatgcaatcaggagtcaaacctggtttgtctgaatctgaagtccatctgctctgtgcacttttataccgtctgctttttcctttattcctaaccttcttccattctgattcccactgagtagtggacaggaaccactgaagtttgcctgacaccatcaaccaggccctagtcacctggctttgcctttgccctgctgtgtgatcttagctccctgcccaggcccacagccatggccatggcccagaaactcagccacctcctgccgagtctgcggcaggtcatccaggagcctcagctatctctgcagccagagcctgtcttcacggtggatcgagctgaggtgccgccgctcttctggaagccgtacatctatgcgggctaccggccgctgcatcagacctggcgcttctatttccgcacgctgttccagcagcacaacgaggccgtgaatgtctggacccacctgctggcggccctggtactgctgctgcggctggccctctttgtggagaccgtggacttctggggagacccacacgccctgcccctcttcatcattgtccttgcctctttcacctacctctccttcagtgccttggctcacctcctgcaggccaagtctgagttctggcattacagcttcttcttcctggactatgtgggggtggccgtgtaccagtttggcagtgccttggcacacttctactatgctatcgagcccgcctggcatgcccaggtgcaggctgtttttctgcccatggctgcctttctcgcctggctttcctgcattggctcctgctataacaagtacatccagaaaccaggcctgctgggccgcacatgccaggaggtgccctccgtcctggcctacgcactggacattagtcctgtggtgcatcgtatcttcgtgtcctccgaccccaccacggatgatccagctcttctctaccacaagtgccaggtggtcttctttctgctggctgctgccttcttctctaccttcatgcccgagcgctggttccctggcagctgccatgtcttcgggcagggccaccaacttttccacatcttcttggtgctgtgcacgctggctcagctggaggctgtggcactggactatgaggcccgacggcccatctatgagcctctgcacacgcactggcctcacaacttttctggcctcttcctgctcacggtgggcagcagcatcctcactgcattcctcctgagccagctggtacagcgcaaacttgatcagaagaccaagtgaagggggatggcatctggtagggagggaggtatagttgggggacaggggtctgggtttggctccaggtgggaacaaggcctggtaaagttgtttgtgtctggcccacagtgactctctgtgcacgactcaactgccaagggcatcactggccaattcttggatttagggattggctaggagttgctggggtccactcctgggcctgccccagctccttgcccagggagagggaaagagttaacggtgtgggccactccagcttgcccttccactgccactcactggggtgaggctgggggtcagcttggtgaggattggggcttctagattgtctaggcaggaggtgaaacttaggccagagtcagatttgagctgagccaggggaggccttggcaacctacttctactcagatttcattgctggatgcggaaggggtaggcccaaaatatatacaggatcttactgtcccttgaagcccagccacaagtgttggagctgcagagagaccccaaaggtagtagattgtgccagatacaaatgggtcccatccagtgcttcatactccttcagtcactatcccagacagtgagccccagatctcctagctctggcttctgtgtcccacacggcctgttcccagcttctctcctggttcccttgttacggattcatttatccattcagtgtttcctgggcctctgctcagaggcaggtcaccactgggccctgtggatcaatgcaagatgacaaaggctttttttttttttttttttttttttttttttgaggagtttcgctcttgttggctaggctggagtaaaatggtgcgatctcggctcactgcacctccgcctcccaggttcaagcgattttcctgcctcagcctcccgagtagctggggttacaggcatgcaccaccatgcctggctaattttctgtatttttagtagagacggggtttctccatgttggtcaggctggtcttgaactcctgacctcaggtgatctgcccgtctcggcctcccaaagtgctgggattaccggcatgagccactgcgcctggccgacaaaggctttgatatcagaatgaactgtcaagggaggtgctggagagggattaacctgtgctgcctgggaccctcagggtcttaggttggggagtgtgaataggagtttgcagatggagaataggaagggcattccaggcagagggaaacctgtgcagagaccaagaggtgtggaaggaaaagtggggttggggctgggtggtctggattatggcctggatgcaataaagtactgtgacagtagccacctctttgttttttgtctcctgtttccgggaggggcccctgctcacattactggaggttttccggaggaagctggggcccctgggagtggacacagggtgcagggagcagttcttgttttatctttgctgggggatggggttggggccttatataccatatctatatatacaaaatttgtttggcaagggagtgggcggcagttttattactaaagttttataagtagttaaaataatgtgtttaaaatatgataatcccactttatgatctga

SEQ ID NO: 23666 - DNA, 2114 bp, Homo sapiens
  source 1..2114: mol_type = unassigned DNA
acagtttcccttccgctcacctccgcctgagcagtggagaaggcggcactctggtggggctgctccaggcatgcagatcccacaggcgccctggccagtcgtctgggcggtgctacaactgggctggcggccaggatggttcttagactccccagacaggccctggaacccccccaccttctccccagccctgctcgtggtgaccgaaggggacaacgccaccttcacctgcagcttctccaacacatcggagagcttcgtgctaaactggtaccgcatgagccccagcaaccagacggacaagctggccgccttccccgaggaccgcagccagcccggccaggactgccgcttccgtgtcacacaactgcccaacgggcgtgacttccacatgagcgtggtcagggcccggcgcaatgacagcggcacctacctctgtggggccatctccctggcccccaaggcgcagatcaaagagagcctgcgggcagagctcagggtgacagagagaagggcagaagtgcccacagcccaccccagcccctcacccaggccagccggccagttccaaaccctggtggttggtgtcgtgggcggcctgctgggcagcctggtgctgctagtctgggtcctggccgtcatctgctcccgggccgcacgagggacaataggagccaggcgcaccggccagcccctgaaggaggacccctcagccgtgcctgtgttctctgtggactatggggagctggatttccagtggcgagagaagaccccggagccccccgtgccctgtgtccctgagcagacggagtatgccaccattgtctttcctagcggaatgggcacctcatcccccgcccgcaggggctcagctgacggccctcggagtgcccagccactgaggcctgaggatggacactgctcttggcccctctgaccggcttccttggccaccagtgttctgcagaccctccaccatgagcccgggtcagcgcatttcctcaggagaagcaggcagggtgcaggccattgcaggccgtccaggggctgagctgcctgggggcgaccggggctccagcctgcacctgcaccaggcacagccccaccacaggactcatgtctcaatgcccacagtgagcccaggcagcaggtgtcaccgtcccctacagggagggccagatgcagtcactgcttcaggtcctgccagcacagagctgcctgcgtccagctccctgaatctctgctgctgctgctgctgctgctgctgctgcctgcggcccggggctgaaggcgccgtggccctgcctgacgccccggagcctcctgcctgaacttgggggctggttggagatggccttggagcagccaaggtgcccctggcagtggcatcccgaaacgccctggacgcagggcccaagactgggcacaggagtgggaggtacatggggctggggactccccaggagttatctgctccctgcaggcctagagaagtttcagggaaggtcagaagagctcctggctgtggtgggcagggcaggaaacccctccacctttacacatgcccaggcagcacctcaggccctttgtggggcagggaagctgaggcagtaagcgggcaggcagagctggaggcctttcaggcccagccagcactctggcctcctgccgccgcattccaccccagcccctcacaccactcgggagagggacatcctacggtcccaaggtcaggagggcagggctggggttgactcaggcccctcccagctgtggccacctgggtgttgggagggcagaagtgcaggcacctagggccccccatgtgcccaccctgggagctctccttggaacccattcctgaaattatttaaaggggttggccgggctcccaccagggcctgggtgggaaggtacaggcgttcccccggggcctagtacccccgccgtggcctatccactcctcacatccacacactgcacccccactcctggggcagggccaccagcatccaggcggccagcaggcacctgagtggctgggacaagggatcccccttccctgtggttctattatattataattataattaaatatgagagcatgctaagga

SEQ ID NO: 23667 - DNA, 1956 bp, Homo sapiens
  source 1..1956: mol_type = unassigned DNA
agtttcccttccgctcacctccgcctgagcagtggagaaggcggcactctggtggggctgctccaggcatgcagatcccacaggcgccctggccagtcgtctgggcggtgctacaactgggctggcggccaggatggttcttagactccccagacaggccctggaacccccccaccttctccccagccctgctcgtggtgaccgaaggggacaacgccaccttcacctgcagcttctccaacacatcggagagcttcgtgctaaactggtaccgcatgagccccagcaaccagacggacaagctggccgccttccccgaggaccgcagccagcccggccaggactgccgcttccgtgtcacacaactgcccaacgggcgtgacttccacatgagcgtggtcagggcccggcgcaatgacagcggcacctacctctgtggggccatctccctggcccccaaggcgcagatcaaagagagcctgcgggcagagctcagggtgacagggacaataggagccaggcgcaccggccagcccctgaaggaggacccctcagccgtgcctgtgttctctgtggactatggggagctggatttccagtggcgagagaagaccccggagccccccgtgccctgtgtccctgagcagacggagtatgccaccattgtctttcctagcggaatgggcacctcatcccccgcccgcaggggctcagctgacggccctcggagtgcccagccactgaggcctgaggatggacactgctcttggcccctctgaccggcttccttggccaccagtgttctgcagaccctccaccatgagcccgggtcagcgcatttcctcaggagaagcaggcagggtgcaggccattgcaggccgtccaggggctgagctgcctgggggcgaccggggctccagcctgcacctgcaccaggcacagccccaccacaggactcatgtctcaatgcccacagtgagcccaggcagcaggtgtcaccgtcccctacagggagggccagatgcagtcactgcttcaggtcctgccagcacagagctgcctgcgtccagctccctgaatctctgctgctgctgctgctgctgctgctgctgcctgcggcccggggctgaaggcgccgtggccctgcctgacgccccggagcctcctgcctgaacttgggggctggttggagatggccttggagcagccaaggtgcccctggcagtggcatcccgaaacgccctggacgcagggcccaagactgggcacaggagtgggaggtacatggggctggggactccccaggagttatctgctccctgcaggcctagagaagtttcagggaaggtcagaagagctcctggctgtggtgggcagggcaggaaacccctccacctttacacatgcccaggcagcacctcaggccctttgtggggcagggaagctgaggcagtaagcgggcaggcagagctggaggcctttcaggcccagccagcactctggcctcctgccgccgcattccaccccagcccctcacaccactcgggagagggacatcctacggtcccaaggtcaggagggcagggctggggttgactcaggcccctcccagctgtggccacctgggtgttgggagggcagaagtgcaggcacctagggccccccatgtgcccaccctgggagctctccttggaacccattcctgaaattatttaaaggggttggccgggctcccaccagggcctgggtgggaaggtacaggcgttcccccggggcctagtacccccgccgtggcctatccactcctcacatccacacactgcacccccactcctggggcagggccaccagcatccaggcggccagcaggcacctgagtggctgggacaagggatcccccttccctgtggttctattatattataattataattaaatatgagagcatgctaagga

SEQ ID NO: 23668 - DNA, 2067 bp, Homo sapiens
  source 1..2067: mol_type = unassigned DNA
aagtcagtgcctcagttgctggtaaggtgtagctgttctgtcccagtccccgtagctctgcaccgagcagaagaggtctagggtcacgcaggggccatggctgaggcacttgggcttggttctggcaggcggagcggacggggctgagagcggggccctacgggcggaagaggagcactggaagaaggaagagacaaatgttggggtctacggattcagttccagtttaatgatgtggccctctaaggagataattttgccttaaacagaaagacttgaccctcttaggtgtcatacctaagatcagtgtgttttttgtgtccaattcttttatcaccaaaaaagagaagaaatattgcagtgaatgaagattcctctgcattttagcactgctttttcaactgtagttggcttttgaatgaggatgacaatggaagagatgaagaatgaagctgagaccacatccatggtttctatgcccctctatgcagtcatgtatcctgtgtttaatgagctagaacgagtaaatctgtctgcagcccagacactgagagccgctttcatcaaggctgaaaaagaaaatccaggtctcacacaagacatcattatgaaaattttagagaaaaaaagcgtggaagttaacttcacggagtcccttcttcgtatggcagctgatgatgtagaagagtatatgattgaacgaccagagccagaattccaagacctaaacgaaaaggcacgagcacttaaacaaattctcagtaagatcccagatgagatcaatgacagagtgaggtttctgcagacaatcaaggatatagctagtgcaataaaagaacttcttgatacagtgaataatgtcttcaagaaatatcaataccagaaccgcagggcacttgaacaccaaaagaaagaatttgtaaagtactccaaaagtttcagtgatactctgaaaacgtattttaaagatggcaaggcaataaatgtgttcgtaagtgccaaccgactaattcatcaaaccaacttaatacttcagaccttcaaaactgtggcctgaaagttgtatatgttaagagatgtacttctcagtggcagtattgaactgcctttatctgtaaattttaaagtttgactgtataaattatcagtccctcctgaagggatctaatccaggatgttgaatgggattattgccatcttacaccatatttttgtaaaatgtagcttaatcataatctcacactgaagattttgcatcacttttgctattatcattcttttaagaattataagccaaaagaatttacgccttaatgtgtcattatataacattccttaaaagaattgtaaatattggtgtttgtttctgacattttaacttgaaagcgatatgctgcaagataatgtatttaacaatatttggtggcaaatattcaataaatagtttacatctgttaaacatttctttacttgaaaaaatgcatatatatatgtgtgtatatatatatatatatatatatatatgaacagaagaccaagacaacttggtgtaatgtctaaaaaacttctaatgggagcttatcagcagtttatcaaataataaagcaagaatttctatttttgtccttaatcactttggacacagagtagtcaatggaaatatttttgttaattacttataaggtactgagtatttttatatgatttccaacctgttttaaacgacttatgagtaagagatagcattttctagtgtttttgcactataatgccactttttgaactcttgtgacaaatgtagatttgactcttaaaaattaagcctttcgtatactgggccctcataagctttgcacaattttttcccaaaaaatagccacaattaatagtaatttgaagctatatcaacggttggattgaaattgtcatgagtgttaatattatatacactcttcaactaggtacagttttatttcaccatagagaagttttaaggaaattatgtatcaagtgttcatgttaagtggtttcatttttcaattataaaataaagggaaaaaatcagaa

SEQ ID NO: 23669 - DNA, 934 bp, Homo sapiens
  source 1..934: mol_type = unassigned DNA
aggttggcccctggtgccccgggagaggggacagggcggatgtgcctggggtggggtcctttgaaggtgtggcttcggaccgagaggtgaggctgctgttttccccctgctttatcagtgtgttttttgtgtccaattcttttatcaccaaaaaagagaagaaatattgcagtgaatgaagattcctctgcattttagcactgctttttcaactgtagttggcttttgaatgaggatgacaatggaagagatgaagaatgaagctgagaccacatccatggtttctatgcccctctatgcagtcatgtatcctgtgtttaatgagctagaacgagtaaatctgtctgcagcccagacactgagagccgctttcatcaaggctgaaaaagaaaatccaggtctcacacaagacatcattatgaaaattttagagaaaaaaagcgtggaagttaacttcacggagtcccttcttcgtatggcagctgatgatgtagaagagtatatgattgaacgaccagagccagaattccaagacctaaacgaaaaggcacgagcacttaaacaaattctcagtaagatcccagatgagatcaatgacagagtgaggtttctgcagacaatcaaggatatagctagtgcaataaaagaacttcttgatacagtgaataatgtcttcaagaaatatcaataccagaaccgcagggcacttgaacaccaaaagaaagaatttgtaaagtactccaaaagtttcagtgatactctgaaaacgtattttaaagatggcaaggcaataaatgtgttcgtaagtgccaaccgactaattcatcaaaccaacttaatacttcagaccttcaaaactgtggcctgaaagttgtatatgttaagagatgtacttctcagtggcagtattgaactgcctttatctgtaaatttt

SEQ ID NO: 23670 - DNA, 715 bp, Homo sapiens
  source 1..715: mol_type = unassigned DNA
gggacagggcggatgtgcctggggtggggtcctttgaaggtgtggcttcggaccgagaggtgaggctgctgttttccccctgctttctttctcctctaaatcttggtctcttgtttggaagtgactaacagcattttggcatgagaaagccctaaaaagatcagtgtgttttttgtgtccaattcttttatcaccaaaaaagagaagaaatattgcagtgaatgaagattcctctgcattttagcactgctttttcaactgtagttggcttttgaatgaggatgacaatggaagagatgaagaatgaagctgagaccacatccatggtttctatgcccctctatgcagtcatgtatcctgtgtttaatgagctagaacgagtaaatctgtctgcagcccagacactgagagccgctttcatcaaggctgaaaaagaaaatccaggtctcacacaagacatcattatgaaaattttagagaaaaaaagcgtggaagttaacttcacggagtcccttcttcgtatggcagctgatgatgtagaagagtatatgattgaacgaccagagccagaattccaagacctaaacgaaaaggcacgagcacttaaacaaattctcagtaagatcccagatgagatcaatgacagagtgaggtttctgcagacaatcaaggatatagctagtgcaataaaagaacttcttgatacagtgaataa

SEQ ID NO: 23671 - DNA, 585 bp, Homo sapiens
  source 1..585: mol_type = unassigned DNA
gaagtgaagtcagtgcctcagttgctgaggagcactggaagaaggaagagacaaatgttggggtctacggattcagttccagtttaatgatgtggccctctaaggagataattttgccttaaacagaaagacttgaccctcttaggtgtcatacctaagctttctcctctaaatcttggtctcttgtttggaagtgactaacagcattttggcatgagaaagccctaaaaagatcagtgtgttttttgtgtccaattcttttatcaccaaaaaagagaagaaatattgcagtgaatgaagattcctctgcattttagcactgctttttcaactgtagttggcttttgaatgaggatgacaatggaagagatgaagaatgaagctgagaccacatccatggtttctatgcccctctatgcagtcatgtatcctgtgtttaatgagctagaacgagtaaatctgtctgcagcccagacactgagagccgctttcatcaaggctgaaaaagaaaatccaggtctcacacaagacatcattatgaaaattttagagaaaaaaagcgtggaagttaacttcacggagtcc

SEQ ID NO: 23672 - DNA, 1026 bp, Homo sapiens
  source 1..1026: mol_type = unassigned DNA
gggtccttccggcgtcgccggagtgaattgatccgggagttgaagagggctgcaaggtgggaagtgaagtcagtgcctcagttgctgaggagcactggaagaaggaagagacaaatgttggggtctacggattcagttccagtttaatgatgtggccctctaaggagataattttgccttaaacagaaagacttgaccctcttaggtgtcatacctaagatcagtgtgttttttgtgtccaattcttttatcaccaaaaaagagaagaaatattgcagtgaatgaagattcctctgcattttagcactgctttttcaactgtagttggcttttgaatgaggatgacaatggaagagatgaagaatgaagctgagaccacatccatggtttctatgcccctctatgcagtcatgtatcctgtgtttaatgagctagaacgagtaaatctgtctgcagcccagacactgagagccgctttcatcaaggctgaaaaagaaaatccaggtctcacacaagacatcattatgaaaattttagagaaaaaaagcgtggaagttaacttcacggagtcccttcttcgtatggcagctgatgatgtagaagagtatatgattgaacgaccagagccagaattccaagacctaaacgaaaaggcacgagcacttaaacaaattctcagtaagatcccagatgagatcaatgacagagtgaggtttctgcagacaatcaaggatatagctagtgcaataaaagaacttcttgatacagtgaataatgtcttcaagaaatatcaataccagaaccgcagggcacttgaacaccaaaagaaagaatttgtaaagtactccaaaagtttcagtgatactctgaaaacgtattttaaagatggcaaggcaataaatgtgttcgtaagtgccaaccgactaattcatcaaaccaacttaatacttcagaccttcaaaactgtggcctgaaagttgtatatgttaagagatgtacttctcagtggcagtattgaactgcctt

SEQ ID NO: 23673 - DNA, 1360 bp, Homo sapiens
  source 1..1360: mol_type = unassigned DNA
gcacgactccggctgggcaggattccggacaacgcctggttcctcttgggtccttccggcgtcgccggagtgaattgatccgggagttgaagagggctgcaaggtgggaagtgaagtcagtgcctcagttgctgctttctcctctaaatcttggtctcttgtttggaagtgactaacagcattttggcatgagaaagccctaaaaagatcagtgtgttttttgtgtccaattcttttatcaccaaaaaagagaagaaatattgcagtgaatgaagattcctctgcattttagcactgctttttcaactgtagttggcttttgaatgaggatgacaatggaagagatgaagaatgaagctgagaccacatccatggtttctatgcccctctatgcagtcatgtatcctgtgtttaatgagctagaacgagtaaatctgtctgcagcccagacactgagagccgctttcatcaaggctgaaaaagaaaatccaggtctcacacaagacatcattatgaaaattttagagaaaaaaagcgtggaagttaacttcacggagtcccttcttcgtatggcagctgatgatgtagaagagtatatgattgaacgaccagagccagaattccaagacctaaacgaaaaggcacgagcacttaaacaaattctcagtaagatcccagatgagatcaatgacagagtgaggtttctgcagacaatcaaggatatagctagtgcaataaaagaacttcttgatacagtgaataatgtcttcaagaaatatcaataccagaaccgcagggcacttgaacaccaaaagaaagaatttgtaaagtactccaaaagtttcagtgatactctgaaaacgtattttaaagatggcaaggcaataaatgtgttcgtaagtgccaaccgactaattcatcaaaccaacttaatacttcagaccttcaaaactgtggcctgaaagttgtatatgttaagagatgtacttctcagtggcagtattgaactgcctttatctgtaaattttaaagtttgactgtataaattatcagtccctcctgaagggatctaatccaggatgttgaatgggattattgccatcttacaccatatttttgtaaaatgtagcttaatcataatctcacactgaagattttgcatcacttttgctattatcattcttttaagaattataagccaaaagaatttacgccttaatgtgtcattatataacattccttaaaagaattgtaaatattggtgtttgtttctgacattttaacttgaaagcgatatgctgcaagataatgtatttaacaatatttggtggcaaatattcaataaatagtttacatctgt

SEQ ID NO: 23674 - DNA, 849 bp, Homo sapiens
  source 1..849: mol_type = unassigned DNA
ggcggatgtgcctggggtggggtcctttgaaggtgtggcttcggaccgagagctttctcctctaaatcttggtctcttgtttggaagtgactaacagcattttggcatgagaaagccctaaaaagatcagtgtgttttttgtgtccaattcttttatcaccaaaaaagagaagaaatattgcagtgaatgaagattcctctgcattttagcactgctttttcaactgtagttggcttttgaatgaggatgacaatggaagagatgaagaatgaagctgagaccacatccatggtttctatgcccctctatgcagtcatgtatcctgtgtttaatgagctagaacgagtaaatctgtctgcagcccagacactgagagccgctttcatcaaggctgaaaaagaaaatccaggtctcacacaagacatcattatgaaaattttagagaaaaaaagcgtggaagttaacttcacggagtcccttcttcgtatggcagctgatgatgtagaagagtatatgattgaacgaccagagccagaattccaagacctaaacgaaaaggcacgagcacttaaacaaattctcagtaagatcccagatgagatcaatgacagagtgaggtttctgcagacaatcaaggatatagctagtgcaataaaagaacttcttgatacagtgaataatgtcttcaagaaatatcaataccagaaccgcagggcacttgaacaccaaaagaaagaatttgtaaagtactccaaaagtttcagtgatactctgaaaacgtattttaaagatggcaaggcaataaatgtgttcgtaagtgccaaccgactaattcatcaaaccaactt

SEQ ID NO: 23675 - DNA, 716 bp, Homo sapiens
  source 1..716: mol_type = unassigned DNA
gaaggtgtggcttcggaccgagagatcagtgtgttttttgtgtccaattcttttatcaccaaaaaagagaagaaatattgcagtgaatgaagattcctctgcattttagcactgctttttcaactgtagttggcttttgaatgaggatgacaatggaagagatgaagaatgaagctgagaccacatccatggtttctatgcccctctatgcagtcatgtatcctgtgtttaatgagctagaacgagtaaatctgtctgcagcccagacactgagagccgctttcatcaaggctgaaaaagaaaatccaggtctcacacaagacatcattatgaaaattttagagaaaaaaagcgtggaagttaacttcacggagtcccttcttcgtatggcagctgatgatgtagaagagtatatgattgaacgaccagagccagaattccaagacctaaacgaaaaggcacgagcacttaaacaaattctcagtaagatcccagatgagatcaatgacagagtgaggtttctgcagacaatcaaggatatagctagtgcaataaaagaacttcttgatacagtgaataatgtcttcaagaaatatcaataccagaaccgcagggcacttgaacaccaaaagaaagaatttgtaaagtactccaaaagtttcagtgatactctgaaaacgtattttaaagatggcaagtaagtactgtaatttatc

SEQ ID NO: 23676 - DNA, 686 bp, Homo sapiens
  source 1..686: mol_type = unassigned DNA
gtgggaagtgaagtcagtgcctcagttgctgggaagaggagcactggaagaaggaagagacaaatgttggggtctacggattcagttccagtttaatgatgtggccctctaaggagataattttgccttaaacagaaagacttgaccctcttaggtgtcatacctaagatcagtgtgttttttgtgtccaattcttttatcaccaaaaaagagaagaaatattgcagtgaatgaagattcctctgcattttagcactgctttttcaactgtagttggcttttgaatgaggatgacaatggaagagatgaagaatgaagctgagaccacatccatggtttctatgcccctctatgcagtcatgtatcctgtgtttaatgagctagaacgagtaaatctgtctgcagcccagacactgagagccgctttcatcaaggctgaaaaagaaaatccaggtctcacacaagacatcattatgaaaattttagagaaaaaaagcgtggaagttaacttcacggagtcccttcttcgtatggcagctgatgatgtagaagagtatatgattgaacgaccagagccagaattccaagacctaaacgaaaaggcacgagcacttaaacaaattctcagtaagatcccagatgagatcaatgacagagtgaggtttctgcagacaatcaaggatata

SEQ ID NO: 23677 - DNA, 1276 bp, Homo sapiens
  source 1..1276: mol_type = unassigned DNA
cggctgggcaggattccggacaacgcctggttcctcttgggtccttccggcgtcgccggagtgaattgatccgggagttgaagagggctgcaaggtgggaagtgaagtcagtgcctcagttgctgatcagtgtgttttttgtgtccaattcttttatcaccaaaaaagagaagaaatattgcagtgaatgaagattcctctgcattttagcactgctttttcaactgtagttggcttttgaatgaggatgacaatggaagagatgaagaatgaagctgagaccacatccatggtttctatgcccctctatgcagtcatgtatcctgtgtttaatgagctagaacgagtaaatctgtctgcagcccagacactgagagccgctttcatcaaggctgaaaaagaaaatccaggtctcacacaagacatcattatgaaaattttagagaaaaaaagcgtggaagttaacttcacggagtcccttcttcgtatggcagctgatgatgtagaagagtatatgattgaacgaccagagccagaattccaagacctaaacgaaaaggcacgagcacttaaacaaattctcagtaagatcccagatgagatcaatgacagagtgaggtttctgcagacaatcaaggatatagctagtgcaataaaagaacttcttgatacagtgaataatgtcttcaagaaatatcaataccagaaccgcagggcacttgaacaccaaaagaaagaatttgtaaagtactccaaaagtttcagtgatactctgaaaacgtattttaaagatggcaaggcaataaatgtgttcgtaagtgccaaccgactaattcatcaaaccaacttaatacttcagaccttcaaaactgtggcctgaaagttgtatatgttaagagatgtacttctcagtggcagtattgaactgcctttatctgtaaattttaaagtttgactgtataaattatcagtccctcctgaagggatctaatccaggatgttgaatgggattattgccatcttacaccatatttttgtaaaatgtagcttaatcataatctcacactgaagattttgcatcacttttgctattatcattcttttaagaattataagccaaaagaatttacgccttaatgtgtcattatataacattccttaaaagaattgtaaatattggtgtttgtttctgacattttaacttgaaagcgatatgctgcaagataatgtatttaacaatatttggtggcaaatattcaataaatagtttacatct

SEQ ID NO: 23678 - DNA, 6453 bp, Homo sapiens
  source 1..6453: mol_type = unassigned DNA
ggactgtgggtatcctggtctccgcgtgtgtgagtaccgcggcgcgaggttagtggtagctgggtgcagacgccgtggcgctggagacccaaacatggcaaacctggaagaaagcttcccccgaggaggtacaagaaagatccacaaaccagagaaagctttccagcagtcagttgaacaagacaacttatttgatatttctactgaagagggatccaccaaaagaaaaaagagccagaaggggccagcaaaaacaaaaaagttgaaaatcgaaaagagagaaagcagcaagtccgcaagagagaagtttgaaatccttagtgttgagtccctgtgtgagggaatgcgtattttgggttgcgtgaaagaggtgaatgaactggaactggtgattagtctccccaatggcctccagggctttgtgcaagtcactgaaatctgtgatgcctacaccaaaaagctgaatgagcaggtgacacaagaacaacctctgaaggacctacttcacttgcctgaacttttctcacctggaatgctggtaagatgtgtggtgagcagtctgggcatcacagacaggggcaagaagagtgtcaagctgtctctgaaccccaaaaatgtcaacagagtgctgagtgctgaggccctgaagcctggcatgctacttacaggtaccgtatccagcctggaagaccatggctacctagtggacattggtgttgatgggaccagagcttttctgccactgctgaaagcccaggagtacatcagacagaagaacaaaggtgctaaactaaaggtgggtcagtacctgaactgcattgttgaaaaggtgaaaggcaacggaggagttgttagtctgtctgttggtcactcagaggtttctacggccattgctactgaacagcagagctggaaccttaataacttgctaccaggactggtggtcaaagctcaggtacagaaggtgactccatttggccttacgctaaacttcctcacattcttcacgggcgtggttgactttatgcacctggatcccaagaaagctggaacatatttctcaaatcaggcagtgagggcctgcatcctttgcgtccatcctcgaaccagagttgtgcacctgagcctgcgccccatcttcctacagcctggacgcccactcacccgactctcttgccagaaccttggagcagtgctggatgatgttcctgtccagggttttttcaaaaaggctggggccacctttaggctgaaggatggggttctggcctatgcccggctcagccatctctctgattctaagaacgtcttcaatcctgaggccttcaagccagggaacactcacaagtgtagaattattgactacagccaaatggatgaactggccttgctctctctacgaacgtctattattgaagctcagtaccttagatatcatgacatcgaacctggggcagtggtaaagggcacagtgctaaccataaagtcatatgggatgctggtgaaggtgggcgagcagatgaggggcctggtacctcccatgcacctggctgacatcctgatgaagaatccggagaagaagtaccacatcggggatgaggtcaagtgccgggttttgctttgtgaccctgaagccaagaagctgatgatgaccctgaaaaaaaccctgattgagtccaaactacctgtcattacctgctatgccgatgccaagcctggtctgcagacacatggcttcatcatcagggtcaaggactatggctgcattgtgaagttctacaacaatgtgcagggactggtgcccaagcatgagctcagtactgagtatatccctgacccggagagagttttttacactggccaggtggtgaaggttgtcgtattgaactgtgagccatccaaagagaggatgctcttatccttcaagctgtcgagtgatccagagccaaagaaagagcctgcaggacacagtcagaagaaaggaaaagccattaacattgggcagttggtagatgtgaaggttttagagaagaccaaagatgggctggaggtggctgtcctgccccacaacatccgtgctttcctccccacatctcatctgtcggaccacgttgccaacggcccattgttacatcattggctccaggcaggtgacatccttcaccgagtcctgtgtctgagccagagcgaggggcgtgttcttctttgcaggaagccagccttggtctccacagtagaaggtggccaggatcccaagaacttctcagaaatccatcctggaatgctgctcattggttttgtgaagagcatcaaggactatggcgtgttcatccagttcccctcaggtcttagcggactggccccaaaagctatcatgagtgacaaatttgtgacctccacaagtgaccactttgttgagggccagacagtagcggcaaaggtgaccaatgtggatgaggagaagcagcggatgctgctgtcactgcggctgtcggactgtggtctgggggacttggctatcaccagcctcctcctcctgaatcagtgcctggaggagctgcagggcgtgcgcagccttatgagcaaccgagactctgtgttgatccagacgctggccgagatgaccccaggaatgttccttgacctagtggtgcaggaggtgttggaagatggctctgtggtattcagtgggggtccagtgcccgacctggtcctgaaagccagcagataccatcgcgcagggcaggaggtggaatctgggcagaaaaagaaggttgttatcttaaatgttgatcttttgaagttggaagtgcacgtttcccttcaccaggacttggtgaatagaaaagctagaaagctgaggaaaggcagcgaacaccaggcgattgtgcagcacttggagaagtcctttgccattgcctccttggtagagacgggccacctggcagctttctccctgacctctcacctcaacgacaccttccgctttgactcagagaaattgcaggtgggacagggtgtctccctaaccctcaagaccacagaaccaggagtgactggccttcttttggctgtggaggggccggctgccaagaggaccatgaggccgacccagaaggactctgagacagttgatgaggatgaagaagtggatccagctctgactgtagggaccataaagaagcacaccctctccatcggggacatggtcacagggactgtcaagtccattaagcctacccatgtggttgtgactctggaagatggcattattggctgtatccatgcctcccacattctagatgatgttccagagggcacctctcctactaccaagctgaaggttgggaagacggtcactgcccgagtgattggcgggcgagacatgaagacattcaagtatctcccaataagtcaccccagattcgttcgaaccatcccggagctgagtgttcggccaagtgagctggaggatggccacactgctcttaacactcactctgttagccccatggagaagattaaacagtaccaggccggccagactgttacttgcttcttaaagaaatacaatgtggtgaagaaatggcttgaggtggagattgccccagacatccgggggagaattcccttattgctcacttctctgagcttcaaggttctgaagcatccagataagaagttccgggttggccaggccctgagggccaccgttgttggcccagattcctccaagaccctcttatgtctgtccctcacaggtcctcacaagcttgaggaaggggaagtggccatgggccgagtggtgaaggtgactcccaacgaggggctgaccgtctccttcccctttgggaagataggaacagtcagtatatttcacatgagtgactcctactccgagacgcccctggaagacttcgtcccccagaaggttgtcagatgttacatcctgtccactgcagacaacgtattgactttgtcgctgcgatcatccagaacaaacccggagacgaaaagcaaagtagaagatccagagattaactccatccaggacattaaggaagggcagcttctgaggggctatgtagggtccatccagccacacggtgtgttctttcgccttggcccctccgttgtgggtttggctcggtactcccatgtctcccagcacagcccgtccaagaaagccctttataacaaacacctccctgaagggaagctgctcacagccagggtcctacgccttaaccaccagaagaacctggtagagctgtctttcctccccggagacactgggaagccagacgtgctttctgcttccttggaagggcaacttacaaagcaagaggagaggaaaacagaggctgaggagagagaccaaaaaggggaaaagaaaaatcagaaaaggaacgagaagaagaaccagaaggggcaggaggaggtggagatgcccagcaaggagaagcaacagccccagaagccacaggcgcagaagcggggcgggcgggagtgccgggagtctgggagtgagcaggaaagagtgagcaagaagccaaagaaagccggcctgtcagaggaggacgacagccttgtggacgtgtactatcgggagggaaaagaggaggcagaagagacgaatgtgctgcccaaggagaagcaaaccaagccagcagaagcgccccggctgcagctgtcttcaggcttcgcttggaatgtgggactagactctctgaccccggccttgccacctctagcagagagctcagacagcgaggaggatgagaagccacaccaagccacgataaagaaaagcaagaaagaaagggagttggagaagcagaaggcagagaaggaactgtcccgcattgaggaggcgctgatggatcctgggcggcagccagagtccgcggatgattttgaccgactggtgctgagctcccccaacagctccattctgtggctgcagtacatggctttccacctgcaggccacggagatcgagaaggcccgtgccgtggctgagagggcccttaagaccatctccttcagagaggagcaggagaagctgaacgtgtgggtggctctgctgaacctggagaacatgtacggctctcaggagtccctgaccaaggtctttgagcgagccgtgcagtacaacgagcctctcaaagtctttctccacctggctgacatctacgccaagtcagagaaattccaggaagctggtgaactctacaaccggatgctgaagcgtttccggcaggagaaagctgtgtggatcaaatacggcgccttccttctgcggaggagccaggctgcagccagtcaccgcgtgctgcagcgagccctggagtgcctgcctagcaaggagcatgtggatgtcattgccaagtttgcccagcttgagtttcagctgggggatgcagagcgggccaaagccatttttgagaacacgctgagcacctacccaaagcgcacagatgtctggtcggtctatatcgacatgaccatcaagcacggcagccagaaggacgtccgggacatctttgagcgggtcattcatctgagcttggcccccaagagaatgaagttcttcttcaagcgctacctggactacgagaagcagcatggcactgagaaggatgtgcaggcagtcaaggccaaggccctggagtatgtggaggccaagagctcagtgctagaggactagtggcaggctggctctgtgggacactgtcaacaatgggccagcccggccccgcctcgagtgcctgggcactcggaaaactgttacctcaggactctatttaaatgctgctttttctgcagcacgcttggggaaatcctgtcaggatgaaaaggaagttgagattttttaaatccctcttcgcttgctttattttcagtaccaacttgttatctttttccttatctgaggctacctggggattgtgggcagcaggcccctggactcccagaaatgctgagggtccctcttccaggggagttccctggggagcaagagtagaggggctattcccgagggtcctgtggtcagggtcctgctttgtccctggcaggctgtcagtccagctggagggggtcagtaggctccagggagtgggccctcccctccgatcttggagtctctgggtgttccttcagcctcagcctcactggtaccttctgccctttaggggaggctatgagtctgggacaggaggacaaattcagagcccagagggggaaatggagaaacctgggctgctgaggaaagccacgggtgttggcgtgaactgatgatgtctcatcccacgcccactatggccacattacctaacctctccatatctgggctattcaaggtcttggaggccagcacagacccagctagttgttgaagccagttcttttttgtcttggtcatgagggaattaaacgttttctctggca

SEQ ID NO: 23679 - DNA, 3789 bp, Homo sapiens
  source 1..3789: mol_type = unassigned DNA
gggtatcctggtctccgcgtgtgtgagtaccgcggcgcgaggttagtggtagctgggtgcagacgccgtggcgctggagacccaaacatggcaaacctggaagaaagcttcccccgaggaggtacaagaaagatccacaaaccagagaaagctttccagcagtcagttgaacaagacaacttatttgatatttctactgaagagggatccaccaaaagaaaaaagagccagaaggggccagcaaaaacaaaaaagttgaaaatcgaaaagagagaaagcagcaagtccgcaagagagaagtttgaaatccttagtgttgagtccctgtgtgagggaatgcgtattttgggttgcgtgaaagaggtgaatgaactggaactggtgattagtctccccaatggcctccagggctttgtgcaagtcactgaaatctgtgatgcctacaccaaaaagctgaatgagcaggtgacacaagaacaacctctgaaggacctacttcacttgcctgaacttttctcacctggaatgctggtaagatgtgtggtgagcagtctgggcatcacagacaggggcaagaagagtgtcaagctgtctctgaaccccaaaaatgtcaacagagtgctgagtgctgaggccctgaagcctggcatgctacttacaggtaccgtatccagcctggaagaccatggctacctagtggacattggtgttgatgggaccagagcttttctgccactgctgaaagcccaggagtacatcagacagaagaacaaaggtgctaaactaaaggtgggtcagtacctgaactgcattgttgaaaaggtgaaaggcaacggaggagttgttagtctgtctgttggtcactcagaggtttctacggccattgctactgaacagcagagctggaaccttaataacttgctaccaggactggtggtcaaagctcaggtacagaaggtgactccatttggccttacgctaaacttcctcacattcttcacgggcgtggttgactttatgcacctggatcccaagaaagctggaacatatttctcaaatcaggcagtgagggcctgcatcctttgcgtccatcctcgaaccagagttgtgcacctgagcctgcgccccatcttcctacagcctggacgcccactcacccgactctcttgccagaaccttggagcagtgctggatgatgttcctgtccagggttttttcaaaaaggctggggccacctttaggctgaaggatggggttctggcctatgcccggctcagccatctctctgattctaagaacgtcttcaatcctgaggccttcaagccagggaacactcacaagtgtagaattattgactacagccaaatggatgaactggccttgctctctctacgaacgtctattattgaagctcagtaccttagatatcatgacatcgaacctggggcagtggtaaagggcacagtgctaaccataaagtcatatgggatgctggtgaaggtgggcgagcagatgaggggcctggtacctcccatgcacctggctgacatcctgatgaagaatccggagaagaagtaccacatcggggatgaggtcaagtgccgggttttgctttgtgaccctgaagccaagaagctgatgatgaccctgaaaaaaaccctgattgagtccaaactacctgtcattacctgctatgccgatgccaagcctggtctgcagacacatggcttcatcatcagggtcaaggactatggctgcattgtgaagttctacaacaatgtgcagggactggtgcccaagcatgagctcagtactgagtatatccctgacccggagagagttttttacactggccaggtggtgaaggttgtcgtattgaactgtgagccatccaaagagaggatgctcttatccttcaagctgtcgagtgatccagagccaaagaaagagcctgcaggacacagtcagaagaaaggaaaagccattaacattgggcagttggtagatgtgaaggttttagagaagaccaaagatgggctggaggtggctgtcctgccccacaacatccgtgctttcctccccacatctcatctgtcggaccacgttgccaacggcccattgttacatcattggctccaggcaggtgacatccttcaccgagtcctgtgtctgagccagagcgaggggcgtgttcttctttgcaggaagccagccttggtctccacagtagaaggtggccaggatcccaagaacttctcagaaatccatcctggaatgctgctcattggttttgtgaagagcatcaaggactatggcgtgttcatccagttcccctcaggtcttagcggactggccccaaaagctatcatgagtgacaaatttgtgacctccacaagtgaccactttgttgagggccagacagtagcggcaaaggtgaccaatgtggatgaggagaagcagcggatgctgctgtcactgcggctgtcggactgtggtctgggggacttggctatcaccagcctcctcctcctgaatcagtgcctggaggagctgcagggcgtgcgcagccttatgagcaaccgagactctgtgttgatccagacgctggccgagatgaccccaggaatgttccttgacctagtggtgcaggaggtgttggaagatggctctgtggtattcagtgggggtccagtgcccgacctggtcctgaaagccagcagataccatcgcgcagggcaggaggtggaatctgggcagaaaaagaaggttgttatcttaaatgttgatcttttgaagttggaagtgcacgtttcccttcaccaggacttggtgaatagaaaagctagaaagctgaggaaaggcagcgaacaccaggcgattgtgcagcacttggagaagtcctttgccattgcctccttggtagagacgggccacctggcagctttctccctgacctctcacctcaacgacaccttccgctttgactcagagaaattgcaggtgggacagggtgtctccctaaccctcaagaccacagaaccaggagtgactggccttcttttggctgtggaggggccggctgccaagaggaccatgaggccgacccagaaggactctgagacagttgatgaggatgaagaagtggatccagctctgactgtagggaccataaagaagcacaccctctccatcggggacatggtcacagggactgtcaagtccattaagcctacccatgtggttgtgactctggaagatggcattattggctgtatccatgcctcccacattctagatgatgttccagagggcacctctcctactaccaagctgaaggttgggaagacggtcactgcccgagtgattggcgggcgagacatgaagacattcaagtatctcccaataagtcaccccagattcgttcgaaccatcccggagctgagtgttcggccaagtgagctggaggatggccacactgctcttaacactcactctgttagccccatggagaagattaaacagtaccaggccggcctgtcagaggaggacgacagccttgtggacgtgtactatcgggagggaaaagaggaggcagaagagacgaatgtgctgcccaaggagaagcaaaccaagccagcagaagcgccccggctgcagctgtcttcaggcttcgcttggaatgtgggactagactctctgaccccggccttgccacctctagcagagagctcagacagcgaggaggatgagaagccacaccaagccacgcagataaagaaaagcaagaaa

SEQ ID NO: 23680 - DNA, 936 bp, Homo sapiens
  source 1..936: mol_type = unassigned DNA
atggctgccgccggggccaggcctgtggagctgggcttcgccgagtcggcgccggcgtggcgactgcgcagcgagcagttccccagcaaggtgtatgcgccgctgcctggccgcccggacgccttccaccgctgcatcttcctcttctgctgccgcgagcagccgtgctgtgccggcctgcgagtttttaggaatcaactacccaggaaaaacgatttttactcatatgagccaccttctgagaatcctcccccagaaacaggagaatcagtgtgtctccagcttaagtctggtgctcatctctgcagggtttgtggctgtttaggccccaaaacgtgctccagatgccacaaagcatattactgcagcaaggagcatcagaccctagactggagattgggacataagcaggcttgtgcacaaccagatcatctggaccatataattccagaccacaacttcctttttccagaatttgaaattgtaatagaaacagaagatgagattatgcctgaggttgtggaaaaggaagattactcagagattatagggagcatgggtgaagcacttgaggaagaactggattccatggcaaaacatgaatccagggaagataaaatttttcagaagtttaaaactcagatagcccttgaaccagaacagattcttagatatggcagaggtattgcccccatctggatttctggtgaaaatattcctcaagaaaaggatattccagattgcccctgtggtgccaagagaatattggaattccaggtcatgcctcagctcctaaactacctgaaggctgacagactgggcaagagcattgactggggcatcctggctgtcttcacctgtgctgagagctgcagcttgggtactggctatacagaagaatttgtgtggaagcaggatgtaacagatacaccgtaa

SEQ ID NO: 23681 - DNA, 2657 bp, Homo sapiens
  source 1..2657: mol_type = unassigned DNA
gggctgcgccccacgccagcccgcgccccgcatggctgccgccggggccaggcctgtggagctgggcttcgccgagtcggcgccggcgtggcgactgcgcagcgagcagttccccagcaaggtgggcgggcggccggcatggctgggcgcggccgggctgccggggccccaggccctggcctgcgagctgtgcggccgcccgctctccttcctgctgcaggtgtatgcgccgctgcctggccgcccggacgccttccaccgctgcatcttcctcttctgctgccgcgagcagccgtgctgtgccggcctgcgagtttttaggaatcaactacccaggaaaaacgatttttactcatatgagccaccttctgagaatcctcccccagaaacaggagaatcagtgtgtctccagcttaagtctggtgctcatctctgcagggtttgtggctgtttaggccccaaaacgtgctccagatgccacaaagcatattactgcagcaaggagcatcagaccctagactggagattgggacataagcaggcttgtgcacaaccagatcatctggaccatataattccagaccacaacttcctttttccagaatttgaaattgtaatagaaacagaagatgagattatgcctgaggttgtggaaaaggaagattactcagagattatagggagcatgggtaagcagtttcaggacttcattcattaagtggttaaacataatacttggaagaaagggctccatgtgcctagaagagaggtactgagaggaagactcactttggaggctgtagcatacaattttcagatattgcctcaggtaaaaatatacttcctggactttgttttctgacacataagaggtgtgttctgctccctgtaaagacaagggtgggtatccagatggtcccatgagtagggctgcacaagatgctggaggcttggtaagttcctctgggtcgcagatcggtttctcgggtcgggatagtgtgagtgcctagcacagtgtcgggcacgcagaagggccccttaaaagtttctctttcatctggccagttttagatacacaattttgtcagtttacttacagtgcatactcttgggtagtacttgtgctgaccaagtatcttagaggcttattttattatagtagccaacatttatccagcacttaccttatataaagggctgtttgtgcatgagctcattaaaatcgtgacagcagaccaatgagtgagaaactgccccattttgaaggtgaggaaattgaggttctgggtataactttctttggtcacataatattaaattttacaatttgagccttgagccatacacaaaaccaccacaaaattagatttatagactcaaaatgaaaacatcagcttactggtttgtagttcataccagtcatacattccaaaacatgttttgagtcttactctgtgcctgaccttgtgcttgataacagggatataatgggaagcaacactccagtggtcagatgctcacagtcttatggaggagcccaaataatatctggggaagttaaagtccatataatgactgataagagtacaatacaggtgccatgggaacacgtgacatcactgaagactgcctggaaggggccgcgcgtgtgttcatgcctatacgataaacatgatacataatgaaaatgcttatctttaggagaaaggagagcctagagtagcaggatcaaggatgaaagctggacttcaaatatgccttgttagtgtaaatgtgactgtggaactgtatgagtattttaagattatggagtaaagtaagttttaaaaagcagtccctaatcatcaaaagtaaaaaactcttgatgtagtcatataaccacactaagaactcttccaggtgacttcaaaacataggacagtacatctctagtagaatatgccctgagaatgaaaagaatgtaacagtgttagtattttgaataaacatgttattactagactgttgcttttattttgagatggttgtgtgtgtattggggggaaaggaaacgagtaattatgttggtgttactgagaactgagatgttgggcgtaggaggaagataatgttgattgtgtctacgtaccatttctctctaaaaggaactccaggctctttggagaggtggttgattccagaactaggtcaggaaacgttcatataatgtgggaacatggtcatatcaaagattaaggataaggattactagggccatgtcagaactcaagcaacatgaaaaggctcctgcttgcaaaagatggacagtttgaacatccacaaggacgctaactgcatcagatatgtttaatgggttcaaaatgatactttaaaaaaactcagtaatcatctttataggatacttgggaacagactcattttcaaattggtaaataaaaggaaagagtttgccttcgaggggtacataacttaattatgaatgaagtgatatgtgtggaatttacttcagagtaatggaggtggaagtggcagagaaaggaaacactggacttgatagtgttgaaactgattaatgatatgtggcggttcattatagtatttccacttttctgtatgtccaaaattttctaaaataaaaggagaattgaatagaaaaa

SEQ ID NO: 23682 - DNA, 3378 bp, Homo sapiens
  source 1..3378: mol_type = unassigned DNA
tcttgccttccggcccggcgcccgatttccgccttccgacccagctgtgggctgcgccccacgccagcccgcgccccgcatggctgccgccggggccaggcctgtggagctgggcttcgccgagtcggcgccggcgtggcgactgcgcagcgagcagttccccagcaaggtgggcgggcggccggcatggctgggcgcggccgggctgccggggccccaggccctggcctgcgagctgtgcggccgcccgctctccttcctgctgcaggtgtatgcgccgctgcctggccgcccggacgccttccaccgctgcatcttcctcttctgctgccgcgagcagccgtgctgtgccggcctgcgagtttttaggaatcaactacccaggaaaaacgatttttactcatatgagccaccttctgagaatcctcccccagaaacaggagaatcagtgtgtctccagcttaagtctggtgctcatctctgcagggtttgtggctgtttaggccccaaaacgtgctccagatgccacaaagcatattactgcagcaaggagcatcagaccctagactggagattgggacataagcaggcttgtgcacaaccagatcatctggaccatataattccagaccacaacttcctttttccagaatttgaaattgtaatagaaacagaagatgagattatgcctgaggttgtggaaaaggaagattactcagagattatagggagcatgggtgaagcacttgaggaagaactggattccatggcaaaacatgaatccagggaagataaaatttttcagaagtttaaaactcagatagcccttgaaccagaacagattcttagatatggcagaggtattgcccccatctggatttctggtgaaaatattcctcaagaaaaggatattccagattgcccctgtggtgccaagagaatattggaattccaggtcatgcctcagctcctaaactacctgaaggctgacagactgggcaagagcattgactggggcatcctggctgtcttcacctgtgctgagagctgcagcttgggtactggctatacagaagaatttgtgtggaagcaggatgtaacagatacaccgtaaaggcatcttaaagccttgaaaaatgttaataatcttttataccttgcaattccatttctgggattttatcctaaggaaatacttataccaaaaatagaggtgcagagatgttgacagattgcttacacagtgtctacttattagtgaaacaaaagtgtccagtgacagggaattaaataaattttggtacatccacagaggaaggctacacagtcttaattataacacctatattgacaacagacataccattataggtggtattcatggtatgatcctattcttgtaaaaatatttgtatgtatgcacagaaatctgcaaagatgtacacttagtgaactggttaccaacgaatggtgggactaactaaaatggtctttttacttatatgtgcatttctttttataataaaaatgggttatatgcctaatgaagtcaaaccatctcactctgagcatttcccaccctaggtttttaaaacacaaaaatacttaggtaaaactcccaacaaacttgtctgatcattagctgattatcacaggctctagtatgtactggaagcccagaatatttgagaaataccaaacctcaggttggtgagtatgatgaacaggaaacccagtaattctgaagcagcagtatcacagttggcaggatgaggaacaacagtggctttgtgatcacagaactggaatttaaagaggctggaccttcagaactgatcttggtcagccagcggccctgcttacagatgagacactgaaaggcaaaaggcgatggtcttccctttccgtgtcagcattgtatacaggttccctatcgcacatacaagggttatggaatgtaagccaaaataagggtctggcctaggaggcagcagcctgaggaaaggaaggccctgaagtcagttttcaaagggctgacccttggcctattatgtttctgatacatctgtttaagcaagcggctcctaagactacactaaggtttcttccatcccctagcagctcacagttgacaattcccagttctctcagcaccagtgatgcctgcccttaagacacattgctgttgatcagtgcttgaatactgacggctaattctgataaatttctcaggcttatttccttaatctacattggctcacattgtcccctaacacatccctgttaactgaaatgcattgccaccataaatcctcacgttttcataggtaacatcacttgctaatgtaattgtctacttggctattttatttgtaatttaaaaagttctgtcctagtagtccatattatataagtatacatatgcaatttgtattaattgtataagatagttatacatagcaccatatgggaaactgcagtatggagtttctcccatggggaggttatcagctacttaagagctagaggatactagtttcgaacctgggatggctaaatctatgaaaatcacctataactatggtgtcacagccctgtggctactggagtaagttgtcatcaactagtgacaagagctggtcgcaacacttagtaggaagcacagtggcataaggaaacctggactagtggggcctttatatctaaaattatgtattattccttataggcagaatctgtaagtacgttatgactgctaatgacttttaaagcaaacatgttaacgatctttctatggtaaaaactgttatttggggacatcaccagatgatgtggacattcttgcaggtattttggcatacccaggcaagctgtcattggtgtatattccagttaacctctggagatgatcgtaacagtttacagggcctttccatttgggatggatatatcaagagggagacaaactggtccaaatcaccagaaagaaaatctcacagcaccgacttggcatctgtgttaaaaaatagcaactatatttaaaataaactgtacaacataaaaaatttaaattaaaaaatgcattaagcaagttgcctttagaaatgtgaagacattttaaaacactacaagataatgagcaagtctcacctacataatcatggctccacagacggtgccagtccatgcatccaccatttctcaacacctacaaagttttaagatctgcttggttcagatactgtccagccacagcagctccctctgctgtagagagcagcatattcagctttgcctttttatttcagatactgaatatcctttggcaatttcagatatcacagcaaaaaaaaaaaaagttccaagtgtttttggcaa

SEQ ID NO: 23683 - DNA, 1897 bp, Homo sapiens
  source 1..1897: mol_type = unassigned DNA
cttccggcccggcgcccgatttccgccttccgacccagctgtgggctgcgccccacgccagcccgcgccccgcatggctgccgccggggccaggcctgtggagctgggcttcgccgagtcggcgccggcgtggcgactgcgcagcgagcagttccccagcaaggtgtatgcgccgctgcctggccgcccggacgccttccaccgctgcatcttcctcttctgctgccgcgagcagccgtgctgtgccggcctgcgagtttttaggaatcaactacccaggaaaaacgatttttactcatatgagccaccttctgagaatcctcccccagaaacaggagaatcagtgtgtctccagcttaagtctggtgctcatctctgcagggtttgtggctgtttaggccccaaaacgtgctccagatgccacaaagcatattactgcagcaaggagcatcagaccctagactggagattgggacataagcaggcttgtgcacaaccagatcatctggaccatataattccagaccacaacttcctttttccagaatttgaaattgtaatagaaacagaagatgagattatgcctgaggttgtggaaaaggaagattactcagagattatagggagcatgggtaagcagtttcaggacttcattcattaagtggttaaacataatacttggaagaaagggctccatgtgcctagaagagaggtactgagaggaagactcactttggaggctgtagcatacaattttcagatattgcctcaggtaaaaatatacttcctggactttgttttctgacacataagaggtgtgttctgctccctgtaaagacaagggtgggtatccagatggtcccatgagtagggctgcacaagatgctggaggcttggtaagttcctctgggtcgcagatcggtttctcgggtcgggatagtgtgagtgcctagcacagtgtcgggcacgcagaagggccccttaaaagtttctctttcatctggccagttttagatacacaattttgtcagtttacttacagtgcatactcttgggtagtacttgtgctgaccaagtatcttagaggcttattttattatagtagccaacatttatccagcacttaccttatataaagggctgtttgtgcatgagctcattaaaatcgtgacagcagaccaatgagtgagaaactgccccattttgaaggtgaggaaattgaggttctgggtataactttctttggtcacataatattaaattttacaatttgagccttgagccatacacaaaaccaccacaaaattagatttatagactcaaaatgaaaacatcagcttactggtttgtagttcataccagtcatacattccaaaacatgttttgagtcttactctgtgcctgaccttgtgcttgataacagggatataatgggaagcaacactccagtggtcagatgctcacagtcttatggaggagcccaaataatatctggggaagttaaagtccatataatgactgataagagtacaatacaggtgccatgggaacacgtgacatcactgaagactgcctggaaggggccgcgcgtgtgttcatgcctatacgataaacatgatacataatgaaaatgcttatctttaggagaaaggagagcctagagtagcaggatcaaggatgaaagctggacttcaaatatgccttgttagtgtaaatgtgactgtggaactgtatgagtattttaagattatggagtaaagtaagttttaaaaagcagtccctaatcatcaaaagtaaaaaactcttgatgtagtcatataaccacactaagaactcttccaggtgacttcaaaacataggacagtacatctctagtagaatatgccctgagaatgaa

SEQ ID NO: 23684 - DNA, 1114 bp, Homo sapiens
  source 1..1114: mol_type = unassigned DNA
tgtgggctgcgccccacgccagcccgcgccccgcatggctgccgccggggccaggcctgtggagctgggcttcgccgagtcggcgccggcgtggcgactgcgcagcgagcagttccccagcaaggtgtatgcgccgctgcctggccgcccggacgccttccaccgctgcatcttcctcttctgctgccgcgagcagccgtgctgtgccggcctgcgagtttttaggaatcaactacccaggaaaaacgatttttactcatatgagccaccttctgagaatcctcccccagaaacaggagaatcagtgtgtctccagcttaagtctggtgctcatctctgcagggtttgtggctgtttaggccccaaaacgtgctccagatgccacaaagcatattactgcagcaaggagcatcagaccctagactggagattgggacataagcaggcttgtgcacaaccagatcatctggaccatataattccagaccacaacttcctttttccagaatttgaaattgtaatagaaacagaagatgagattatgcctgaggttgtggaaaaggaagattactcagagattatagggagcatggggatataatgggaagcaacactccagtggtcagatgctcacagtcttatggaggagcccaaataatatctggggaagttaaagtccatataatgactgataagagtacaatacaggtgccatgggaacacgtgacatcactgaagactgcctggaaggggccgcgcgtgtgttcatgcctatacgataaacatgatacataatgaaaatgcttatctttaggagaaaggagagcctagagtagcaggatcaaggatgaaagctggacttcaaatatgccttgttagtgtaaatgtgactgtggaactgtatgagtattttaagattatggagtaaagtaagttttaaaaagcagtccctaatcatcaaaagtaaaaaactcttgatgtagtcatataaccacactaagaactcttccaggtgacttcaaaacataggacagtacatctctagtagaatatgccctgagaatgaaaagaatgtaacagtgttagtattttgaataaacatgttattactaga

SEQ ID NO: 23685 - DNA, 6161 bp, Homo sapiens
  source 1..6161: mol_type = unassigned DNA
agtacttctccggggggttgttcgagtggaggaatactcttacgtgaaagtgctcagtacaccactgcggcaggaaggaggaagggaagaattccagatggggagaaagtaatattttgcagcacagtacagggtaaactgggtccaggtgggcgtagccgccgcgacaccttcacgtgaccgcggacagcttaaggaccccgcatccagtgcgcctgcgctggagctcccggaagttgccggacccggaacgcaggcggagcgcaagtctgtcagccagtcagtccgccagtccgccagcccagtacctctctctcctcggccctcgtaagctgtccgcggtctgtttggcccgaacggcggcggaggcgctgatcatggcgacattcatctcggtgcagctgaaaaagacctcagaggtggacctggccaagccgctggtgaagttcatccagcagacttacccaagcggcggggaagagcaggcccagtactgccgcgcggcggaggagctcagcaagctgcgccgcgccgcagtcggtcgtccgctggacaagcacgagggcgcgctcgagacgctcctgagatattatgatcagatttgttctattgaacccaaattcccattttctgaaaatcagatctgcttgacatttacctggaaggatgctttcgataaaggttcactttttggaggctctgtaaaactggctcttgcaagcttaggatatgaaaagagctgtgtgttgttcaattgtgcagccttagctagccaaattgcagcagaacagaacctggataatgatgaaggattgaaaatcgctgctaaacattaccagtttgctagtggtgcctttttacatattaaagagacggttttatctgccttaagtcgagagccgaccgtggacatatctccagatactgttgggaccctcagtcttattatgctggcacaggctcaagaagtattttttttaaaagccacaagagataaaatgaaagatgccatcatagctaaattggctaatcaggctgcagattattttggtgatgctttcaaacagtgtcaatacaaagatactctccccaaggaggtgttccctgtcttggctgcaaagcactgtatcatgcaggccaatgctgagtaccatcagtctatcctggcaaaacagcagaagaaatttggagaagaaattgcaaggttacagcatgcagcagaactgattaaaacagtggcatctcgctatgatgaatatgttaatgtgaaggatttttctgacaaaatcaatcgtgcccttgctgcagcaaagaaggataatgacttcatttatcatgatcgagttccagaccttaaagatctagatcctattggcaaagccacacttgtgaaatctaccccggtcaatgtacccatcagtcagaaatttactgatctgtttgagaagatggttcccgtgtcagtacagcagtctttggctgcctataatcagaggaaagccgatttggttaacagatcaattgctcagatgagagaagccaccactttggcaaatggggtgctagcttcccttaatcttccagcagcaattgaagatgtgtctggagacactgtacctcagtctatattgactaaatccagatctgtgattgaacagggaggcatccagactgttgatcagttgattaaagaactgcctgaattactgcaacgaaatagagaaatcctagatgagtcattaaggttgttggatgaagaagaagcaaccgataatgatttaagagcaaaatttaaggaacgttggcaaaggacaccatccaatgaactgtataagcctttaagagcagagggaaccaacttcagaacagttttagataaagctgtgcaggcagatggacaagtgaaagaatgttaccagtctcatcgtgacaccatcgtgcttttgtgtaagccagagcctgagctgaatgctgccatcccttctgctaatccagcaaagaccatgcagggcagtgaggttgtaaatgtcttaaaatccttattgtcaaatcttgatgaagtaaagaaggaaagagagggtctggagaatgacttgaaatctgtgaattttgacatgacaagcaagtttttgacagccctggctcaagatggtgtgataaatgaagaagctctttctgttactgaactagatcgagtctatggaggtcttacaactaaagtccaagaatctctaaagaaacaggagggacttcttaaaaatattcaggtctcacatcaggaattttcaaaaatgaaacaatctaataatgaagctaacttaagagaagaagttttgaagaatttagctactgcatatgacaactttgttgaacttgtagctaatttgaaggaaggcacaaagttttacaatgagttgactgaaatcctggtcaggttccagaacaaatgcagtgatatagtttttgcacggaagacagaaagagatgaactcttaaaggacttgcaacaaagcattgccagagaacctagtgctccttcaattcctacacctgcgtatcagtcctcaccagcaggaggacatgcaccaactcctccaactccagcgccaagaaccatgccgcctactaagccccagcccccagccaggcctccaccacctgtgcttccagcaaatcgagctccttctgctactgctccatctccagtgggggctgggactgctgcgccagctccatcacaaacgcctggctcagctcctcctccacaggcgcagggaccaccctatcccacctatccaggatatcctgggtattgccaaatgcccatgcccatgggctataatccttatgcgtatggccagtataatatgccatatccaccagtgtatcaccagagtcctggacaggctccatacccgggaccccagcagccttcataccccttccctcagcccccacagcagtcttactatccacagcagtaatatgtctgctcagcagctcagctgattcagatcagagggaaagaaataccaaccctgcaataagtgtactaaactctacgctctggttaatgtaatgtactctcctggactgaatgcagtgtataatttctgtctacagctagaagctgtgccccagttccacatttgattacacatgtgagatttgctgctgttgcagtataaacactaggtataataggatttgaaattgcattacagttcataaaaattgaaaatgagaaattaaacctgcaagtgaaacatttgaaacgattatactttctacataagacatggttgggacatcagatacttacaaagatggtttaagtatggatactagagaaaattaagttttctttctctttggtttattgatttggtttaatttccattatgctattttgcataatcaaggcactgtaaatcttataattttaaaataaattacttaagaacagttgtcattgttatgttttgttattgattctcattactgtctaattttttttctggtattagtctcattttgtatgtatataagttaaacagatactgtttttaagtgcatgaatagtacaagttattatcaaggatgttttacagggaaatcaaaagaatattatcatactttatctttcgtatgctgattagtaaacgatttttgacatttattttagaaagtcctataatgtggaagaaacaaacagttgctaccaaagattcttcaaataaacatacaaataaatgtgtatatttaatgttttattgttagcttctccagaaaattgatgcaaattctggtaataattcttgcattttttccccataacctggttaaaataaatacgccattggcaatacttcataatgtaatggaattgtttggggaacacttactgtaccctctcatcctttttccaccttactgtgttaacttagtgacatttaatgcccaatatgtatgaatagatctaagccatttaattttttttccttaaagattggagtattttataattcaaggagcatacaaaacaatggttgggaacatatgccaattatggaataggctatgtatttaatattaatctctgccattaggatatctactcactgtataaacctcagtaaaaatagtgaagacatgcatcatggaatgagaaaatgagaaaggaatgagttgtctaacatcacagtgggatctgttttttgtgaggttcatttctgaacacattaggcatatgagcagatttccagtgaatctatttatgtttattttctgagtttcaacgctgaccttttcttgcattattgtttcattttaatgatagtgttacttgtcccactgttgttttcattgagtttggatttatattttaaatgttcgaatgaaagtatgattgtaaaagggagtgaattggtttaaaaatatatgtatattttaaactttgttgtgtgtaggaaacatgaaggcatgttaattcaatataaatgacctttgatttcatggaatattaaagttggtttaaagtccaatagttaaaccttagcaaaaatagctttttacttcatcagttgctaagatttaatactttggattcatcaaagtgtgacatgggcttgtttgacttctgtaagtggcatttaagttccacattcttattacttgaggtactttatactaacataagacagtgagagttagaggtattacaagttgctagtttataatgtcttactaatgcagaaacaaggaaaaaagcaaaattggcctgaatattctcttggggaaagagggcaccaaagaaaagggtaagtgcatctgagggccaaaagagatgtataagccttttagcccattccccatgctgggcctgctcacagagccacaggaagatcattcagaaactaggaaaggaggcccccacagctgatcctgccacagcacacctgactcactcggctctgttagtgtaaccttttaaatgtagcaacacaaaccctttccctcttgtcagttcactcatcctttggtttctttttaatcacctgtgtctgggcacagacaatcacaataaatgcagccctttattactgttaaggatcatactgttggtttggagttggaagggtactactctgtgattcaggtgtgttgtacccatatttataattaggctttattatcttcctaaatcaaggaaaggaaatcatccccagaccatttatgctgagctttggaatactattttaaactggattgtacttaaataatgaagctctgcatagaggaactagtcagaagtggggaaaacactgtctaatttttatcagtctggtataaagtattgatctaagagaactctccctgtgccccttggtctttattctcaattaagaaaaacagtcacatgtcacgacaaaccaatcaatctttatgagatattcctgtatccataccccagcttgtttgcaatttataaacctccccttcaaaactaaggagttgcagaaaaaaatggatttcacagagccttgtgtccctaaagttctgtcccagtcagcagtctttatagtccaaacagattataaaaaatgttttccatttgaactttacagtttgcaaaagtgcttttatacattttctaatttcagaaacaggataatttgttaagtgggtttcagtttgctaatagggattttttgtgttttgttttttaattttcagcatctcttgaagaatcttgctacagccaaatggcatctcactttttaaagacgtttgcaattattagttgattcacagtacagaacaaggtataaaggaaaaaaccctgctaggtagtgttataattgctagattaaaaatagactagaacaggttcattttaagatttacttggaagagcaaagaaggaaaaattatatttttaaagaaagagaatattcaggctttatttctggtatgaagtttatattttttaaaaaaatcctatattatcacaccagagattttagattcttttctggttagaaacattgctggtagttggattatatttttattgtattcatttatcttagggggaacattgtaaagaaacaaaaaggtccagatgaatgtatgctagaaataaaagttgaaagattctt

SEQ ID NO: 23686 - DNA, 5954 bp, Homo sapiens
  source 1..5954: mol_type = unassigned DNA
ggagctcccggaagttgccggacccggaacgcaggcggagcgcaagtctgtcagccagtcagtccgccagtccgccagcccagtacctctctctcctcggccctcgtaagctgtccgcggtctgtttggcccgaacggcggcggaggcgctgatcatggcgacattcatctcggtgcagctgaaaaagacctcagaggtggacctggccaagccgctggtgaagttcatccagcagacttacccaagcggcggggaagagcaggcccagtactgccgcgcggcggaggagctcagcaagctgcgccgcgccgcagtcggtcgtccgctggacaagcacgagggcgcgctcgagacgctcctgagatattatgatcagatttgttctattgaacccaaattcccattttctgaaaatcagatctgcttgacatttacctggaaggatgctttcgataaaggttcactttttggaggctctgtaaaactggctcttgcaagcttaggatatgaaaagagctgtgtgttgttcaattgtgcagccttagctagccaaattgcagcagaacagaacctggataatgatgaaggattgaaaatcgctgctaaacattaccagtttgctagtggtgcctttttacatattaaagagacggttttatctgccttaagtcgagagccgaccgtggacatatctccagatactgttgggaccctcagtcttattatgctggcacaggctcaagaagtattttttttaaaagccacaagagataaaatgaaagatgccatcatagctaaattggctaatcaggctgcagattattttggtgatgctttcaaacagtgtcaatacaaagatactctccccaagtatttttatttccaggaggtgttccctgtcttggctgcaaagcactgtatcatgcaggccaatgctgagtaccatcagtctatcctggcaaaacagcagaagaaatttggagaagaaattgcaaggttacagcatgcagcagaactgattaaaacagtggcatctcgctatgatgaatatgttaatgtgaaggatttttctgacaaaatcaatcgtgcccttgctgcagcaaagaaggataatgacttcatttatcatgatcgagttccagaccttaaagatctagatcctattggcaaagccacacttgtgaaatctaccccggtcaatgtacccatcagtcagaaatttactgatctgtttgagaagatggttcccgtgtcagtacagcagtctttggctgcctataatcagaggaaagccgatttggttaacagatcaattgctcagatgagagaagccaccactttggcaaatggggtgctagcttcccttaatcttccagcagcaattgaagatgtgtctggagacactgtacctcagtctatattgactaaatccagatctgtgattgaacagggaggcatccagactgttgatcagttgattaaagaactgcctgaattactgcaacgaaatagagaaatcctagatgagtcattaaggttgttggatgaagaagaagcaaccgataatgatttaagagcaaaatttaaggaacgttggcaaaggacaccatccaatgaactgtataagcctttaagagcagagggaaccaacttcagaacagttttagataaagctgtgcaggcagatggacaagtgaaagaatgttaccagtctcatcgtgacaccatcgtgcttttgtgtaagccagagcctgagctgaatgctgccatcccttctgctaatccagcaaagaccatgcagggcagtgaggttgtaaatgtcttaaaatccttattgtcaaatcttgatgaagtaaagaaggaaagagagggtctggagaatgacttgaaatctgtgaattttgacatgacaagcaagtttttgacagccctggctcaagatggtgtgataaatgaagaagctctttctgttactgaactagatcgagtctatggaggtcttacaactaaagtccaagaatctctaaagaaacaggagggacttcttaaaaatattcaggtctcacatcaggaattttcaaaaatgaaacaatctaataatgaagctaacttaagagaagaagttttgaagaatttagctactgcatatgacaactttgttgaacttgtagctaatttgaaggaaggcacaaagttttacaatgagttgactgaaatcctggtcaggttccagaacaaatgcagtgatatagtttttgcacggaagacagaaagagatgaactcttaaaggacttgcaacaaagcattgccagagaacctagtgctccttcaattcctacacctgcgtatcagtcctcaccagcaggaggacatgcaccaactcctccaactccagcgccaagaaccatgccgcctactaagccccagcccccagccaggcctccaccacctgtgcttccagcaaatcgagctccttctgctactgctccatctccagtgggggctgggactgctgcgccagctccatcacaaacgcctggctcagctcctcctccacaggcgcagggaccaccctatcccacctatccaggatatcctgggtattgccaaatgcccatgcccatgggctataatccttatgcgtatggccagtataatatgccatatccaccagtgtatcaccagagtcctggacaggctccatacccgggaccccagcagccttcataccccttccctcagcccccacagcagtcttactatccacagcagtaatatgtctgctcagcagctcagctgattcagatcagagggaaagaaataccaaccctgcaataagtgtactaaactctacgctctggttaatgtaatgtactctcctggactgaatgcagtgtataatttctgtctacagctagaagctgtgccccagttccacatttgattacacatgtgagatttgctgctgttgcagtataaacactaggtataataggatttgaaattgcattacagttcataaaaattgaaaatgagaaattaaacctgcaagtgaaacatttgaaacgattatactttctacataagacatggttgggacatcagatacttacaaagatggtttaagtatggatactagagaaaattaagttttctttctctttggtttattgatttggtttaatttccattatgctattttgcataatcaaggcactgtaaatcttataattttaaaataaattacttaagaacagttgtcattgttatgttttgttattgattctcattactgtctaattttttttctggtattagtctcattttgtatgtatataagttaaacagatactgtttttaagtgcatgaatagtacaagttattatcaaggatgttttacagggaaatcaaaagaatattatcatactttatctttcgtatgctgattagtaaacgatttttgacatttattttagaaagtcctataatgtggaagaaacaaacagttgctaccaaagattcttcaaataaacatacaaataaatgtgtatatttaatgttttattgttagcttctccagaaaattgatgcaaattctggtaataattcttgcattttttccccataacctggttaaaataaatacgccattggcaatacttcataatgtaatggaattgtttggggaacacttactgtaccctctcatcctttttccaccttactgtgttaacttagtgacatttaatgcccaatatgtatgaatagatctaagccatttaattttttttccttaaagattggagtattttataattcaaggagcatacaaaacaatggttgggaacatatgccaattatggaataggctatgtatttaatattaatctctgccattaggatatctactcactgtataaacctcagtaaaaatagtgaagacatgcatcatggaatgagaaaatgagaaaggaatgagttgtctaacatcacagtgggatctgttttttgtgaggttcatttctgaacacattaggcatatgagcagatttccagtgaatctatttatgtttattttctgagtttcaacgctgaccttttcttgcattattgtttcattttaatgatagtgttacttgtcccactgttgttttcattgagtttggatttatattttaaatgttcgaatgaaagtatgattgtaaaagggagtgaattggtttaaaaatatatgtatattttaaactttgttgtgtgtaggaaacatgaaggcatgttaattcaatataaatgacctttgatttcatggaatattaaagttggtttaaagtccaatagttaaaccttagcaaaaatagctttttacttcatcagttgctaagatttaatactttggattcatcaaagtgtgacatgggcttgtttgacttctgtaagtggcatttaagttccacattcttattacttgaggtactttatactaacataagacagtgagagttagaggtattacaagttgctagtttataatgtcttactaatgcagaaacaaggaaaaaagcaaaattggcctgaatattctcttggggaaagagggcaccaaagaaaagggtaagtgcatctgagggccaaaagagatgtataagccttttagcccattccccatgctgggcctgctcacagagccacaggaagatcattcagaaactaggaaaggaggcccccacagctgatcctgccacagcacacctgactcactcggctctgttagtgtaaccttttaaatgtagcaacacaaaccctttccctcttgtcagttcactcatcctttggtttctttttaatcacctgtgtctgggcacagacaatcacaataaatgcagccctttattactgttaaggatcatactgttggtttggagttggaagggtactactctgtgattcaggtgtgttgtacccatatttataattaggctttattatcttcctaaatcaaggaaaggaaatcatccccagaccatttatgctgagctttggaatactattttaaactggattgtacttaaataatgaagctctgcatagaggaactagtcagaagtggggaaaacactgtctaatttttatcagtctggtataaagtattgatctaagagaactctccctgtgccccttggtctttattctcaattaagaaaaacagtcacatgtcacgacaaaccaatcaatctttatgagatattcctgtatccataccccagcttgtttgcaatttataaacctccccttcaaaactaaggagttgcagaaaaaaatggatttcacagagccttgtgtccctaaagttctgtcccagtcagcagtctttatagtccaaacagattataaaaaatgttttccatttgaactttacagtttgcaaaagtgcttttatacattttctaatttcagaaacaggataatttgttaagtgggtttcagtttgctaatagggattttttgtgttttgttttttaattttcagcatctcttgaagaatcttgctacagccaaatggcatctcactttttaaagacgtttgcaattattagttgattcacagtacagaacaaggtataaaggaaaaaaccctgctaggtagtgttataattgctagattaaaaatagactagaacaggttcattttaagatttacttggaagagcaaagaaggaaaaattatatttttaaagaaagagaatattcaggctttatttctggtatgaagtttatattttttaaaaaaatcctatattatcacaccagagattttagattcttttctggttagaaacattgctggtagttggattatatttttattgtattcatttatcttagggggaacattgtaaagaaacaaaaaggtccagatgaatgtatgctagaaataaaagttgaaagattctt

SEQ ID NO: 23687 - DNA, 2851 bp, Homo sapiens
  source 1..2851: mol_type = unassigned DNA
ctcatgaggagccactcagattcctgtcacttctcaaagcatctccgtcgtgaacatggccctgccaccattcttcggccagggtcgcccaggcccaccgcccccgcagccgccgcctcctgctcctttcggctgtccgccaccgccgctgccctccccggctttcccgccgcctctcccccagcggcccggcccttttccgggggcctccgcccccttccttcagcctccgctggctctgcagccccgagcctccgcggaggcctcccgcggcggaggcggcgctggcgccttctacccggtgccaccaccgccgctgcctcctccgccgccccagtgtcggcccttcccggggaccgacgccggcgagcggccgcggccaccgcctcccggcccggggccgccctggagcccgcggtggcctgaggcgccgccgccgccggccgacgtgctcggggatgcggccctccaacgcctgcgcgaccggcagtggctggaggcggtgttcgggaccccgcggcgggcaggctgtccggtgccccagcgcacgcatgccgggcccagccttggcgaagtgcgcgcgcgattgctccgggctctgcgcctggtgcggcggctgcgcggcctgagccaggccctgcgcgaggccgaagccgacggcgcggcctgggtcctgctgtactcccagaccgcgccgctgcgcgcggaactggccgagcggctacagccgttgacccaggctgcctatgtgggcgaggcgcggaggaggctggagagggtccggcgccgccggctgcggcttcgcgagagggcccgggaacgcgaggccgagcgggaggcagaggccgcgcgggcagtggaacgcgagcaggagattgaccgctggagggtgaagtgtgtgcaggaggtggaggagaagaagcgggagcaggaactcaaagcagccgctgatggcgtactatctgaagtgaggaaaaaacaagcagataccaaaagaatggtggacattctacgggctttggagaaattgaggaaactgaggaaagaggctgcagcgaggaaaggggtctgtcctccagcctcagcagatgagacttttacgcatcatcttcagcgactgagaaaactcattaaaaagcgctctgaactgtatgaagctgaagagagagccctcagagttatgctagaaggagaacaagaggaagagaggaaaagagaattagaaaagaaacaaagaaaagaaaaagagaaaattttacttcagaaacgtgaaattgagtccaagttgtttggggatccagatgagttcccacttgctcacctcttggagcctttccgacagtattatctccaagccgagcactccctgccagcgctcatccagatcaggcatgattgggatcagtacctggtgccatccgatcatcccaaaggcaacttcgttccccaaggatgggtccttcccccgctccccagcaacgacatctgggcaactgctgttaagctgcattagtaaagatgctccaggagtgtggtccagccagcgctctttccagctgtaaatattagcgatggtgccatcttttgctgtagactaaactgcaacttctaaattccatgtggcattcccctaccctgaagttatgctttccttctgtgctctgtgctggccagaggtgcctcttgaatcagattaatgtggtttttcaggaaaggacttaggtgaactgaggtttttaccacaggcagtgaatgaccttggttcaccaaatttgcctctgttttgaggggcttggtccagagtgacttgttaatttactctaacttccttgtgtgttgatgggtaagtacactcaaacactgaatacaggtgtgtgatgggtagatttcacagcccttctactaatagtgagtgtgaaggcaagcttgatgcaaaacctcctgacctttcctacctgaagagccctttgacttctaggaagaaaggtcaaaaatgttatcttcagttgtgttaatcccagttttagtgcagcttaggaggctgctagttaggaagatggcagtggctgtaggctgggttgccagaaaagatggtggcctagtcttattattcagatggagaacttagaaaacctgaagagtacccaaattggattgtattttaatggacaatggctgtattttttccatgttagaaggatcctaatgaaagcacctgttatttttaagtttctaagggtctagttgttcagaatccccaaggatatttccctaacctcactcagtcacattgtaggagccagtgtagctatggaattatcttaggaactcaagcttctaaaactatccatgtagtcaaatctaggggaaaaagcaaataaaaatagtaaaatttggccgggcacagtggctcacgcctgtaatcccaacactttgggaggccgaggcgggccgatcacgaggtcaggagatcaaggccatcctggctaacacggtgaaaccctgtctctactaaaaatacaaaaaaatattagctgggcgtaggtggtgcacacctgtagtcccagctactggggaggctgaggcaggagaatggtgtaaaacccaggaggcagagcttgcagtgagccgagatcgcgccacggcactccagcctgggagacagagcaagactccgtctcaaaaaaaaaaaaagtaaaatttattttttatattcattaataaatgctgttgtgcttggagatgatcactcatataacatgtcatttttttggttctgttttggtttggtttttgccaattattttgttatatttccaaaaaactaaataaaaatcatttttatttttta

SEQ ID NO: 23688 - DNA, 934 bp, Homo sapiens
  source 1..934: mol_type = unassigned DNA
ctcatgaggagccactcagattcctgtcacttctcaaagcatctccgtcgtgaacatggccctgccaccattcttcggccagggtcgcccaggccccctccgcccccttccttcagcctccgccggcttcgcgagagggcccgggaacgcgaggccgagcgggaggcagaggccgcgcgggcagtggaacgcgagcaggagattgaccgctggagggtgaagtgtgtgcaggaggtggaggagaagaagcgggagcaggaactcaaagcagccgctgatggcgtactatctgaagtgaggaaaaaacaagcagataccaaaagaatggtggacattctacgggctttggagaaattgaggaaactgaggaaagaggctgcagcgaggaaaggggtctgtcctccagcctcagcagatgagacttttacgcatcatcttcagcgactgagaaaactcattaaaaagcgctctgaactgtatgaagctgaagagagagccctcagagttatgctagaaggagaacaagaggaagagaggaaaagagaattagaaaagaaacaaagaaaagaaaaagagaaaattttacttcagaaacgtgaaattgagtccaagttgtttggggatccagatgagttcccacttgctcacctcttggagcctttccgacagtattatctccaagccgagcactccctgccagcgctcatccagatcaggcatgattgggatcagtacctggtgccatccgatcatcccaaaggcaacttcgttccccaaggatgggtccttcccccgctccccagcaacgacatctgggcaactgctgttaagctgcattagtaaagatgctccaggagtgtggtccagccagcgctctttccagctgtaaatattagcgatggtgccatcttttgctgtagactaaactgcaact

SEQ ID NO: 23689 - DNA, 2150 bp, Homo sapiens
  source 1..2150: mol_type = unassigned DNA
agccactcagattcctgtcacttctcaaagcatctccgtcgtgaacatggccctgccaccattcttcggccagggtcgccccggcgccgccggctgcggcttcgcgagagggcccgggaacgcgaggccgagcgggaggcagaggccgcgcgggcagtggaacgcgagcaggagattgaccgctggagggtgaagtgtgtgcaggaggtggaggagaagaagcgggagcaggaactcaaagcagccgctgatggcgtactatctgaagtgaggaaaaaacaagcagataccaaaagaatggtggacattctacgggctttggagaaattgaggaaactgaggaaagaggctgcagcgaggaaaggggtctgtcctccagcctcagcagatgagacttttacgcatcatcttcagcgactgagaaaactcattaaaaagcgctctgaactgtatgaagctgaagagagagccctcagagttatgctagaaggagaacaagaggaagagaggaaaagagaattagaaaagaaacaaagaaaagaaaaagagaaaattttacttcagaaacgtgaaattgagtccaagttgtttggggatccagatgagttcccacttgctcacctcttggagcctttccgacagtattatctccaagccgagcactccctgccagcgctcatccagatcaggcatgattgggatcagtacctggtgccatccgatcatcccaaaggcaacttcgttccccaaggatgggtccttcccccgctccccagcaacgacatctgggcaactgctgttaagctgcattagtaaagatgctccaggagtgtggtccagccagcgctctttccagctgtaaatattagcgatggtgccatcttttgctgtagactaaactgcaacttctaaattccatgtggcattcccctaccctgaagttatgctttccttctgtgctctgtgctggccagaggtgcctcttgaatcagattaatgtggtttttcaggaaaggacttaggtgaactgaggtttttaccacaggcagtgaatgaccttggttcaccaaatttgcctctgttttgaggggcttggtccagagtgacttgttaatttactctaacttccttgtgtgttgatgggtaagtacactcaaacactgaatacaggtgtgtgatgggtagatttcacagcccttctactaatagtgagtgtgaaggcaagcttgatgcaaaacctcctgacctttcctacctgaagagccctttgacttctaggaagaaaggtcaaaaatgttatcttcagttgtgttaatcccagttttagtgcagcttaggaggctgctagttaggaagatggcagtggctgtaggctgggttgccagaaaagatggtggcctagtcttattattcagatggagaacttagaaaacctgaagagtacccaaattggattgtattttaatggacaatggctgtattttttccatgttagaaggatcctaatgaaagcacctgttatttttaagtttctaagggtctagttgttcagaatccccaaggatatttccctaacctcactcagtcacattgtaggagccagtgtagctatggaattatcttaggaactcaagcttctaaaactatccatgtagtcaaatctaggggaaaaagcaaataaaaatagtaaaatttggccgggcacagtggctcacgcctgtaatcccaacactttgggaggccgaggcgggccgatcacgaggtcaggagatcaaggccatcctggctaacacggtgaaaccctgtctctactaaaaatacaaaaaaatattagctgggcgtaggtggtgcacacctgtagtcccagctactggggaggctgaggcaggagaatggtgtaaaacccaggaggcagagcttgcagtgagccgagatcgcgccacggcactccagcctgggagacagagcaagactccgtctcaaaaaaaaaaaaagtaaaatttattttttatattcattaataaatgctgttgtgcttggagatgatcactcatataacatgtcatttttttggttctgttttggtttggtttttgccaattattttgttatatttccaaaaaactaaataaaaatcatttttatttttt

SEQ ID NO: 23690 - DNA, 1994 bp, Homo sapiens
  source 1..1994: mol_type = unassigned DNA
aggacagacggcagtggctcctgagagctggctggggccattttggcccctcgcctgtggccttctgcagacttggcctgggaggggatggggcagctgcgccatgtgcaccacccttttcctgctcagcaccctggccatgctctggcgccgccgatttgccaaccgagtccaaccagagcccagcgacgtggatggggcagctaggggcagcagcttggatgcggaccctcagtcctcaggcagggagaaagaacctctgaagtaagccctcacctctgcaggtggggctcaggcccagagactgggatcagctggctcaggcagctcaggtcctggttcgtcccctagcccaggaggatgctgtgggagctgcagcagcggcaagagggagaatggggggaagcagcactagagaagttcccagagctcatcctgtcactggctgctctgctgaaattatcaataagaaatgccagttggatctgtgacatgtctgcctgcagctggatgggagcaacggacagcttgtcctccgaatgtgttttctgtatgtgtgcaagcgcgtgtgttccaaacgggcagtagcgtgtgggaaggaaaaagcctgacacttgtttttatcaatttgctgatgctcagtcccggcggctgcctcctttgcccccagctgctctgccatttctctcttttcaatcctgcatgatcctgagcagagataaaagcagatttccgcttctgctcccagatccaggagcagaccctgcaggcagctgctcctgatgtctcacagctattagtcttcaaaaaccccccgtgcctctgtgcacacgcgtctctcctccccagccagcccccctcccagcccagcggcgatgtctctgcctggctggcccgtgcccttgacttccaggcagtagaagatggagttctctagacagcagcacttcagccgccactctgcctctgaagggaaggaagggaaagggtgagggatgccgcagagcagagggaaccgctggggaggcgctcagggtgggggaggaggtgcaccccgctggggagggcctgctggtacctcggggagcctggctggggtgtgtgcgaaggcagttctgtgggagcctctcaaagtagggcaggcaggaggcagggggaaagtcacactagggaaggagcctgcagaggcaaagccagagcgccagcctgacccaggccgtgagcccgtgatcgcctgtctcagctcctgtcagcctgtctctctctttggaggcatcggccttcctggtgacaggcctgtcaggctgagggccagagggcactgttcccgggacccagtctgtgttccccgatcctatctgcatttattctctatttgccatgttcctgtcacctcatccttgctgccatttccgagttgctcatctccttccactggtctgaggaattgtcaggccaaggtcatggagctggctcacggcccagacgcacttccccagggcagcgcccctccacgccactgttccgagaacctgcgcaggaggtggtggctgctccagggatccatccagaggaagggcgggaaaaagagaggaaggggctgctggcggccagcggggctgtggctgcctgggcttggaggttgcctgggcagctggggtgccatgtgggccgggtgggggggctgtctcccccagggagcaggctggctttggtgggagcagattgtgtttacaccttccccgcacacccagcccacgctcgcctcttattcccggggcctctcccacccctgggctctctgcgcagtctgcacatttgcagctcctgctgcagaaagttacctctctcagcctagagctccccacagaaggctcctgggacccgggtgccccttccttggcccactggctcccatcacagggcttagtgtgaagctcagggcaagggtggacctttaaatgggggaattaaatcctgactatgacactgtc

SEQ ID NO: 23691 - DNA, 1177 bp, Homo sapiens
  source 1..1177: mol_type = unassigned DNA
ggtcccagtgcttgcggcgtcgcgagtgtgcgcgtgcggacccttcccgcggcggggaactgactcaaagtccaacactcccgagctttcgcggcgaggccgaccgccagcccgcccgtgggggcgaacaggagcccctccggcggccgccgtggacctagctgggctcccctcgcccgggcctctccccgcgcccccgagccagccgctgggggccgcggcgccactcccacggctctggacgcccaggctctggggggttagcacgggggtcgtccccctgcccgcccaccgccccggctgtcggaacttgagcgcacctccgacctcgggcgccagaggcctgcgccccctctccttccgcccagcacctccatgccctcggtgcacgaacgcggcggcggcggccagaagtcccccgtggcttatgaatgacacggacagagagcccagcgacgtggatggggcagctaggggcagcagcttggatgcggaccctcagtcctcaggcagctcaggtcctggttcgtcccctagcccaggaggatgctgtgggagctgcagcagcggcaagagggagaatggggggaagcagcactagagaagttcccagagctcatcctgtcactggctgctctgctgaaattatcaataagaaatgccagttggatctgtgacatgtctgcctgcagctggatgggagcaacggacagcttgtcctccgaatgtgttttctgtatgtgtgcaagcgcgtgtgttccaaacgggcagtagcgtgtgggaaggaaaaagcctgacacttgtttttatcaatttgctgatgctcagtcccggcggctgcctcctttgcccccagctgctctgccatttctctcttttcaatcctgcatgatcctgagcagagataaaagcagatttccgcttctgctcccagatccaggagcagaccctgcaggcagctgctcctgatgtctcacagctattagtcttcaaaaaccccccgtgcctctgtgcacacgcgtctctcctccccagccagcccccctcccagcccagcggcgatgtctctgcctggctggcccgtgcccttgacttccaggcagtagaagatggagttctctagacagcagcacttcagccgccactctgcctctgaagggaaggaagggaaagggtg

SEQ ID NO: 23692 - DNA, 1832 bp, Homo sapiens
  source 1..1832: mol_type = unassigned DNA
agtatgtgtggttggggaattcatgtggaggtcagagtggaagcaggtgtgagagggtccagcagaaggaaacatggctgccaaagtgtttgagtccattggcaagtttggcctggccttagctgttgcaggaggcgtggtgaactctgccttatataatgtggatgctgggcacagagctgtcatctttgaccgattccgtggagtgcaggacattgtggtaggggaagggactcattttctcatcccgtgggtacagaaaccaattatctttgactgccgttctcgaccacgtaatgtgccagtcatcactggtagcaaagatttacagaatgtcaacatcacactgcgcatcctcttccggcctgtcgccagccagcttcctcgcatcttcaccagcatcggagaggactatgatgagcgtgtgctgccgtccatcacaactgagatcctcaagtcagtggtggctcgctttgatgctggagaactaatcacccagagagagctggtctccaggcaggtgagcgacgaccttacagagcgagccgccacctttgggctcatcctggatgacgtgtccttgacacatctgaccttcgggaaggagttcacagaagcggtggaagccaaacaggtggctcagcaggaagcagagagggccagatttgtggtggaaaaggctgagcaacagaaaaaggcggccatcatctctgctgagggcgactccaaggcagctgagctgattgccaactcactggccactgcaggggatggcctgatcgagctgcgcaagctggaagctgcagaggacatcgcgtaccagctctcacgctctcggaacatcacctacctgccagcggggcagtccgtgctcctccagctgccccagtgagggcccaccctgcctgcacctccgcgggctgactgggccacagccccgatgattcttaacacagccttccttctgctcccaccccagaaatcactgtgaaatttcatgattggcttaaagtgaaggaaataaaggtaaaatcacttcagatctctaattagtctatcaaatgaaactctttcattcttctcacatccatctacttttttatccacctccctaccaaaaattgccaagtgcctatgcaaaccagctttaggtcccaattcggggcctgctggagttccggcctgggcaccagcatttggcagcacgcaggcggggcagtatgtgatggactggggagcacaggtgtctgcctagatccacgtgtggcctccgtcctgtcactgatggaaggtttgcggatgagggcatgtgcggctgaactgagaaggcaggcctccgtcttcccagcggttcctgtgcagatgctgctgaagagaggtgccggggaggggcagagaggaagtggtctgtctgttaccataagtctgattctctttaactgtgtgaccagcggaaacaggtgtgtgtgaactgggcacagattgaagaatctgcccctgttgaggtgggtgggcctgactgttgccccccagggtcctaaaacttggatggacttgtatagtgagagaggaggcctggaccgagatgtgagtcctgttgaagacttcctctctaccccccaccttggtccctctcagatacccagtggaattccaacttgaaggattgcatcctgctggggctgaacatgcctgccaaagacgtgtccgacctacgttcctggccccctcattcagagactgcccttctcacgggctctatgcctgcactgggaaggaaacaaatgtgtataaactgctgtcaataaatgacacccagaccttccggctca

SEQ ID NO: 23693 - DNA, 907 bp, Homo sapiens
  source 1..907: mol_type = unassigned DNA
gcgcagtatgtgtggttggggaattcatgtggaggtcagagtggaagcagttatcttggccccaggatgtcatccagctcctgcttccataagaagcatgtcgttcttaatacacgatgttgacaagcagtatggtgaggaggtgtgagagggtccagcagaaggaaacatggctgccaaagtgtttgagtccattggcaagtttggcctggccttagctgttgcaggaggcgtggtgaactctgccttatataatgtggatgctgggcacagagctgtcatctttgaccgattccgtggagtgcaggacattgtggtaggggaagggactcattttctcatcccgtgggtacagaaaccaattatctttgactgccgttctcgaccacgtaatgtgccagtcatcactggtagcaaagatttacagaatgtcaacatcacactgcgcatcctcttccggcctgtcgccagccagcttcctcgcatcttcaccagcatcggagaggactatgatgagcgtgtgctgccgtccatcacaactgagatcctcaagtcagtggtggctcgctttgatgctggagaactaatcacccagagagagctggtctccaggcaggtgagcgacgaccttacagagcgagccgccacctttgggctcatcctggatgacgtgtccttgacacatctgaccttcgggaaggagttcacagaagcggtggaagccaaacaggtggctcagcaggaagcagagagggccagatttgtggtggaaaaggctgagcaacagaaaaaggcggccatcatctctgctgagggcgactccaaggcagctgagctgattgccaactcactggccactgcaggggatggcctgatcgagctgcgcaagctggaagctgcagaggac

SEQ ID NO: 23694 - DNA, 534 bp, Homo sapiens
  source 1..534: mol_type = unassigned DNA
tgtgtggttggggaattcatgtggaggtcagagtggaagcaggtgagaatggagggggcggcaaaggctcgtttctgggcatctctgcagtcctcctctgctccatgatgtgcactttgggcgaggagagtgcgtgtgagagggtccagcagaaggaaacatggctgccaaagtgtttgagtccattggcaagtttggcctggccttagctgttgcaggaggcgtggtgaactctgccttatataatgtggatgctgggcacagagctgtcatctttgaccgattccgtggagtgcaggacattgtggtaggggaagggactcattttctcatcccgtgggtacagaaaccaattatctttgactgccgttctcgaccacgtaatgtgccagtcatcactggtagcaaagatttacagaatgtcaacatcacactgcgcatcctcttccggcctgtcgccagccagcttcctcgcatcttcaccagcatcggagaggactatgatgagcgtgtgctgccgtccatcacaactga

SEQ ID NO: 23695 - DNA, 732 bp, Homo sapiens
  source 1..732: mol_type = unassigned DNA
cagagtggaagcaggtgagaatggagggggcggcaaaggctcgtttctgggcatctctgcagtcctcctctgctccatgatgtgcactttgggcgaggagagtgtgagagggtccagcagaaggaaacatggctgccaaagtgtttgagtccattggcaagtttggcctggccttagctgttgcaggaggcgtggtgaactctgccttatataatgtggatgctgggcacagagctgtcatctttgaccgattccgtggagtgcaggacattgtggtaggggaagggactcattttctcatcccgtgggtacagaaaccaattatctttgactgccgttctcgaccacgtaatgtgccagtcatcactggtagcaaagatttacagaatgtcaacatcacactgcgcatcctcttccggcctgtcgccagccagcttcctcgcatcttcaccagcatcggagaggactatgatgagcgtgtgctgccgtccatcacaactgagatcctcaagtcagtggtggctcgctttgatgctggagaactaatcacccagagagagctggtctccaggcaggtgagcgacgaccttacagagcgagccgccacctttgggctcatcctggatgacgtgtccttgacacatctgaccttcgggaaggagttcacagaagcggtggaagccaaacaggtggctcagcaggaagcagagagggccagatttgtggtggaaa

SEQ ID NO: 23696 - DNA, 796 bp, Homo sapiens
  source 1..796: mol_type = unassigned DNA
atgtggaggtcagagtggaagcaggtgagaatggagggggcggcaaaggctcgtttctgggcatctctgcagtcctcctctgctccatgatgtgcactttgggcgaggagagtgcgtgcgtgtgagagggtccagcagaaggaaacatggctgccaaagtgtttgagtccattggcaagtttggcctggccttagctgttgcaggaggcgtggtgaactctgccttatataatgtggatgctgggcacagagctgtcatctttgaccgattccgtggagtgcaggacattgtggtaggggaagggactcattttctcatcccgtgggtacagaaaccaattatctttgactgccgttctcgaccacgtaatgtgccagtcatcactggtagcaaagatttacagaatgtcaacatcacactgcgcatcctcttccggcctgtcgccagccagcttcctcgcatcttcaccagcatcggagaggactatgatgagcgtgtgctgccgtccatcacaactgagatcctcaagtcagtggtggctcgctttgatgctggagaactaatcacccagagagagctggtctccaggcaggtgagcgacgaccttacagagcgagccgccacctttgggctcatcctggatgacgtgtccttgacacatctgaccttcgggaaggagttcacagaagcggtggaagccaaacaggtggctcagcaggaagcagagagggccagatttgtggtggaaaaggctgagcaacagaaaaaggcggccatcatctctgctgagggcga

SEQ ID NO: 23697 - DNA, 890 bp, Homo sapiens
  source 1..890: mol_type = unassigned DNA
agtatgtgtggttggggaattcatgtggaggtcagagtggaagcaggtgtgagagggtccagcagaaggaaacatggctgccaaagtgtttgagtccattggcaagtttggcctggccttagctgttgcaggaggcgtggtgaactctgccttatataatgtggatgctgggcacagagctgtcatctttgaccgattccgtggagtgcaggacattgtggtaggggaagggactcattttctcatcccgtgggtacagaaaccaattatctttgactgccgttctcgaccacgtaatgtgccagtcatcactggtagcaaagatttacagaatgtcaacatcacactgcgcatcctcttccggcctgtcgccagccagcttcctcgcatcttcaccagcatcggagaggactatgatgagcgtgtgctgccgtccatcacaactgagatcctcaagtcagtggtggctcgctttgatgctggagaactaatcacctacctgccagcggggcagtccgtgctcctccagctgccccagtgagggcccaccctgcctgcacctccgcgggctgactgggccacagccccgatgattcttaacacagccttccttctgctcccaccccagaaatcactgtgaaatttcatgattggcttaaagtgaaggaaataaaggtaaaatcacttcagatctctaattagtctatcaaatgaaactctttcattcttctcacatccatctacttttttatccacctccctaccaaaaattgccaagtgcctatgcaaaccagctttaggtcccaattcggggcctgctggagttccggcctgggcaccagcatttggcagcacgcaggcggggcagtatgtgatggactggggagcac

SEQ ID NO: 23698 - DNA, 700 bp, Homo sapiens
  source 1..700: mol_type = unassigned DNA
ctgggcatctctgcagtcctcctctgctccatgatgtgcactttgggcgaggagagtgcgtgtgtgagagggtccagcagaaggaaacatggctgccaaagtgtttgagtccattggcaagtttggcctggccttagctgttgcaggaggcgtggtgaactctgccttatataatgtggatgctgggcacagagctgtcatctttgaccgattccgtggagtgcaggacattgtggtaggggaagggactcattttctcatcccgtgggtacagaaaccaattatctttgactgccgttctcgaccacgtaatgtgccagtcatcactggtagcaaagatttacagaatgtcaacatcacactgcgcatcctcttccggcctgtcgccagccagcttcctcgcatcttcaccagcatcggagaggactatgatgagcgtgtgctgccgtccatcacaactgagatcctcaagtcagtggtggctcgctttgatgctggagaactaatcacccagagagagctggtctccaggcaggtgagcgacgaccttacagagcgagccgccacctttgggctcatcctggatgacgtgtccttgacacatctgaccttcgggaaggagttcacagaagcggtggaagccaaacaggtggctcagcaggaagcagagagggccagatttgtggtggaaaaggtgagc

SEQ ID NO: 23699 - DNA, 1110 bp, Homo sapiens
  source 1..1110: mol_type = unassigned DNA
tccgtatgcgcgattcctgtgcgcgaagttcgggtccgtagtgggctaagggggagggtttcaaagggagcgcacttccgctgccctttctttcgccagccttacgggcccgaaccctcgtgtgaagggtgcagtacctaagccggagcggggtagaggcgggccggcacccccttctgacctccagtgccgccggcctcaagatcagacatggcccagaacttgaaggacttggcgggacggctgcccgccgggccccggggcatgggcacggccctgaagctgttgctgggggccggcgccgtggcctacggtgtgcgcgaatctgtgttcaccgtggaaggcgggcacagagccatcttcttcaatcggatcggtggagtgcagcaggacactatcctggccgagggccttcacttcaggatcccttggttccagtaccccattatctatgacattcgggccagacctcgaaaaatctcctcccctacaggctccaaagacctacagatggtgaatatctccctgcgagtgttgtctcgacccaatgctcaggagcttcctagcatgtaccagcgcctagggctggactacgaggaacgagtgttgccgtccattgtcaacgaggtgctcaagagtgtggtggccaagttcaatgcctcacagctgatcacccagcgggcccaggtatccctgttgatccgccgggagctgacagagagggccaaggacttcagcctcatcctggatgatgtggccatcacagagctgagctttagccgagagtacacagctgctgtagaagccaaacaagtggcccagcaggaggcccagcgggcccaattcttggtagaaaaagcaaagcaggaacagcggcagaaaattgtgcaggccgagggtgaggccgaggctgccaagatgcttggagaagcactgagcaagaaccctggctacatcaaacttcgcaagattcgagcagcccagaatatctccaagacgatcgccacatcacagaatcgtatctatctcacagctgacaaccttgtgctgaacctacaggatgaaagtttcaccaggtacagtgacagcctcatcaagggtaagaaatga

SEQ ID NO: 23700 - DNA, 902 bp, Homo sapiens
  source 1..902: mol_type = unassigned DNA
gccagccttacgggcccgaaccctcgtgtgaagggtgcagtacctaagccggagcggggtagaggcgggccggcacccccttctgacctccagtgccgccggcctcaagatcagacatggcccagaacttgaaggacttggcgggacggctgcccgccgggccccggggcatgggcacggccctgaagctgttgctgggggccggcgccgtggcctacggtgtgcgcgaatctgtgttcaccgtggaaggcgggcacagagccatcttcttcaatcggatcggtggagtgcagcaggacactatcctggccgagggccttcacttcaggatcccttggttccagtaccccattatctatgacattcgggccagacctcgaaaaatctcctcccctacaggctccaaagacctacagatggtgaatatctccctgcgagtgttgtctcgacccaatgctcaggagcttcctagcatgtaccagcgcctagggctggactacgaggaacgagtgttgccgtccattgtcaacgaggtgctcaagagtgtggtggccaagttcaatgcctcacagctgatcacccagcgggcccaggtatccctgttgatccgccgggagctgacagagagggccaaggacttcagcctcatcctggatgatgtggccatcacagagctgagctttagccgagagtacacagctgctgtagaagccaaacaagtggcactgagcaagaaccctggctacatcaaacttcgcaagattcgagcagcccagaatatctccaagacgatcgccacatcacagaatcgtatctatctcacagctgacaaccttgtgctgaacctacaggatgaaagtttcaccaggggaagtgacagcctcatcaagggtaagaaatga

SEQ ID NO: 23701 - DNA, 1515 bp, Homo sapiens
  source 1..1515: mol_type = unassigned DNA
aggaaatggagatgacttgctgtcttgcgctgccctccctgggagggcagccttccagaaaggggcgggacttccgtatgcgcgattcctgtgcgcgaagttcgggtccgtagtgggctaagggggagggtttcaaagggagcgcacttccgctgccctttctttcgccagccttacgggcccgaaccctcgtgtgaagggtgcagtacctaagccggagcggggtagaggcgggccggcacccccttctgacctccagtgccgccggcctcaagatcagacatggcccagaacttgaaggacttggcgggacggctgcccgccgggccccggggcatgggcacggccctgaagctgttgctgggggccggcgccgtggcctacggtgtgcgcgaatctgtgttcaccgtggaaggcgggcacagagccatcttcttcaatcggatcggtggagtgcagcaggacactatcctggccgagggccttcacttcaggatcccttggttccagtaccccattatctatgacattcgggccagacctcgaaaaatctcctcccctacaggctccaaagacctacagatggtgaatatctccctgcgagtgttgtctcgacccaatgctcaggagcttcctagcatgtaccagcgcctagggctggactacgaggaacgagtgttgccgtccattgtcaacgaggtgctcaagagtgtggtggccaagttcaatgcctcacagctgatcacccagcgggcccaggtatccctgttgatccgccgggagctgacagagagggccaaggacttcagcctcatcctggatgatgtggccatcacagagctgagctttagccgagagtacacagctgctgtagaagccaaacaagtggcccagcaggaggcccagcgggcccaattcttggtagaaaaagcaaagcaggaacagcggcagaaaattgtgcaggccgagggtgaggccgaggctgccaagatgcttggagaagcactgagcaagaaccctggctacatcaaacttcgcaagattcgagcagcccagaatatctccaagacgatcgccacatcacagaatcgtatctatctcacagctgacaaccttgtgctgaacctacaggatgaaagtttcaccaggggaagtgacagcctcatcaagggtaagaaatgagcctagtcaccaagaactccacccccagaggaagtggatctgcttctccagtttttgaggagccagccaggggtccagcacagccctaccccgccccagtatcatgcgatggtcccccacaccggttccctgaacccctcttggattaaggaagactgaagactagccccttttctggggaattactttcctcctccctgtgttaactggggctgttggggacagtgcgtgatttctcagtgatttcctacagtgttgttccctccctcaaggctgggaggagataaacaccaacccaggaattctcaataaatttttattacttaacctgaa

SEQ ID NO: 23702 - DNA, 1518 bp, Homo sapiens
  source 1..1518: mol_type = unassigned DNA
gtagtgggctaagggggagggtttcaaagggagcgcacttccgctgccctttctttcgccagccttacgggcccgaaccctcgtgtgaagggtgcagtacctaagccggagcggggtagaggcgggccggcacccccttctgacctccagtgccgccggcctcaagatcagacatggcccagaacttgaaggacttggcgggacggctgcccgccgggccccggggcatgggcacggccctgaagctgttgctgggggccggcgccgtggcctacggtgtgcgcgaatctgtgttcaccgtggaaggcgggcacagagccatcttcttcaatcggatcggtggagtgcagcaggacactatcctggccgagggccttcacttcaggatcccttggttccagtaccccattatctatgacattcgggccagacctcgaaaaatctcctcccctacaggctccaaagacctacagatggtgaatatctccctgcgagtgttgtctcgacccaatgctcaggagcttcctagcatgtaccagcgcctagggctggactacgaggaacgagtgttgccgtccattgtcaacgaggtgctcaagagtgtggtggccaagttcaatgcctcacagctgatcacccagcgggcccaggtatccctgttgatccgccgggagctgacagagagggccaaggacttcagcctcatcctggatgatgtggccatcacagagctgagctttagccgagagtacacagctgctgtagaagccaaacaagtgggtgagtcgcaagagccgtggggtgagggcttctgagatgcaggaggaggaaagactccatgggtggggctcctgacccaggacagggtctccctgactctctcccaccacagcccagcaggaggcccagcgggcccaattcttggtagaaaaagcaaagcaggaacagcggcagaaaattgtgcaggccgagggtgaggccgaggctgccaagatgcttggagaagcactgagcaagaaccctggctacatcaaacttcgcaagattcgagcagcccagaatatctccaagacgatcgccacatcacagaatcgtatctatctcacagctgacaaccttgtgctgaacctacaggatgaaagtttcaccaggggaagtgacagcctcatcaagggtaagaaatgagcctagtcaccaagaactccacccccagaggaagtggatctgcttctccagtttttgaggagccagccaggggtccagcacagccctaccccgccccagtatcatgcgatggtcccccacaccggttccctgaacccctcttggattaaggaagactgaagactagccccttttctggggaattactttcctcctccctgtgttaactggggctgttggggacagtgcgtgatttctcagtgatttcctacagtgttgttccctccctcaaggctgggaggagataaacaccaacccaggaattctcaataaatttttattacttaacctgaa

SEQ ID NO: 23703 - DNA, 1338 bp, Homo sapiens
  source 1..1338: mol_type = unassigned DNA
cttcaccccaagtgaccatgagaggtgccacgcgagtctcaatcatgctcctcctagtaactgtgtctgactgtgctgtgatcacaggggcctgtgagcgggatgtccagtgtggggcaggcacctgctgtgccatcagcctgtggcttcgagggctgcggatgtgcaccccgctggggcgggaaggcgaggagtgccaccccggcagccacaaggtccccttcttcaggaaacgcaagcaccacacctgtccttgcttgcccaacctgctgtgctccaggttcccggacggcaggtaccgctgctccatggacttgaagaacatcaatttttaggcgcttgcctggtctcaggatacccaccatccttttcctgagcacagcctggatttttatttctgccatgaaacccagctcccatgactctcccagtccctacactgactaccctgatctctcttgtctagtacgcacatatgcacacaggcagacatacctcccatcatgacatggtccccaggctggcctgaggatgtcacagcttgaggctgtggtgtgaaaggtggccagcctggttctcttccctgctcaggctgccagagaggtggtaaatggcagaaaggacattccccctcccctccccaggtgacctgctctctttcctgggccctgcccctctccccacatgtatccctcggtctgaattagacattcctgggcacaggctcttgggtgcattgctcagagtcccaggtcctggcctgaccctcaggcccttcacgtgaggtctgtgaggaccaatttgtgggtagttcatcttccctcgattggttaactccttagtttcagaccacagactcaagattggctcttcccagagggcagcagacagtcaccccaaggcaggtgtagggagcccagggaggccaatcagccccctgaagactctggtcccagtcagcctgtggcttgtggcctgtgacctgtgaccttctgccagaattgtcatgcctctgaggccccctcttaccacactttaccagttaaccactgaagcccccaattcccacagcttttccattaaaatgcaaatggtggtggttcaatctaatctgatattgacatattagaaggcaattagggtgtttccttaaacaactcctttccaaggatcagccctgagagcaggttggtgactttgaggagggcagtcctctgtccagattggggtgggagcaagggacagggagcagggcaggggctgaaaggggcactgattcagaccagggaggcaactacacaccaacctgctggctttagaataaaagcaccaactgaa

SEQ ID NO: 23704 - DNA, 1022 bp, Homo sapiens
  source 1..1022: mol_type = unassigned DNA
gagggcgccatgaggagcctgtgctgcgccccactcctgctcctcttgctgctgccgccgctgctgctcacgccccgcgctggggacgccgccgtgatcaccggggcttgtgacaaggactcccaatgtggtggaggcatgtgctgtgctgtcagtatctgggtcaagagcataaggatttgcacacctatgggcaaactgggagacagctgccatccactgactcgtaaaaacaattttggaaatggaaggcaggaaagaagaaagaggaagagaagcaaaaggaaaaaggaggttccattttttgggcggaggatgcatcacacttgcccatgtctgccaggcttggcctgtttacggacttcatttaaccgatttatttgtttagcccaaaagtaatcgctctggagtagaaaccaaatgtgaatagccacatcttacctgtaaagtcttacttgtgattgtgccaaacaaaaaatgtgccagaaagaaatgctcttgcttcctcaactttccaagtaacatttttatctttgatttgtaaatgatttttttttttttttatcgaaagagaattttacttttggatagaaatatgaagtgtaaggcattatggaactggttcttatttccctgtttgtgttttggtttgatttggcttttttcttaaatgtcaaaaacgtacccattttcacaaaaatgaggaaaataagaatttgatattttgttagaaaaacttttttttttttttctcaccaccccaagccccatttgtgccctgccacacaaatacacctacagcttttggtcccttgcctcttccacctcaaagaatttcaaggctcttaccttactttatttttgtccatttctcttccctcctcttgcattttaaagtggagggtttgtctctttgagtttgatggcagaatcactgatgggaatccagctttttgctggcatttaaatagtgaaaagagtgtatatgtgaacttgacactccaaactcctgtcatggcacg

SEQ ID NO: 23705 - DNA, 1549 bp, Homo sapiens
  source 1..1549: mol_type = unassigned DNA
gccggcgtgagtcacggcggggctagcctttataacggcccggaggctcgcgggagccgccgcgcccgtccgcccgccgctccgcgctccacccagcgcacccgggccccgcgcccccaactgcctccggcggccgcccagtcccgagggcgccatgaggagcctgtgctgcgccccactcctgctcctcttgctgctgccgccgctgctgctcacgccccgcgctggggacgccgccgtgatcaccggggcttgtgacaaggactcccaatgtggtggaggcatgtgctgtgctgtcagtatctgggtcaagagcataaggatttgcacacctatgggcaaactgggagacagctgccatccactgactcgtaaagttccattttttgggcggaggatgcatcacacttgcccatgtctgccaggcttggcctgtttacggacttcatttaaccgatttatttgtttagcccaaaagtaatcgctctggagtagaaaccaaatgtgaatagccacatcttacctgtaaagtcttacttgtgattgtgccaaacaaaaaatgtgccagaaagaaatgctcttgcttcctcaactttccaagtaacatttttatctttgatttgtaaatgatttttttttttttttatcgaaagagaattttacttttggatagaaatatgaagtgtaaggcattatggaactggttcttatttccctgtttgtgttttggtttgatttggcttttttcttaaatgtcaaaaacgtacccattttcacaaaaatgaggaaaataagaatttgatattttgttagaaaaacttttttttttttttctcaccaccccaagccccatttgtgccctgccacacaaatacacctacagcttttggtcccttgcctcttccacctcaaagaatttcaaggctcttaccttactttatttttgtccatttctcttccctcctcttgcattttaaagtggagggtttgtctctttgagtttgatggcagaatcactgatgggaatccagctttttgctggcatttaaatagtgaaaagagtgtatatgtgaacttgacactccaaactcctgtcatggcacggaagctaggagtgctgctggacccttcctaaacctgtcactcaagaggacttcagctctgctgttgggctggtgtgtggacagaaggaatggaaagccaaattaatttagtccagatttctaggtttgggtttttctaaaaataaaagattacatttacttcttttactttttataaagttttttttccttagtctcctacttagagatattctagaaaatgtcacttgaagaggaagtatttattttaatctggcacaacactaattaccatttttaaagcagtattaagttgtaatttaaaccttgtttgtaactgaaaggtcgattgtaatggattgccgtttgtacctgtatcagtattgctgtgtaaaaattctgtatcagaataataacagtactgtatatcatttgatttattttaatattatatccttatttttgtc

SEQ ID NO: 23706 - DNA, 1155 bp, Homo sapiens
  source 1..1155: mol_type = unassigned DNA
atggcagcccagaatggaaacaccagtttcacacccaactttaatccaccccaagaccatgcctcctccctctcctttaacttcagttatggtgattatgacctccctatggatgaggatgaggacatgaccaagacccggaccttcttcgcagccaagatcgtcattggcattgcactggcaggcatcatgctggtctgcggcatcggtaactttgtctttatcgctgccctcacccgctataagaagttgcgcaacctcaccaatctgctcattgccaacctggccatctccgacttcctggtggccatcatctgctgccccttcgagatggactactacgtggtacggcagctctcctgggagcatggccacgtgctctgtgcctccgtcaactacctgcgcaccgtctccctctacgtctccaccaatgccttgctggccattgccattgacagatatctcgccatcgttcaccccttgaaaccacggatgaattatcaaacggcctccttcctgatcgccttggtctggatggtgtccattctcattgccatcccatcggcttactttgcaacagaaacggtcctctttattgtcaagagccaggagaagatcttctgtggccagatctggcctgtggatcagcagctctactacaagtcctacttcctcttcatctttggtgtcgagttcgtgggccctgtggtcaccatgaccctgtgctatgccaggatctcccgggagctctggttcaaggcagtccctgggttccagacggagcagattcgcaagcggctgcgctgccgcaggaagacggtcctggtgctcatgtgcattctcacggcctatgtgctgtgctgggcacccttctacggtttcaccatcgttcgtgacttcttccccactgtgttcgtgaaggaaaagcactacctcactgccttctacgtggtcgagtgcatcgccatgagcaacagcatgatcaacaccgtgtgcttcgtgacggtcaagaacaacaccatgaagtacttcaagaagatgatgctgctgcactggcgtccctcccagcgggggagcaagtccagtgctgaccttgacctcagaaccaacggggtgcccaccacagaagaggtggactgtatcaggctgaagtga

SEQ ID NO: 23707 - DNA, 1771 bp, Homo sapiens
  source 1..1771: mol_type = unassigned DNA
gctggaaagagctgtggggccggagcgccaactccagctggaacccagagaccctgacacgccggaggagcccgccggggcgaggaaaaaagagggacatcccccacgcagcggctctgcaagtgcaagtccgggtcctcgaggtgaaaaccgagcggcccgcctgcgcccaaccacactgtgactctcgatccggcttccggagcagcagagcgcacagaaaggaggcgccgagacagacatcaccatggcagcccagaatggaaacaccagtttcacacccaactttaatccaccccaagaccatgcctcctccctctcctttaacttcagttatggtgattatgacctccctatggatgaggatgaggacatgaccaagacccggaccttcttcgcagccaagatcgtcattggcattgcactggcaggcatcatgctggtctgcggcatcggtaactttgtctttatcgctgccctcacccgctataagaagttgcgcaacctcaccaatctgctcattgccaacctggccatctccgacttcctggtggccatcatctgctgccccttcgagatggactactacgtggtacggcagctctcctgggagcatggccacgtgctctgtgcctccgtcaactacctgcgcaccgtctccctctacgtctccaccaatgccttgctggccattgccattgacagatatctcgccatcgttcaccccttgaaaccacggatgaattatcaaacggcctccttcctgatcgccttggtctggatggtgtccattctcattgccatcccatcggcttactttgcaacagaaacggtcctctttattgtcaagagccaggagaagatcttctgtggccagatctggcctgtggatcagcagctctactacaagtcctacttcctcttcatctttggtgtcgagttcgtgggccctgtggtcaccatgaccctgtgctatgccaggatctcccgggagctctggttcaaggcagtccctgggttccagacggagcagattcgcaagcggctgcgctgccgcaggaagacggtcctggtgctcatgtgcattctcacggcctatgtgctgtgctgggcacccttctacggtttcaccatcgttcgtgacttcttccccactgtgttcgtgaaggaaaagcactacctcactgccttctacgtggtcgagtgcatcgccatgagcaacagcatgatcaacaccgtgtgcttcgtgacggtcaagaacaacaccatgaagtacttcaagaagatgatgctgctgcactggcgtccctcccagcgggggagcaagtccagtgctgaccttgacctcagaaccaacggggtgcccaccacagaagaggtggactgtatcaggctgaagtgacccactggtgtcacacaattgaaaaccccagtccagtactcagagcatcacccaccatcaaccaagttcataggctgcatgggaaatgacatctgtgttcatgcctcccccgtgccctcaagaagctgaatgctgcaaagtcgtaacatacaatgagactagacatgaaccaaatcagctgacatttactgatatccgctcgacacctactgtgtccacaatcccaacaaggagattagacacaaggagcagcaactgacatggactgaacatgtactgtgtgcaaaccacaccaatgagattagacagggacagcaggagctgacatttactcttcacctactgtaataaaaaacacttgatttgatt

SEQ ID NO: 23708 - DNA, 1354 bp, Homo sapiens
  source 1..1354: mol_type = unassigned DNA
atccttattctatatctcttggtatttagtgtaaaaattttaaaatctttacctagcaatcttgaggaagaaacttgataactgataatacatgagattgttacctaagtgaaatataatcctatatattcaacaaactttagagaaataagataaattttaaagtaaatgacttctgtagttttatagatcctccaaaccaatctagtctcagatctcaccttcatcatttctctcatttccttttggcctaattaatcaaaatccttcctagaatgttcatttctggccagtatgtcttcctgaatatgaataagaaataaaataccatttgatgtttgaaattatgggggtaatctcaatgacggaaatagatgaccaggaaaagggaaacgaatgcctgattcattatattcatgaagatatcaaaggtttataaagccaatatctgggaaagagaaaaccgtgagacttccagatcttctctggtgaagtgtgtttcctgcaacgatcacgaacatgaacatcaaaggatcgccatggaaagggtccctcctgctgctgctggtgtcaaacctgctcctgtgccagagcgtggcccccttgcccatctgtcccggcggggctgcccgatgccaggtgacccttcgagacctgtttgaccgcgccgtcgtcctgtcccactacatccataacctctcctcagaaatgttcagcgaattcgataaacggtatacccatggccgggggttcattaccaaggccatcaacagctgccacacttcttcccttgccacccccgaagacaaggagcaagcccaacagatgaatcaaaaagactttctgagcctgatagtcagcatattgcgatcctggaatgagcctctgtatcatctggtcacggaagtacgtggtatgcaagaagccccggaggctatcctatccaaagctgtagagattgaggagcaaaccaaacggcttctagagggcatggagctgatagtcagccaggttcatcctgaaaccaaagaaaatgagatctaccctgtctggtcgggacttccatccctgcagatggctgatgaagagtctcgcctttctgcttattataacctgctccactgcctacgcagggattcacataaaatcgacaattatctcaagctcctgaagtgccgaatcatccacaacaacaactgctaagcccacatccatttcatctatttctgagaaggtccttaatgatccgttccattgcaagcttcttttagttgtatctcttttgaatccatgcttgggtgtaacaggtctcctcttaaaaaataaaaactgactccttagagacatcaaaatc

SEQ ID NO: 23709 - DNA, 591 bp, Homo sapiens
  source 1..591: mol_type = unassigned DNA
atgaacatcaaaggatcgccatggaaagggtccctcctgctgctgctggtgtcaaacctgctcctgtcccactacatccataacctctcctcagaaatgttcagcgaattcgataaacggtatacccatggccgggggttcattaccaaggccatcaacagctgccacacttcttcccttgccacccccgaagacaaggagcaagcccaacagatgaatcaaaaagactttctgagcctgatagtcagcatattgcgatcctggaatgagcctctgtatcatctggtcacggaagtacgtggtatgcaagaagccccggaggctatcctatccaaagctgtagagattgaggagcaaaccaaacggcttctagagggcatggagctgatagtcagccaggttcatcctgaaaccaaagaaaatgagatctaccctgtctggtcgggacttccatccctgcagatggctgatgaagagtctcgcctttctgcttattataacctgctccactgcctacgcagggattcacataaaatcgacaattatctcaagctcctgaagtgccgaatcatccacaacaacaactgctaa

SEQ ID NO: 23710 - DNA, 1679 bp, Homo sapiens
  source 1..1679: mol_type = unassigned DNA
aagagaaggcagccaacatgaaggaaaatgtggcatctgcaaccgttttcactctgctactttttctcaacacctgccttctgaatggacagttacctcctggaaaacctgagatctttaaatgtcgttctcccaataaggaaacattcacctgctggtggaggcctgggacagatggaggacttcctaccaattattcactgacttaccacagggaaggagagacactcatgcatgaatgtccagactacataaccggtggccccaactcctgccactttggcaagcagtacacctccatgtggaggacatacatcatgatggtcaatgccactaaccagatgggaagcagtttctcggatgaactttatgtggacgtgacttacatagttcagccagaccctcctttggagctggctgtggaagtaaaacagccagaagacagaaaaccctacctgtggattaaatggtctccacctaccctgattgacttaaaaactggttggttcacgctcctgtatgaaattcgattaaaacccgagaaagcagctgagtgggagatccattttgctgggcagcaaacagagtttaagattctcagcctacatccaggacagaaataccttgtccaggttcgctgcaaaccagaccatggatactggagtgcatggagtccagcgaccttcattcagatacctagtgacttcaccatgaatgatacaaccgtgtggatctctgtggctgtcctttctgctgtcatctgtttgattattgtctgggcagtggctttgaagggctatagcatggtgacctgcatctttccgccagttcctgggccaaaaataaaaggatttgatgctcatctgttggagaagggcaagtctgaagaactactgagtgccttgggatgccaagactttcctcccacttctgactatgaggacttgctggtggagtatttagaagtagatgatagtgaggaccagcatctaatgtcagtccattcaaaagaacacccaagtcaaggtgaccccttgatgttgggtgcctctcattacaaaaatctcaaatcttacagaccaagaaaaatctcaagtcaaggaagacttgcggtgttcacaaaggcaacattgaccacagtccagtagagctgaagagcatataccagaattcaggaactcaacattttctcccctctgtccaaccacaggacagactgtgcaccccagggagatgctgtgtgtccactggcctcactgacttggattactcctgcagcacgtgaccagccagctcatatgatcactccctactgcccccaaagcagaattgactgggagctggaaacccacacaaaaagggacaattatattgaatgtaacatactccctctgcttacctagtgccttcacctcctatgggcatttggagtaaaaggttgttatgcaggtgtttgtgaaggatgtggccaagtcagttgtctcccttacagggtgacccaagattaatgatatctacccatccccagtccctcgaccccctagttgcaatcagctttgtcactgtcccccttaggcactgccatgtaaagcacgtggtcccccattctgaagcagtgggaaacctagaagagatgtactcttcgcaacctggttggatcttaaaaacatggttctaac

SEQ ID NO: 23711 - DNA, 1297 bp, Homo sapiens
  source 1..1297: mol_type = unassigned DNA
atgaaggaaaatgtggcatctgcaaccgttttcactctgctactttttctcaacacctgccttctgaatggacagttacctcctggaaaacctgagatctttaaatgtcgttctcccaataaggaaacattcacctgctggtggaggcctgggacagatggaggacttcctaccaattattcactgacttaccacagggaaggagagacactcatgcatgaatgtccagactacataaccggtggccccaactcctgccactttggcaagcagtacacctccatgtggaggacatacatcatgatggtcaatgccactaaccagatgggaagcagtttctcggatgaactttatgtggacgtgacttacatagttcagccagaccctcctttggagctggctgtggaagtaaaacagccagaagacagaaaaccctacctgtggattaaatggtctccacctaccctgattgacttaaaaactggttggttcacgctcctgtatgaaattcgattaaaacccgagaaagcagctgagtgggagatccattttgctgggcagcaaacagagtttaagattctcagcctacatccaggacagaaataccttgtccaggttcgctgcaaaccagaccatggatactggagtgcatggagtccagcgaccttcattcagatacctagtgacttcaccatgaatgatacaaccgtgtggatctctgtggctgtcctttctgctgtcatctgtttgattattgtctgggcagtggctttgaagggctatagcatggtgacctgcatctttccgccagttcctgggccaaaaataaaaggatttgatgctcatctgttggagaagggcaagtctgaagaactactgagtgccttgggatgccaagactttcctcccacttctgactatgaggacttgctggtggagtatttagaagtagatgatagtgaggaccagcatctaatgtcagtccattcaaaagaacacccaagtcaagagagagaacagcggcaagcccaagaagcccgggactcctgagaacaataaggagtatgccaaggtgtccggggtcatggataacaacatcctggtgttggtgccagatccacatgctaaaaacgtggcttgctttgaagaatcagccaaagaggccccaccatcacttgaacagaatcaagctgagaaagccctggccaacttcactgcaacatcaagcaagtgcaggctccagctgggtggtttggattacctggatcccgcatgttttacacactcctttcactga

SEQ ID NO: 23712 - DNA, 11485 bp, Homo sapiens
  source 1..11485: mol_type = unassigned DNA
ccgatctggggggaatcagttgtttcttcaggtcttcgcaggattccagctcccccaactacctccgtcgccttctaaaactggcaggctctggacgttttgcatgctgaagaaaatcactgttttgcctccagcaaggaacataaatgttgcaacactgactcctcctctcatgaagaaagagtgaacaagtgcaccgagttgagcttcttctcacagagccaccgggctggggaccggggagcggaggctgaaatccccagacgccggttttctgggctgggctttctgccttactcactccttctccctctttctggattttaccgaccgttcgcgaaacagctttccacacaatggagcttcatgtcctcgtgcaggaagtactcatcgactgatgtggcagactttgctccctggcaaaactaaagaactctcctattcatggaggcgaacactgaggatgctttccacatgaaccctgaagtgaacttctgatacatttcctgcagcaagagaaggcagccaacatgaaggaaaatgtggcatctgcaaccgttttcactctgctactttttctcaacacctgccttctgaatgttcagccagaccctcctttggagctggctgtggaagtaaaacagccagaagacagaaaaccctacctgtggattaaatggtctccacctaccctgattgacttaaaaactggttggttcacgctcctgtatgaaattcgattaaaacccgagaaagcagctgagtgggagatccattttgctgggcagcaaacagagtttaagattctcagcctacatccaggacagaaataccttgtccaggttcgctgcaaaccagaccatggatactggagtgcatggagtccagcgaccttcattcagatacctagtgacttcaccatgaatgatacaaccgtgtggatctctgtggctgtcctttctgctgtcatctgtttgattattgtctgggcagtggctttgaagggctatagcatggtgacctgcatctttccgccagttcctgggccaaaaataaaaggatttgatgctcatctgttggagaagggcaagtctgaagaactactgagtgccttgggatgccaagactttcctcccacttctgactatgaggacttgctggtggagtatttagaagtagatgatagtgaggaccagcatctaatgtcagtccattcaaaagaacacccaagtcaaggtatgaaacccacatacctggatcctgacactgactcaggccgggggagctgtgacagcccttcccttttgtctgaaaagtgtgaggaaccccaggccaatccctccacattctatgatcctgaggtcattgagaagccagagaatcctgaaacaacccacacctgggacccccagtgcataagcatggaaggcaaaatcccctattttcatgctggtggatccaaatgttcaacatggcccttaccacagcccagccagcacaaccccagatcctcttaccacaatattactgatgtgtgtgagctggctgtgggccctgcaggtgcaccggccactctgttgaatgaagcaggtaaagatgctttaaaatcctctcaaaccattaagtctagagaagagggaaaggcaacccagcagagggaggtagaaagcttccattctgagactgaccaggatacgccctggctgctgccccaggagaaaaccccctttggctccgctaaacccttggattatgtggagattcacaaggtcaacaaagatggtgcattatcattgctaccaaaacagagagagaacagcggcaagcccaagaagcccgggactcctgagaacaataaggagtatgccaaggtgtccggggtcatggataacaacatcctggtgttggtgccagatccacatgctaaaaacgtggcttgctttgaagaatcagccaaagaggccccaccatcacttgaacagaatcaagctgagaaagccctggccaacttcactgcaacatcaagcaagtgcaggctccagctgggtggtttggattacctggatcccgcatgttttacacactcctttcactgatagcttgactaatggaatgattggttaaaatgtgatttttcttcaggtaacactacagagtacgtgaaatgctcaagaatgtagtcagactgacactactaaagctcccagctcctttcatgctccatttttaaccacttgcctctttctccagcagctgattccagaacaaatcattatgtttcctaactgtgatttgtagatttactttttgctgttagttataaaactatgtgttcaatgaaataaaagcacactgcttagtattcttgagggacaatgccaataggtatatcctctggaaaaggctttcatgatttggcatgggacagacggaaatgaaattgtcaaaattgtttaccatagaaagatgacaaaagaaaattttccacataggaaaatgccatgaaaattgcttttgaaaaacaactgcataacctttacactcctcgtccattttattaggattacccaaatataaccatttaaagaaagaatgcattccagaacaaattgtttacataagttcctataccttactgacacattgctgatatgcaagtaagaaataatgcctccaattttttcttaaaatagtttagatatgttaagcatggattttccccctaaattctactctaaagcttctataaaatatagtttggaaataaaaatgttcttacacaaggggcaaatgaatttcatgtgaatccctttaggatgttttcctccttcatttcagcatgatagataatttattatacaccttagtctttccttagttaaaaaaaaattccctaaagactaacttgaaaagaaaaccacagcaggatgctaatggaattactgccttactgtacatacaaattctactttaatataaacccataagtttaactgtatttttgaagactatttttctatgacttaggtaaaataaaagactattttctattttcccagtacagctgtttatgtattcagtgggtacagtattttctgctgcaaggttataatgtgtatttacagtacatagtagtatataaagttcccgtttgtggagtaaaatgccataccaacccaaagcccactgtgaaatatgaagtgaatgacaaaattcagttttcaacgcaatatagtatagtttatctgattcttttgatctccaggacactttaaacaactgctaccaccaccaccaacctagggatttaggattctccacagaccagaaattatttctcctttgagtttcaggctcctctgggactcctgttcatcaatgggtgaatcttcctaaagctaccataaaaagggagggcgacgatttctaacagctgtttaaaagagagaggttttgcttttgtgagaaatcttgggccacaaaaaaattttaagcaaagccaggagttagtgtctctctgaagtaaattcaattgcaaaatcttggcagaggcagaaatggctcatatcagaagtgtccaaataaaagttctgggaaactaggtatttgcttcccagagcaatgggaatagctccaaaggtcagagtaaggtaatgagaatctcccggtcaattccagtgccaggcttcctgaaagaagtcaaagcttggatcctcattttaaagggcgcatccatgactcatctagcagcccctctctatttttcccttcacttgatggtaaatccattctatatgtccatttactagctggacatagagaacttgagctcacctctgggagttaaatattccaccccaactatcccatattgatagcaactggactcagaggtccccctcctgtttgaaagtgaacacattgccaatgttttgagaatggcaaaagcaatagatacgaagctccatttttctaatatataaacaatatcatgtgagtaagggaagcgtgtgggaaagttgtccaagctcattcagtcccctaaatcctcgatactttaactgtctgagaaccaactgcataggcatcacctgggcagtgtttgaaaattccatttgcagaatcttaagcatcagaatctgcattttactaagatccccaaatgattcaattgcacactgaagtttgagaagcattgttctagacaaccatttccactaaaggttattttagttcatagtaacaatcctcttttggaaaggacagatcaagtctgtttgacttgcaatgaacaacactgcatgtaagcaggcaaaaaaagaaacatatcagtagtttaagattcacattatgctgaatcttatatgaattcacataaaagaatgacctgcaaaactacgcacaacttctgaaaggccaaggaatataatctaccttgagagacattaaccaaagacagtcaccctcaaagccaatgcagactaaatctttcctaacatagtctattctctaagaatagagaagatatgtatcagtcactcttatagtctgaaaacctaaacataaaagtaatctgcttttgacatataattttgtataatacgtatgaaaaaatgtgacagctaaggacttgaattaaatccctaaaaaacaattagccactcattaggccaagactttaattctatgatcaattagcactgtttatctgaattaagcttttttgtggtctaacaaaaagtttttttgtggtctatcaaggagacagctgttcaaatggaaggatacatgtggggcaggggggcggtgaagagacctagattctggtcctaactgctttgccttggagagattaattcccccctctaagcctcagtttcctctgaagatgttggaccagataacctctaaggtcctttgaaactgactccttgattccatgactcactgaatatttttctgcaaagataatcccaaccaatgccttctatcctaatctaacaaaaaattgctcttcatcatagaaatacaaagtaatcttcagtgatgtgctctttatactttgctttttaaaccgtccattccagttggtcttaatatattgcacaagtattttataagtgaaatgtgtacagaatcatattctaagattatgtgcaaatatatgtgtagaaagaggcatttaaaaaaagaggcaggagattgagaagagacatattgaatgaggcactaatctttagaaaaatgatcttttactgaatcaagccatgctcattccttgctgaatccaacagccccaaatctcttttcttatatttggctgttaatttttttccttgcaccatcctagattgttaacaaccattgcacagttggctcatgtatccttacactctgagttataataagttgtatttttataaacaaatacctaaatattcaagttttaaggcgcatggaaactgaatctaggcaacgggtgatttgtgtagcttacaacctgaacagcaagatgttccaattcattctaacagatgtgtataagcacaagttatatcagctgtgtcagatatttaacagatcctacatttattagctatataacagactctacattttcctaagtgcctaagaccaatcctggtagtcacttaagtacaaaagactcactttaactggcttggtctgaaggggtcaatcctttactgcctgtacaagatctgggcagttttgctctgtgtcttgtgatgacccagctgaatgtgaaaagcctatgagttattgagcaaccagaggtccctgcattccaagttgcagtttagctctggggaaactctggctttctctttcctcaagtgtccaccactgcccatcatttgcagaaagacttggccctgcctttagcaacttccctatctccttagagtagacaagaaagaaacagatttgtgcacattttacaaagtgccttcctctatttttttttaaagttttcattttgcaaggaaaaatgtattgattagaaagtaacatttgccttatagggattatatatatatatagatatagatatagatatgtatgaatggagagatgagaagaagccagaaagggcacaacaaaatggtctaagggccaaccagcaatgttcagtgaatgtttacgtattgtttaattgaatcaacacagagctgttgtgaatagtgtgacttactttgcctgataagaaattgaggctggctgtgatttggggataaacctgccaccctgtgatttgagactctccataccaaaacttattgatacatttttgaatgtcattggcttacatgcctaaacctgaagagaacaatgcatgcacattggaactttgtacacaaacagaaaaatataaatgactttgaattaccatcccaagcattgctaacgtagatgtgccattgacgaaagtctcatgtgttcttgagtgaacaaatttccttttcttcctttttggctcaagcacaataatgctgtcactgagacagtgactgagcactcaatgtccaagactaaatcacatcaccacgactaagtaggcactatgtcctgggatgagtcttttaaactctggccatcaggttccttacttgttaaataagtaggttggcctaaaaggtttctaagacctctcatgatctaggtaaaatccagggtttcaggtcagtgtccctggtgcagtgcaagaaagccttgctgacacacccttggcctgaagcagtgagcacatgagattgtgtgacaacgcttcagagaaaaacagagatctgttcctccaactcagattgatttaacatccttgcttctccttttccttcctggctttacatatttgtagggtttttactccttctccagagcctactattttcctaagagttagtagcaaccataggatccacaagaaatgaaattattcatcaacaatgactttggcactgcaaaagactgagtcaaaggttaaatcagtcacacagatatccaaggccaagttgaagatcacaagtatatcccatttagagatttgcatacttagagattaagcccatgttcattaattatttagttaattcaaaagccattaataaatccatgcccagcctacgcaacatagtaagacccagtctctacaaaaattttaaaaattagccagccatggtgacacgtacctgtagtcctagacacttgggaaggtgaagccagaggattgcttgagcccaggaggtcgaggctgcagtgaaccgtgattgtgtcactgcactccagcctgggtgagagagcaagaccttgtctcaataaataaacccaagttacttcgatgactagatactggaggtctgaaggagaagctttaaaaatacagattgattgcttcagagaaatcctatttataattatgatctgaacttattctatgattagcaaatatatcatctgaaaataaaacaggagttctctccccagacttttgtttttcaggatggtgagttttggtctgggaccctcatggcacccattttgataaaaggaaaaagatagtaaaacaggaaataggaagtttccagagatttgggcatctcaggattccatgaaatgctgagactaacccactaaatccaaattttattggctatggtaaatctaaatctgttcagtgttctgaacagattttatgagtttatgtctaagagtttatgtctaagagaggtacataattcacaaacactatcatgctggcagctgttttgtccacatcaattcccttgatttaatgctctgatttcaatttagaaagtactgagacatgtaaagtctcaaaataggaaaaacctatcctgtttataaggtgtggtcaataaatagaccacagataatcttagtctattaattaactctcagatcatcttagactattaattaacattctgcttgctgctgattaaaaagaaaaaaaccctaaaaccttcagcaactgaagtagtaatataaaaaataacctttaatagttatggtcaaattacgcttcacttggataaacctcaaaatgtagtctgagtttttttgtgcacacttcacaaatcctgggggaaaaatcttttttccacgttatctgaaaaactatatggcgaagataccgctgaaaaataatttgttttatgaaattcctgaaaagctaattttgaattttttaaagtaactacctcccttttgtgtcctaatgtccttccttcaaagctgcttatagtttagaaatgaaagatgtcatgtctcatgctttgactggttttcggtggcatatttgatgtatttgccaagtggcattactgactttacagtaactgttacattattttgtactatattgctttatgtggttcaaaaatagtatatgccatattgaaatatgtaatcctcatgttgtgaaactcatcatgtaatacaatgaaaatcattacttaataacttacaatttatccatatgtagtttcaatatgattgtgtctatgactgtaaaacaaactgaaaaaatatgtaatgtatttctgttgaaagcgtgaatgtactaattttttcctaatcttgtctagaagaaagattctatgtcattcattgtacagctgctctggggtgttacacatttaaagtacaatccaacagttgtttgaaagtcagcctctcggctttgtttcatgtgactgctgacacttctcaagtgttctttgcataatgaggctggattttgtgcttcatcgttcattttaaacaattgaaaagtctcatgtggaaaccaaagcaatctagaaccagcctgttgggtgactgtgtcttctgtaaagccatattgaagtgaagttatacataatagcataaggttccacattttcaaagctaccactacctctgcttttcctctttccctagaaaatgccaagcaaaattccccaacactaagtgagaaattagaagtaattgttttataattaagttgctgggttttttttttaacaccttctaattcatcactttgtagggttatgcaagagtttctgaataaccattcttacatgtttatattttataaaaaccggctgcaagaaagattcagaaagaatacttagtaagtcatcatatgaaaaaccaacaaaaccatagagtgcagattttttcctaactataagtcacctcatagttgtccaaagccatgataatgatatctcttacaaattgacttctgtaacccccctagaaataacccttttccttatttgattttagtcatcaaacatagtatgatatgggaaaagtcagccatttaccagaaattatcttattttgattttaaaaactcatttctatatgtagttattgtaatgtctatttttttagacttaaagatttatagaagactatagttatctgatttgttattttgcatttttcattctgtaaatctttgcttatggcacattgtgctctctgttttccatggttttattcatttatctcctcctattttgaggggacaacatgggtagttaaatctttgtcaatagtattggagataacactaactgctattatcataacatcttcatttttactgcatgccaaaaccaatgcctgccaaacaaaatcttagacatcccaatataatatgttagttatatttctattcacatcattattgaaaatacccagctcagtgcctggcttaataaatgtttaattcccttacctactcttgctctatttttttatttgaaatggagatgagcaaaataacacattcatggctgaagcaattttttggacatttcttgttaccaaaagatctataatcaggacattgtttatgtaagttggacaaaaaaaattcttcccctttatgtccacccttcctatgattgcaagacaaaatttccctcctttacctcatccctataacatgggaggctgagaaaaatgaggggagatggaaccagatacaaggagatccaataagagaagcttatttaaatattgtgaaataaaggaagaaccaaagcatttttttaagtggggaatccttttgaacagttattatttatccatattattaacaacatcttttctgacaaaatccatcagatgaagtgtaaatggataatcttttaatggatctaaacctagaaagtttcacttactgttcatgtccgtgttccagaattgtgaaatggtgtgtggttttgctttccaagttcttctctgcctcctcttaattctctaattccatgtcttacagaagaatgagaaatttctttcttacttgagtatcatgctctaaaaaacttggcttcagtcacagaaacgctggctctcctgtgcttatattgaagccaactgcctttaattcttgggccctcttatatttttaaggtgcaaaatttgaagtctcagtcaccagacacaggttctatacaattaatgatgagctggagaagtaatatgtagctaatttttcaaaagcattgaatatactttccggaaagaaaacagaaattaaatattgccacatcttgccagaatcccatctgacaccttaactttgtcaggtttcctacaacttgctaatcaagttttatacattctaaatctccccagtttctttggggctggaagatgcaacttccatttaatagaaactttgaaatcttggggtaagggagcagtggggggactagggagaaggataagaaatagaattattgaaaagcccccaccagggaccttcctggccagaatatgcagagtaattcctgctggcttcacctttgaaagtccctcgaaactatgcagatgaaactgagtctgtttttgatattgtcagatgtattctaccttggaagtcccaacacctaaactggaattcttgtatttacatctcctccactgtcccccacaccacccctcaattcctgctgcccctgctaatgttaagcatttttctcttgttatcatcaggttcacattaaaaacagatacttacaaactgacttgaagcacagatacttttacgaatgtgataaaatattttcttaagaaaaggaaagaggatgtgggtcaaataaaacaccgcatggatgttgattggtgaatactggtgtaagaaaagggagctcaggaatttttattactgtatttgtaaatgagtttgaaggaatttgtaaatgccactggtacatttttaaggtgacacatttgctccttataaagttattaaaaattacagggtaagcttaaatgacgtttgccagtagttttactttatataatcaatattgatattgttgctgaactatgtaactttatgatgcatttttcagtcccttttcagagcaaatgcttttgcaatggtagtaatgtttagtttaaattgacttaataaattattacctgagcaatggtt

SEQ ID NO: 23713 - DNA, 1339 bp, Homo sapiens
  source 1..1339: mol_type = unassigned DNA
aagagaaggcagccaacatgaaggaaaatgtggcatctgcaaccgttttcactctgctactttttctcaacacctgccttctgaatggacagttacctcctggaaaacctgagatctttaaatgtcgttctcccaataaggaaacattcacctgctggtggaggcctgggacagatggaggacttcctaccaattattcactgacttaccacagggaaggagagacactcatgcatgaatgtccagactacataaccggtggccccaactcctgccactttggcaagcagtacacctccatgtggaggacatacatcatgatggtcaatgccactaaccagatgggaagcagtttctcggatgaactttatgtggacgtgacttacatagttcagccagaccctcctttggagctggctgtggaagtaaaacagccagaagacagaaaaccctacctgtggattaaatggtctccacctaccctgattgacttaaaaactggttggttcacgctcctgtatgaaattcgattaaaacccgagaaagcagctgagtgggagatccattttgctgggcagcaaacagagtttaagattctcagcctacatccaggacagaaataccttgtccaggttcgctgcaaaccagaccatggatactggagtgcatggagtccagcgaccttcattcagatacctagtggtgaccccttgatgttgggtgcctctcattacaaaaatctcaaatcttacagaccaagaaaaatctcaagtcaaggaagacttgcggtgttcacaaaggcaacattgaccacagtccagtagagctgaagagcatataccagaattcaggaactcaacattttctcccctctgtccaaccacaggacagactgtgcaccccagggagatgctgtgtgtccactggcctcactgacttggattactcctgcagcacgtgaccagccagctcatatgatcactccctactgcccccaaagcagaattgactgggagctggaaacccacacaaaaagggacaattatattgaatgtaacatactccctctgcttacctagtgccttcacctcctatgggcatttggagtaaaaggttgttatgcaggtgtttgtgaaggatgtggccaagtcagttgtctcccttacagggtgacccaagattaatgatatctacccatccccagtccctcgaccccctagttgcaatcagctttgtcactgtcccccttaggcactgccatgtaaagcacgtggtcccccattctgaagcagtgggaaacctagaagagatgtactcttcgcaacctggttggatctta

SEQ ID NO: 23714 - DNA, 11680 bp, Homo sapiens
  source 1..11680: mol_type = unassigned DNA
atgctgaagaaaatcactgttttgcctccagcaaggaacataaatgttgcaacactgactcctcctctcatgaagaaagagtgaacaagtgcaccgagttgagcttcttctcacagagccaccgggctggggaccggggagcggaggctgaaatccccagacgccggttttctgggctgggctttctgccttactcactccttctccctctttctggattttaccgaccgttcgcgaaacagctttccacacaatggagcttcatgtcctcgtgcaggaagtactcatcgactgatgtggcagactttgctccctggcaaaactaaagaactctcctattcatggaggcgaacactgaggatgctttccacatgaaccctgaagtgaacttctgatacatttcctgcagcaagagaaggcagccaacatgaaggaaaatgtggcatctgcaaccgttttcactctgctactttttctcaacacctgccttctgaatggacagttacctcctggaaaacctgagatctttaaatgtcgttctcccaataaggaaacattcacctgctggtggaggcctgggacagatggaggacttcctaccaattattcactgacttaccacagggaaggagagacactcatgcatgaatgtccagactacataaccggtggccccaactcctgccactttggcaagcagtacacctccatgtggaggacatacatcatgatggtcaatgccactaaccagatgggaagcagtttctcggatgaactttatgtggacgtgacttacatagttcagccagaccctcctttggagctggctgtggaagtaaaacagccagaagacagaaaaccctacctgtggattaaatggtctccacctaccctgattgacttaaaaactggttggttcacgctcctgtatgaaattcgattaaaacccgagaaagcagctgagtgggagatccattttgctgggcagcaaacagagtttaagattctcagcctacatccaggacagaaataccttgtccaggttcgctgcaaaccagaccatggatactggagtgcatggagtccagcgaccttcattcagatacctagtgacttcaccatgaatgatacaaccgtgtggatctctgtggctgtcctttctgctgtcatctgtttgattattgtctgggcagtggctttgaagggctatagcatggtgacctgcatctttccgccagttcctgggccaaaaataaaaggatttgatgctcatctgttggagaagggcaagtctgaagaactactgagtgccttgggatgccaagactttcctcccacttctgactatgaggacttgctggtggagtatttagaagtagatgatagtgaggaccagcatctaatgtcagtccattcaaaagaacacccaagtcaaggtatgaaacccacatacctggatcctgacactgactcaggccgggggagctgtgacagcccttcccttttgtctgaaaagtgtgaggaaccccaggccaatccctccacattctatgatcctgaggtcattgagaagccagagaatcctgaaacaacccacacctgggacccccagtgcataagcatggaaggcaaaatcccctattttcatgctggtggatccaaatgttcaacatggcccttaccacagcccagccagcacaaccccagatcctcttaccacaatattactgatgtgtgtgagctggctgtgggccctgcaggtgcaccggccactctgttgaatgaagcaggtaaagatgctttaaaatcctctcaaaccattaagtctagagaagagggaaaggcaacccagcagagggaggtagaaagcttccattctgagactgaccaggatacgccctggctgctgccccaggagaaaaccccctttggctccgctaaacccttggattatgtggagattcacaaggtcaacaaagatggtgcattatcattgctaccaaaacagagagagaacagcggcaagcccaagaagcccgggactcctgagaacaataaggagtatgccaaggtgtccggggtcatggataacaacatcctggtgttggtgccagatccacatgctaaaaacgtggcttgctttgaagaatcagccaaagaggccccaccatcacttgaacagaatcaagctgagaaagccctggccaacttcactgcaacatcaagcaagtgcaggctccagctgggtggtttggattacctggatcccgcatgttttacacactcctttcactgatagcttgactaatggaatgattggttaaaatgtgatttttcttcaggtaacactacagagtacgtgaaatgctcaagaatgtagtcagactgacactactaaagctcccagctcctttcatgctccatttttaaccacttgcctctttctccagcagctgattccagaacaaatcattatgtttcctaactgtgatttgtagatttactttttgctgttagttataaaactatgtgttcaatgaaataaaagcacactgcttagtattcttgagggacaatgccaataggtatatcctctggaaaaggctttcatgatttggcatgggacagacggaaatgaaattgtcaaaattgtttaccatagaaagatgacaaaagaaaattttccacataggaaaatgccatgaaaattgcttttgaaaaacaactgcataacctttacactcctcgtccattttattaggattacccaaatataaccatttaaagaaagaatgcattccagaacaaattgtttacataagttcctataccttactgacacattgctgatatgcaagtaagaaataatgcctccaattttttcttaaaatagtttagatatgttaagcatggattttccccctaaattctactctaaagcttctataaaatatagtttggaaataaaaatgttcttacacaaggggcaaatgaatttcatgtgaatccctttaggatgttttcctccttcatttcagcatgatagataatttattatacaccttagtctttccttagttaaaaaaaaattccctaaagactaacttgaaaagaaaaccacagcaggatgctaatggaattactgccttactgtacatacaaattctactttaatataaacccataagtttaactgtatttttgaagactatttttctatgacttaggtaaaataaaagactattttctattttcccagtacagctgtttatgtattcagtgggtacagtattttctgctgcaaggttataatgtgtatttacagtacatagtagtatataaagttcccgtttgtggagtaaaatgccataccaacccaaagcccactgtgaaatatgaagtgaatgacaaaattcagttttcaacgcaatatagtatagtttatctgattcttttgatctccaggacactttaaacaactgctaccaccaccaccaacctagggatttaggattctccacagaccagaaattatttctcctttgagtttcaggctcctctgggactcctgttcatcaatgggtgaatcttcctaaagctaccataaaaagggagggcgacgatttctaacagctgtttaaaagagagaggttttgcttttgtgagaaatcttgggccacaaaaaaattttaagcaaagccaggagttagtgtctctctgaagtaaattcaattgcaaaatcttggcagaggcagaaatggctcatatcagaagtgtccaaataaaagttctgggaaactaggtatttgcttcccagagcaatgggaatagctccaaaggtcagagtaaggtaatgagaatctcccggtcaattccagtgccaggcttcctgaaagaagtcaaagcttggatcctcattttaaagggcgcatccatgactcatctagcagcccctctctatttttcccttcacttgatggtaaatccattctatatgtccatttactagctggacatagagaacttgagctcacctctgggagttaaatattccaccccaactatcccatattgatagcaactggactcagaggtccccctcctgtttgaaagtgaacacattgccaatgttttgagaatggcaaaagcaatagatacgaagctccatttttctaatatataaacaatatcatgtgagtaagggaagcgtgtgggaaagttgtccaagctcattcagtcccctaaatcctcgatactttaactgtctgagaaccaactgcataggcatcacctgggcagtgtttgaaaattccatttgcagaatcttaagcatcagaatctgcattttactaagatccccaaatgattcaattgcacactgaagtttgagaagcattgttctagacaaccatttccactaaaggttattttagttcatagtaacaatcctcttttggaaaggacagatcaagtctgtttgacttgcaatgaacaacactgcatgtaagcaggcaaaaaaagaaacatatcagtagtttaagattcacattatgctgaatcttatatgaattcacataaaagaatgacctgcaaaactacgcacaacttctgaaaggccaaggaatataatctaccttgagagacattaaccaaagacagtcaccctcaaagccaatgcagactaaatctttcctaacatagtctattctctaagaatagagaagatatgtatcagtcactcttatagtctgaaaacctaaacataaaagtaatctgcttttgacatataattttgtataatacgtatgaaaaaatgtgacagctaaggacttgaattaaatccctaaaaaacaattagccactcattaggccaagactttaattctatgatcaattagcactgtttatctgaattaagcttttttgtggtctaacaaaaagtttttttgtggtctatcaaggagacagctgttcaaatggaaggatacatgtggggcaggggggcggtgaagagacctagattctggtcctaactgctttgccttggagagattaattcccccctctaagcctcagtttcctctgaagatgttggaccagataacctctaaggtcctttgaaactgactccttgattccatgactcactgaatatttttctgcaaagataatcccaaccaatgccttctatcctaatctaacaaaaaattgctcttcatcatagaaatacaaagtaatcttcagtgatgtgctctttatactttgctttttaaaccgtccattccagttggtcttaatatattgcacaagtattttataagtgaaatgtgtacagaatcatattctaagattatgtgcaaatatatgtgtagaaagaggcatttaaaaaaagaggcaggagattgagaagagacatattgaatgaggcactaatctttagaaaaatgatcttttactgaatcaagccatgctcattccttgctgaatccaacagccccaaatctcttttcttatatttggctgttaatttttttccttgcaccatcctagattgttaacaaccattgcacagttggctcatgtatccttacactctgagttataataagttgtatttttataaacaaatacctaaatattcaagttttaaggcgcatggaaactgaatctaggcaacgggtgatttgtgtagcttacaacctgaacagcaagatgttccaattcattctaacagatgtgtataagcacaagttatatcagctgtgtcagatatttaacagatcctacatttattagctatataacagactctacattttcctaagtgcctaagaccaatcctggtagtcacttaagtacaaaagactcactttaactggcttggtctgaaggggtcaatcctttactgcctgtacaagatctgggcagttttgctctgtgtcttgtgatgacccagctgaatgtgaaaagcctatgagttattgagcaaccagaggtccctgcattccaagttgcagtttagctctggggaaactctggctttctctttcctcaagtgtccaccactgcccatcatttgcagaaagacttggccctgcctttagcaacttccctatctccttagagtagacaagaaagaaacagatttgtgcacattttacaaagtgccttcctctatttttttttaaagttttcattttgcaaggaaaaatgtattgattagaaagtaacatttgccttatagggattatatatatatatagatatagatatagatatgtatgaatggagagatgagaagaagccagaaagggcacaacaaaatggtctaagggccaaccagcaatgttcagtgaatgtttacgtattgtttaattgaatcaacacagagctgttgtgaatagtgtgacttactttgcctgataagaaattgaggctggctgtgatttggggataaacctgccaccctgtgatttgagactctccataccaaaacttattgatacatttttgaatgtcattggcttacatgcctaaacctgaagagaacaatgcatgcacattggaactttgtacacaaacagaaaaatataaatgactttgaattaccatcccaagcattgctaacgtagatgtgccattgacgaaagtctcatgtgttcttgagtgaacaaatttccttttcttcctttttggctcaagcacaataatgctgtcactgagacagtgactgagcactcaatgtccaagactaaatcacatcaccacgactaagtaggcactatgtcctgggatgagtcttttaaactctggccatcaggttccttacttgttaaataagtaggttggcctaaaaggtttctaagacctctcatgatctaggtaaaatccagggtttcaggtcagtgtccctggtgcagtgcaagaaagccttgctgacacacccttggcctgaagcagtgagcacatgagattgtgtgacaacgcttcagagaaaaacagagatctgttcctccaactcagattgatttaacatccttgcttctccttttccttcctggctttacatatttgtagggtttttactccttctccagagcctactattttcctaagagttagtagcaaccataggatccacaagaaatgaaattattcatcaacaatgactttggcactgcaaaagactgagtcaaaggttaaatcagtcacacagatatccaaggccaagttgaagatcacaagtatatcccatttagagatttgcatacttagagattaagcccatgttcattaattatttagttaattcaaaagccattaataaatccatgcccagcctacgcaacatagtaagacccagtctctacaaaaattttaaaaattagccagccatggtgacacgtacctgtagtcctagacacttgggaaggtgaagccagaggattgcttgagcccaggaggtcgaggctgcagtgaaccgtgattgtgtcactgcactccagcctgggtgagagagcaagaccttgtctcaataaataaacccaagttacttcgatgactagatactggaggtctgaaggagaagctttaaaaatacagattgattgcttcagagaaatcctatttataattatgatctgaacttattctatgattagcaaatatatcatctgaaaataaaacaggagttctctccccagacttttgtttttcaggatggtgagttttggtctgggaccctcatggcacccattttgataaaaggaaaaagatagtaaaacaggaaataggaagtttccagagatttgggcatctcaggattccatgaaatgctgagactaacccactaaatccaaattttattggctatggtaaatctaaatctgttcagtgttctgaacagattttatgagtttatgtctaagagtttatgtctaagagaggtacataattcacaaacactatcatgctggcagctgttttgtccacatcaattcccttgatttaatgctctgatttcaatttagaaagtactgagacatgtaaagtctcaaaataggaaaaacctatcctgtttataaggtgtggtcaataaatagaccacagataatcttagtctattaattaactctcagatcatcttagactattaattaacattctgcttgctgctgattaaaaagaaaaaaaccctaaaaccttcagcaactgaagtagtaatataaaaaataacctttaatagttatggtcaaattacgcttcacttggataaacctcaaaatgtagtctgagtttttttgtgcacacttcacaaatcctgggggaaaaatcttttttccacgttatctgaaaaactatatggcgaagataccgctgaaaaataatttgttttatgaaattcctgaaaagctaattttgaattttttaaagtaactacctcccttttgtgtcctaatgtccttccttcaaagctgcttatagtttagaaatgaaagatgtcatgtctcatgctttgactggttttcggtggcatatttgatgtatttgccaagtggcattactgactttacagtaactgttacattattttgtactatattgctttatgtggttcaaaaatagtatatgccatattgaaatatgtaatcctcatgttgtgaaactcatcatgtaatacaatgaaaatcattacttaataacttacaatttatccatatgtagtttcaatatgattgtgtctatgactgtaaaacaaactgaaaaaatatgtaatgtatttctgttgaaagcgtgaatgtactaattttttcctaatcttgtctagaagaaagattctatgtcattcattgtacagctgctctggggtgttacacatttaaagtacaatccaacagttgtttgaaagtcagcctctcggctttgtttcatgtgactgctgacacttctcaagtgttctttgcataatgaggctggattttgtgcttcatcgttcattttaaacaattgaaaagtctcatgtggaaaccaaagcaatctagaaccagcctgttgggtgactgtgtcttctgtaaagccatattgaagtgaagttatacataatagcataaggttccacattttcaaagctaccactacctctgcttttcctctttccctagaaaatgccaagcaaaattccccaacactaagtgagaaattagaagtaattgttttataattaagttgctgggttttttttttaacaccttctaattcatcactttgtagggttatgcaagagtttctgaataaccattcttacatgtttatattttataaaaaccggctgcaagaaagattcagaaagaatacttagtaagtcatcatatgaaaaaccaacaaaaccatagagtgcagattttttcctaactataagtcacctcatagttgtccaaagccatgataatgatatctcttacaaattgacttctgtaacccccctagaaataacccttttccttatttgattttagtcatcaaacatagtatgatatgggaaaagtcagccatttaccagaaattatcttattttgattttaaaaactcatttctatatgtagttattgtaatgtctatttttttagacttaaagatttatagaagactatagttatctgatttgttattttgcatttttcattctgtaaatctttgcttatggcacattgtgctctctgttttccatggttttattcatttatctcctcctattttgaggggacaacatgggtagttaaatctttgtcaatagtattggagataacactaactgctattatcataacatcttcatttttactgcatgccaaaaccaatgcctgccaaacaaaatcttagacatcccaatataatatgttagttatatttctattcacatcattattgaaaatacccagctcagtgcctggcttaataaatgtttaattcccttacctactcttgctctatttttttatttgaaatggagatgagcaaaataacacattcatggctgaagcaattttttggacatttcttgttaccaaaagatctataatcaggacattgtttatgtaagttggacaaaaaaaattcttcccctttatgtccacccttcctatgattgcaagacaaaatttccctcctttacctcatccctataacatgggaggctgagaaaaatgaggggagatggaaccagatacaaggagatccaataagagaagcttatttaaatattgtgaaataaaggaagaaccaaagcatttttttaagtggggaatccttttgaacagttattatttatccatattattaacaacatcttttctgacaaaatccatcagatgaagtgtaaatggataatcttttaatggatctaaacctagaaagtttcacttactgttcatgtccgtgttccagaattgtgaaatggtgtgtggttttgctttccaagttcttctctgcctcctcttaattctctaattccatgtcttacagaagaatgagaaatttctttcttacttgagtatcatgctctaaaaaacttggcttcagtcacagaaacgctggctctcctgtgcttatattgaagccaactgcctttaattcttgggccctcttatatttttaaggtgcaaaatttgaagtctcagtcaccagacacaggttctatacaattaatgatgagctggagaagtaatatgtagctaatttttcaaaagcattgaatatactttccggaaagaaaacagaaattaaatattgccacatcttgccagaatcccatctgacaccttaactttgtcaggtttcctacaacttgctaatcaagttttatacattctaaatctccccagtttctttggggctggaagatgcaacttccatttaatagaaactttgaaatcttggggtaagggagcagtggggggactagggagaaggataagaaatagaattattgaaaagcccccaccagggaccttcctggccagaatatgcagagtaattcctgctggcttcacctttgaaagtccctcgaaactatgcagatgaaactgagtctgtttttgatattgtcagatgtattctaccttggaagtcccaacacctaaactggaattcttgtatttacatctcctccactgtcccccacaccacccctcaattcctgctgcccctgctaatgttaagcatttttctcttgttatcatcaggttcacattaaaaacagatacttacaaactgacttgaagcacagatacttttacgaatgtgataaaatattttcttaagaaaaggaaagaggatgtgggtcaaataaaacaccgcatggatgttgattggtgaatactggtgtaagaaaagggagctcaggaatttttattactgtatttgtaaatgagtttgaaggaatttgtaaatgccactggtacatttttaaggtgacacatttgctccttataaagttattaaaaattacagggtaagcttaaatgacgtttgccagtagttttactttatataatcaatattgatattgttgctgaactatgtaactttatgatgcatttttcagtcccttttcagagcaaatgcttttgcaatggtagtaatgtttagtttaaattgacttaataaattattacctgagcaa

SEQ ID NO: 23715 - DNA, 1206 bp, Homo sapiens
  source 1..1206: mol_type = unassigned DNA
aagagaaggcagccaacatgaaggaaaatgtggcatctgcaaccgttttcactctgctactttttctcaacacctgccttctgaatgagagacactcatgcatgaatgtccagactacataaccggtggccccaactcctgccactttggcaagcagtacacctccatgtggaggacatacatcatgatggtcaatgccactaaccagatgggaagcagtttctcggatgaactttatgtggacgtgacttacatagttcagccagaccctcctttggagctggctgtggaagtaaaacagccagaagacagaaaaccctacctgtggattaaatggtctccacctaccctgattgacttaaaaactggttggttcacgctcctgtatgaaattcgattaaaacccgagaaagcagctgagtgggagatccattttgctgggcagcaaacagagtttaagattctcagcctacatccaggacagaaataccttgtccaggttcgctgcaaaccagaccatggatactggagtgcatggagtccagcgaccttcattcagatacctagtggtgaccccttgatgttgggtgcctctcattacaaaaatctcaaatcttacagaccaagaaaaatctcaagtcaaggaagacttgcggtgttcacaaaggcaacattgaccacagtccagtagagctgaagagcatataccagaattcaggaactcaacattttctcccctctgtccaaccacaggacagactgtgcaccccagggagatgctgtgtgtccactggcctcactgacttggattactcctgcagcacgtgaccagccagctcatatgatcactccctactgcccccaaagcagaattgactgggagctggaaacccacacaaaaagggacaattatattgaatgtaacatactccctctgcttacctagtgccttcacctcctatgggcatttggagtaaaaggttgttatgcaggtgtttgtgaaggatgtggccaagtcagttgtctcccttacagggtgacccaagattaatgatatctacccatccccagtccctcgaccccctagttgcaatcagctttgtcactgtcccccttaggcactgccatgtaaagcacgtggtcccccattctgaagcagtgggaaacctagaagagatgtactcttcgcaacctggttggatctta

SEQ ID NO: 23716 - DNA, 568 bp, Homo sapiens
  source 1..568: mol_type = unassigned DNA
agcaaaggtgaggcagctgtgtctccctctggctgccttttctcccctcctctctcaccagaagccaacgcgtacacgctgagtggagaggccgcgaggacaagacagtgggacatgcgtgtgctggggaagtcgagaagcaggacaggaggcagctaaagaactctcctattcatggaggcgaacactgaggatgctttccacatgaaccctgaagtgaacttctgatacatttcctgcagcaagagaaggcagccaacatgaaggaaaatgtggcatctgcaaccgttttcactctgctactttttctcaacacctgccttctgaatggacagttacctcctggaaaacctgagatctttaaatgtcgttctcccaataaggaaacattcacctgctggtggaggcctgggacagatggaggacttcctaccaattattcactgacttaccacagggaaggagagacactcatgcatgaatgtccagactacataaccggtggccccaactcctgccactttggcaagcagtacacctccatgtggaggacatacatcatgatggt

SEQ ID NO: 23717 - DNA, 583 bp, Homo sapiens
  source 1..583: mol_type = unassigned DNA
attttaccgaccgttcgcgaaacagctttccacacaatggagcttcatgtcctcgtgcaggaagtactcatcgactgatgtggcagactttgctccctggcaaaagtcttacggataccaagtcccatgcctgccagcttgcacctgttaagtcatgtgatacttaggaaatgtacacatcaccccagtgcagaggcctttatccacttcccttcattttgcctggattgttgctgtgagtgagaaataaatgacatgaaatgatcatgtatatcactgtcttcagaggatgctaaagaactctcctattcatggaggcgaacactgaggatgctttccacatgaaccctgaagtgaacttctgatacatttcctgcagcaagagaaggcagccaacatgaaggaaaatgtggcatctgcaaccgttttcactctgctactttttctcaacacctgccttctgaatggacagttacctcctggaaaacctgagatctttaaatgtcgttctcccaataaggaaacattcacctgctggtggaggcctgggacagatggaggacttcctaccaattattcactg

SEQ ID NO: 23718 - DNA, 579 bp, Homo sapiens
  source 1..579: mol_type = unassigned DNA
agtccttggagtgaactgggagacaaggaggctgctttggcatggagctgagaacatctctagatcgcactggaaggcagagagaggccagacagggaactctgaagagctgccacagcctgtgccagggtgacatcaggctaaagaactctcctattcatggaggcgaacactgaggatgctttccacatgaaccctgaagtgaacttctgatacatttcctgcagcaagagaaggcagccaacatgaaggaaaatgtggcatctgcaaccgttttcactctgctactttttctcaacacctgccttctgaatggacagttacctcctggaaaacctgagatctttaaatgtcgttctcccaataaggaaacattcacctgctggtggaggcctgggacagatggaggacttcctaccaattattcactgacttaccacagggaaggagagacactcatgcatgaatgtccagactacataaccggtggccccaactcctgccactttggcaagcagtacacctccatgtggaggacatacatcatgatggtcaatgccactaaccagatgggaagca

SEQ ID NO: 23719 - DNA, 1566 bp, Homo sapiens
  source 1..1566: mol_type = unassigned DNA
atgaaggaaaatgtggcatctgcaaccgttttcactctgctactttttctcaacacctgccttctgaatgttcagccagaccctcctttggagctggctgtggaagtaaaacagccagaagacagaaaaccctacctgtggattaaatggtctccacctaccctgattgacttaaaaactggttggttcacgctcctgtatgaaattcgattaaaacccgagaaagcagctgagtgggagatccattttgctgggcagcaaacagagtttaagattctcagcctacatccaggacagaaataccttgtccaggttcgctgcaaaccagaccatggatactggagtgcatggagtccagcgaccttcattcagatacctagtgacttcaccatgaatgatacaaccgtgtggatctctgtggctgtcctttctgctgtcatctgtttgattattgtctgggcagtggctttgaagggctatagcatggtgacctgcatctttccgccagttcctgggccaaaaataaaaggatttgatgctcatctgttggagaagggcaagtctgaagaactactgagtgccttgggatgccaagactttcctcccacttctgactatgaggacttgctggtggagtatttagaagtagatgatagtgaggaccagcatctaatgtcagtccattcaaaagaacacccaagtcaaggtatgaaacccacatacctggatcctgacactgactcaggccgggggagctgtgacagcccttcccttttgtctgaaaagtgtgaggaaccccaggccaatccctccacattctatgatcctgaggtcattgagaagccagagaatcctgaaacaacccacacctgggacccccagtgcataagcatggaaggcaaaatcccctattttcatgctggtggatccaaatgttcaacatggcccttaccacagcccagccagcacaaccccagatcctcttaccacaatattactgatgtgtgtgagctggctgtgggccctgcaggtgcaccggccactctgttgaatgaagcaggtaaagatgctttaaaatcctctcaaaccattaagtctagagaagagggaaaggcaacccagcagagggaggtagaaagcttccattctgagactgaccaggatacgccctggctgctgccccaggagaaaaccccctttggctccgctaaacccttggattatgtggagattcacaaggtcaacaaagatggtgcattatcattgctaccaaaacagagagagaacagcggcaagcccaagaagcccgggactcctgagaacaataaggagtatgccaaggtgtccggggtcatggataacaacatcctggtgttggtgccagatccacatgctaaaaacgtggcttgctttgaagaatcagccaaagaggccccaccatcacttgaacagaatcaagctgagaaagccctggccaacttcactgcaacatcaagcaagtgcaggctccagctgggtggtttggattacctggatcccgcatgttttacacactcctttcactga

SEQ ID NO: 23720 - DNA, 1525 bp, Homo sapiens
  source 1..1525: mol_type = unassigned DNA
aagagaaggcagccaacatgaaggaaaatgtggcatctgcaaccgttttcactctgctactttttctcaacacctgccttctgaatggacagttacctcctggaaaacctgagatctttaaatgtcgttctcccaataaggaaacattcacctgctggtggaggcctgggacagatggaggacttcctaccaattattcactgacttaccacagggaaggagagacactcatgcatgaatgtccagactacataaccggtggccccaactcctgccactttggcaagcagtacacctccatgtggaggacatacatcatgatggtcaatgccactaaccagatgggaagcagtttctcggatgaactttatgtggacgtgacttacatagttcagccagaccctcctttggagctggctgtggaagtaaaacagccagaagacagaaaaccctacctgtggattaaatggtctccacctaccctgattgacttaaaaactggttggttcacgctcctgtatgaaattcgattaaaacccgagaaagcagctgagtgggagatccattttgctgggcagcaaacagagtttaagattctcagcctacatccaggacagaaataccttgtccaggttcgctgcaaaccagaccatggatactggagtgcatggagtccagcgaccttcattcagatacctagtgacttcaccatgaatgatacaaccgtgtggatctctgtggctgtcctttctgctgtcatctgtttgattattgtctgggcagtggctttgaagggctatagcatggtgacctgcatctttccgccagttcctgggccaaaaataaaaggatttgatgctcatctgttggaggtgaccccttgatgttgggtgcctctcattacaaaaatctcaaatcttacagaccaagaaaaatctcaagtcaaggaagacttgcggtgttcacaaaggcaacattgaccacagtccagtagagctgaagagcatataccagaattcaggaactcaacattttctcccctctgtccaaccacaggacagactgtgcaccccagggagatgctgtgtgtccactggcctcactgacttggattactcctgcagcacgtgaccagccagctcatatgatcactccctactgcccccaaagcagaattgactgggagctggaaacccacacaaaaagggacaattatattgaatgtaacatactccctctgcttacctagtgccttcacctcctatgggcatttggagtaaaaggttgttatgcaggtgtttgtgaaggatgtggccaagtcagttgtctcccttacagggtgacccaagattaatgatatctacccatccccagtccctcgaccccctagttgcaatcagctttgtcactgtcccccttaggcactgccatgtaaagcacgtggtcccccattctgaagcagtgggaaacctagaagagatgtactcttcgcaacctggttggatcttaaaaacatggttctaac

SEQ ID NO: 23721 - DNA, 588 bp, Homo sapiens
  source 1..588: mol_type = unassigned DNA
cttattcctcctgctttgctgaaaccacagctgccttgaatcgagccattttgattctgccgcaaatgagctgtaaaccaaatcaagccacatcaaacaaatccaaccaccatcaaaagcaactaaagaactctcctattcatggaggcgaacactgaggatgctttccacatgaaccctgaagtgaacttctgatacatttcctgcagcaagagaaggcagccaacatgaaggaaaatgtggcatctgcaaccgttttcactctgctactttttctcaacacctgccttctgaatggacagttacctcctggaaaacctgagatctttaaatgtcgttctcccaataaggaaacattcacctgctggtggaggcctgggacagatggaggacttcctaccaattattcactgacttaccacagggaaggagagacactcatgcatgaatgtccagactacataaccggtggccccaactcctgccactttggcaagcagtacacctccatgtggaggacatacatcatgatggtcaatgccactaaccagatgggaagcagtttctcggatgaactttatgtggacg

SEQ ID NO: 23722 - DNA, 581 bp, Homo sapiens
  source 1..581: mol_type = unassigned DNA
acagagccaccgggctggggaccggggagcggaggctgaaatccccagacgccggttttctgggctgggctttctgccttactcactccttctccctctttctggattttaccgaccgttcgcgaaacagctttccacacaatggagcttcatgtcctcgtgcaggaagtactcatcgactgatgtggcagactttgctccctggcaaaagttgtaaaaggatgactgcgtagagccacagcattctccttgtcagtgtaggaaatgcagaggaggatttacctccggcacttgcctctaagacacctaataaagatgaggaaggctccagcctgaagcgtgggtgaggtgtccagctgcccaaaggcgacagctaaagaactctcctattcatggaggcgaacactgaggatgctttccacatgaaccctgaagtgaacttctgatacatttcctgcagcaagagaaggcagccaacatgaaggaaaatgtggcatctgcaaccgttttcactctgctactttttctcaacacctgccttctgaatggacagttacctcctggaaaacctgagatcttta

SEQ ID NO: 23723 - DNA, 1086 bp, Homo sapiens
  source 1..1086: mol_type = unassigned DNA
aagagaaggcagccaacatgaaggaaaatgtggcatctgcaaccgttttcactctgctactttttctcaacacctgccttctgaatggacagttacctcctggaaaacctgagatctttaaatgtcgttctcccaataaggaaacattcacctgctggtggaggcctgggacagatggaggacttcctaccaattattcactgacttaccacagggaaggagagacactcatgcatgaatgtccagactacataaccggtggccccaactcctgccactttggcaagcagtacacctccatgtggaggacatacatcatgatggtcaatgccactaaccagatgggaagcagtttctcggatgaactttatgtggacgtgacttacatagttcagccagaccctcctttggagctggctgtggaagtaaaacagccagaagacagaaaaccctacctgtggattaaatggtctccacctaccctgattgacttaaaaactggttggttcacgctcctgtatgaaattcgattaaaacccgagaaagcagctgagtgggagatccattttgctgggcagcaaacagagtttaagattctcagcctacatccaggacagaaataccttgtccaggttcgctgcaaaccagaccatggatactggagtgcatggagtccagcgaccttcattcagatacctagtgacttcaccatgaatgatacaaccgtgtggatctctgtggctgtcctttctgctgtcatctgtttgattattgtctgggcagtggctttgaagggctatagcatggtgacctgcatctttccgccagttcctgggccaaaaataaaaggatttgatgctcatctgttggaggacagactgtgcaccccagggagatgctgtgtgtccactggcctcactgacttggattactcctgcagcacgtgaccagccagctcatatgatcactccctactgcccccaaagcagaattgactgggagctggaaacccacacaaaaagggacaattatattgaatgtaacatactccctctgcttacctagtgccttcacctcctatgggca

SEQ ID NO: 23724 - DNA, 2166 bp, Homo sapiens
  source 1..2166: mol_type = unassigned DNA
gcctgcgcggagggagccgcgagacaggtgcgcatgcgcagtgcgcgtctgcgagaccgacttggacggagccgagctgaggctcggcttcctgctgatggtcagggttttggcaactccccggtgtgagaggggtagggagtgctcccggcggcgacggggccgagttcaccagccgccggggcagtagtcgaaggcccggcgcggcatgtcctgggtgccgcggtgcgggcagtgaacgcgcgccgggcgggatgggccggcgccgggcgccagagctgtaccgggctccgttcccgttgtacgcgcttcaggtcgaccccagcactgggctgctcatcgctgcgggcggaggaggcgccgccaagacaggcataaagaatggcgtgcactttctgcagctagagctgattaatgggcgcttgagtgcctccttgctgcactcccatgacacagagacacgggccaccatgaacttggcactggctggtgacatccttgctgcagggcaggatgcccactgtcagctcctgcgcttccaggcacatcaacagcagggcaacaaggcagagaaggccggttccaaggagcaggggcctcgacaaaggaagggagcagccccagcagagaagaaatgtggagcggaaacccagcacgaggggctagaactcagggtagagaatttgcaggcggtgcagacagactttagctccgatccactgcagaaagttgtgtgcttcaaccacgataataccctgcttgccactggaggaacagatggctacgtccgtgtctggaaggtgcccagcctggagaaggttctggagttcaaagcccacgaaggggagattgaagacctggctttagggcctgatggcaagttggtaaccgtgggccgggaccttaaggcctctgtgtggcagaaggatcagctggtgacacagctgcactggcaagaaaatggacccaccttttccagcacaccttaccgctaccaggcctgcaggtttgggcaggttccagaccagcctgctggcctgcgactcttcacagtgcaaattccccacaagcgcctgcgccagccccctccctgctacctcacagcctgggatggctccaacttcttgccccttcggaccaagtcctgtggccatgaagtcgtctcctgcctcgatgtcagtgaatccggcaccttcctaggcctgggcacagtcactggctctgttgccatctacatagctttctctctccagtgcctctactacgtgagggaggcccatggcattgtggtgacggatgtggcctttctacctgagaagggtcgtggtccagagctccttgggtcccatgaaactgccctgttctctgtggctgtggacagtcgttgccagctgcatctgttgccctcacggcggagtgttcctgtgtggctcctgctcctgctgtgtgtcgggcttattattgtgaccatcctgctgctccagagtgcctttccaggtttcctttagcttccctgcttcctgggaatcaggagcctggacactgccatctctagagcagagtggaggcctggactccctttgctcactccattcgggtccacagctgaggttgccgctgacaagatgaatgggcactgcctgcccttctagtgaaaaggcttggctatggccctgtgtgactccaggtcccaggaaccttgccttcgtcatctgtggatccatccagaacagcggtatctgaagcccaggccatactccctgcctcctttcttctgcctaccagaggctccagagttgagcttgtccttatctagaaacatgtgaagatgcccaagagcctggaggcactgctgtccttcctgcagaaacagtttctcctcctcccctcagccttgtggccagttcctcttcacatgaagcccctggcatttgctggggaagggactggcctggtacttgctgttagggcaggaaggggcaaaaggaagacttgggtagtaatctgggggttcagatgggtagcactaagccagctggcctaaagatgcaataagttcctaggtagtctacccttaccttgaggaatgggaaaatgaacctcagcccattaggcaggaaaagttgatatttaataaacaaggaaagagtgaactgagaccccaaa

SEQ ID NO: 23725 - DNA, 1692 bp, Homo sapiens
  source 1..1692: mol_type = unassigned DNA
ttggacggagccgagctgaggctcggcttcctgctgatggtcagggttttggcaactccccggtgtgagaggggtagggagtgctcccggcggcatgtcctgggtgccgcggtgcgggcagtgaacgcgcgccgggcgggatgggccggcgccgggcgccagagctgtaccgggctccgttcccgttgtacgcgcttcaggtcgaccccagcactgggctgctcatcgctgcgggcggaggaggcgccgccaagacaggcataaagaatggcgtgcactttctgcagctagagctgattaatgggcgcttgagtgcctccttgctgcactcccatgacacagagacacgggccaccatgaacttggcactggctggtgacatccttgctgcagggcaggatgcccactgtcagctcctgcgcttccaggcacatcaacagcagggcaacaaggcagagaaggccggttccaaggagcaggggcctcgacaaaggaagggagcagccccagcagagaagaaatgtggagcggaaacccagcacgaggggctagaactcagggtagagaatttgcaggcggtgcagacagactttagctccgatccactgcagaaagttgtgtgcttcaaccacgataataccctgcttgccactggaggaacagatggctacgtccgtgtctggaaggtgcccagcctggagaaggttctggagttcaaagcccacgaaggggagattgaagacctggctttagggcctgatggcaagttggtaaccgtgggccgggaccttaaggcctctgtgtggcagaaggatcagctggtgacacagctgcactggcaagaaaatggacccaccttttccagcacaccttaccgctaccaggcctgcaggtttgggcaggttccagaccagcctgctggcctgcgactcttcacagtgcaaattccccacaagcgcctgcgccagccccctccctgctacctcacagcctgggatggctccaacttcttgccccttcggaccaagtcctgtggccatgaagtcgtctcctgcctcgatgtcagtgaatccggcaccttcctaggcctgggcacagtcactggctctgttgccatctacatagctttctctctccagtgcctctactacgtgagggaggcccatggcattgtggtgacggatgtggcctttctacctgagaagggtcgtggtccagagctccttgggtcccatgaaactgccctgttctctgtggctgtggacagtcgttgccagctgcatctgttgccctcacggcggagtgttcctgtgtggctcctgctcctgctgtgtgtcgggcttattattgtgaccatcctgctgctccagagtgcctttccaggtttcctttagcttccctgcttcctgggaatcaggagcctggacactgccatctctagagcagagtggaggcctggactccctttgctcactccattcgggtccacagctgaggttgccgctgacaagatgaatgggcactgcctgcccttctagtgaaaaggcttggctatggccctgtgtgactccaggtcccaggaaccttgccttcgtcatctgtggatccatccagaacagcggtatctgaagcccaggccatactccctgcctcctttcttctgcctaccagaggctccagagttgagcttgt

SEQ ID NO: 23726 - DNA, 585 bp, Homo sapiens
  source 1..585: mol_type = unassigned DNA
accacttctctgggacacattgccttctgttttctccagcatgcgcttgctccagctcctgttcagggccagccctgccaccctgctcctggttctctgcctgcagttgggggccaacaaagctcaggacaacactcggaagatcataataaagaattttgacattcccaagtcagtacgtccaaatgacgaagtcactgcagtgcttgcagttcaaacagaattgaaagaatgcatggtggttaaaacttacctcattagcagcatccctctacaaggtgcatttaactataagtatactgcctgcctatgtgacgacaatccaaaaaccttctactgggacttttacaccaacagaactgtgcaaattgcagccgtcgttgatgttattcgggaattaggcatctgccctgatgatgctgctgtaatccccatcaaaaacaaccggttttatactattgaaatcctaaaggtagaataatggaagccctgtctgtttgccacacccaggtgatttcctctaaagaaacttggctggaatttctgctgtggtctataaaataaacttcttaacatgcttctcca

SEQ ID NO: 23727 - DNA, 2577 bp, Homo sapiens
  source 1..2577: mol_type = unassigned DNA
gtttttccgggagagaccacgcttcccctcaagctccccaacggctccgccttcccgccggagcctgacccttcccagagtgcccggcgattccggcgtgcgaggcccttggagggcaaggccccagggcctggcttaggagcgcgagaggcaggctgggaattgtagttcgaaggccctcgagagcggctagagtctggcggccgagaggactagttgtcccagcgtgccctgcgcctcagcccgcgcgctcgcagcttctcgctctcgcctgcctgcccgctcccttgcttgctcgcgctttcgctcgccctctcctcgaggatcgaggggactctgaccacagcctgtggctgggaagggagacagaggcggcggcggctcaggggaaacgaggctgcagtggtggtagtaggaagatgtcgggcgaggacgagcaacaggagcaaactatcgctgaggacctggtcgtgaccaagtataagatggggggcgacatcgccaacagggtacttcggtccttggtggaagcatctagctcaggtgtgtcggtactgagcctgtgtgagaaaggtgatgccatgattatggaagaaacagggaaaatcttcaagaaagaaaaggaaatgaagaaaggtattgcttttcccaccagcatttcggtaaataactgtgtatgtcacttctcccctttgaagagcgaccaggattatattctcaaggaaggtgacttggtaaaaattgaccttggggtccatgtggatggcttcatcgctaatgtagctcacacttttgtggttgatgtagctcaggggacccaagtaacagggaggaaagcagatgttattaaggcagctcacctttgtgctgaagctgccctacgcctggtcaaacctggaaatcagaacacacaagtgacagaagcctggaacaaagttgcccactcatttaactgcacgccaatagaaggtatgctgtcacaccagttgaagcagcatgtcatcgatggagaaaaaaccattatccagaatcccacagaccagcagaagaaggaccatgaaaaagctgaatttgaggtacatgaagtatatgctgtggatgttctcgtcagctcaggagagggcaaggccaaggatgcaggacagagaaccactatttacaaacgagacccctctaaacagtatggactgaaaatgaaaacttcacgtgccttcttcagtgaggtggaaaggcgttttgatgccatgccgtttactttaagagcatttgaagatgagaagaaggctcggatgggtgtggtggagtgcgccaaacatgaactgctgcaaccatttaatgttctctatgagaaggagggtgaatttgttgcccagtttaaatttacagttctgctcatgcccaatggccccatgcggataaccagtggtcccttcgagcctgacctctacaagtctgagatggaggtccaggatgcagagctaaaggccctcctccagagttctgcaagtcgaaaaacccagaaaaagaaaaaaaagaaggcctccaagactgcagagaatgccaccagtggggaaacattagaagaaaatgaagctggggactgaggtgggtcccatctccccagcttgctgctcctgcctcatccccttcccaccaaaccccagactctgtgaagtgcagttcttctccacctaggaccgccagcagagcggggggatctccctgcccccaccccagttccccaacccactcccttccaacaacaaccagctccaactgactctggtcttgggaggtgaggcttcccaaccacggaagactactttaaatgaaaaaaagaaattgaataataaaatcaggagtcaaaattcatcgtcttcaagcccctctttctagccttttctactactctctgcttggtcaaggtttgtgccccactacagaacagggctaaattagccaccaccactgaaaactcagccgaatttttttataccactctgatgtcagcattttttccatctgtttggggctttttcctcttttttccattctccccaaatattttatctggcttcaaaattaagaggattatttttcagattgtttttattcagtgtggccgattcctcatctgattcaggctgtccagtcaggcccctcccattttaggagctggagccttcatttatgaagagattctcatctatgaaatggatcctcatttgtaaatcttttttcttccattttcacaaagctgtaaagaaataatccatctcaaccttaccctttttctctggagtcagtggggtctttcctcgctccatcttacacagacctgagctggaagctcaactggttttgttccctgtttgaaatattgtgatctccctcccatgaaagaaaaaccaagaaccagaggcgtagactgactgaagacacaactcctggctttctgaagctatggacttggattggattgctgggggtttgtagagaaaggtgacaaatttcagtacctctggcatgctgtcccaggaaactagggctcccactaacttatgaggtttttaaaca

SEQ ID NO: 23728 - DNA, 1215 bp, Homo sapiens
  source 1..1215: mol_type = unassigned DNA
gcgtgccctgcgcctcagcccgcgcgctcgcagcttctcgctctcgcctgcctgcccgctcccttgcttgctcgcgctttcgctcgccctctcctcgaggatcgaggggactctgaccacagccctgaggacctggtcgtgaccaagtataagatggggggcgacatcgccaacagggtacttcggtccttggtggaagcatctagctcaggtgtgtcggtactgagcctgtgtgagaaaggtgatgccatgattatggaagaaacagggaaaatcttcaagaaagaaaaggaaatgaagaaaggtattgcttttcccaccagcatttcggtaaataactgtgtatgtcacttctcccctttgaagagcgaccaggattatattctcaaggaaggtgacttggtaaaaattgaccttggggtccatgtggatggcttcatcgctaatgtagctcacacttttgtggttgatgtagctcaggggacccaagtaacagggaggaaagcagatgttattaaggcagctcacctttgtgctgaagctgccctacgcctggtcaaacctggaaatcagaacacacaagtgacagaagcctggaacaaagttgcccactcatttaactgcacgccaatagaaggtatgctgtcacaccagttgaagcagcatgtcatcgatggagaaaaaaccattatccagaatcccacagaccagcagaagaaggaccatgaaaaagctgaatttgaggtacatgaagtatatgctgtggatgttctcgtcagctcaggagagggcaaggccaaggatgcaggacagagaaccactatttacaaacgagacccctctaaacagtatggactgaaaatgaaaacttcacgtgccttcttcagtgaggtggaaaggcgttttgatgccatgccgtttactttaagagcatttgaagatgagaagaaggctcggatgggtgtggtggagtgcgccaaacatgaactgctgcaaccatttaatgttctctatgagaaggagggtgaatttgttgcccagtttaaatttacagttctgctcatgcccaatggccccatgcggataaccagtggtcccttcgagcctgacctctacaagtctgagatggaggtccaggatgcagagctaaaggccctcctccagagttctgcaagtcgaaaaacccagaaaaagaaaaaaaagaagaagaaaaaa

SEQ ID NO: 23729 - DNA, 2961 bp, Homo sapiens
  source 1..2961: mol_type = unassigned DNA
aatatttatatttcctctgtcttttaaaactgaacaccgaggtgggttttgtggtgggtggtgaacggacaggtttgggcctcgatcccccacccgaccctagcacccacaggtgggggtgccccctctgctgatgcgcctcctccctcagcaccatggacctgctggactggagcagcctcatcgacagcaggaccaagctgtccaagcacttggtagtccccaacgcacaggtaacacctccgctcctcagtgaggcccagctcagcagggcgctgcgctaagaagggaattcagcctgccacgtgtgtctcttgttgcctaccctgggaacttaacatgaccaaaatcactgcacactatggccccacagaccccctgtggtccagggggaagaagacaagcccactagtgtccacagagtgcttggcgggacagagacccacgcggagccttaagacaccacaaggagagggggtctgggggccttccccaagtcatctgtcttgtgcatcaggtcaccccaaacttcagaggcctgaaacggcagcagccactctgcttctgcctcatggttctggggttgacagggctcagctgggcagtcctcccctggggtctcctgggtagctgtactcacagagtggtggcgctgggacctgggggaggcacccattcacatgtctgggagttggtgctggctgtggcttgggctttttcccaacatggcagctgggctctaagggccagtgtcacctgagacgtgagagccaggcagaagctgggtgaccttttcctgcctcgcctcagaagtcacacggtgtcttttctggcaagttctgtttgttagaagcatgtcaccaggccagcctgtatacagcggggagaggaatgagactcatctgcctgtgggaggggggcccaggacctggcagactgcttgaaaccacagcttaaactgggattcaaagaaagaacagaagcaccttcagaaaacatcctgcagaggcagctttccatgacacatctagccccagtccactaagggcccagcctcaaacttagagcccccgacccagagcctcggggcgcagtgcgtacagtgtggctgtgcaccaaggccaccagctgttggagactttagcatggtgtagcaagggatagagtggtactgtttgtgcccagtgaggcaaggctgctggggccagcaaaggggtgagcgggaggccctgcgggatgggtccccacggcctctgagcaccagcaacttgaaggcctcatcctggtggttgccctggtccctggctacgtgtcagcacgtgctgcacaactgccctgtctgcctgtagccaggggtcttcctcctgggccctctgcctgctccgggtggagcccttctgtttgacgattgggtgatcagtgttcacttgttcaatgtcacatgggagttgcagggggctctcccacaacggtggggcctctgtgggaactggggagtacacacttcggagtgcaggcctggactgagcctggggcccactgacatgggcactgagctccctcgtggtacccctaggccccgcatagggcagtgcactggctgcgttggaggttcaggggcactgtgctgcttgtccaggtggccctccctcccagccctgcacagacgggtgagagggttcctgtgggctgggaatactgagagaggtttagcctgggcctcagggtggcactttcccgcccttgctgtggcctgaccgcgtgttgcacccccagacaggacagctggagcccctgctgtcccggttcactgaggaggaggagctacagatgaccaggatgctacagcggatggatgtcctggccaagaaagccacagagatgggcgtgcggctgatggtggatgccgagcagacctacttccagccggccatcagccgcctgacgctggagatgcagcggaagttcaatgtggagaagccgctcatcttcaacacataccagtgctacctcaaggatgcctatgacaatgtgaccctggacgtggagctggctcgccgtgagggctggtgttttggggccaagctggtgcggggcgcatacctggcccaggagcgagcccgtgcggcagagatcggctatgaggaccccatcaaccccacgtacgaggccaccaacgccatgtaccacaggtgcctggactacgtgttggaggagctgaagcacaacgccaaggccaaggtgatggtggcctcccacaatgaggacacagtgcgctttgcactgcgcaggatggaggagctgggcctgcatcctgctgaccaccgggtgtactttggacagctgctaggcatgtgtgaccagatcagcttcccgctgggccaggccggctaccccgtgtacaagtacgtgccctatggccccgtgatggaggtgctgccctacttgtcccgccgtgccctggagaacagcagcctcatgaagggcacccatcgggagcggcagctgctgtggctggagctcttgaggcggctccgaactggcaacctcttccatcgccctgcctagcacccgccagcacacccttagcctccagcaccccccgcccccgcccaggccatcaccacagctgcagccaaccccatcctcacacagattcaccttttttcaccccacacttgcagagctgctggaggtgaggtcaggtgcctcccagccctgcccagagtatgggcactcaggtgtgggccgaacctgatacctgcctgggacagccactggaaacttttgggaactctcctcgaatgtgtgggcccaaggcccccacctctgtgacccccatgtccttggacctagaggattgtccaccttctgccaaggccagcccacacagcccgagccccttggggagcagtggccgggctggggaggcctgcctggtcaataaaccactgttcctgc

SEQ ID NO: 23730 - DNA, 2462 bp, Homo sapiens
  source 1..2462: mol_type = unassigned DNA
ggtctcactctgttgctgtcttcacggagagcaggagcagaggctttgagaagccagtgggccttggcctcagccctgccggcagagggtccccaccatgcagctgaagtgccagggtgcttgtgaagtctaagcccttgtctggcatttgtcaggaatatagggtgaggcctctgggaccgagcggggcggggcggggcggggcggggcggggcgggaccaacagcgcacacttaagcggcccgggcgggtaccgccgtcccgccatggctctgaggcgcgccctgcccgcgctgcgcccctgcattccccgcttcgtcccgctgtccacggcgccggcctcccgcgagcagcccgcagcgggcccagcggccgtgccaggaggtgggtcggccacggcagtgcggccgccggtgcccgccgtggacttcggcaacgcgcaggaggcgtaccgcagccggcgaacctgggagctggcgcggagcctgctggtgctgcgcttgtgcgcctggcccgcgctgctggcgcgccacgagcagctgctgtatgtttccaggaaacttctaggacagaggctattcaacaagctcatgaagatgaccttctatgggcattttgtagccggggaggaccaggagtccatccagcccctgcttcggcactacagggccttcggtgtcagcgccatcctggactatggagtggaggaggacctgagccccgaggaggcagagcacaaggagatggagtcctgcacctcagctgcggagagggatggcagtggcacgaataagcgggacaagcaataccaggcccactgggccttcggggaccgcaggaatggtgtcatcagtgcccgcacctacttctacgccaatgaggccaagtgcgacagccacatggagacattcttgcgctgcatcgaagcctcaggtagagtcagcgatgacggcttcatagccattaagctcacagcactggggagaccccagtttctgctgcagttctcagaggtgctggccaagtggaggtgcttctttcaccaaatggctgtggagcaagggcaggcgggcctggctgccatggacaccaagctggaggtggcggtgctgcaggaaagtgtcgcaaagttgggcatcgcatccagggctgagattgaggactggttcacggcagagaccctgggagtgtctggcaccatggacctgctggactggagcagcctcatcgacagcaggaccaagctgtccaagcacttggtagtccccaacgcacagacaggacagctggagcccctgctgtcccggttcactgaggaggaggagctacagatgaccaggatgctacagcggatggatgtcctggccaagaaagccacagagatgggcgtgcggctgatggtggatgccgagcagacctacttccagccggccatcagccgcctgacgctggagatgcagcggaagttcaatgtggagaagccgctcatcttcaacacataccagtgctacctcaaggatgcctatgacaatgtgaccctggacgtggagctggctcgccgtgagggctggtgttttggggccaagctggtgcggggcgcatacctggcccaggagcgagcccgtgcggcagagatcggctatgaggaccccatcaaccccacgtacgaggccaccaacgccatgtaccacaggtgcctggactacgtgttggaggagctgaagcacaacgccaaggccaaggtgatggtggcctcccacaatgaggacacagtgcgctttgcactgcgcaggatggaggagctgggcctgcatcctgctgaccaccgggtgtactttggacagctgctaggcatgtgtgaccagatcagcttcccgctgggccaggccggctaccccgtgtacaagtacgtgccctatggccccgtgatggaggtgctgccctacttgtcccgccgtgccctggagaacagcagcctcatgaagggcacccatcgggagcggcagctgctgtggctggagctcttgaggcggctccgaactggcaacctcttccatcgccctgcctagcacccgccagcacacccttagcctccagcaccccccgcccccgcccaggccatcaccacagctgcagccaaccccatcctcacacagattcaccttttttcaccccacacttgcagagctgctggaggtgaggtcaggtgcctcccagccctgcccagagtatgggcactcaggtgtgggccgaacctgatacctgcctgggacagccactggaaacttttgggaactctcctcgaatgtgtgggcccaaggcccccacctctgtgacccccatgtccttggacctagaggattgtccaccttctgccaaggccagcccacacagcccgagccccttggggagcagtggccgggctggggaggcctgcctggtcaataaaccactgttcctgc

SEQ ID NO: 23731 - DNA, 1985 bp, Homo sapiens
  source 1..1985: mol_type = unassigned DNA
gctgaagtgccagggtgcttgtgaagtctaagcccttgtctggcatttgtcaggaatataggctgctgtatgtttccaggaaacttctaggacagaggctattcaacaagctcatgaagatgaccttctatgggcattttgtagccggggaggaccaggagtccatccagcccctgcttcggcactacagggccttcggtgtcagcgccatcctggactatggagtggaggaggacctgagccccgaggaggcagagcacaaggagatggagtcctgcacctcagctgcggagagggatggcagtggcacgaataagcgggacaagcaataccaggcccactgggccttcggggaccgcaggaatggtgtcatcagtgcccgcacctacttctacgccaatgaggccaagtgcgacagccacatggagacattcttgcgctgcatcgaagcctcaggtagagtcagcgatgacggcttcatagccattaagctcacagcactggggagaccccagtttctgctgcagttctcagaggtgctggccaagtggaggtgcttctttcaccaaatggctgtggagcaagggcaggcgggcctggctgccatggacaccaagctggaggtggcggtgctgcaggaaagtgtcgcaaagttgggcatcgcatccagggctgagattgaggactggttcacggcagagaccctgggagtgtctggcaccatggacctgctggactggagcagcctcatcgacagcaggaccaagctgtccaagcacttggtagtccccaacgcacagacaggacagctggagcccctgctgtcccggttcactgaggaggaggagctacagatgaccaggatgctacagcggatggatgtcctggccaagaaagccacagagatgggcgtgcggctgatggtggatgccgagcagacctacttccagccggccatcagccgcctgacgctggagatgcagcggaagttcaatgtggagaagccgctcatcttcaacacataccagtgctacctcaaggatgcctatgacaatgtgaccctggacgtggagctggctcgccgtgagggctggtgttttggggccaagctggtgcggggcgcatacctggcccaggagcgagcccgtgcggcagagatcggctatgaggaccccatcaaccccacgtacgaggccaccaacgccatgtaccacaggtgcctggactacgtgttggaggagctgaagcacaacgccaaggccaaggtgatggtggcctcccacaatgaggacacagtgcgctttgcactgcgcaggatggaggagctgggcctgcatcctgctgaccaccgggtgtactttggacagctgctaggcatgtgtgaccagatcagcttcccgctgggccaggccggctaccccgtgtacaagtacgtgccctatggccccgtgatggaggtgctgccctacttgtcccgccgtgccctggagaacagcagcctcatgaagggcacccatcgggagcggcagctgctgtggctggagctcttgaggcggctccgaactggcaacctcttccatcgccctgcctagcacccgccagcacacccttagcctccagcaccccccgcccccgcccaggccatcaccacagctgcagccaaccccatcctcacacagattcaccttttttcaccccacacttgcagagctgctggaggtgaggtcaggtgcctcccagccctgcccagagtatgggcactcaggtgtgggccgaacctgatacctgcctgggacagccactggaaacttttgggaactctcctcgaatgtgtgggcccaaggcccccacctctgtgacccccatgtccttggacctagaggattgtccaccttctgccaaggccagcccacacagcccgagccccttggggagcagtggccgggctggggaggcctgcctggtcaataaaccactgttcctgc

SEQ ID NO: 23732 - DNA, 1677 bp, Homo sapiens
  source 1..1677: mol_type = unassigned DNA
tagagatggggtctcactatgtcgcccagggtagtctcaaactcctcggtcttggcctcccaaagtgttgggattacaaacgtgagaaccgtattttcaaatgtattcaataacactacagcgtttccaattttaagaggaagcaattgccacaaaatcactgcccctggtctgggcaaggggcagttggtgaacttgctgcctccagagaaccttccctggtgtggaggcagccagggacccaggatgctccggacctgttacgtgctctgttcccaagctggtcccccctccaggggctggcagtccctgagctttgatggcggggccttccaccttaagggcacaggagagctgacacgggccttgctggttctccggctgtgtgcctggcccccactcgtcactcacgggctgttgctccaggcctggtctcggcgactcctgggctcccggctctcaggcgcatttctccgagcatccgtctatgggcagtttgtggctggtgagacagcagaggaggtgaagggctgcgtgcagcagctgcggaccctcagcctccgaccactgctggcagtgcccactgaggaggagccggactctgctgccaagagtggtgaggcgtggtatgaggggaacctcggtgctatgctgcggtgtgtggacctgtcacggggcctcctggagccccccagcctggctgaggccagcctcatgcagctgaaggtgacggcgctgaccagtactcggctctgtaaggagctagcctcgtgggtcagaaggccaggagcctccttggagctgagccccgagaggctggctgaagctatggactctgggcagaacctccaggtctcctgcctcaatgctgagcagaaccagcacctccgggcctccctcagccgcctgcatcgggtggcacagtatgcccgggcccagcacgtgcggctcctggtggatgcggagtacacctcactgaaccctgcgctctcgctgctggtggctgccctggctgtgcgctggaacagcccgggtgaaggcgggccctgggtgtggaacacctaccaggcctgtctaaaggacacattcgagcggctggggagggatgcagaggctgcgcacagggccggcctggccttcggagtgaagctggtacgaggtgcatatctggacaaggagagagcggtggcccagctccatgggatggaagaccccactcagcctgactatgaggccaccagtcagagttacagccgctgcctggaactgatgctgacgcacgtggcccgccatggccccatgtgccacctcatggtggcttcccacaatgaggaatctgttcgccaggcaaccaagcgcatgtgggagctgggcattcctctggatgggactgtctgtttcggacaacttctgggcatgtgtgaccacgtctctctagcactggggcaggccggctatgtagtgtataagtccattccctatggctccttggaggaggtaatcccctacctgatccggagggcccaggagaaccggagcgtgcttcagggtgcccgcagggaacaggagctgctcagccaagaactgtggcggcggctgctgccaggatgccgaaggataccccactagcacccctgagggggtcatgtggtcaataaaagtccttaggtgctgcct

SEQ ID NO: 23733 - DNA, 932 bp, Homo sapiens
  source 1..932: mol_type = unassigned DNA
gatcttacggtgcgacagtcctcttctcaggccctctggcccgagagcctgttgactctgtgacacactctgaggagctggttgtggtgttttccagcgagggaagaaaagagtaattttttcaaagcatttatagaaacgcagcaaagggaaggtgtgaggttgccgccatgcctggcagaacggagggaggcagttggctccggaatgcggccgccgcagatgttctccgcaaccttccggaagtggaatggcgggagcctcagcattgctgcccaccgaccccccggaagcggaaacagaatccccgcgtgccccttcctcactaccctccaaatcccgctgcagccattgccgcagacacgatgccgaaacgaaagaagcagaatcatcaccagccaccgacacagcagcagcccccgctgcccgagcgggaagagactggagatgaggaggatgggagtcccatcggaccacccagccttctgggccctccccccatggccaatggaaaacctggcgaccctaagtcagctcttcacagaggtcctccaggatcaaggggaccactgattccaccactgctgagtctcccacctcctccttggggtagaggcccaattcggagagggcttggccccaggtctagcccatatggtcgtggttggtggggagtcaatgcagaacctccttttccggggccaggccatgggggtcccaccaggggaagctttcacaaggaacagagaaaccctcgaaggctcaaaagctggtctcttatcaagaatacctgcccgcccaaggatgacccccaggttatggaagacaaatccgaccgccctgtctgccgacattttgccaaaaagggccactgtcgatatgaggacctctgtgccttctaccatccaggcgtcaatggacctcctctgtga

SEQ ID NO: 23734 - DNA, 1797 bp, Homo sapiens
  source 1..1797: mol_type = unassigned DNA
agaatccccgcgtgccccttcctcactaccctccaaatcccgctgcagccattgccgcagacacgatgccgaaacgaaagaagcagaatcatcaccagccaccgacacagcagcagcccccgctgcccgagcgggaagagactggagatgaggaggatgggagtcccatcgctcttcacagaggtcctccaggatcaaggggaccactgattccaccactgctgagtctcccacctcctccttggggtagaggcccaattcggagagggcttggccccaggtctagcccatatggtcgtggttggtggggagtcaatgcagaacctccttttccggggccaggccatgggggtcccaccaggggaagctttcacaaggaacagagaaaccctcgaaggctcaaaagctggtctcttatcaagaatacctgcccgcccaaggatgacccccaggttatggaagacaaatccgaccgccctgtctgccgacattttgccaaaaagggccactgtcgatatgaggacctctgtgccttctaccatccaggcgtcaatggacctcctctgtgagactgtgccttcccatccaggctggaaggagctctctgtgacctagcggccatttatttctctgtagccctatgatggctactgtgaggctcttctaacaccctcagtcagtgacacacccatcccatccaccacttcccccgtgtggggtccagagtggtgttgcatcactggtgcgcggcatacgcgctttcttctgatccagcctgtagagactcgcctttgggacccatctttgcttcctttcagttgcctcctggatcttctttcccgtcatcaaatgactgctgaacaggaaacctctttggtgctgtttcttgtgcatctgtccacctgttccccagtattgccctcaattcctgagagccctggagcggtttcctaccattcccttcttttagctgcttgttttaagtcctttttatgtgacattccctacccccaatgttgtcagctgcttgtgaaactcagccaggttgtctaacctggggtcaagtttgggtgactggtgcagagttacttcctaaaaggccactctccctgcctttggatttcatagtttctctgtcagtagcatgatccccaccgctatggtctatctatgatcaccgtgctttgtgaaactgtgcatccccttgtagcctttctcagtgtccgtggcatttttgtgacttcccagcactagaataagttttcctgccaaaatgagtgaggcgcttggtgccctctggactttcccacttcccaacatgggagaattgtgaactttccatcagactgcctccctggccctccccattcttctcctgttggttattctgagtctgacacagacccatgacatgtcttataaagcctccaatggctttatcctacctagatcccttccagcccattttaattagactatgtcattgtgaggccaccagtccattcatttgaattctgtgaatctccaccttgcctatctttgggtagaagctggacagtactgttgccctcttccaatcctcttcccctacatccctggcactggttgttttctgtgaaaacagcagtgaacaggttcagttttgaactggccctgaggaaatgggtcaggagttgtattggcaagagggaggggtgagagctgttggagaactgagaatgaggttttttttttttttttctttttaactttttttatattagtaataaatgcagtggaaaccagcattttatttaa

SEQ ID NO: 23735 - DNA, 2254 bp, Homo sapiens
  source 1..2254: mol_type = unassigned DNA
aacccaagcgggacaaggacttttggggggaggtcaaagggcacgaagttgtgcctgcagctgttaccatagtaaccgaggaccggatgtggcgatcttacggtgcgacagtcctcttctcaggccctctggcccgagagcctgttgactctgtgacacactctgaggagctggttgtggtgttttccagcgagggaagaaaagagtaattttttcaaagcatttatagaaacgcagcaaagggaaggtgtgaggttgccgccatgcctggcagagacggagggaggcagttggctccggaatgcggccgccgcagatgttctccgcaaccttccggaagtggaatggcgggagcctcagcattgctgcccaccgaccccccggaagcggaaacagaatccccgcgtgccccttcctcactaccctccaaatcccgctgcagccattgccgcagacacgatgccgaaacgaaagaagcagaatcatcaccagccaccgacacagcagcagcccccgctgcccgagcgggaagagactggagatgaggaggatgggagtcccatcggaccacccagccttctgggccctccccccatggccaatggaaaacctggcgaccctaagtcagctcttcacagaggtcctccaggatcaaggggaccactgattccaccactgctgagtctcccacctcctccttggggtagaggcccaattcggagagggcttggccccaggtctagcccatatggtcgtggttggtggggagtcaatgcagaacctccttttccggggccaggccatgggggtcccaccaggggaagctttcacaaggaacagagaaaccctcgaaggctcaaaagctggtctcttatcaagaatacctgcccgcccaaggatgacccccaggttatggaagacaaatccgaccgccctgtctgccgacattttgccaaaaagggccactgtcgatatgaggacctctgtgccttctaccatccaggcgtcaatggacctcctctgtgagactgtgccttcccatccaggctggaaggagctctctgtgacctagcggccatttatttctctgtagccctatgatggctactgtgaggctcttctaacaccctcagtcagtgacacacccatcccatccaccacttcccccgtgtggggtccagagtggtgttgcatcactggtgcgcggcatacgcgctttcttctgatccagcctgtagagactcgcctttgggacccatctttgcttcctttcagttgcctcctggatcttctttcccgtcatcaaatgactgctgaacaggaaacctctttggtgctgtttcttgtgcatctgtccacctgttccccagtattgccctcaattcctgagagccctggagcggtttcctaccattcccttcttttagctgcttgttttaagtcctttttatgtgacattccctacccccaatgttgtcagctgcttgtgaaactcagccaggttgtctaacctggggtcaagtttgggtgactggtgcagagttacttcctaaaaggccactctccctgcctttggatttcatagtttctctgtcagtagcatgatccccaccgctatggtctatctatgatcaccgtgctttgtgaaactgtgcatccccttgtagcctttctcagtgtccgtggcatttttgtgacttcccagcactagaataagttttcctgccaaaatgagtgaggcgcttggtgccctctggactttcccacttcccaacatgggagaattgtgaactttccatcagactgcctccctggccctccccattcttctcctgttggttattctgagtctgacacagacccatgacatgtcttataaagcctccaatggctttatcctacctagatcccttccagcccattttaattagactatgtcattgtgaggccaccagtccattcatttgaattctgtgaatctccaccttgcctatctttgggtagaagctggacagtactgttgccctcttccaatcctcttcccctacatccctggcactggttgttttctgtgaaaacagcagtgaacaggttcagttttgaactggccctgaggaaatgggtcaggagttgtattggcaagagggaggggtgagagctgttggagaactgagaatgaggttttttttttttttttctttttaactttttttatattagtaataaatgcagtggaaaccagcattttatttaa

SEQ ID NO: 23736 - DNA, 2254 bp, Homo sapiens
  source 1..2254: mol_type = unassigned DNA
aacccaagcgggacaaggacttttggggggaggtcaaagggcacgaagttgtgcctgcagctgttaccatagtaaccgaggaccggatgtggcgatcttacggtgcgacagtcctcttctcaggccctctggcccgagagcctgttgactctgtgacacactctgaggagctggttgtggtgttttccagcgagggaagaaaagagtaattttttcaaagcatttatagaaacgcagcaaagggaaggtgtgaggttgccgccatgcctggcagagacggagggaggcagttggctccggaatgcggccgccgcagatgttctccgcaaccttccggaagtggaatggcgggagcctcagcattgctgcccaccgaccccccggaagcggaaacagaatccccgcgtgccccttcctcactaccctccaaatcccgctgcagccattgccgcagacacgatgccgaaacgaaagaagcagaatcatcaccagccaccgacacagcagcagcccccgctgcccgagcgggaagagactggagatgaggaggatgggagtcccatcggaccacccagccttctgggccctccccccatggccaatggaaaacctggcgaccctaagtcagctcttcacagaggtcctccaggatcaaggggaccactgattccaccactgctgagtctcccacctcctccttggggtagaggcccaattcggagagggcttggccccaggtctagcccatatggtcgtggttggtggggagtcaatgcagaacctccttttccggggccaggccatgggggtcccaccaggggaagctttcacaaggaacagagaaaccctcgaaggctcaaaagctggtctcttatcaagaatacctgcccgcccaaggatgacccccaggttatggaagacaaatccgaccgccctgtctgccgacattttgccaaaaagggccactgtcgatatgaggacctctgtgccttctaccacccaggcgtcaatggacctcctctgtgagactgtgccttcccatccaggctggaaggagctctctgtgacctagcggccatttatttctctgtagccctatgatggctactgtgaggctcttctaacaccctcagtcagtgacacacccatcccatccaccacttcccccgtgtggggtccagagtggtgttgcatcactggtgcgcggcatacgcgctttcttctgatccagcctgtagagactcgccttcgggacccatctttgcttcctttcagttgcctcctggatcttctttcccgtcatcaaatgactgctgaacaggaaacctctttggtgctgtttcttgtgcatctgtccacctgttccccagtattgccctcaattcctgagagccctggagcggtttcctaccattcccttcttttagctgcttgttttaagtcctttttatgtgacattccctacccccaatgttgtcagctgcttgtgaaactcagccaggttgtctaacctggggtcaagtttgggtgactggtgcagagttacttcctaaaaggccactctccctgcctttggatttcatagtttctctgtcagtagcatgatccccaccgctatggtctatctatgatcaccgtgctttgtgaaactgtgcatccccttgtagcctttctcagtgtccgtggcatttttgtgacttcccagcactagaataagttttcctgccaaaatgagtgaggcgcttggtgccctctggactttcccacttcccaacatgggagaattgtgaactttccatcagactgcctccctggccctccccattcttctcctgttggttattctgagtctgacacagacccatgacatgtcttataaagcctccaatggctttatcctacctagatcccttccagcccattttaattagactatgtcattgtgaggccaccagtccattcatttgaattctgtgaatctccaccttgcctatctttgggtagaagctggacagtactgttgccctcttccaatcctcttcccctacatccctggcactggttgttttctgtgaaaacagcagtgaacaggttcagttttgaactggccctgaggaaatgggtcaggagttgtattggcaagagggaggggtgagagctgttggagaactgagaatgaggttttttttttttttttctttttaactttttttatattagtaataaatgcagtggaaaccagcattttatttaa

SEQ ID NO: 23737 - DNA, 1797 bp, Homo sapiens
  source 1..1797: mol_type = unassigned DNA
agaatccccgcgtgccccttcctcactaccctccaaatcccgctgcagccattgccgcagacacgatgccgaaacgaaagaagcagaatcatcaccagccaccgacacagcagcagcccccgctgcccgagcgggaagagactggagatgaggaggatgggagtcccatcgctcttcacagaggtcctccaggatcaaggggaccactgattccaccactgctgagtctcccacctcctccttggggtagaggcccaattcggagagggcttggccccaggtctagcccatatggtcgtggttggtggggagtcaatgcagaacctccttttccggggccaggccatgggggtcccaccaggggaagctttcacaaggaacagagaaaccctcgaaggctcaaaagctggtctcttatcaagaatacctgcccgcccaaggatgacccccaggttatggaagacaaatccgaccgccctgtctgccgacattttgccaaaaagggccactgtcgatatgaggacctctgtgccttctaccacccaggcgtcaatggacctcctctgtgagactgtgccttcccatccaggctggaaggagctctctgtgacctagcggccatttatttctctgtagccctatgatggctactgtgaggctcttctaacaccctcagtcagtgacacacccatcccatccaccacttcccccgtgtggggtccagagtggtgttgcatcactggtgcgcggcatacgcgctttcttctgatccagcctgtagagactcgccttcgggacccatctttgcttcctttcagttgcctcctggatcttctttcccgtcatcaaatgactgctgaacaggaaacctctttggtgctgtttcttgtgcatctgtccacctgttccccagtattgccctcaattcctgagagccctggagcggtttcctaccattcccttcttttagctgcttgttttaagtcctttttatgtgacattccctacccccaatgttgtcagctgcttgtgaaactcagccaggttgtctaacctggggtcaagtttgggtgactggtgcagagttacttcctaaaaggccactctccctgcctttggatttcatagtttctctgtcagtagcatgatccccaccgctatggtctatctatgatcaccgtgctttgtgaaactgtgcatccccttgtagcctttctcagtgtccgtggcatttttgtgacttcccagcactagaataagttttcctgccaaaatgagtgaggcgcttggtgccctctggactttcccacttcccaacatgggagaattgtgaactttccatcagactgcctccctggccctccccattcttctcctgttggttattctgagtctgacacagacccatgacatgtcttataaagcctccaatggctttatcctacctagatcccttccagcccattttaattagactatgtcattgtgaggccaccagtccattcatttgaattctgtgaatctccaccttgcctatctttgggtagaagctggacagtactgttgccctcttccaatcctcttcccctacatccctggcactggttgttttctgtgaaaacagcagtgaacaggttcagttttgaactggccctgaggaaatgggtcaggagttgtattggcaagagggaggggtgagagctgttggagaactgagaatgaggttttttttttttttttctttttaactttttttatattagtaataaatgcagtggaaaccagcattttatttaa

SEQ ID NO: 23738 - DNA, 1797 bp, Homo sapiens; identical to SEQ ID NO: 23737
  source 1..1797: mol_type = unassigned DNA

SEQ ID NO: 23739 - DNA, 1797 bp, Homo sapiens; identical to SEQ ID NO: 23737
  source 1..1797: mol_type = unassigned DNA

SEQ ID NO: 23740 - DNA, 2254 bp, Homo sapiens; identical to SEQ ID NO: 23735
  source 1..2254: mol_type = unassigned DNA

SEQ ID NO: 23741 - DNA, 2254 bp, Homo sapiens; identical to SEQ ID NO: 23736
  source 1..2254: mol_type = unassigned DNA

SEQ ID NO: 23742 - DNA, 1797 bp, Homo sapiens; identical to SEQ ID NO: 23734
  source 1..1797: mol_type = unassigned DNA

SEQ ID NO: 23743 - DNA, 1797 bp, Homo sapiens; identical to SEQ ID NO: 23737
  source 1..1797: mol_type = unassigned DNA

SEQ ID NO: 23744 - DNA, 1797 bp, Homo sapiens; identical to SEQ ID NO: 23734
  source 1..1797: mol_type = unassigned DNA

SEQ ID NO: 23745 - DNA, 2254 bp, Homo sapiens; identical to SEQ ID NO: 23735
  source 1..2254: mol_type = unassigned DNA

SEQ ID NO: 23746 - DNA, 2254 bp, Homo sapiens; identical to SEQ ID NO: 23736
  source 1..2254: mol_type = unassigned DNA

SEQ ID NO: 23747 - DNA, 2254 bp, Homo sapiens; identical to SEQ ID NO: 23736
  source 1..2254: mol_type = unassigned DNA

SEQ ID NO: 23748 - DNA, 932 bp, Homo sapiens
  source 1..932: mol_type = unassigned DNA
gatcttacggtgcgacagtcctcttctcaggccctctggcccgagagcctgttgactctgtgacacactctgaggagctggttgtggtgttttccagcgagggaagaaaagagtaattttttcaaagcatttatagaaacgcagcaaagggaaggtgtgaggttgccgccatgcctggcagaacggagggaggcagttggctccggaatgcggccgccgcagatgttctccgcaaccttccggaagtggaatggcgggagcctcagcattgctgcccaccgaccccccggaagcggaaacagaatccccgcgtgccccttcctcactaccctccaaatcccgctgcagccattgccgcagacacgatgccgaaacgaaagaagcagaatcatcaccagccaccgacacagcagcagcccccgctgcccgagcgggaagagactggagatgaggaggatgggagtcccatcggaccacccagccttctgggccctccccccatggccaatggaaaacctggcgaccctaagtcagctcttcacagaggtcctccaggatcaaggggaccactgattccaccactgctgagtctcccacctcctccttggggtagaggcccaattcggagagggcttggccccaggtctagcccatatggtcgtggttggtggggagtcaatgcagaacctccttttccggggccaggccatgggggtcccaccaggggaagctttcacaaggaacagagaaaccctcgaaggctcaaaagctggtctcttatcaagaatacctgcccgcccaaggatgacccccaggttatggaagacaaatccgaccgccctgtctgccgacattttgccaaaaagggccactgtcgatatgaggacctctgtgccttctaccacccaggcgtcaatggacctcctctgtga

SEQ ID NO: 23749 - DNA, 932 bp, Homo sapiens; identical to SEQ ID NO: 23748
  source 1..932: mol_type = unassigned DNA

SEQ ID NO: 23750 - DNA, 932 bp, Homo sapiens; identical to SEQ ID NO: 23748
  source 1..932: mol_type = unassigned DNA

SEQ ID NO: 23751 - DNA, 932 bp, Homo sapiens; identical to SEQ ID NO: 23733
  source 1..932: mol_type = unassigned DNA

SEQ ID NO: 23752 - DNA, 932 bp, Homo sapiens; identical to SEQ ID NO: 23748
  source 1..932: mol_type = unassigned DNA

SEQ ID NO: 23753 - DNA, 932 bp, Homo sapiens; identical to SEQ ID NO: 23733
  source 1..932: mol_type = unassigned DNA

SEQ ID NO: 23754 - DNA, 563 bp, Homo sapiens
  source 1..563: mol_type = unassigned DNA
aacgcagagttgggagcaactccagagcctccttcaagatgctgctggtcctgctctcagtggtccttctggctctgagctcagctcagagcacagataatgatgtgaactatgaagactttactttcaccataccagatgtagaggactcaagtcagagaccagatcagggaccccagagacctcctcctgaaggactcctacctagaccccctggtgatagtggtaaccaagatgatggtcctcagcagagaccaccaaaaccaggaggccatcaccgccatcctcccccacctccttttcaaaatcagcaacgaccaccccgacgaggacaccgtcaactctctctaccccgatttccttctgtcagcctgcaggaagcatcatcattcttccagagggacagaccagcaagacatccccaggagcaaccactctggtaatctagaattcagtggcagaaaataaataagaagataacttccttcagaaagccatgacattgaaataatgtggtcataactctttcttcagtataccaataaaatattaatagcatgcaa

SEQ ID NO: 23755 - DNA, 508 bp, Homo sapiens
  source 1..508: mol_type = unassigned DNA
cagagttgggagcaactccagagcctccttcaagatgctgctggtcctgctctcagtggtccttctggctctgagctcagctcagagcacagataatgatgtgaactatgaagactttactttcaccataccagatgtagaggactcctacctagaccccctggtgatagtggtaaccaagatgatggtcctcagcagagaccaccaaaaccaggaggccatcaccgccatcctcccccacctccttttcaaaatcagcaacgaccaccccgacgaggacaccgtcaactctctctaccccgatttccttctgtcagcctgcaggaagcatcatcattcttccagagggacagaccagcaagacatccccaggagcaaccactctggtaatctagaattcagtggcagaaaataaataagaagataacttccttcagaaagccatgacattgaaataatgtggtcataactctttcttcagtataccaataaaatattaatagcatgc

SEQ ID NO: 23756 - DNA, 326 bp, Homo sapiens
  source 1..326: mol_type = unassigned DNA
agagttgggagcaactccagagcctccttcaagatgctgctggtcctgctctcagtggtccttctggctctgagctcagctcagagcacagataatgatgtgaactatgaagactttactttcaccataccagcctgcaggaagcatcatcattcttccagagggacagaccagcaagacatccccaggagcaaccactctggtaatctagaattcagtggcagaaaataaataagaagataacttccttcagaaagccatgacattgaaataatgtggtcataactctttcttcagtataccaataaaatattaatagcatgcaa

SEQ ID NO: 23757 - DNA, 5977 bp, Homo sapiens
  source 1..5977: mol_type = unassigned DNA
tagttgtgaattctggtcctgccactgtcactgttgatttgcttaaccttgtctgagcccgtctctctgggctgtatctcctcatctatctctgaggtcctttccaattggaagttgcaaagattcattgaggggagcaaggaaggaggagcctcagcctttaggagctttcctttttaaaagaaaaaggtcaacccttggttcttatagatgctcagaacatgttcttgggggaaaacgctgaaaggtttgctttgggccctactgggcctggggaggtctctggagaagagcttggggcagaatgagaagcagcggaagccatgggtggctgcatggaggacgacgcaccccacaagagaagtgagaccctgcagctgagggagcatcatggcagtgtttctggaggccaaggatgcccattcggtcctgaaacgattccctcgtgccaatgagttcctggaggagctgcgccagggcaccatcgagcgagagtgcatggaggagatctgcagctacgaggaggtcaaggaagtgtttgagaacaaagagaaaacgatggagttctggaaagggtacccaaatgcagtctactctgtccgagacccctcgcagagctcagatgccatgtatgtggtggtaccccttctgggggtggcactgctgattgtcatcgccttgttcatcatctggaggtgccagctgcagaaagcgacccgtcaccacccctcctatgctcagaaccggtacctagccagtcgcgccgggcacaccctcccccgggtcatggtgtaccggggtactgtgcatagccaaggggagccttctgggcaccgagaggcagcgaacagcccccaggtggtgctggggcccagtcgggggggcaggaccacagtccggctagagagcaccctctacctccctgagctctctctctccagactgtccagcaccacccctcccccctcctacgaggaggtgactgcgccccaagagagcagcagtgaggaggccagcgtgtcttacagtgacccacccccaaagtacgaggagatagtggccgccaaccctggcgctgacaagtagtgggacgtttgtgccctgtcctggatgaacgcctctttccgaggtctcctattttctttttaactttttaaagactgtgccaccacaaaacagccttagcctccttgttgccaaataattccctaactgtggagttttaggaagtcagttgtcagagacaggtggggagggtgggggtagggaccacgcatgagtcgaagcccccgggaagagccaaaggccaaagtgcccaactctttgggatgacccccaagcctccaacatcctgtctttccatcaggaactggcttctcttatgccaaaggaataaccccattgagttgattgtggccagaatgtccacaggcctggcctgggggctgtgggactggctggaggcctgcctgtgtctagagctctgggcctcaggggtaagggaaggaagccagcctttcagcaccccttaccctccacagttctgtgatttctgtccttgcttacatttggaggacagggacaaggactgagcaaaaacaaaatgaaaaaatcatgacaaataaataattaacacaatagaacaaaactctagcacccgggccgttcataggaggccaagggaaatttatcacatggatctgtgatgtccgcctcccctaaaacctgtccccacactcctggaaggaggacagggtgtgtgaaggatgagggccagagggctgggtggcagagtttcctcttccacattgaccaaggggcccacgtggactctgccattcagtttctagtgtgcttgtctctccagacatgtggaccagctgtgttcaaaccactacccactggcatgagcctactttttgcgaatggtgcattgaaattgaacttcagattgaggatttctccttaacgatggtgcgcatctcaggagaagatcctaaagtgtcccttttaaaacatttatttgtggagaagcccgtggcctggggttgaaggcccatatggggtttgctctgctgttgccaggtgccagtctgttttcagtgaggctttggacagcagtggggcagaaggcacctgccctttaactgtcagtgaccatgctagacactgttgataccacctccccctacttccgtctccatcctcctgacctcaacaccaaaccatttctcctctgtggtgctttaaaaattgtagcaaatttttgtgtggtgcaagaatgcatggcctgcgtctattggcaaccacagcaatttaaaatccactgagctgacaagcttttttctgtcaaaatatctctctaaggcagacattgggactcatttccttgaatgcagccctgccttcaggccacagaggacttctggaggctgctctagccctgaggacttgccctgggacgtgcttccagttagaaggcttgtgtccctaccccagtgaggccaccagcttggaccactccaccctgtggctggggttttccatccttccccctacctcacaggcccgttggaggctgactgagcaaatgcctgcgaagtgcttgaattgccggggagccagcgaggtttgccttaggaagagtcttctagaaaggtgtaggttataagggagcagtcttagctgaggccctcatatgcctctgatgttgagtctccacttggagagtcaatctcccgtcagttgaccctttccatcctctcgtcctccctttccagagctccctgatgccagagatgctggtgaatgcaggtgacattctacctttcgtttccttgtctttccctcccctgggccttcagcattgcactcctgcccttcatcacaaaggggtttttggcttaagaggcccctgctttttccatgttgggggacctggggaagcctgaagctcggggctagccctggctctcccagtatttcttcaagtaggtgccagagtgtgacctgggagcaggtgagaagaaacttatcccaatatgtctactcagttagcacagagccaggcatgagctccactgatcagagccaaagggagtttgccaagaaatgcccgctgcctttggcatctgagttgcagctgggtggtaatgggagagagcaggaagaggcccaaggcctggcccatggagggcaacatgtgtccttcaggggctgaggacaggccgtgggaagagtcacaggaggttgcttaaggcctgtgatgttcggttcagatgcttcatggtgttctgccaggtggggttgcaccacggtctctgggatggtttctgcagcacattgtagaaaaaagactgtacagcacacagcaggcatcactccttgcgatgcacacttggattttatgaatgccctgtacatatcttttcaaactctgtgtttgtatggaggtggatttgatacaatgctgactctttcgtggctacatttttgctgtttttggacttctatgtgtgtgtgtgtgtgtgtgtgtgtgtgtatctatgtgtgcacgttgccttttctcattgcttatctgaaacaatagccggtgtgcagctatatttgtaccaggagggatccggtctgaaaagaggaatgtcacctcccctcgcagggctgagtagcctgatgacagggccctgagcaaggaaacgtggcattaactatattggacacccaacccccaaagttgtcactgtttgcctccttgaaaaaggctttggaagaagacaaagcagctccattctgcaggtctccaccctatgcaacccccgctcacacgcccttttggcatggtgcccctggcccaggcttctgttctgtgggtgtcagcagctgaaagaaatctgagtactcctgggcatggttttttttttttttttttttttttttttttttttttttttttttttttttttttttgtgtgtgtgtgtgtgtgtgtgtgtgtgtgtgtgtgtgtgtatggaaagatgtgtgactattgactttgggtatcgcgggactagttaattagatgtttttcatttttcaaaaagaaaaggttttaaaaattttcttgaaatgtgactgtcacttgttttcaaccaaaaactttttaagattttttaaaagaaaaatcgaaatcctgtccctcccccgcttcccatcgcctccggttttcaaaatgaaagcacaagtgcaagagtggggtgcacaggtgcctggcgtgtacacaccacccacacagctgcgtccagccctggctgagggagacgcagtgctgagcagtcagccccgggaggcctctttttcaacttccaatcccactgccatgaatgtgaattccttagggtgcttccaaaaacaggagtctgcctgatctgttggacattgcctttttggtagcccgaatatgaggaattcaggacaggaaagtgtctttttgtcaagtagtcagagccggatgcttcccctctcccagtgggtggagcatcgcaacccccagccagagttgatcttttgacaacccagtgacatcccatgagaaggaagaaaaaaaattcaacactgcctctagattgttattttgtccaagagagagatcatggagagagtctctctcgctcacggaggctctgtctttctaggagtatgtgtgtgtgctgtctcatgtgtggacactcacagttgaggctgagatggatatcttggcagcagagctgctggtctaggtggcttttcagcttgacaagtaatgaagctccatttcaggacttcatcgattccgaaacaagcacagccccccaccccccgccacggaactctactaatactaatcactataattagctaatttaaaagtacggtaatcagactgcttgcaactattttaaaagcccattaatttgaagcccactacttcagaacttcgagaaaatcacaacttaagacaattcacagtagctgtgattctggctacataaaaatatttgaaatattcttccctttagtcaatgttcagggtcttttgtgtaagagaaatccagtttaaaatgagtacccttttcaaagaaaaggctcaagatattaaggatcccttcaccgtgccttcagctttgcagttcagcacttctcgtatgtacagggtgatctcttgttctctctccatcacagggatgttggatattgcagcctttcactctactccgttatttatcctgtgaataacatagtttgtgaactagactgcaatttaaactaatacacatgatgtatctttctaaatattctgtaaagcagatgcttcgctgtcagactggccgctccatcattcgcctccaaatattcaaacgtgggagcttttcctttcagactgtgggcagcgagtctctctctagcaagaatttatctgacaaacatacccaaatagcacaccctctcaagctcaatgcctcaacagttgtttcactgtactgatatctgactgctgaacagtgcctgcccttcacccacccccagcccgagcattaacacagatcttcaggattgggacaaatcccccagctgcttttgcctctcaatccatctcccctcatcgataccaatttcccaggcctgaacacatctgttattttgctctgacattgtgaatttgtgacagtggaaaccctgatatgtgcaactgagcttatagaaataattactgtgaaatggattaattttgataccactttaaactgtgcttgtattcatgtgttgacccttgtcagctgggaaatctgtacattcagtatatgtcagcatttcattggagcctgggggcaacagacaaacttgcttctgatttctctctctctctctttctttttataattgttgaatttggctgttacattttgtctccttctttacaagaaaacaataataataaagagcaaatggcatccacttgaa

SEQ ID NO: 23758 - DNA, 650 bp, Homo sapiens
  source 1..650: mol_type = unassigned DNA
ggcgcagcagcgaggtggcgggctgcgtgcgcaaacagggcggccgccttctgggcccggagaacgagaagtgagaccctgcagctgagggagcatcatggcaggcctcagtagggctctctcctcagtgtttctggaggccaaggatgcccattcggtcctgaaacgattccctcgtgccaatgagttcctggaggagctgcgccagggcaccatcgagcgagagtgcatggaggagatctgcagctacgaggaggtcaaggaagtgtttgagaacaaagagaaaacggcatgtaccaccctggggctggttctgggagtaggagtagcctcaggaatagcaagaacaggccctggtaatgcagaccaatcagaagcaaggaaagacacccagcctaaggcatagccactagggccatcacggagcagataaaatggagttctggaaagggtacccaaatgcagtctactctgtccgagacccctcgcagagctcagatgccatgtatgtggtggtaccccttctgggggtggcactgctgattgtcatcgccttgttcatcatctggaggtgccagctgcagaaagcgacccgtcaccacccctcctatgctcagaaccggtacctagccagtcgcgccgggcacacc

SEQ ID NO: 23759 - DNA, 379 bp, Homo sapiens
  source 1..379: mol_type = unassigned DNA
gacccctcgcagagctcagatgccatgtatgtggtggtaccccttctgggggtggcactgctgattgtcatcgccttgttcatcatctggaggtgccagctgcagaaagcgacccgtcaccacccctcctatgctcagaaccgcagatgcttcgctgtcagactggccgctccatcattcgcctccaaatattcaaacgtgggagcttttcctttcagactgtgggcagcgagtctctctctagcaagaatttatctgacaaacatacccaaatagcacaccctctcaagctcaatgcctcaacagttgtttcactgtactgatatctgactgctgaacagtgcctgcccttcacccacccccagcccgagcattaaca

SEQ ID NO: 23760 - DNA, 339 bp, Homo sapiens
  source 1..339: mol_type = unassigned DNA
gcagcgcgacgattgcggcctggcgatcggggcactgcggtcgtggcgcgcgaggcgcggggcgcgaggccagccctggaacggcggggtgtggggggcgggcagctgcggagcccccagaggaaagcaggggcaggcaggggggtgccgagagaagtgagaccctgcagctgagggagcatcatggcagtgtttctggaggccaaggatgcccattcggtcctgaaacgattccctcgtgccaatgagttcctggaggagctgcgccagggcaccatcgagcgagagtgcatggaggagatctgcagctacgaggaggtcaaggaagtgtttgagaac

SEQ ID NO: 23761 - DNA, 1303 bp, Homo sapiens
  source 1..1303: mol_type = unassigned DNA
aggcaggggggtgccgagagaagtgagaccctgcagctgagggagcatcatggcagtgtttctggaggccaaggatgcccattcggtcctgaaacgattccctcgtgccaatgagttcctggaggagctgcgccagggcaccatcgagcgagagtgcatggaggagatctgcagctacgaggaggtcaaggaagtgtttgagaacaaagagaaaacgatggagttctggaaagggtacccaaatgcagtctactctgtccgagacccctcgcagagctcagatgccatgtatgtggtggtaccccttctgggggtggcactgctgattgtcatcgccttgttcatcatctggaggtgccagctgcagaaagcgacccgtcaccacccctcctatgctcagaaccggtacctagccagtcgcgccgggcacaccctcccccgggtcatggtgtaccggggtactgtgcatagccaaggggagccttctgggcaccgagaggcagcgaacagcccccaggtggtgctggggcccagtcgggggggcaggaccacagtccggctagagagcaccctctacctccctgagctctctctctccagactgtccagcaccacccctcccccctcctacgaggaggtgactgcgccccaagagagcagcagtgaggaggccagcgtgtcttacagtgacccacccccaaagtacgaggagatagtggccgccaaccctggcgctgacaagtagtgggacgtttgtgccctgtcctggatgaacgcctctttccgaggtctcctattttctttttaactttttaaagactgtgccaccacaaaacagccttagcctccttgttgccaaataattccctaactgtggagttttaggaagtcagttgtcagagacaggtggggagggtgggggtagggaccacgcatgagtcgaagcccccgggaagagccaaaggccaaagtgcccaactctttgggatgacccccaagcctccaacatcctgtctttccatcaggaactggcttctcttatgccaaaggaataaccccattgagttgattgtggccagaatgtccacaggcctggcctgggggctgtgggactggctggaggcctgcctgtgtctagagctctgggcctcaggggtaagggaaggaagccagcctttcagcaccccttaccctccacagttctgtgatttctgtccttgcttacatttggaggacagggacaaggactgagcaaaaacaaaatgaaaaaatcatgacaaataaataattaacacaatagaac

SEQ ID NO: 23762 - DNA, 5530 bp, Homo sapiens
  source 1..5530: mol_type = unassigned DNA
cccggaccgaggcaggacctcaccccgcgcgtgttccccgggcgcccctctgcgaaccccaggcccttcccaggtttgcgcgcgggggccatccagaccctgcggagagcgaggcccggagcgtcgccgaggtttgagggcgccggagaccgagggcctggcggccgaaggaaccgccccaagaagagcctctggcccgggggctgctggaacatgtgcggggggacacagtttgtttgacagttgccagactatgtttacgcttctggttctactcagccaactgcccacagttaccctggggtttcctcattgcgcaagaggtccaaaggcttctaagcatgcgggagaagaagtgtttacatcaaaagaagaagcaaactttttcatacatagacgccttctgtataatagatttgatctggagctcttcactcccggcaacctagaaagagagtgcaatgaagaactttgcaattatgaggaagccagagagatttttgtggatgaagataaaacgattgcattttggcaggaatattcagctaaaggaccaaccacaaaatcagatggcaacagagagaaaatagatgttatgggccttctgactggattaattgctgctggagtatttttggttatttttggattacttggctactatctttgtatcactaagtgtaataggctacaacatccatgctcttcagccgtctatgaaagggggaggcacactccctccatcattttcagaagacctgaggaggctgccttgtctccattgccgccttctgtggaggatgcaggattaccttcttatgaacaggcagtggcgctgaccagaaaacacagtgtttcaccaccaccaccatatcctgggcacacaaaaggatttagggtatttaaaaaatctatgtctctcccatctcactgactaccttgtcattttggtataagaaatttgtgttatttgataggccgggcatggtggctcatgcctgtaatcccagcactttgggaggccaggagttcgagaccagcctggccaacatggtgaaacccggtctctactaaaaattcaaaaattacctaggcgtcatggggcatgcctgtagtcccacctacttgggaggctgaagcaggagaattgctcgaacctgggaggcagaggttgcagtaagctgagatcacgccactgcattccagcctgggcgacagagcaagactccatctcaaaaataaaataaaaaaagaaagaaagaaaagaagaagaaaagagaagaaggagaaggagatgaaggaggaggaggaggagaaggagaagaagaagaagaagaagaccacaaaagacatgactatccaactttttatgacaaactgcaaggaataaaggaagaataagtccatgtactgtaccacagaagttctgtctgcatcttggacctgaacttgatcattatcagcttgataagagactttttgactctatatccttgcagttaagaagaaagcacttttttgtaatgtttgttttaatggttcaaaaaaaatctttcttataaagagcataggtagaattagtgaactctttggatcctttgtacagataaaggttatagatttcttgtgttgaatattaaaaaagcaaggatgtctaaccattaagattatccaaagtcaggctgggcgcagtggctcacgcctgtaatcccagcactttgggagggataggtgggcggatcacctgaggtcaggagtttgagaccagcctggccaacatggcaaaaccccgtctctacaaaaatacaaaagaaattagccagacatgatggcgggtgcctctaatcccagctactggggaggctgaggtgggagaatcgcttgaactcgggaggtggaggttgtagtgaggcgagattgtgccattgcactccaacctgggcgacagagtgagactccatctcaaaaaaaaaaaaaaaaaaaaagattatccaaaaagatattggacctactctttcttaggatttttttggcggggggttagaaatacttcacagaatttgacatttcagtataaatctgtgaccttaatataatcacttggttttatatgttaaattattgcacagcagtcatcatattttgcagagtttagttcttaactcttgctgtcagtcatgttttattataggtagtggggtcagtagttttcttcttctaaaaaatactatttgctatgaagttagttcttcagaagatacaagtttgcaatgaaaaggatttgcaagggttgttatgctatcaaataaacagacctaaaatctaggagacactagaacttaatgaagttgcccctgttactgattagtaaatactcccatcttcgttgcaaaattatctctctgtataactacatatgattattttgaaatttgttaaacttcataagtaatagtttgagaatgtggaaaaagtaatttgcttttctgctcttaaaataatattgattaatgttaccagaaaccttttgcatctcttaatatgtctgaacacaaaaggaaaacaccataatcatataaacccattctttgtctcttcttctaaatcatatgtataaccagtttttccttaagaatgtagcagcatataagctataaatttctggagtatatgcacacaaatttatctgggtgggtatgtaggtatatgtgagtttgtttcctcttccaggagctcaagaaataacatactcctgaaaaatagaatagaaatttctgtgctttatgtttttgccaggctattacattttcttatcatttaggatcacttataaaatgatcattgtttattttgttttataatttttacaggagtgagactgcaaacccacatgtttgatagttcctaccaaattaaaagtttagaaagcataaatcatattacagtgcatatgtgagtgtatgtctctcttttaagatgcatcatcttaaggcagataaaagtaagtccttaatcattacagactgccaaagactttatccttttagattctcagtctctttgttgcttgttgcaaataaatcatctagcaacatttacatttaattaggaaatctaacttgcttttaaaagttacccacgttgcatataaaaatcttgctattccttgtgtcttggctttacataagcacttttgctcatgtgactttgcactttgcacttattttaatcctctttaaagggctacaggcaaattctactttgccataatcacactaaggcatggaagaacaacttgcccagaatctagcaggttggtgacaactgggtttagaatgagtgagcacacttttctagtcccatgtcatgcctataaaattacactgcctcgaattatgaaattcagggatcttgtacataattctaagtttgggacagaaatttacaagcatttctcatatatacatacatttatatatgtacatgttacatatatttagatgtattctcatatacatatgaaaatatttatgatgaatagaattataagatatgtatgtatcttgcactgaatcataatttgaaatatttcatgaattcatttacttctattgactcccaaaattctaactgcaagctagcttcagaacctgtgagaaccccaccccacccaagcagctgcctagatttgtctactgctatcattttgtgtaaagcagttgctctaacttgaatgagtctagaattcatcattaagattgtgatatttatagagcatccaatgtggagatcatgatactttaaatataaaaaggaaaatatgatagaactgttattgacaaatgcttataatgattgaagggaaagtatctcaacattgtatcagtcacatatatttctgttgctttcaccattttctattcctgttgtaagtttggtggtagatttagttttgtttggtttatctgttttgtttgtgttttgtctcctggcaattgattagtgttaatcattaaatctattttgacacaaggttttatatataattagatcagttttccactttattacaattaagaaatgagtaaaatatggatataaaaggagaattggattgaaaagacaaatacacatttacaaggtcatacctttggtaggacagacaattccatatagaatattctcttttgataatgaaaaaaattaaagagagcacaaactttgactatgtcaaagtatttttatttttaattttttgagacaaggtcttgctctgctacccaggctggagtgcagtggtgcaatcacaactcactgtagcctgaacttcggggctcaagcaatcctcccacctcagcctcctaagtagctgggaccacaggtgcacctcggtacacctggctaatttttgtgttttttgtagagacagggtttcaccatgttgcccatgctggtctctaactcctgagctcaaggaatccacccacctcggcctcccaaagtgctgggattacaggcatgagccaccacactggactgctgtgtcaaagttttgcatcttttttttttttttttccagaaggagtctcactttgtcacccaggctggagtgcagtggagtgatcatggctcactgcaacctccgcctcccaggttcaaggatttctcctgcctcagcctcctgagtagctgcattacaggcacctgccagcacgccttgcaaatttttgtatttttagtggagatggggttttgccatgttggccaggctggtctcaaactcctgacctcaggtgatccgcccgcctcagcctcccaaagggctgggattacaggcgtgagccactgtgcctggccccaagttttgcatcttttaatgccctctgaacaaatacatagagaaaactctcagaacaattaaaacctgcagagcaacagtgtcctccatgtcttaggtttcaagtttgcctctaaaattctaatccatatttttctacttctcagataatttatgtgtgtgtactcttcctagacgtacaagagactttttaatgctaaatatttgtcagtgcttaacaaaaactcaatttcacattactcatattgtttttgttttaattgaatgtgaattaaatttttattagttatttgatttggaatgttatgtatgccattaacactattaggggaatctctagcatttctgtatttttaaagaatttgattcttttgtagattctgcctgtgtggtcattttaaaacatgtgtgacatatatcagtaccttcattcttctatattttgtgtctcctccaacctccaactttttttgttttttgaaaaatgtttctctaacacctcaacagtttaaggtaatttagtacacatatatcagtatttttgtgatctgaaaaagcaacccattttctaaattcatatttttcctaaaactttactatgtttttattttaagaggtttcctgttatatacactttttacacatgcaaataaactttataccaagtgagta

SEQ ID NO: 23763 - DNA, 1080 bp, Homo sapiens
  source 1..1080: mol_type = unassigned DNA
ctcctgacagttcgccccaggagcgggcgccgctggccgagatgctcctccgggacttggtgctgcgccgtggctgctgctggtcctcgctgctgctgcactgcgcgctccacccgctctggggcttcgtgcaggtgacgcatggtgagccccagaagtcctgctccaaagtgactgacagctgccgacacgtctgccagtgccggccccctcccccgctgcccccgccgcccccacccccgccacctcccagactcctctccgccccagctcccaactctacctcttgccccactgaggaaagctggtggtcggggctggtgatcatcattgccgtatgctgtgcctccctggtgtttctgactgtgcttgtcatcatttgctacaaagccataaaaaggaaccatgccatctagggagccctctgtggccatctctgcctggaccagggtggaaatgcctcttcttggtttaatgagaccagcctcagctgactcacagagctgcagagccaggctgggtcctaacaactctctctagcatttccggagccccacggggcacgcgttaggaaaccactgagaaaagacgaaaatggcaccagcgttgctgagtatcccatgagtgcttcgcagagcaacaaaggagtagacgtgaacaacgcagtggtgtgagtctgcaggccctggacccgctggccagagggacaccttggtggcactggtggacatgggaaagcaggtggacatgagctaaccctgagcttgtccaggacttcattgcctcacaggccctgagcctcccgaaggagaaaccattgtcttcccaggcttgcccctggtcagcctgcgggcccaggcagctcggacaccaggctgagcccggcgcagcacctgggcagtgtccccaccccaggccctccacatcctcctccctgtctggtgtctggtctgtcgactgcccccagctgctgtctaaagcatgcgcactggcgaagccagagggatctgtctttctactgtggcagggaggcttccccctttagccaaaagaaagatggtccggagcccactccctgcc

SEQ ID NO: 23764 - DNA, 3711 bp, Homo sapiens
  source 1..3711: mol_type = unassigned DNA
agagctgccgcggggggaacgcggacctcttttccccgagcccagggtcggctggggccgccgccaggcaagttcgccccaggagcgggcgccgctggccgagatgctcctccgggacttggtgctgcgccgtggctgctgctggtcctcgctgctgctgcactgcgcgctccacccgctctggggcttcgtgcaggtgacgcatggtgagccccagaagtcctgctccaaagtgactgacagctgccgacacgtctgccagtgccggccccctcccccgctgcccccgccgcccccacccccgccacctcccagactcctctccgccccagctcccaactctacctcttgccccactgaggaaagctggtggtcggggctggtgatcatcattgccgtatgctgtgcctccctggtgtttctgactgtgcttgtcatcatttgctacaaagccataaaaaggaaaccactgagaaaagacgaaaatggcaccagcgttgctgagtatcccatgagtgcttcgcagagcaacaaaggagtagacgtgaacaacgcagtggtgtgagtctgcaggccctggacccgctggccagagggacaccttggtggcactggtggacatgggaaagcaggtggacatgagctaaccctgagcttgtccaggacttcattgcctcacaggccctgagcctcccgaaggagaaaccattgtcttcccaggcttgcccctggtcagcctgcgggcccaggcagctcggacaccaggctgagcccggcgcagcacctgggcagtgtccccaccccaggccctccacatcctcctccctgtctggtgtctggtctgtcgactgcccccagctgctgtctaaagcatgcgcactggcgaagccagagggatctgtctttctactgtggcagggaggcttccccctttagccaaaagaaagatggtccggagcccactccctgccggaaaacctctcctcctcccaggaagcctgcctgctccactgttcacattctcaacagaagccatcggcacagccagcagacagacgtcccctttcaaaggtgcttcccacacatctgttcatcgccccatctgcagttgttgtcaatcttcagggcctgccttctccctcctatccccactgacaccctacaccctaggctcctgactgcctgccatggagggctgtgagtccagcctgcagaatcccctcctgagcagacacaggagtgcgtttacactcgggggcagtgtctggccttccgggggcaaaacgactcactgaacccgcagcccagggccactgggcaagggcagaggccactgcacctgtcctcagactcatccccacacttgaccccataggaactgatgcatctgtgtgagccaggccctgccttagtcagcagaggccactacttgtgccaaatccactgtgggcctgctgtaccaggctgatgctggccaggcgctggatgtcccccacagtcccctgaggcctgactgttgtactcaggccctctcccagagtcctccatcatctccccattttaccctaccccgagccccagtcgccaagaaggaggtgttgttcttccagggtcttcctttcaatgtctgtttccacagtctcatgctatagaagcgctgagccctccagcgtggttggaggatcaagggatgaaatgggacaggaggagaggggtcctccaggctggtgacccctgccctgttggcctgtctcccaagtggcagccttccctgtgggccacatcaggaaacccacggagacagggtgattttgcatctcctggaaaatgagtgggacactcctggccccctggctctccccaccacccctacatatgtgctcagaaggagcccaatgcattgaatggttccactgtcgagccctctaagacctggtttgcctcctaaacctccagtgtgctcctctgataggtgtttaagctacaggtgagactttgaagtccagagaagacagacacacctgaaaaccggtccccatttgggccgaaccttaaaaagcccattgtcccagagtcctagtgcccacggagctgtctgtgtgtcattgtcctgcccaggtcatcaggtgtgggctgaggacaggcccagggcataccctcccataaaggggttttcttctttcctcatttccttctatttgaggacttgtttggggtttagatttgaattttgcttcccctggacacctgggcatcagcatagtgccaccccctgctcctgacctggccagtacttcacagtgctcttgaggtgcggagccagctgacaaataggccagagggtgtgggccagcagcaggttaaagggggaaacccagcagaccccaccccagggcactctcccctactgccttcagccttctggtgcctgttgaacccccaagctgtgccctaagcagacccctgggcaggaccctagccctaagcacacaccaccctgtgctgcaaccatgagaaagtgcccatgccttgggctgtccagaagctcaggagtgatcagagggcaccttctctaagaggggaggttcctggctaagggaccatggagtggtgggcagcctgaaggggctgggcacagcccagctttgcgcacactcgcctggtcccatcattccctaccttggcttaaacctaggaggcctggattttgcagttagcctaatcttccagccccaggcgaggctccctggtgaggaatcagctgagccatcaccacgttttggggcctgtatcctcttccctgagccgctgacgcatccagggctctagtctgcacataaattccctctcagctgggcttgtaaaatcccttctcaccccagttagcaaaaatcaagggaagagcctagtttttttaaaagattcacttaatatccaccccccacctcaagcccaagaccgcccattcaaaaaacaagtatacggcacagcaagggagacccactagattttgagcttacagagacataagggtacttaaaaccctgccggcctagtatttgagcttagaacttttatttaaaatgagccggcagtctctagacacacaccgatcctcaggctagtccgagccctgaggtcaagaatgaaatgcacttcccttctcattttctcaaatagatcttttccagccgtctcacagttgaccccaactttggaactcagatcataggatctcccagaggtttcaggtgttcctaagaagcttctaaaggaagttttggaagaaagactaataggtgtaaacatataaacatatatattatatatagctatatatatttaaagagatctctacatatatatatatatataaatacaactactgtactctctgcatctgtacaaagtatgagttaaactgcccaggtagtgtgagatacgtaatgcatgaatgtgaatatcctgaaatctgccttcttagcaacgtgccgcgtgtactggagagaggacagttgctcctgggagttctctcaatgggcaaatgtacaagttgatgccgtcttatccaccaacaagccattaaggttggtttcctgctgagacttttgtaccggaagcgagaccggcagcactgggggtgtccatatgccacttatgaggaagaaagcaccatgacttttttattttcaataaaaatatagagatgtc

SEQ ID NO: 23765 - DNA, 3649 bp, Homo sapiens
  source 1..3649: mol_type = unassigned DNA
ctcctgacagttcgccccaggagcgggcgccgctggccgagatgctcctccgggacttggtgctgcgccgtggctgctgctggtcctcgctgctgctgcactgcgcgctccacccgctctggggcttcgtgcaggtgacgcatggtgagccccagaagtcctgctccaaagtgactgacagctgccgacacgtctgccagtgccggccccctcccccgctgcccccgccgcccccacccccgccacctcccagactcctctccgccccagctcccaactctacctcttgccccactgaggaaagctggtggtcggggctggtgatcatcattgccgtatgctgtgcctccctggtgtttctgactgtgcttgtcatcatttgctacaaagccataaaaaggaaaccactgagaaaagacgaaaatggcaccagcgttgctgagtatcccatgagtgcttcgcagagcaacaaaggagtagacgtgaacaacgcagtggtgtgagtctgcaggccctggacccgctggccagagggacaccttggtggcactggtggacatgggaaagcaggtggacatgagctaaccctgagcttgtccaggacttcattgcctcacaggccctgagcctcccgaaggagaaaccattgtcttcccaggcttgcccctggtcagcctgcgggcccaggcagctcggacaccaggctgagcccggcgcagcacctgggcagtgtccccaccccaggccctccacatcctcctccctgtctggtgtctggtctgtcgactgcccccagctgctgtctaaagcatgcgcactggcgaagccagagggatctgtctttctactgtggcagggaggcttccccctttagccaaaagaaagatggtccggagcccactccctgccggaaaacctctcctcctcccaggaagcctgcctgctccactgttcacattctcaacagaagccatcggcacagccagcagacagacgtcccctttcaaaggtgcttcccacacatctgttcatcgccccatctgcagttgttgtcaatcttcagggcctgccttctccctcctatccccactgacaccctacaccctaggctcctgactgcctgccatggagggctgtgagtccagcctgcagaatcccctcctgagcagacacaggagtgcgtttacactcgggggcagtgtctggccttccgggggcaaaacgactcactgaacccgcagcccagggccactgggcaagggcagaggccactgcacctgtcctcagactcatccccacacttgaccccataggaactgatgcatctgtgtgagccaggccctgccttagtcagcagaggccactacttgtgccaaatccactgtgggcctgctgtaccaggctgatgctggccaggcgctggatgtcccccacagtcccctgaggcctgactgttgtactcaggccctctcccagagtcctccatcatctccccattttaccctaccccgagccccagtcgccaagaaggaggtgttgttcttccagggtcttcctttcaatgtctgtttccacagtctcatgctatagaagcgctgagccctccagcgtggttggaggatcaagggatgaaatgggacaggaggagaggggtcctccaggctggtgacccctgccctgttggcctgtctcccaagtggcagccttccctgtgggccacatcaggaaacccacggagacagggtgattttgcatctcctggaaaatgagtgggacactcctggccccctggctctccccaccacccctacatatgtgctcagaaggagcccaatgcattgaatggttccactgtcgagccctctaagacctggtttgcctcctaaacctccagtgtgctcctctgataggtgtttaagctacaggtgagactttgaagtccagagaagacagacacacctgaaaaccggtccccatttgggccgaaccttaaaaagcccattgtcccagagtcctagtgcccacggagctgtctgtgtgtcattgtcctgcccaggtcatcaggtgtgggctgaggacaggcccagggcataccctcccataaaggggttttcttctttcctcatttccttctatttgaggacttgtttggggtttagatttgaattttgcttcccctggacacctgggcatcagcatagtgccaccccctgctcctgacctggccagtacttcacagtgctcttgaggtgcggagccagctgacaaataggccagagggtgtgggccagcagcaggttaaagggggaaacccagcagaccccaccccagggcactctcccctactgccttcagccttctggtgcctgttgaacccccaagctgtgccctaagcagacccctgggcaggaccctagccctaagcacacaccaccctgtgctgcaaccatgagaaagtgcccatgccttgggctgtccagaagctcaggagtgatcagagggcaccttctctaagaggggaggttcctggctaagggaccatggagtggtgggcagcctgaaggggctgggcacagcccagctttgcgcacactcgcctggtcccatcattccctaccttggcttaaacctaggaggcctggattttgcagttagcctaatcttccagccccaggcgaggctccctggtgaggaatcagctgagccatcaccacgttttggggcctgtatcctcttccctgagccgctgacgcatccagggctctagtctgcacataaattccctctcagctgggcttgtaaaatcccttctcaccccagttagcaaaaatcaagggaagagcctagtttttttaaaagattcacttaatatccaccccccacctcaagcccaagaccgcccattcaaaaaacaagtatacggcacagcaagggagacccactagattttgagcttacagagacataagggtacttaaaaccctgccggcctagtatttgagcttagaacttttatttaaaatgagccggcagtctctagacacacaccgatcctcaggctagtccgagccctgaggtcaagaatgaaatgcacttcccttctcattttctcaaatagatcttttccagccgtctcacagttgaccccaactttggaactcagatcataggatctcccagaggtttcaggtgttcctaagaagcttctaaaggaagttttggaagaaagactaataggtgtaaacatataaacatatatattatatatagctatatatatttaaagagatctctacatatatatatatatataaatacaactactgtactctctgcatctgtacaaagtatgagttaaactgcccaggtagtgtgagatacgtaatgcatgaatgtgaatatcctgaaatctgccttcttagcaacgtgccgcgtgtactggagagaggacagttgctcctgggagttctctcaatgggcaaatgtacaagttgatgccgtcttatccaccaacaagccattaaggttggtttcctgctgagacttttgtaccggaagcgagaccggcagcactgggggtgtccatatgccacttatgaggaagaaagcaccatgacttttttattttcaataaaaatatagagatgtc

SEQ ID NO: 23766 - DNA, 2556 bp, Homo sapiens
  source 1..2556: mol_type = unassigned DNA
cggaaccggaagatggtgtgagccacgggctgccgggggcctggggctcggcgtcggtccccgggggatgtggagagctggcagcatgtcggccgagctgggagtcgggtgcgcattgcgggcggtgaacgagcgcgtgcagcaggctgtggcgcggcggccgcgggatctcccagccatccagccccggctagtggcggtcagcaaaaccaaacctgcagacatggtgatcgaggcctatggacatgggcagcgcacttttggcgagaactacgttcaggaactgctagaaaaagcatcaaatcccaaaattctgtctttgtgtcctgagatcaaatggcacttcattggccacctacagaaacaaaatgtcaacaaattgatggctgtccccaatctcttcatgctggaaacagtggattctgtgaagttggcagacaaagtgaacagttcctggcagagaaaaggttctcctgaaaggttaaaggttatggtccagattaacaccagcggagaagagagtaaacatggccttccaccttcagagaccatagccatcgtggagcacataaacgccaagtgtcctaacctggagtttgtggggctgatgaccataggaagctttgggcatgatcttagtcaaggaccaaatccagacttccagctgttattgtccctccgggaggagctgtgtaaaaagctgaacatccctgctgaccaggttgagctgagcatgggcatgtccgcggatttccagcatgcggttgaagtaggatctacaaatgtccgaataggaagcacgatttttggagagcgggattactcaaagaaacccaccccggacaagtgcgcagcagacgtgaaggccccgctggaggtggcacaggagcactgagccagggaatactgagagcactaactatgcactaacctagattttcatttcgatattccctgtgtcccagcgcagtcctgctctcctgtgacctgtggagagcactaatgatcacgtgtgttgatggaaaccatctgtgcttagtctctgacataggaagcttgcttcaggcaatggctttggattgagtttgagaaattcaaacatttctgcagaacagataccaaatcaatagctaggaatcatgttcaatattgaattctgcccaggagcatgaactgatccatgaatgccttttccaggttaaaatttggtcactgatgcctataatcgtggaagtcagagggattcccctttttcatctcattttaataggaaaattccttatggttaacatctccctacaaactcctactacgtcgtctaaattgctgctctggaataaggtgatttctgcccccagattcttccctagccggtagatacgtgaagatattcccaactgtggaatggcagtgtaggtagcttcaggaaatggctcaggttaattctcaaaacacaaattgttgctggccaggcatggtgactcatgcctgtaatcccagcaatttgggagacagaggcggaaggatcacctgagcctaggagttcaagaccagcctcagcaacagcaggagccccaccccccgtctctacaaaaaaatttaaaaattaactgggcatggtggctgaggtggaagaatggaagaatcacttgagcccaggagtttgaggctgcagtgagctatgattgcaccactgtactcctgccttaaaaaaaaaaaaaaaatcccaatagtccatgaaggctttgatctcttgggaagttcttcatagatgctgtcacatttcttaaagcaaccttttaatatgcagataataccccccaacttttttagagacagcctgtctcttaaaaaaaaaattaatttggtagtgagagcttgtgtcactgccactctgttttatccctgaaattaaaggataacataaggaggacttgggcctttctgacatcatcctgaagagacaggactttgcgtttttcctctgggacctacagtgatgagaatttaatgattatctcctccactataatcctctttagggtgattttttaaatcaaaacccagtgaatctcattactcctaagaaacgaaagattccttcaaagccttttcaggcacatggtttcaacaaagcctggctttgacattccttgtcctgaggagcactttccaggcatagttacagcttccccactgtatttacaagccagaattgtgcaactcttctggatcattaataaagtagcaagatcctcaaaaaacccaaaaacaccattctctaatagtcatgacaaatggcttcagtatggcttgttttttattttccagatggctttttctcttattttttgaagccccagtctttgattttacaggtaactttcaaaacatcatgatgctgccaaatgtacttttgtaaacttaaacattatgattcctgtattatttcagtgagagctacagtgtgatatttcagagtctattaaataaaaatgtgagtttgaattacaccatctgtgccaattacaaagcaattaaaagatttatttttta

SEQ ID NO: 23767 - DNA, 5747 bp, Homo sapiens
  source 1..5747: mol_type = unassigned DNA
ctgggagatcagatcttctagctggctctctgctgccacagctccgccgaagggagggggtggaagaggaggactaaactcagagctgagaggagaggcaggtgtgtgcaggtgcatcacctggatcatgaggtcacccctctgctggctcctcccacttctcatcttggcctcagtggcccaaggccagccaacaagacgaccaagacccgggactgggcccgggcgcagacccaggcccaggcccaggcccacacccagctttcctcagcctgatgaaccagcagagccaacagacctgcctcctcccctccctccaggccctccatctatcttccctgactgtccccgcgaatgctactgcccccctgatttcccatctgccctctactgtgatagccgcaacctgcgaaaggtccctgtcatcccgccccgcatccattacctctatctccagaacaacttcatcactgagctcccggtggagtccttccagaatgccacaggcctgcgatggattaacctggacaacaaccgaatccgcaagatagaccagagggtgctggagaaactgcccggcctggtgttcctctacatggagaagaaccagttggaagaggtcccctcggccctgccccggaacctggagcagctgaggctgagccagaaccacatctccagaatcccgcctggtgtcttcagcaagctggagaacctgctgctcctggatctccagcacaacaggctgagcgacggcgtcttcaagcccgacaccttccatggcctcaagaacctcatgcagctcaacctggcccacaacatcctgagaaagatgccgcccagggtccccaccgccattcaccagctctacctggacagtaacaagattgagaccatccctaacggatacttcaagagctttcccaatcttgccttcattcggcttaactacaacaagctgacagacaggggactccccaagaactcctttaatatctccaacctgcttgtgctccacctgtcccacaacaggatcagcagtgtgcccgccatcaacaacaggctggaacacctgtacctcaacaacaatagcatcgagaaaatcaacggaacccagatttgccccaacgacctagtggcgttccatgacttctcctcggacctggagaacgtgccacacctgcgctacctgcggctggatggaaactacttgaagccgcccatcccgctggacctcatgatgtgcttccgcctcctgcagtccgtggtcatctaggccctactccgccaccggatctgctctgaccgcacttgaaggctggggcccaggcacctgtgccggccattcgttttctctctctccctttctttctcccagctttgcctcccttatcccaccctcgaggcagggaaaagccatctattcttctgcagcctcaggagcgagacttcaaggactcagtttggttccacccagttgaaagacacccagtgcacacccaaactcctggccttctgtggtttccctttgctccagaaacacagatgtgtctaaagacttggtgtccccttctctctcctcccccacccgccactcctgggtacatctgggccgtggactatctgatcttggtcctggccgagcaaacagcccggaggtaaggttcagaaagtccccctggggactcctccatcttcggcagctctggctcaaagaggccgagaaacccagttctcctgggccaaggatcccttctggcaaagctgctgctccgccgcttggttccccggcaccagacatcgccctggccctgctggcccgggtatcgggaaggaggagcgagggaatgacggaggtagggtgcagggtcagggctcccgcaggggcctgcatctggccagcaggacacagggatgcgcagggcgcccccttctgttccagggtgaacatagcacacgccctcctggctgggcctcaggaggaacagccaaggagaagaatggcccaaggaactaggaagcagccatgggagaggggaagggttcaagcccgggatgggcccgcgtgacgtcgatgggtcctgcggcccccttgcccaacctcgggtttagggaggagggttcacagtgtttttgtgggggcgggggaaggaagaggcagccccgcccccgccatctgttctccatcagtgtgcgcggcccagccatttccaccctcgggaggcggctcctgagaaacagggaggaaggggcggagcacctggacgtctcccagaagcccctccacgtttgaaaatgcgcctcctcctcggagacagacgcatcggtgccacctagtggctggtgggagtaacagctggtcccagtcttgcgcctggccctcttcctggggtgattttcctcggtggaggaggcccgtggggtcccaacacggaagagccatgggccgtgtgcatggtgtcgctctcctctagggtctagcgggcacaaacgtccccaggctgggctcattcccatcgtgagtgagcccaggtgaggacatagtcggctcccgtttgttgtaggcccttcccaggtgccttctcagctccctcatctgtaaaccgaggaggtggataagatgctcccggccgggcgcggtggctcacgcctgtaatcccagcactttgggaggccgaggcgggcagattattgcctgagctcaggagttcgaaaccaccctgggcaacatggtgaaacccccgtctctactaaaatacaaaaaaattagccaggcatagtggcgcgcgcctataatcccagctactgggaggctgaggcgggagaatcgcttgagccggggaggcggaggttgcagtgaggcgagattgtgccactgcactccagcttgggcgacagagtgagactccgtctcaaaaaagaaaaaaaaaagatgctcctctgaggtccctccggcgctcatgttccgagtctgcagctccacactttaaatcatactcgaatgcaggacaagtcctaaatatttgccccttcccttgcagtaatttattttctgtatggactgtccctcccccagaggcttccccaccctccattgcctggcccaggtgagcagcttggcaggtctccaagtggaacccggtccagacagggctgcctcgacttcacctttccccctaacttcctccaagggatgctgccccttctcagccccctgcgtgtgtatattggtgggaggcatagaggatggatgttctagaaatgagtaagacacagtgcccacccccaagttaggatgaaaaaagttccagaggtttttaagaaattggattaagctgggtccctaacttcaagaaattcccattatgctccttctcacctttcttttttgctaattatggaaaatagggcccatttcatcatagcctccttcccccgtgctccactacaatcgccgcattctttctagctgcagctggtttcttcaaggctcctgcttaaagtccacacgttattatggccgaaagcaacctggtgcttcggcctggataagagccccttctgcatcttattcacagcttgcagcctcagcccctttgatgaggccctcaggggagaggtcattaccttgatcctgcaaacccagactcgttgagcagcaacgcaatcaccatcatcccactgcccaatctagaatatgtctgctctcctttgctctctgcagctgtaagccagaggggattcaaggtaaataggctttacaggctcccctcctccaaacacacacagaatgggctggtttctttcaagtttaaaaaaagcccccttctccatgcacaagttcattccctccatgctgtcgtcatcgacatatacaggtgtgtacgtaggtgtatgtgtgtactctgcacgtatatctcttctgtcttgaagaccctgttaactttgtgaaataacttccacatttcaacacacttcacagtacaggaaataaagtaatatgaaaaacaccctgcgtgaactcaacggtgtgaacaggtcaagaataacacttcaaagtcatcttgccagccaggcgtggtggatcacgcctgtaatcccagcactctgggaggccaaagcgggcagatcacctgaggtcaggagttcaagaccagcctggccaacatagtgaaaccccttgtttactcaaaatacaaaaattggctgggtgcggtggtacatgcctgtagtcccagctacttgggaggctgaggcaggagaattgcttgaaccctggaggcagaagttgcagtgagccgagatcgcaccactgcactccagcctaggagacaaaacgagacttcatttaaaaaaaataaaaataaaaataaaaataaagtcatcttgccacccaccccctaccattgagccaccatgcccagccccaaagcctcttaattgctctaacaagatgagtggggaaaagattatactcttaagaaattcctacgaaagctatccaaaagccttttctttcctcttttcttattatttttaaatagaggcagggtctcattatgttgcccaggctggtctggaactcctggcctcaagtgatcctcccaccttggcctccccagagtgctgggattacacacgtgagtcaccatgcccagccccaaagccatttcttgaagaatttctcgcaaactcacaaccctcatgaaaaattaatcctcagttccacgagactgcccacccacagacaaaaaaatatatatattcctaaagtcggaccagaaatctgacagctgcctttgaaacccaaagcctcgggttctttcaagctacatgtactaaattgtcgaaggtctcccaggagctctgtactgaggcagacacagaaagacacaaaacggtcgtctttcctgcccaagtaaagcttacagactaactggggagatgtagtgtgcatacaaaacagtaaaagagccatctcaaggacagagagcatagaccaagtcatctggaatggtctacatgccatgcggaagtccaccgaagggttagaacagggtgtcccagactctctcttctgagggaaggttggttgcaaaagtgggattcatgaccctcccaggctacaccatcttctttagaatgagaactgccaggtgacgccctcgctgctcctacctggctactaaacatcgacttcggttcacttcacggatgttcagtggatatcggtcacatgccaggtccccagctacgcattcaaggatggataatatacatagcagcacatccttgaggaactcataccttggtaaagggaaagaaatccatgaatggatacctctgtgtcctaagtgtttgtaataatgctgtgtgtcaggcctctgagcccaagctaagccatcatatcccctgtgacctgcatgtgcacatccagacggctggttcctaccttaactgatgatattccaccacaaaagaagtgaaaatggctggtccctgccttaactgatgacattaccttgtgaaattccttctcctggctcatcctggctcaaaagctcccccactgaacaccttgcaacccccacccctggccaccagagaacaaccccctttgactgtaattttccattacctacccacatcttataaaatggccccatccctatctcccttcgctgactcttttcggactcagcccgcctgcacccaggtgaaataaacagccttgttgctcacacaaa

SEQ ID NO: 23768 - DNA, 1710 bp, Homo sapiens
  source 1..1710: mol_type = unassigned DNA
agaaagcctgttgcgtggaagataaggcggcgcgggaagtggacacaggctgcgagccttgggcagaatggatacctgaggaaaggtatggtttctctccggctcagatctaactggactctcgctcctgctggctggacatggaggatttggaggaagatgtaaggtttattgtggatgagaccttggactttggggggctgtcaccatctgacagccgtgaggaggaagacataacagtgttggtgactccagagaaaccacttcgacggggcctctcccaccgaagtgacccaaatgcagtggcacctgccccccagggtgtgaggctcagcctaggccccctcagtccagagaagctggaggagatcctcgatgaggccaaccggctggccgctcagctggagcagtgtgccctgcaggatcgggagagcgcaggcgagggcctggggcctcgccgagtgaagcccagtcctcggcgggagacctttgtgctgaaggatagtcctgtccgagacctgctgcccactgtgaactctttgacgcggagcaccccctccccaagcagcctgacgcctcgactccggagtaatgataggaaggggtcagtcagggctctccgggctacatctggaaagaggccctccaacatgaagagggagtcacccacttgcaatctgttccctgcatccaaaagcccagcatcttctcctcttacccgatcgactcccccagtccgggggagagccgggcccagtgggagagcagcagccagcccacccacccccatcagatccgtcctggccccacagccttctaccagcaactctcaacgcctgccccggccgcagggagcagctgctaaatcttccagtcaactgcccattccctcggccatccccaggcctgccagccgaatgccactcaccagccggagtgtgccacctggcagaggtgccctacctccggattctctgtcaactcgaaaagggcttccaagaccaagcactgcaggacacagagtgcgggaaagtggacacaaggttcctgtttcccagcgactaaatcttcctgtcatgggtgccactcgcagcaatctgcagccccccaggaaagtggcagtcccaggacctaccaggtaaagagatcaggacagcaagcaagacttcagtagcaaaccactacagtcagtacctggactcgcctctacccagcagaccctgactccagcagattctggcccagggacaggaggaagagatgccaccagggctggtctcccaggagtagagaccatgggaaatggggtggattaggattgagctggagaagacttaaactctctgggttgaaagaagattaggggaaaagaggtcaccttccagcagtgaaatgaacaaatagaagatgagaagtacaggcaagtggtttgtctttatccacccccactgttgtggtcagccccagagaattttatcttcttccttggcattggttcactggacatttccacgtgagcggcctccgtagctaacctccctgccctctgaggagccatcttcctgaatcgcattctctactggactctggcctgcttggagaggtggcagcaggcacctggtcttcagaaattgtttcctgtgaattctgtgactcctaataggccagtttgtgataagcttactctatgagtcttcatttttctaaaat

SEQ ID NO: 23769 - DNA, 1584 bp, Homo sapiens
  source 1..1584: mol_type = unassigned DNA
ctgttgcgtggaagataaggcggcgcgggaagtggacacagggtgggctggagatctaactggactctcgctcctgctggctggacatggaggatttggaggaagatgtaaggtttattgtggatgagaccttggactttggggggctgtcaccatctgacagccgtgaggaggaagacataacagtgttggtgactccagagaaaccacttcgacggggcctctcccaccgaagtgacccaaatgcagtggcacctgccccccagggtgtgaggctcagcctaggccccctcagtccagagaagctggaggagatcctcgatgaggccaaccggctggccgctcagctggagcagtgtgccctgcaggatcgggagagcgcaggcgagggcctggggcctcgccgagtgaagcccagtcctcggcgggagacctttgtgctgaaggatagtcctgtccgagacctgctgcccactgtgaactctttgacgcggagcaccccctccccaagcagcctgacgcctcgactccggagtaatgataggaaggggtcagtcagggctctccgggctacatctggaaagaggccctccaacatgaagagggagtcacccacttgcaatctgttccctgcatccaaaagcccagcatcttctcctcttacccgatcgactcccccagtccgggggagagccgggcccagtgggagagcagcagccagtgaggagaccagagcagccaagttgcgggcctgccagccgaatgccactcaccagccggagtgtgccacctggcagaggtgccctacctccggattctctgtcaactcgaaaagggcttccaagaccaagcactgcaggacacagagtgcgggaaagtggacacaaggttcctgtttcccagcgactaaatcttcctgtcatgggtgccactcgcagcaatctgcagccccccaggaaagtggcagtcccaggacctaccaggtaaagagatcaggacagcaagcaagacttcagtagcaaaccactacagtcagtacctggactcgcctctacccagcagaccctgactccagcagattctggcccagggacaggaggaagagatgccaccagggctggtctcccaggagtagagaccatgggaaatggggtggattaggattgagctggagaagacttaaactctctgggttgaaagaagattaggggaaaagaggtcaccttccagcagtgaaatgaacaaatagaagatgagaagtacaggcaagtggtttgtctttatccacccccactgttgtggtcagccccagagaattttatcttcttccttggcattggttcactggacatttccacgtgagcggcctccgtagctaacctccctgccctctgaggagccatcttcctgaatcgcattctctactggactctggcctgcttggagaggtggcagcaggcacctggtcttcagaaattgtttcctgtgaattctgtgactcctaataggccagtttgtgataagcttactctatgagtcttcatttttctaaaataaagtgaatgtatttttatattctctgta

SEQ ID NO: 23770 - DNA, 1717 bp, Homo sapiens
  source 1..1717: mol_type = unassigned DNA
ctgattcccgggactaggttgcgggagaaagcctgttgcgtggaagataaggcggcgcgggaagtggacacagggtgggctggagatctaactggactctcgctcctgctggctggacatggaggatttggaggaagatgtaaggtttattgtggatgagaccttggactttggggggctgtcaccatctgacagccgtgaggaggaagacataacagtgttggtgactccagagaaaccacttcgacggggcctctcccaccgaagtgacccaaatgcagtggcacctgccccccagggtgtgaggctcagcctaggccccctcagtccagagaagctggaggagatcctcgatgaggccaaccggctggccgctcagctggagcagtgtgccctgcaggatcgggagagcgcaggcgagggcctggggcctcgccgagtgaagcccagtcctcggcgggagacctttgtgctgaaggatagtcctgtccgagacctgctgcccactgtgaactctttgacgcggagcaccccctccccaagcagcctgacgcctcgactccggagtaatgataggaaggggtcagtcagggctctccgggctacatctggaaagaggccctccaacatgaagagggagtcacccacttgcaatctgttccctgcatccaaaagcccagcatcttctcctcttacccgatcgactcccccagtccgggggagagccgggcccagtgggagagcagcagccagcccacccacccccatcagatccgtcctggccccacagccttctaccagcaactctcaacgcctgccccggccgcagggagcagctgctaaatcttccagtcaactgcccattccctcggccatccccaggcctgccagccgaatgccactcaccagccggagtgtgccacctggcagaggtgccctacctccggattctctgtcaactcgaaaagggcttccaagaccaagcactgcaggacacagagtgcgggaaagtggacacaaggttcctgtttcccagcgactaaatcttcctgtcatgggtgccactcgcagcaatctgcagccccccaggaaagtggcagtcccaggacctaccaggtaaagagatcaggacagcaagcaagacttcagtagcaaaccactacagtcagtacctggactcgcctctacccagcagaccctgactccagcagattctggcccagggacaggaggaagagatgccaccagggctggtctcccaggagtagagaccatgggaaatggggtggattaggattgagctggagaagacttaaactctctgggttgaaagaagattaggggaaaagaggtcaccttccagcagtgaaatgaacaaatagaagatgagaagtacaggcaagtggtttgtctttatccacccccactgttgtggtcagccccagagaattttatcttcttccttggcattggttcactggacatttccacgtgagcggcctccgtagctaacctccctgccctctgaggagccatcttcctgaatcgcattctctactggactctggcctgcttggagaggtggcagcaggcacctggtcttcagaaattgtttcctgtgaattctgtgactcctaataggccagtttgtgataagcttactctatgagtcttcatttttctaaaataaagtgaatgtatttttatattctctgta

SEQ ID NO: 23771 - DNA, 1742 bp, Homo sapiens
  source 1..1742: mol_type = unassigned DNA
aggagccccgccccctcggagctgattcccgggactaggttgcgggagaaagcctgttgcgtggaagataaggcggcgcgggaagtggacacagggtgggctggagctcagatctaactggactctcgctcctgctggctggacatggaggatttggaggaagatgtaaggtttattgtggatgagaccttggactttggggggctgtcaccatctgacagccgtgaggaggaagacataacagtgttggtgactccagagaaaccacttcgacggggcctctcccaccgaagtgacccaaatgcagtggcacctgccccccagggtgtgaggctcagcctaggccccctcagtccagagaagctggaggagatcctcgatgaggccaaccggctggccgctcagctggagcagtgtgccctgcaggatcgggagagcgcaggcgagggcctggggcctcgccgagtgaagcccagtcctcggcgggagacctttgtgctgaaggatagtcctgtccgagacctgctgcccactgtgaactctttgacgcggagcaccccctccccaagcagcctgacgcctcgactccggagtaatgataggaaggggtcagtcagggctctccgggctacatctggaaagaggccctccaacatgaagagggagtcacccacttgcaatctgttccctgcatccaaaagcccagcatcttctcctcttacccgatcgactcccccagtccgggggagagccgggcccagtgggagagcagcagccagcccacccacccccatcagatccgtcctggccccacagccttctaccagcaactctcaacgcctgccccggccgcagggagcagctgctaaatcttccagtcaactgcccattccctcggccatccccaggcctgccagccgaatgccactcaccagccggagtgtgccacctggcagaggtgccctacctccggattctctgtcaactcgaaaagggcttccaagaccaagcactgcaggacacagagtgcgggaaagtggacacaaggttcctgtttcccagcgactaaatcttcctgtcatgggtgccactcgcagcaatctgcagccccccaggaaagtggcagtcccaggacctaccaggtaaagagatcaggacagcaagcaagacttcagtagcaaaccactacagtcagtacctggactcgcctctacccagcagaccctgactccagcagattctggcccagggacaggaggaagagatgccaccagggctggtctcccaggagtagagaccatgggaaatggggtggattaggattgagctggagaagacttaaactctctgggttgaaagaagattaggggaaaagaggtcaccttccagcagtgaaatgaacaaatagaagatgagaagtacaggcaagtggtttgtctttatccacccccactgttgtggtcagccccagagaattttatcttcttccttggcattggttcactggacatttccacgtgagcggcctccgtagctaacctccctgccctctgaggagccatcttcctgaatcgcattctctactggactctggcctgcttggagaggtggcagcaggcacctggtcttcagaaattgtttcctgtgaattctgtgactcctaataggccagtttgtgataagcttactctatgagtcttcatttttctaaaataaagtgaatgtatttttatattctctgt

SEQ ID NO: 23772 - DNA, 1730 bp, Homo sapiens
  source 1..1730: mol_type = unassigned DNA
gggagaaagcctgttgcgtggaagataaggcggcgcgggaagtggacacagggtgggctggaggtgtgcttcgcgtgtgatgccaggggagtggaaagatctaactggactctcgctcctgctggctggacatggaggatttggaggaagatgtaaggtttattgtggatgagaccttggactttggggggctgtcaccatctgacagccgtgaggaggaagacataacagtgttggtgactccagagaaaccacttcgacggggcctctcccaccgaagtgacccaaatgcagtggcacctgccccccagggtgtgaggctcagcctaggccccctcagtccagagaagctggaggagatcctcgatgaggccaaccggctggccgctcagctggagcagtgtgccctgcaggatcgggagagcgcaggcgagggcctggggcctcgccgagtgaagcccagtcctcggcgggagacctttgtgctgaaggatagtcctgtccgagacctgctgcccactgtgaactctttgacgcggagcaccccctccccaagcagcctgacgcctcgactccggagtaatgataggaaggggtcagtcagggctctccgggctacatctggaaagaggccctccaacatgaagagggagtcacccacttgcaatctgttccctgcatccaaaagcccagcatcttctcctcttacccgatcgactcccccagtccgggggagagccgggcccagtgggagagcagcagccagcccacccacccccatcagatccgtcctggccccacagccttctaccagcaactctcaacgcctgccccggccgcagggagcagctgctaaatcttccagtcaactgcccattccctcggccatccccaggcctgccagccgaatgccactcaccagccggagtgtgccacctggcagaggtgccctacctccggattctctgtcaactcgaaaagggcttccaagaccaagcactgcaggacacagagtgcgggaaagtggacacaaggttcctgtttcccagcgactaaatcttcctgtcatgggtgccactcgcagcaatctgcagccccccaggaaagtggcagtcccaggacctaccaggtaaagagatcaggacagcaagcaagacttcagtagcaaaccactacagtcagtacctggactcgcctctacccagcagaccctgactccagcagattctggcccagggacaggaggaagagatgccaccagggctggtctcccaggagtagagaccatgggaaatggggtggattaggattgagctggagaagacttaaactctctgggttgaaagaagattaggggaaaagaggtcaccttccagcagtgaaatgaacaaatagaagatgagaagtacaggcaagtggtttgtctttatccacccccactgttgtggtcagccccagagaattttatcttcttccttggcattggttcactggacatttccacgtgagcggcctccgtagctaacctccctgccctctgaggagccatcttcctgaatcgcattctctactggactctggcctgcttggagaggtggcagcaggcacctggtcttcagaaattgtttcctgtgaattctgtgactcctaataggccagtttgtgataagcttactctatgagtcttcatttttctaaaataaagtgaatgtatttttatattctctgta

SEQ ID NO: 23773 - DNA, 1088 bp, Homo sapiens
  source 1..1088: mol_type = unassigned DNA
agaaagcctgttgcgtggaagataaggcggcgcgggaagtggacacagggtgggctggaggtgtgcttcgcgtgtgatgccaggggagtggaaaggtggcttggggagtgcagaaccctgaggatagtggcggggaggaagatggggcgtgcaggccgcccccagtgaggagaggccaggatgcagggcggctccagggcaatctgggcagttgggggagccctccgtatcgttcccggaggtagcaggagtagctgtgcgggaggtgccactcctgggcgcttgctttgcctccagcatgacccccgaccctggcttgcaccctgaatctagctgcgagccttgggcagaatggatacctgaggaaaggtatggtttctctccggctcagatctaactggactctcgctcctgctggctggacatggaggatttggaggaagatgtaaggtttattgtggatgagaccttggactttggggggctgtcaccatctgacagccgtgaggaggaagacataacagtgttggtgactccagagaaaccacttcgacggggcctctcccaccgaagtgacccaaatgcagtggcacctgccccccagggtgtgaggctcagcctaggccccctcagtccagagaagctggaggagatcctcgatgaggccaaccggctggccgctcagctggagcagtgtgccctgcaggatcgggagagcgcaggcgagggcctggggcctcgccgagtgaagcccagtcctcggcgggagacctttgtgctgaaggatagtcctgtccgagacctgctgcccactgtgaactctttgacgcggagcaccccctccccaagcagcctgacgcctcgactccggagtaatgataggaaggggtcagtcagggctctccgggctacatctggaaagaggccctccaacatgaagagggagtcacccacttgcaatctgttccctgcatccaaaagcccagcatcttctcctcttacccgatcgactcccccagtccgggggagagccgggcccagtgggagagcagcagccagtgaggagaccagagcagccaagttgcggg

SEQ ID NO: 23774 - DNA, 835 bp, Homo sapiens
  source 1..835: mol_type = unassigned DNA
agaaagcctgttgcgtggaagataaggcggcgcgggaagtggacacaggctgcgagccttgggcagaatggatacctgaggaaaggtatggtttctctccggctcagatctaactggactctcgctcctgctggctggacatggaggatttggaggaagatgtaaggtttattgtggatgagaccttggactttggggggctgtcaccatctgacagccgtgaggaggaagacataacagtgttggtgactccagagaaaccacttcgacggggcctctcccaccgaagtgacccaaatgcagtggcacctgccccccagggtgtgaggctcagcctaggccccctcagtccagagaagctggaggagatcctcgatgaggccaaccggctggccgctcagctggagcagtgtgccctgcaggatcgggagagcgcaggcgagggcctggggcctcgccgagtgaagcccagtcctcggcgggagacctttgtgctgaaggatagtcctgtccgagacctgctgcccactgtgaactctttgacgcggagcaccccctccccaagcagcctgacgcctcgactccggagtaatgataggaaggggtcagtcagggctctccgggctacatctggaaagaggccctccaacatgaagagggagtcacccacttgcaatctgttccctgcatccaaaagcccagcatcttctcctcttacccgatcgactcccccagtccgggggagagccgggcccagtgggagagcagcagccagcccacccacccccatcagatccgtcctggccccacagccttctaccagcaactctcaacg

SEQ ID NO: 23775 - DNA, 1827 bp, Homo sapiens
  source 1..1827: mol_type = unassigned DNA
aggagccccgccccctcggagctgattcccgggactaggttgcgggagaaagcctgttgcgtggaagataaggcggcgcgggaagtggacacagggtgggctggagatctaactggactctcgctcctgctggctggacatggaggatttggaggaagatgtaaggtttattgtggatgagaccttggactttggggggctgtcaccatctgacagccgtgaggaggaagacataacagtgttggtgactccagagaaaccacttcgacggggcctctcccaccgaagtgacccaaatgcagtggcacctgccccccagggtgtgaggctcagcctaggccccctcagtccagagaagctggaggagatcctcgatgaggccaaccggctggccgctcagctggagcagtgtgccctgcaggatcgggagagcgcaggcgagggcctggggcctcgccgagtgaagcccagtcctcggcgggagacctttgtgctgaaggatagtcctgtccgagacctgctgcccactgtgaactctttgacgcggagcaccccctccccaagcagcctgacgcctcgactccggagtaatgataggaaggggtcagtcagggctctccgggctacatctggaaagaggccctccaacatgaagagggagtcacccacttgcaatctgttccctgcatccaaaagcccagcatcttctcctcttacccgatcgactcccccagtccgggggagagccgggcccagtgggagagcagcagccagtgaggagaccagagcagccaagttgcgggtgagtgggagtggggagtttgtgggattgaccctgaaatttctccacccctctccaccaggcccacccacccccatcagatccgtcctggccccacagccttctaccagcaactctcaacgcctgccccggccgcagggagcagctgctaaatcttccagtcaactgcccattccctcggccatccccaggcctgccagccgaatgccactcaccagccggagtgtgccacctggcagaggtgccctacctccggattctctgtcaactcgaaaagggcttccaagaccaagcactgcaggacacagagtgcgggaaagtggacacaaggttcctgtttcccagcgactaaatcttcctgtcatgggtgccactcgcagcaatctgcagccccccaggaaagtggcagtcccaggacctaccaggtaaagagatcaggacagcaagcaagacttcagtagcaaaccactacagtcagtacctggactcgcctctacccagcagaccctgactccagcagattctggcccagggacaggaggaagagatgccaccagggctggtctcccaggagtagagaccatgggaaatggggtggattaggattgagctggagaagacttaaactctctgggttgaaagaagattaggggaaaagaggtcaccttccagcagtgaaatgaacaaatagaagatgagaagtacaggcaagtggtttgtctttatccacccccactgttgtggtcagccccagagaattttatcttcttccttggcattggttcactggacatttccacgtgagcggcctccgtagctaacctccctgccctctgaggagccatcttcctgaatcgcattctctactggactctggcctgcttggagaggtggcagcaggcacctggtcttcagaaattgtttcctgtgaattctgtgactcctaataggccagtttgtgataagcttactctatgagtcttcatttttctaaaataaagtgaatgtatttttatattctctgt

SEQ ID NO: 23776 - DNA, 351 bp, Homo sapiens
  source 1..351: mol_type = unassigned DNA
agctgggccgggtgccagatactgggatcagccactgcagctccctgagcactctctacagagacgcggaccccagacatgaggaggctcctcctggtcaccagcctggtggttgtgctgctgtgggaggcaggtgcagtcccagcacccaaggtccctatcaagatgcaagtcaaacactggccctcagagcaggacccagagaaggcctggggcgcccgtgtggtggagcctccggagaaggacgaccagctggtggtgctgttccctgtccagaagccgaaactcttgaccaccgaggagaagccacgaggcaccaaggcctggatggagtcccgagcccgaccatga

SEQ ID NO: 23777 - DNA, 780 bp, Homo sapiens
  source 1..780: mol_type = unassigned DNA
agctgggccgggtgccagatactgggatcagccactgcagctccctgagcactctctacagagacgcggaccccagacatgaggaggctcctcctggtcaccagcctggtggttgtgctgctgtgggaggcaggtgcagtcccagcacccaaggtccctatcaagatgcaagtcaaacactggccctcagagcaggacccagagaacagggcctggggcgcccgtgtggtggagcctccggagaaggacgaccagctggtggtgctgttccctgtccagaagccgaaactcttgaccaccgaggagaagccacgaggtcagggcaggggccccatccttccaggcaccaaggcctggatggagaccgaggacaccctgggccatgtcctgagtcccgagcccgaccatgacagcctgtaccaccctccgcctgaggaggaccagggcgaggagaggccccggttgtgggtgatgccaaatcaccaggtgctcctgggaccggaggaagaccaagaccacatctaccacccccagtagggctccaggggccatcactgcccccgccctgtcccaaggcccaggctgttgggactgggaccctccctaccctgccccagctagacaaataaaccccagcaggccgggcgcggtggctcacctctgtaatcccagcacttttagaggccgaggcaggcggatcacctgaaatcaggagttccagaccagcctgggcaacatggtgaaaccccgtctctactaaaaatacaaaaattagccggg

SEQ ID NO: 23778 - DNA, 971 bp, Homo sapiens
  source 1..971: mol_type = unassigned DNA
tcttcctcagtcgtgtggcaggccctgagcaggcagctgggtgtccccgctcagatccaggcccgagtgggctgggcggctgcagagccagtcacctgagctacccagggtgggatccctggccccgacctctgtcctgacacgccccaagcggcagcaacaaagccccaattggcctgggcctgggcaggaggagctgggccgggtgccagatactgggatcagccactgcagctccctgagcactctctacagagacgcggaccccagacatgaggaggctcctcctggtcaccagcctggtggttgtgctgctgtgggaggcaggtgcagtcccagcacccaaggtccctatcaagatgcaagtcaaacactggccctcagagcaggacccagagaaggcctggggcgcccgtgtggtggagcctccggagaaggacgaccagctggtggtgctgttccctgtccagaagccgaaactcttgaccaccgaggagaagccacgaggtcagggcaggggccccatccttccaggcaccaaggcctggatggagaccgaggacaccctgggccatgtcctgagtcccgagcccgaccatgacagcctgtaccaccctccgcctgaggaggaccagggcgaggagaggccccggttgtgggtgatgccaaatcaccaggtgctcctgggaccggaggaagaccaagaccacatctaccacccccagtagggctccaggggccatcactgcccccgccctgtcccaaggcccaggctgttgggactgggaccctccctaccctgccccagctagacaaataaaccccagcaggccgggcgcggtggctcacctctgtaatcccagcacttttagaggccgaggcaggcggatcacctgaaatcaggagttccagaccagcctgggcaacatggtgaaaccccgtctctactaaaaatacaaaaattagccggg

SEQ ID NO: 23779 - DNA, 750 bp, Homo sapiens
  source 1..750: mol_type = unassigned DNA
agctgggccgggtgccagatactgggatcagccactgcagctccctgagcactctctacagagacgcggaccccagacatgaggaggctcctcctggtcaccagcctggtggttgtgctgctgtgggaggcaggtgcagtcccagcacccaaggtccctatcaagatgcaagtcaaacactggccctcagagcaggacccagagaaggcctggggcgcccgtgtggtggagcctccggagaaggacgaccagctggtggtgctgttccctgtccagaagccgaaactcttgaccaccgaggagaagccacgaggcaccaaggcctggatggagaccgaggacaccctgggccatgtcctgagtcccgagcccgaccatgacagcctgtaccaccctccgcctgaggaggaccagggcgaggagaggccccggttgtgggtgatgccaaatcaccaggtgctcctgggaccggaggaagaccaagaccacatctaccacccccagtagggctccaggggccatcactgcccccgccctgtcccaaggcccaggctgttgggactgggaccctccctaccctgccccagctagacaaataaaccccagcaggccgggcgcggtggctcacctctgtaatcccagcacttttagaggccgaggcaggcggatcacctgaaatcaggagttccagaccagcctgggcaacatggtgaaaccccgtctctactaaaaatacaaaaattagccggg

SEQ ID NO: 23780 - DNA, 6861 bp, Homo sapiens
  source 1..6861: mol_type = unassigned DNA
gggctcagccgcggagtgagcgagggagacgggaggagccgaacccggcgccatccgccgccatcctcccccgccccaccgccatcccgtcccggggagcccctaggcccgggtcccggatccccgcgcacccggccaggctctggcacgttttgggggaggtgcctgcaggacccaacatactcaatgagcttccagcgcaatgtccgatcgctcggggccgactgccaagggaaaggatggaaagaagtattcctcgctcaacctgtttgatacgtataagggcaagtccttagagatccagaaacccgctgttgcccctcgccatggcctgcagagtctcgggaaagttgccattgcccggcgtatgccacctccagccaaccttccaagcctgaaagccgagaacaaaggcaatgaccccaatgtctcactagtgccaaaagacggaacaggatgggcaagcaaacaggagcagtccgaccccaagagttccgatgcctcaaccgctcagccgccggaatcgcagccactgccggcttcacagacgcctgcctccaaccagccgaaacgacccccagcagcccccgagaacactcctttggttccaagcggggtaaagtcctgggcacaagccagcgtcacccatggagcacatggagatggtggaagggcatcaagcctactgtcacgattctctcgagaggaatttccgaccctgcaggcggctggcgaccaggacaaggctgccaaggaaagggagtctgccgaacagtcgtctgggcccggaccaagcctccgcccccaaaattctacaacttggagggacggaggtgggcgtggccctgatgagctggagggcccggactccaaacttcatcatggtcatgatccccggggtgggctacagccttcaggcccaccccagttccctccctaccgcggaatgatgccgcctttcatgtatcccccatatctcccgttccctccgccctatggaccccaggggccttaccgataccccactcctgatgggcccagccgttttccccgtgtggcgggcccccgaggctcagggccaccaatgcgcttagtagagcctgtgggtcgtccctctattctcaaagaggataatctcaaagagtttgatcagttggatcaggagaatgatgatggttgggcaggggcccatgaagaggttgactacactgaaaagctcaagttcagcgatgaggaagatgggcgagactctgatgaggagggtgctgagggccacagggattcccaatcagcttctggtgaggaacggccccctgaagcagatggcaaaaagggcaactcccccaacagcgaaccgcccactcctaagacggcctgggcagaaacctctcggcctccagagacagagccgggacctcctgccccaaagcctcccctacccccacctcaccggggccccgccgggaactggggcccccctggggactacccagatcgtgggggtcctccctgcaagcccccagcacctgaagatgaggatgaggcatggcggcagcgacgaaagcagtcgtcatctgagatttccctggcagtggagcgggcccggcgacggcgagaagaagaggagcggcgcatgcaagaagagcgccgggcagcctgtgctgagaagctcaagcgactcgatgaaaagtttggggcacctgacaagcggctcaaagcagagcctgctgccccacctgctgccccttctaccccagctccaccacctgcagtccctaaagaactccctgcacctccagctccacctccagcatcagccccaacaccagagacagaacctgaagagccagcacaggcccctcctgcccaatctactcctactccaggtgtggctgcggctcccactctggtgagtggtggtggcagtaccagtagcaccagcagtggcagcttcgaagccagcccagtggaaccacaactgccctcaaaagagggtcctgaaccaccagaagaggttcctcctcctaccacacccccagttccaaaggtggaacccaagggtgatgggattggtcccacccgccagccccctagtcagggcttgggctaccccaaatatcagaagtcgttgcctcctcgtttccagcggcagcagcaggagcagctcctgaagcagcagcagcagcaccagtggcagcagcatcaacagggctctgcccctcctaccccagtgcccccatcaccaccacagcctgtgaccctgggggctgtgccagctccacaggctccacccccgccccccaaggccctgtacccaggtgctctgggccggcccccacccatgcccccaatgaactttgatccccgatggatgatgattcctccttatgtggacccccggctcctccagggtcgtccccctctagacttctaccctcctggtgtgcatccctctggcctagttccccgagagcgttcagacagtgggggctcaagctcagagccatttgaccgtcatgcacctgctatgttacgggaacggggcactccaccggtggatccaaagttggcctgggtaggagatgtcttcaccgccacacccgctgaaccccgcccacttacctcacctctgcgccaggctgcggatgaggatgacaaggggatgaggagcgagactcctccagtacctcccccaccaccctatctggccagttatccaggctttcctgagaatggagcccctgggcccccaatctctcgctttcctctggaggaaccagggccccgtccactcccctggcccccaggcagtgatgaagtggccaagatacaaactccaccacccaagaaggagccccctaaggaggagactgcacagctgacggggccagaagcaggccgaaagcctgcccgcggagtcgggagtggaggccagggccccccaccaccacgcagagagagtcgcacagagacccgctggggccctcgtccagggagcagtcgtcgtggaatccctccagaggagccaggggccccaccccgccgggctgggcctataaagaaacctccaccacctacaaaagtagaagagctgcctcccaagcccctcgaacagggggatgaaacccccaaacccccaaagccagacccactcaagataaccaaggggaagctagggggccccaaggagaccccacccaatggaaatctttcccctgccccaaggcttcggagggactattcgtatgaaagagtgggtcctacctcttgccggggtcggggccgaggcgagtattttgccagagggaggggttttcgggggacctatgggggacgagggcggggagcccgaagccgggaattccgcagttaccgagagtttcgaggagatgatgggcgtggaggtgggacagggggaccaaaccaccctcctgctccccgaggccgcactgccagcgagacacggagcgagggttcagagtatgaggaaatccccaagcggcgccggcagcggggctcagaaacaggcagcgagacccatgagagtgatctggctccttcagacaaggaggctcccacacccaaggagggaacactcacccaggtccctctcgctcccccaccaccaggagccccaccttcaccagccccagcccgcttcactgcccggggtgggcgagtcttcactcccagaggggtgccatctcgccggggccgaggaggagggaggccccctcctcaagtttgcccaggctggagccctccagccaagtctctggctcccaagaaacctcccacaggccctttgccaccaagtaaggagcctttgaaagagaagttgatcccagggcctctgtcccctgtggcgcgcggaggcagcaatggaggtagcaatgtgggcatggaagatggggagcgaccccgaaggaggcgacatgggagggctcagcagcaggataaaccgcctcgtttccggaggctgaagcaggaacgggagaatgccgcaagggggtctgagggcaagccctccctaacccttccagcctccgctcctggacctgaggaggccctcacaacagtcacagtggccccagcacctcgccgggcagctgccaagtctcctgatctgtcaaaccagaactcagaccaagccaatgaggaatgggagactgcatcagagagcagtgacttcaccagtgagcgccgaggggacaaagaggcacccccaccagtactgctgacacccaaggctgtgggaactcctgggggaggtggaggtggagccgtaccaggtatttcagccatgtcccgcggagatctgagccagagagccaaggatttgagtaaacggagcttctcaagtcagcggccaggcatggaacggcagaatcggcgccctggcccagggggcaaggctggcagcagtggcagcagcagtggaggaggcggtgggggtcctggaggaaggaccgggccaggacgaggcgacaagaggagctggccctctcccaagaaccgaagtcgtcctccagaggagcgtcccccggggcttcccctgcctcccccacctcccagcagttctgctgtcttccgcctggaccaagttatccacagcaaccctgctggcatccaacaggctctggcccagcttagtagccgtcaagggagtgtaactgcaccagggggtcatccaaggcacaagcctgggcttccccaagcccctcagggcccctctcctaggcccccaacccgatacgagccccagagggtcaacagcggcctcagttctgacccccactttgaggagccggggccaatggtgagaggggtgggtgggactcctcgggactctgccggggttagtccctttccccctaaacgtcgggagcggcctcccagaaaaccagagctgctacaggaggaatctttgccacctcctcatagctctggattcttgggctctaagcctgagggcccaggccctcaggcagagtccagagatacaggcacagaggccctgacccctcacatctggaaccgtttacatactgccactagccgaaagagttaccggcccagctccatggagccttggatggagcccctgagtccttttgaggatgtggctggcacagaaatgagtcagtctgacagtggggtggacctgagtggggattctcaggtgtcatcaggtccctgcagccagcgaagttcccctgatggaggactcaagggggcagcagagggaccccccaagaggcctggaggctcctcacccctgaatgctgttccttgtgagggtccacctggctctgaacctcctaggagaccaccacctgccccccacgatggggacagaaaggagctgccccgggagcagcctctgccccctggccccattggcacagaacgatcacagcgtacagaccgaggcacagagcctggccccattcggccatcccatcgacctggtcccccagtccagtttggcactagtgacaaggactcagacttacgcctagtggtaggagacagcttgaaagcagagaaggagctaacagcatcagtcactgaggccattcctgtatcacgagactgggagctgcttcccagtgctgctgcctctgctgagccacaatccaagaacctggattctgggcactgtgtcccggagcccagctcctcaggccagcgcctgtatcctgaggttttctatggcagtgctgggccttccagttctcagatctctgggggagccatggactctcaattacatccaaacagtggaggcttccgccctgggacaccctcactgcacccttacagatcacagcccctatacctaccccccggcccagcccctccctcagcactgctctctgggttagctctcaagggccagtttctggatttctccacaatgcaagctacagagctggggaagttgccggctggaggagttctctaccctccaccttccttcctctactctccggctttctgccccagtcctttgcctgacacatcgttgcttcaggtacgccaggatctgccatccccttcggatttttattctactcctctgcagcctggtggccaaagtggctttctcccttcaggggctcctgcccagcagatgcttctacccatggtagactcacagctgcctgtggtgaactttggctccctgccgccagcaccacctcctgccccacctcccctttctctgttacctgtgggccctgctctgcagccccccagcctggctgtgcggcccccacctgctcctgctactcgggtgctgccttcacctgccaggcccttccccgctagcttggggcgagcagagctgcatccagtggaactaaagccgttccaggattatcaaaaactgagcagcaaccttgggggacctggatcatcacggactcccccaactggaaggtccttctctggcctcaattcccgtctcaaggccacgccttccacctacagtggagtcttccgcacccagcgcgtcgacctttaccagcaggcctccccaccagatgccctgcgctggatacctaagccttgggagcggacagggccgccacctcgagaagggccctcccgacgggcagaggagcctgggtcccgaggggacaaggagcctgggttgcccccaccccgctgagggagttcctcttgccccctacccccggggcttgtatatagattataaatatataagggggaaaggggtgggcggggaggggttctggggctggggcctcacttcccctcctcccccttcccctggtcccctgtccctggggctgtttgttaaaaaagagtaataaaaggatttaaaaaaaaaaa

SEQ ID NO: 23781 - DNA, 4303 bp, Homo sapiens
  source 1..4303: mol_type = unassigned DNA
ttcttcaggcctagttccccgagagcgttcagacagtgggggctcaagctcagagccatttgaccgtcatgcacctgctatgttacgggaacggggcactccaccggtggatccaaagttggcctgggtaggagatgtcttcaccgccacacccgctgaaccccgcccacttacctcacctctgcgccaggctgcggatgaggatgacaaggggatgaggagcgagactcctccagtacctcccccaccaccctatctggccagttatccaggctttcctgagaatggagcccctgggcccccaatctctcgctttcctctggaggaaccagggccccgtccactcccctggcccccaggcagtgatgaagtggccaagatacaaactccaccacccaagaaggagccccctaaggaggagactgcacagctgacggggccagaagcaggccgaaagcctgcccgcggagtcgggagtggaggccagggccccccaccaccacgcagagagagtcgcacagagacccgctggggccctcgtccagggagcagtcgtcgtggaatccctccagaggagccaggggccccaccccgccgggctgggcctataaagaaacctccaccacctacaaaagtagaagagctgcctcccaagcccctcgaacagggggatgaaacccccaaacccccaaagccagacccactcaagataaccaaggggaagctagggggccccaaggagaccccacccaatggaaatctttcccctgccccaaggcttcggagggactattcgtatgaaagagtgggtcctacctcttgccggggtcggggccgaggcgagtattttgccagagggaggggttttcgggggacctatgggggacgagggcggggagcccgaagccgggaattccgcagttaccgagagtttcgaggagatgatgggcgtggaggtgggacagggggaccaaaccaccctcctgctccccgaggccgcactgccagcgagacacggagcgagggttcagagtatgaggaaatccccaagcggcgccggcagcggggctcagaaacaggcagcgagacccatgagagtgatctggctccttcagacaaggaggctcccacacccaaggagggaacactcacccaggtccctctcgctcccccaccaccaggagccccaccttcaccagccccagcccgcttcactgcccggggtgggcgagtcttcactcccagaggggtgccatctcgccggggccgaggaggagggaggccccctcctcaagtttgcccaggctggagccctccagccaagtctctggctcccaagaaacctcccacaggccctttgccaccaagtaaggagcctttgaaagagaagttgatcccagggcctctgtcccctgtggcgcgcggaggcagcaatggaggtagcaatgtgggcatggaagatggggagcgaccccgaaggaggcgacatgggagggctcagcagcaggataaaccgcctcgtttccggaggctgaagcaggaacgggagaatgccgcaagggggtctgagggcaagccctccctaacccttccagcctccgctcctggacctgaggaggccctcacaacagtcacagtggccccagcacctcgccgggcagctgccaagtctcctgatctgtcaaaccagaactcagaccaagccaatgaggaatgggagactgcatcagagagcagtgacttcaccagtgagcgccgaggggacaaagaggcacccccaccagtactgctgacacccaaggctgtgggaactcctgggggaggtggaggtggagccgtaccaggtatttcagccatgtcccgcggagatctgagccagagagccaaggatttgagtaaacggagcttctcaagtcagcggccaggcatggaacggcagaatcggcgccctggcccagggggcaaggctggcagcagtggcagcagcagtggaggaggcggtgggggtcctggaggaaggaccgggccaggacgaggcgacaagaggagctggccctctcccaagaaccgaagtcgtcctccagaggagcgtcccccggggcttcccctgcctcccccacctcccagcagttctgctgtcttccgcctggaccaagttatccacagcaaccctgctggcatccaacaggctctggcccagcttagtagccgtcaagggagtgtaactgcaccagggggtcatccaaggcacaagcctgggcttccccaagcccctcagggcccctctcctaggcccccaacccgatacgagccccagagggtcaacagcggcctcagttctgacccccactttgaggagccggggccaatggtgagaggggtgggtgggactcctcgggactctgccggggttagtccctttccccctaaacgtcgggagcggcctcccagaaaaccagagctgctacaggaggaatctttgccacctcctcatagctctggattcttgggctctaagcctgagggcccaggccctcaggcagagtccagagatacaggcacagaggccctgacccctcacatctggaaccgtttacatactgccactagccgaaagagttaccggcccagctccatggagccttggatggagcccctgagtccttttgaggatgtggctggcacagaaatgagtcagtctgacagtggggtggacctgagtggggattctcaggtgtcatcaggtccctgcagccagcgaagttcccctgatggaggactcaagggggcagcagagggaccccccaagaggcctggaggctcctcacccctgaatgctgttccttgtgagggtccacctggctctgaacctcctaggagaccaccacctgccccccacgatggggacagaaaggagctgccccgggagcagcctctgccccctggccccattggcacagaacgatcacagcgtacagaccgaggcacagagcctggccccattcggccatcccatcgacctggtcccccagtccagtttggcactagtgacaaggactcagacttacgcctagtggtaggagacagcttgaaagcagagaaggagctaacagcatcagtcactgaggccattcctgtatcacgagactgggagctgcttcccagtgctgctgcctctgctgagccacaatccaagaacctggattctgggcactgtgtcccggagcccagctcctcaggccagcgcctgtatcctgaggttttctatggcagtgctgggccttccagttctcagatctctgggggagccatggactctcaattacatccaaacagtggaggcttccgccctgggacaccctcactgcacccttacagatcacagcccctatacctaccccccggcccagcccctccctcagcactgctctctgggttagctctcaagggccagtttctggatttctccacaatgcaagctacagagctggggaagttgccggctggaggagttctctaccctccaccttccttcctctactctccggctttctgccccagtcctttgcctgacacatcgttgcttcaggtacgccaggatctgccatccccttcggatttttattctactcctctgcagcctggtggccaaagtggctttctcccttcaggggctcctgcccagcagatgcttctacccatggtagactcacagctgcctgtggtgaactttggctccctgccgccagcaccacctcctgccccacctcccctttctctgttacctgtgggccctgctctgcagccccccagcctggctgtgcggcccccacctgctcctgctactcgggtgctgccttcacctgccaggcccttccccgctagcttggggcgagcagagctgcatccagtggaactaaagccgttccaggattatcaaaaactgagcagcaaccttgggggacctggatcatcacggactcccccaactggaaggtccttctctggcctcaattcccgtctcaaggccacgccttccacctacagtggagtcttccgcacccagcgcgtcgacctttaccagcaggcctccccaccagatgccctgcgctggatacctaagccttgggagcggacagggccgccacctcgagaagggccctcccgacgggcagaggagcctgggtcccgaggggacaaggagcctgggttgcccccaccccgctgagggagttcctcctcccccttcccctggtcccctgtccctggggctgtttgttaaaaaagagtaataaaaggattt

SEQ ID NO: 23782 - DNA, 6893 bp, Homo sapiens
  source 1..6893: mol_type = unassigned DNA
cagccgcggagtgagcgagggagacgggaggagccgaacccggcgccatccgccgccatcctcccccgccccaccgccatcccgtcccggggagcccctaggcccgggtcccggatccccgcgcacccggccaggggacagagactgagacacttgctgtctggcccacaggctctggcacgttttgggggaggtgcctgcaggacccaacatactcaatgagcttccagcgcaatgtccgatcgctcggggccgactgccaagggaaaggatggaaagaagtattcctcgctcaacctgtttgatacgtataagggcaagtccttagagatccagaaacccgctgttgcccctcgccatggcctgcagagtctcgggaaagttgccattgcccggcgtatgccacctccagccaaccttccaagcctgaaagccgagaacaaaggcaatgaccccaatgtctcactagtgccaaaagacggaacaggatgggcaagcaaacaggagcagtccgaccccaagagttccgatgcctcaaccgctcagccgccggaatcgcagccactgccggcttcacagacgcctgcctccaaccagccgaaacgacccccagcagcccccgagaacactcctttggttccaagcggggtaaagtcctgggcacaagccagcgtcacccatggagcacatggagatggtggaagggcatcaagcctactgtcacgattctctcgagaggaatttccgaccctgcaggcggctggcgaccaggacaaggctgccaaggaaagggagtctgccgaacagtcgtctgggcccggaccaagcctccgcccccaaaattctacaacttggagggacggaggtgggcgtggccctgatgagctggagggcccggactccaaacttcatcatggtcatgatccccggggtgggctacagccttcaggcccaccccagttccctccctaccgcggaatgatgccgcctttcatgtatcccccatatctcccgttccctccgccctatggaccccaggggccttaccgataccccactcctgatgggcccagccgttttccccgtgtggcgggcccccgaggctcagggccaccaatgcgcttagtagagcctgtgggtcgtccctctattctcaaagaggataatctcaaagagtttgatcagttggatcaggagaatgatgatggttgggcaggggcccatgaagaggttgactacactgaaaagctcaagttcagcgatgaggaagatgggcgagactctgatgaggagggtgctgagggccacagggattcccaatcagcttctggtgaggaacggccccctgaagcagatggcaaaaagggcaactcccccaacagcgaaccgcccactcctaagacggcctgggcagaaacctctcggcctccagagacagagccgggacctcctgccccaaagcctcccctacccccacctcaccggggccccgccgggaactggggcccccctggggactacccagatcgtgggggtcctccctgcaagcccccagcacctgaagatgaggatgaggcatggcggcagcgacgaaagcagtcgtcatctgagatttccctggcagtggagcgggcccggcgacggcgagaagaagaggagcggcgcatgcaagaagagcgccgggcagcctgtgctgagaagctcaagcgactcgatgaaaagtttggggcacctgacaagcggctcaaagcagagcctgctgccccacctgctgccccttctaccccagctccaccacctgcagtccctaaagaactccctgcacctccagctccacctccagcatcagccccaacaccagagacagaacctgaagagccagcacaggcccctcctgcccaatctactcctactccaggtgtggctgcggctcccactctggtgagtggtggtggcagtaccagtagcaccagcagtggcagcttcgaagccagcccagtggaaccacaactgccctcaaaagagggtcctgaaccaccagaagaggttcctcctcctaccacacccccagttccaaaggtggaacccaagggtgatgggattggtcccacccgccagccccctagtcagggcttgggctaccccaaatatcagaagtcgttgcctcctcgtttccagcggcagcagcaggagcagctcctgaagcagcagcagcagcaccagtggcagcagcatcaacagggctctgcccctcctaccccagtgcccccatcaccaccacagcctgtgaccctgggggctgtgccagctccacaggctccacccccgccccccaaggccctgtacccaggtgctctgggccggcccccacccatgcccccaatgaactttgatccccgatggatgatgattcctccttatgtggacccccggctcctccagggtcgtccccctctagacttctaccctcctggtgtgcatccctctggcctagttccccgagagcgttcagacagtgggggctcaagctcagagccatttgaccgtcatgcacctgctatgttacgggaacggggcactccaccggtggatccaaagttggcctgggtaggagatgtcttcaccgccacacccgctgaaccccgcccacttacctcacctctgcgccaggctgcggatgaggatgacaaggggatgaggagcgagactcctccagtacctcccccaccaccctatctggccagttatccaggctttcctgagaatggagcccctgggcccccaatctctcgctttcctctggaggaaccagggccccgtccactcccctggcccccaggcagtgatgaagtggccaagatacaaactccaccacccaagaaggagccccctaaggaggagactgcacagctgacggggccagaagcaggccgaaagcctgcccgcggagtcgggagtggaggccagggccccccaccaccacgcagagagagtcgcacagagacccgctggggccctcgtccagggagcagtcgtcgtggaatccctccagaggagccaggggccccaccccgccgggctgggcctataaagaaacctccaccacctacaaaagtagaagagctgcctcccaagcccctcgaacagggggatgaaacccccaaacccccaaagccagacccactcaagataaccaaggggaagctagggggccccaaggagaccccacccaatggaaatctttcccctgccccaaggcttcggagggactattcgtatgaaagagtgggtcctacctcttgccggggtcggggccgaggcgagtattttgccagagggaggggttttcgggggacctatgggggacgagggcggggagcccgaagccgggaattccgcagttaccgagagtttcgaggagatgatgggcgtggaggtgggacagggggaccaaaccaccctcctgctccccgaggccgcactgccagcgagacacggagcgagggttcagagtatgaggaaatccccaagcggcgccggcagcggggctcagaaacaggcagcgagacccatgagagtgatctggctccttcagacaaggaggctcccacacccaaggagggaacactcacccaggtccctctcgctcccccaccaccaggagccccaccttcaccagccccagcccgcttcactgcccggggtgggcgagtcttcactcccagaggggtgccatctcgccggggccgaggaggagggaggccccctcctcaagtttgcccaggctggagccctccagccaagtctctggctcccaagaaacctcccacaggccctttgccaccaagtaaggagcctttgaaagagaagttgatcccagggcctctgtcccctgtggcgcgcggaggcagcaatggaggtagcaatgtgggcatggaagatggggagcgaccccgaaggaggcgacatgggagggctcagcagcaggataaaccgcctcgtttccggaggctgaagcaggaacgggagaatgccgcaagggggtctgagggcaagccctccctaacccttccagcctccgctcctggacctgaggaggccctcacaacagtcacagtggccccagcacctcgccgggcagctgccaagtctcctgatctgtcaaaccagaactcagaccaagccaatgaggaatgggagactgcatcagagagcagtgacttcaccagtgagcgccgaggggacaaagaggcacccccaccagtactgctgacacccaaggctgtgggaactcctgggggaggtggaggtggagccgtaccaggtatttcagccatgtcccgcggagatctgagccagagagccaaggatttgagtaaacggagcttctcaagtcagcggccaggcatggaacggcagaatcggcgccctggcccagggggcaaggctggcagcagtggcagcagcagtggaggaggcggtgggggtcctggaggaaggaccgggccaggacgaggcgacaagaggagctggccctctcccaagaaccgaagtcgtcctccagaggagcgtcccccggggcttcccctgcctcccccacctcccagcagttctgctgtcttccgcctggaccaagttatccacagcaaccctgctggcatccaacaggctctggcccagcttagtagccgtcaagggagtgtaactgcaccagggggtcatccaaggcacaagcctgggcttccccaagcccctcagggcccctctcctaggcccccaacccgatacgagccccagagggtcaacagcggcctcagttctgacccccactttgaggagccggggccaatggtgagaggggtgggtgggactcctcgggactctgccggggttagtccctttccccctaaacgtcgggagcggcctcccagaaaaccagagctgctacaggaggaatctttgccacctcctcatagctctggattcttgggctctaagcctgagggcccaggccctcaggcagagtccagagatacaggcacagaggccctgacccctcacatctggaaccgtttacatactgccactagccgaaagagttaccggcccagctccatggagccttggatggagcccctgagtccttttgaggatgtggctggcacagaaatgagtcagtctgacagtggggtggacctgagtggggattctcaggtgtcatcaggtccctgcagccagcgaagttcccctgatggaggactcaagggggcagcagagggaccccccaagaggcctggaggctcctcacccctgaatgctgttccttgtgagggtccacctggctctgaacctcctaggagaccaccacctgccccccacgatggggacagaaaggagctgccccgggagcagcctctgccccctggccccattggcacagaacgatcacagcgtacagaccgaggcacagagcctggccccattcggccatcccatcgacctggtcccccagtccagtttggcactagtgacaaggactcagacttacgcctagtggtaggagacagcttgaaagcagagaaggagctaacagcatcagtcactgaggccattcctgtatcacgagactgggagctgcttcccagtgctgctgcctctgctgagccacaatccaagaacctggattctgggcactgtgtcccggagcccagctcctcaggccagcgcctgtatcctgaggttttctatggcagtgctgggccttccagttctcagatctctgggggagccatggactctcaattacatccaaacagtggaggcttccgccctgggacaccctcactgcacccttacagatcacagcccctatacctaccccccggcccagcccctccctcagcactgctctctgggttagctctcaagggccagtttctggatttctccacaatgcaagctacagagctggggaagttgccggctggaggagttctctaccctccaccttccttcctctactctccggctttctgccccagtcctttgcctgacacatcgttgcttcaggtacgccaggatctgccatccccttcggatttttattctactcctctgcagcctggtggccaaagtggctttctcccttcaggggctcctgcccagcagatgcttctacccatggtagactcacagctgcctgtggtgaactttggctccctgccgccagcaccacctcctgccccacctcccctttctctgttacctgtgggccctgctctgcagccccccagcctggctgtgcggcccccacctgctcctgctactcgggtgctgccttcacctgccaggcccttccccgctagcttggggcgagcagagctgcatccagtggaactaaagccgttccaggattatcaaaaactgagcagcaaccttgggggacctggatcatcacggactcccccaactggaaggtccttctctggcctcaattcccgtctcaaggccacgccttccacctacagtggagtcttccgcacccagcgcgtcgacctttaccagcaggcctccccaccagatgccctgcgctggatacctaagccttgggagcggacagggccgccacctcgagaagggccctcccgacgggcagaggagcctgggtcccgaggggacaaggagcctgggttgcccccaccccgctgagggagttcctcttgccccctacccccggggcttgtatatagattataaatatataagggggaaaggggtgggcggggaggggttctggggctggggcctcacttcccctcctcccccttcccctggtcccctgtccctggggctgtttgttaaaaaagagtaataaaaggatttaaaaaaaaaaa

SEQ ID NO: 23783 - DNA, 6893 bp, Homo sapiens
  source 1..6893: mol_type = unassigned DNA
cagccgcggagtgagcgagggagacgggaggagccgaacccggcgccatccgccgccatcctcccccgccccaccgccatcccgtcccggggagcccctaggcccgggtcccggatccccgcgcacccggccaggggacagagactgagacacttgctgtctggcccacaggctctggcacgttttgggggaggtgcctgcaggacccaacatactcaatgagcttccagcgcaatgtccgatcgctcggggccgactgccaagggaaaggatggaaagaagtattcctcgctcaacctgtttgatacgtataagggcaagtccttagagatccagaaacccgctgttgcccctcgccatggcctgcagagtctcgggaaagttgccattgcccggcgtatgccacctccagccaaccttccaagcctgaaagccgagaacaaaggcaatgaccccaatgtctcactagtgccaaaagacggaacaggatgggcaagcaaacaggagcagtccgaccccaagagttccgatgcctcaaccgctcagccgccggaatcgcagccactgccggcttcacagacgcctgcctccaaccagccgaaacgacccccagcagcccccgagaacactcctttggttccaagcggggtaaagtcctgggcacaagccagcgtcacccatggagcacatggagatggtggaagggcatcaagcctactgtcacgattctctcgagaggaatttccgaccctgcaggcggctggcgaccaggacaaggctgccaaggaaagggagtctgccgaacagtcgtctgggcccggaccaagcctccgcccccaaaattctacaacttggagggacggaggtgggcgtggccctgatgagctggagggcccggactccaaacttcatcatggtcatgatccccggggtgggctacagccttcaggcccaccccagttccctccctaccgcggaatgatgccgcctttcatgtatcccccatatctcccgttccctccgccctatggaccccaggggccttaccgataccccactcctgatgggcccagccgttttccccgtgtggcgggcccccgaggctcagggccaccaatgcgcttagtagagcctgtgggtcgtccctctattctcaaagaggataatctcaaagagtttgatcagttggatcaggagaatgatgatggttgggcaggggcccatgaagaggttgactacactgaaaagctcaagttcagcgatgaggaagatgggcgagactctgatgaggagggagctgagggccacagggattcccaatcagcttctggtgaggaacggccccctgaagcagatggcaaaaagggcaactcccccaacagcgaaccgcccactcctaagacggcctgggcagaaacctctcggcctccagagacagagccgggacctcctgccccaaagcctcccctacccccacctcaccggggccccgccgggaactggggcccccctggggactacccagatcgtgggggtcctccctgcaagcccccagcacctgaagatgaggatgaggcatggcggcagcgacgaaagcagtcgtcatctgagatttccctggcagtggagcgggcccggcgacggcgagaagaagaggagcggcgcatgcaagaagagcgccgggcagcctgtgctgagaagctcaagcgactcgatgaaaagtttggggcacctgacaagcggctcaaagcagagcctgctgccccacctgctgccccttctaccccagctccaccacctgcagtccctaaagaactccctgcacctccagctccacctccagcatcagccccaacaccagagaaagaacctgaagagccagcacaggcccctcctgcccaatctactcctactccaggtgtggctgcggctcccactctggtgagtggtggtggcagtaccagtagcaccagcagtggcagcttcgaagccagcccagtggaaccacaactgccctcaaaagagggtcctgaaccaccagaagaggttcctcctcctaccacacccccagttccaaaggtggaacccaagggtgatgggattggtcccacccgccagccccctagtcagggcttgggctaccccaaatatcagaagtcgttgcctcctcgtttccagcggcagcagcaggagcagctcctgaagcagcagcagcagcaccagtggcagcagcatcaacagggctctgcccctcctaccccagtgcccccatcaccaccacagcctgtgaccctgggggctgtgccagctccacaggctccacccccgccccccaaggccctgtacccaggtgctctgggccggcccccacccatgcccccaatgaactttgatccccgatggatgatgattcctccttatgtggacccccggctcctccagggtcgtccccctctagacttctaccctcctggtgtgcatccctctggcctagttccccgagagcgttcagacagtgggggctcaagctcagagccatttgaccgtcatgcacctgctatgttacgggaacggggcactccaccggtggatccaaagttggcctgggtgggagatgtcttcaccgccacacccgctgaaccccgcccacttacctcacctctgcgccaggctgcggatgaggatgacaaggggatgaggagcgagactcctccagtacctcccccaccaccctatctggccagttatccaggctttcctgagaatggagcccctgggcccccaatctctcgctttcctctggaggaaccagggccccgtccactcccctggcccccaggcagtgatgaagtggccaagatacaaactccaccacccaagaaggagccccctaaggaggagactgcacagctgacggggccagaagcaggccgaaagcctgcccgcggagtcgggagtggaggccagggccccccaccaccacgcagagagagtcgcacagagacccgctggggccctcgtccagggagcagtcgtcgtggaatccctccagaggagccaggggccccaccccgccgggctgggcctataaagaaacctccaccacctacaaaagtagaagagctgcctcccaagcccctcgaacagggggatgaaacccccaaacccccaaagccagacccactcaagataaccaaggggaagctagggggccccaaggagaccccacccaatggaaatctttcccctgccccaaggcttcggagggactattcgtatgaaagagtgggtcctacctcttgccggggtcggggccgaggcgagtattttgccagagggaggggttttcgggggacctatgggggacgagggcggggagcccgaagccgggaattccgcagttaccgagagtttcgaggagatgatgggcgtggaggtgggacagggggaccaaaccaccctcctgctccccgaggccgcactgccagcgagacacggagcgagggttcagagtatgaggaaatccccaagcggcgccggcagcggggctcagaaacaggcagcgagacccatgagagtgatctggctccttcagacaaggaggctcccacacccaaggagggaacactcacccaggtccctctcgctcccccaccaccaggagccccaccttcaccagccccagcccgcttcactgcccggggtgggcgagtcttcactcccagaggggtgccatctcgccggggccgaggaggagggaggccccctcctcaagtttgcccaggctggagccctccagccaagtctctggctcccaagaaacctcccacaggccctttgccaccaagtaaggagcctttgaaagagaagttgatcccagggcctctgtcccctgtggcgcgcggaggcagcaatggaggtagcaatgtgggcatggaagatggggagcgaccccgaaggaggcgacatgggagggctcagcagcaggataaaccgcctcgtttccggaggctgaagcaggaacgggagaatgccgcaagggggtctgagggcaagccctccctaacccttccagcctccgctcctggacctgaggaggccctcacaacagtcacagtggccccagcacctcgccgggcagctgccaagtctcctgatctgtcaaaccagaactcagaccaagccaatgaggaatgggagactgcatcagagagcagtgacttcaccagtgagcgccgaggggacaaagaggcacccccaccagtactgctgacacccaaggctgtgggaactcctgggggaggtggaggtggagccgtaccaggtatttcagccatgtcccgcggagatctgagccagagagccaaggatttgagtaaacggagcttctcaagtcagcggccaggcatggaacggcagaatcggcgccctggcccagggggcaaggctggcagcagtggcagcagcagtggaggaggcggtgggggtcctggaggaaggaccgggccaggacgaggcgacaagaggagctggccctctcccaagaaccgaagtcgtcctccagaggagcgtcccccggggcttcccctgcctcccccacctcccagcagttctgctgtcttccgcctggaccaagttatccacagcaaccctgctggcatccaacaggctctggcccagcttagtagccgtcaagggagtgtaactgcaccagggggtcatccaaggcacaagcctgggcctccccaagcccctcagggcccctctcctaggcccccaacccgatacgagccccagagggtcaacagcggcctcagttctgacccccactttgaggagccggggccaatggtgagaggggtgggtgggactcctcgggactctgccggggttagtccctttccccctaaacgtcgggagcggcctcccagaaaaccagagctgctacaggaggaatctttgccacctcctcatagctctggattcttgggctctaagcctgagggcccaggccctcaggcagagtccagagatacaggcacagaggccctgacccctcacatctggaaccgtttacatactgccactagccgaaagagttaccggcccagctccatggagccttggatggagcccctgagtccttttgaggatgtggctggcacagaaatgagtcagtctgacagtggggtggacctgagtggggattctcaggtgtcatcaggtccctgcagccagcgaagttcccctgatggaggactcaagggggcagcagagggaccccccaagaggcctggaggctcctcacccctgaatgctgttccttgtgagggtccacctggctctgaacctcctaggagaccaccacctgccccccacgatggggacagaaaggagctgccccgggagcagcctctgccccctggccccattggcacagaacgatcacagcatacagaccgaggcacagagcctggccccattcggccatcccatcgacctggtcccccagtccagtttggcactagtgacaaggactcagacttacgcctagtggtaggagacagcttgaaagcagagaaggagctaacagcatcagtcactgaggccattcctgtatcacgagactgggagctgcttcccagtgctgctgcctctgctgagccacaatccaagaacctggattctgggcactgtgtcccggagcccagctcctcaggccagcgcctgtatcctgaggttttctatggcagtgctgggccttccagttctcagatctctgggggagccatggactctcagttacatccaaacagtggaggcttccgccctgggacaccctcactgcacccttacagatcacagcccctatacctaccccccggcccagcccctccctcagcactgctctctggggtagctctcaagggccagtttctggatttctccacaatgcaagctacagagctggggaagttgccggctggaggagttctctaccctccaccttccttcctctactctccggctttctgccccagtcctttgcctgacacatcgttgcttcaggtacgccaggatctgccatccccttcggatttttattctactcctctgcagcctggtggccaaagtggctttctcccttcaggggctcctgcccagcagatgcttctacccatggtagactcacagctgcctgtggtgaactttggctccctgccgccagcaccacctcctgccccaccttccctttctctgttacctgtgggccctgctctgcagccccccagcctggctgtgcggcccccacctgctcctgctactcgggtgctgccttcacctgccaggcccttccccgctagcttggggcgagcagagctgcatccagtggaactaaagccgttccaggattatcaaaaactgagcagcaaccttgggggacctggatcatcacggactcccccaactggaaggtccttctctggcctcaattcccgtctcaaggccacgccttccacctacagtggagtcttccgcacccagcgcgtcgacctttaccagcaggcctccccaccagatgccctgcgctggatacctaagccttgggagcggacagggccgccacctcgagaagggccctcccgacgggcagaggagcctgggtcccgaggggacaaggagcctgggttgcccccaccccgctgagggagttcctcttgccccctacccccggggcttgtatatagattataaatatataagggggaaaggggtgggcggggaggggttctggggctggggcctcacttcccctcctcccccttcccctggtcccctgtccctggggctgtttgttaaaaaagagtaataaaaggatttaaaaaaaaaaa

SEQ ID NO: 23784 - DNA, 6861 bp, Homo sapiens
  source 1..6861: mol_type = unassigned DNA
gggctcagccgcggagtgagcgagggagacgggaggagccgaacccggcgccatccgccgccatcctcccccgccccaccgccatcccgtcccggggagcccctaggcccgggtcccggatccccgcgcacccggccaggctctggcacgttttgggggaggtgcctgcaggacccaacatactcaatgagcttccagcgcaatgtccgatcgctcggggccgactgccaagggaaaggatggaaagaagtattcctcgctcaacctgtttgatacgtataagggcaagtccttagagatccagaaacccgctgttgcccctcgccatggcctgcagagtctcgggaaagttgccattgcccggcgtatgccacctccagccaaccttccaagcctgaaagccgagaacaaaggcaatgaccccaatgtctcactagtgccaaaagacggaacaggatgggcaagcaaacaggagcagtccgaccccaagagttccgatgcctcaaccgctcagccgccggaatcgcagccactgccggcttcacagacgcctgcctccaaccagccgaaacgacccccagcagcccccgagaacactcctttggttccaagcggggtaaagtcctgggcacaagccagcgtcacccatggagcacatggagatggtggaagggcatcaagcctactgtcacgattctctcgagaggaatttccgaccctgcaggcggctggcgaccaggacaaggctgccaaggaaagggagtctgccgaacagtcgtctgggcccggaccaagcctccgcccccaaaattctacaacttggagggacggaggtgggcgtggccctgatgagctggagggcccggactccaaacttcatcatggtcatgatccccggggtgggctacagccttcaggcccaccccagttccctccctaccgcggaatgatgccgcctttcatgtatcccccatatctcccgttccctccgccctatggaccccaggggccttaccgataccccactcctgatgggcccagccgttttccccgtgtggcgggcccccgaggctcagggccaccaatgcgcttagtagagcctgtgggtcgtccctctattctcaaagaggataatctcaaagagtttgatcagttggatcaggagaatgatgatggttgggcaggggcccatgaagaggttgactacactgaaaagctcaagttcagcgatgaggaagatgggcgagactctgatgaggagggagctgagggccacagggattcccaatcagcttctggtgaggaacggccccctgaagcagatggcaaaaagggcaactcccccaacagcgaaccgcccactcctaagacggcctgggcagaaacctctcggcctccagagacagagccgggacctcctgccccaaagcctcccctacccccacctcaccggggccccgccgggaactggggcccccctggggactacccagatcgtgggggtcctccctgcaagcccccagcacctgaagatgaggatgaggcatggcggcagcgacgaaagcagtcgtcatctgagatttccctggcagtggagcgggcccggcgacggcgagaagaagaggagcggcgcatgcaagaagagcgccgggcagcctgtgctgagaagctcaagcgactcgatgaaaagtttggggcacctgacaagcggctcaaagcagagcctgctgccccacctgctgccccttctaccccagctccaccacctgcagtccctaaagaactccctgcacctccagctccacctccagcatcagccccaacaccagagaaagaacctgaagagccagcacaggcccctcctgcccaatctactcctactccaggtgtggctgcggctcccactctggtgagtggtggtggcagtaccagtagcaccagcagtggcagcttcgaagccagcccagtggaaccacaactgccctcaaaagagggtcctgaaccaccagaagaggttcctcctcctaccacacccccagttccaaaggtggaacccaagggtgatgggattggtcccacccgccagccccctagtcagggcttgggctaccccaaatatcagaagtcgttgcctcctcgtttccagcggcagcagcaggagcagctcctgaagcagcagcagcagcaccagtggcagcagcatcaacagggctctgcccctcctaccccagtgcccccatcaccaccacagcctgtgaccctgggggctgtgccagctccacaggctccacccccgccccccaaggccctgtacccaggtgctctgggccggcccccacccatgcccccaatgaactttgatccccgatggatgatgattcctccttatgtggacccccggctcctccagggtcgtccccctctagacttctaccctcctggtgtgcatccctctggcctagttccccgagagcgttcagacagtgggggctcaagctcagagccatttgaccgtcatgcacctgctatgttacgggaacggggcactccaccggtggatccaaagttggcctgggtgggagatgtcttcaccgccacacccgctgaaccccgcccacttacctcacctctgcgccaggctgcggatgaggatgacaaggggatgaggagcgagactcctccagtacctcccccaccaccctatctggccagttatccaggctttcctgagaatggagcccctgggcccccaatctctcgctttcctctggaggaaccagggccccgtccactcccctggcccccaggcagtgatgaagtggccaagatacaaactccaccacccaagaaggagccccctaaggaggagactgcacagctgacggggccagaagcaggccgaaagcctgcccgcggagtcgggagtggaggccagggccccccaccaccacgcagagagagtcgcacagagacccgctggggccctcgtccagggagcagtcgtcgtggaatccctccagaggagccaggggccccaccccgccgggctgggcctataaagaaacctccaccacctacaaaagtagaagagctgcctcccaagcccctcgaacagggggatgaaacccccaaacccccaaagccagacccactcaagataaccaaggggaagctagggggccccaaggagaccccacccaatggaaatctttcccctgccccaaggcttcggagggactattcgtatgaaagagtgggtcctacctcttgccggggtcggggccgaggcgagtattttgccagagggaggggttttcgggggacctatgggggacgagggcggggagcccgaagccgggaattccgcagttaccgagagtttcgaggagatgatgggcgtggaggtgggacagggggaccaaaccaccctcctgctccccgaggccgcactgccagcgagacacggagcgagggttcagagtatgaggaaatccccaagcggcgccggcagcggggctcagaaacaggcagcgagacccatgagagtgatctggctccttcagacaaggaggctcccacacccaaggagggaacactcacccaggtccctctcgctcccccaccaccaggagccccaccttcaccagccccagcccgcttcactgcccggggtgggcgagtcttcactcccagaggggtgccatctcgccggggccgaggaggagggaggccccctcctcaagtttgcccaggctggagccctccagccaagtctctggctcccaagaaacctcccacaggccctttgccaccaagtaaggagcctttgaaagagaagttgatcccagggcctctgtcccctgtggcgcgcggaggcagcaatggaggtagcaatgtgggcatggaagatggggagcgaccccgaaggaggcgacatgggagggctcagcagcaggataaaccgcctcgtttccggaggctgaagcaggaacgggagaatgccgcaagggggtctgagggcaagccctccctaacccttccagcctccgctcctggacctgaggaggccctcacaacagtcacagtggccccagcacctcgccgggcagctgccaagtctcctgatctgtcaaaccagaactcagaccaagccaatgaggaatgggagactgcatcagagagcagtgacttcaccagtgagcgccgaggggacaaagaggcacccccaccagtactgctgacacccaaggctgtgggaactcctgggggaggtggaggtggagccgtaccaggtatttcagccatgtcccgcggagatctgagccagagagccaaggatttgagtaaacggagcttctcaagtcagcggccaggcatggaacggcagaatcggcgccctggcccagggggcaaggctggcagcagtggcagcagcagtggaggaggcggtgggggtcctggaggaaggaccgggccaggacgaggcgacaagaggagctggccctctcccaagaaccgaagtcgtcctccagaggagcgtcccccggggcttcccctgcctcccccacctcccagcagttctgctgtcttccgcctggaccaagttatccacagcaaccctgctggcatccaacaggctctggcccagcttagtagccgtcaagggagtgtaactgcaccagggggtcatccaaggcacaagcctgggcctccccaagcccctcagggcccctctcctaggcccccaacccgatacgagccccagagggtcaacagcggcctcagttctgacccccactttgaggagccggggccaatggtgagaggggtgggtgggactcctcgggactctgccggggttagtccctttccccctaaacgtcgggagcggcctcccagaaaaccagagctgctacaggaggaatctttgccacctcctcatagctctggattcttgggctctaagcctgagggcccaggccctcaggcagagtccagagatacaggcacagaggccctgacccctcacatctggaaccgtttacatactgccactagccgaaagagttaccggcccagctccatggagccttggatggagcccctgagtccttttgaggatgtggctggcacagaaatgagtcagtctgacagtggggtggacctgagtggggattctcaggtgtcatcaggtccctgcagccagcgaagttcccctgatggaggactcaagggggcagcagagggaccccccaagaggcctggaggctcctcacccctgaatgctgttccttgtgagggtccacctggctctgaacctcctaggagaccaccacctgccccccacgatggggacagaaaggagctgccccgggagcagcctctgccccctggccccattggcacagaacgatcacagcatacagaccgaggcacagagcctggccccattcggccatcccatcgacctggtcccccagtccagtttggcactagtgacaaggactcagacttacgcctagtggtaggagacagcttgaaagcagagaaggagctaacagcatcagtcactgaggccattcctgtatcacgagactgggagctgcttcccagtgctgctgcctctgctgagccacaatccaagaacctggattctgggcactgtgtcccggagcccagctcctcaggccagcgcctgtatcctgaggttttctatggcagtgctgggccttccagttctcagatctctgggggagccatggactctcagttacatccaaacagtggaggcttccgccctgggacaccctcactgcacccttacagatcacagcccctatacctaccccccggcccagcccctccctcagcactgctctctggggtagctctcaagggccagtttctggatttctccacaatgcaagctacagagctggggaagttgccggctggaggagttctctaccctccaccttccttcctctactctccggctttctgccccagtcctttgcctgacacatcgttgcttcaggtacgccaggatctgccatccccttcggatttttattctactcctctgcagcctggtggccaaagtggctttctcccttcaggggctcctgcccagcagatgcttctacccatggtagactcacagctgcctgtggtgaactttggctccctgccgccagcaccacctcctgccccaccttccctttctctgttacctgtgggccctgctctgcagccccccagcctggctgtgcggcccccacctgctcctgctactcgggtgctgccttcacctgccaggcccttccccgctagcttggggcgagcagagctgcatccagtggaactaaagccgttccaggattatcaaaaactgagcagcaaccttgggggacctggatcatcacggactcccccaactggaaggtccttctctggcctcaattcccgtctcaaggccacgccttccacctacagtggagtcttccgcacccagcgcgtcgacctttaccagcaggcctccccaccagatgccctgcgctggatacctaagccttgggagcggacagggccgccacctcgagaagggccctcccgacgggcagaggagcctgggtcccgaggggacaaggagcctgggttgcccccaccccgctgagggagttcctcttgccccctacccccggggcttgtatatagattataaatatataagggggaaaggggtgggcggggaggggttctggggctggggcctcacttcccctcctcccccttcccctggtcccctgtccctggggctgtttgttaaaaaagagtaataaaaggatttaaaaaaaaaaa

SEQ ID NO: 23785 - DNA, 6893 bp, Homo sapiens
  source 1..6893: mol_type = unassigned DNA
cagccgcggagtgagcgagggagacgggaggagccgaacccggcgccatccgccgccatcctcccccgccccaccgccatcccgtcccggggagcccctaggcccgggtcccggatccccgcgcacccggccaggggacagagactgagacacttgctgtctggcccacaggctctggcacgttttgggggaggtgcctgcaggacccaacatactcaatgagcttccagcgcaatgtccgatcgctcggggccgactgccaagggaaaggatggaaagaagtattcctcgctcaacctgtttgatacgtataagggcaagtccttagagatccagaaacccgctgttgcccctcgccatggcctgcagagtctcgggaaagttgccattgcccggcgtatgccacctccagccaaccttccaagcctgaaagccgagaacaaaggcaatgaccccaatgtctcactagtgccaaaagacggaacaggatgggcaagcaaacaggagcagtccgaccccaagagttccgatgcctcaaccgctcagccgccggaatcgcagccactgccggcttcacagacgcctgcctccaaccagccgaaacgacccccagcagcccccgagaacactcctttggttccaagcggggtaaagtcctgggcacaagccagcgtcacccatggagcacatggagatggtggaagggcatcaagcctactgtcacgattctctcgagaggaatttccgaccctgcaggcggctggcgaccaggacaaggctgccaaggaaagggagtctgccgaacagtcgtctgggcccggaccaagcctccgcccccaaaattctacaacttggagggacggaggtgggcgtggccctgatgagctggagggcccggactccaaacttcatcatggtcatgatccccggggtgggctacagccttcaggcccaccccagttccctccctaccgcggaatgatgccgcctttcatgtatcccccatatctcccgttccctccgccctatggaccccaggggccttaccgataccccactcctgatgggcccagccgttttccccgtgtggcgggcccccgaggctcagggccaccaatgcgcttagtagagcctgtgggtcgtccctctattctcaaagaggataatctcaaagagtttgatcagttggatcaggagaatgatgatggttgggcaggggcccatgaagaggttgactacactgaaaagctcaagttcagcgatgaggaagatgggcgagactctgatgaggagggagctgagggccacagggattcccaatcagcttctggtgaggaacggccccctgaagcagatggcaaaaagggcaactcccccaacagcgaaccgcccactcctaagacggcctgggcagaaacctctcggcctccagagacagagccgggacctcctgccccaaagcctcccctacccccacctcaccggggccccgccgggaactggggcccccctggggactacccagatcgtgggggtcctccctgcaagcccccagcacctgaagatgaggatgaggcatggcggcagcgacgaaagcagtcgtcatctgagatttccctggcagtggagcgggcccggcgacggcgagaagaagaggagcggcgcatgcaagaagagcgccgggcagcctgtgctgagaagctcaagcgactcgatgaaaagtttggggcacctgacaagcggctcaaagcagagcctgctgccccacctgctgccccttctaccccagctccaccacctgcagtccctaaagaactccctgcacctccagctccacctccagcatcagccccaacaccagagacagaacctgaagagccagcacaggcccctcctgcccaatctactcctactccaggtgtggctgcggctcccactctggtgagtggtggtggcagtaccagtagcaccagcagtggcagcttcgaagccagcccagtggaaccacaactgccctcaaaagagggtcctgaaccaccagaagaggttcctcctcctaccacacccccagttccaaaggtggaacccaagggtgatgggattggtcccacccgccagccccctagtcagggcttgggctaccccaaatatcagaagtcgttgcctcctcgtttccagcggcagcagcaggagcagctcctgaagcagcagcagcagcaccagtggcagcagcatcaacagggctctgcccctcctaccccagtgcccccatcaccaccacagcctgtgaccctgggggctgtgccagctccacaggctccacccccgccccccaaggccctgtacccaggtgctctgggccggcccccacccatgcccccaatgaactttgatccccgatggatgatgattcctccttatgtggacccccggctcctccagggtcgtccccctctagacttctaccctcctggtgtgcatccctctggcctagttccccgagagcgttcagacagtgggggctcaagctcagagccatttgaccgtcatgcacctgctatgttacgggaacggggcactccaccggtggatccaaagttggcctgggtaggagatgtcttcaccgccacacccgctgaaccccgcccacttacctcacctctgcgccaggctgcggatgaggatgacaaggggatgaggagcgagactcctccagtacctcccccaccaccctatctggccagttatccaggctttcctgagaatggagcccctgggcccccaatctctcgctttcctctggaggaaccagggccccgtccactcccctggcccccaggcagtgatgaagtggccaagatacaaactccaccacccaagaaggagccccctaaggaggagactgcacagctgacggggccagaagcaggccgaaagcctgcccgcggagtcgggagtggaggccagggccccccaccaccacgcagagagagtcgcacagagacccgctggggccctcgtccagggagcagtcgtcgtggaatccctccagaggagccaggggccccaccccgccgggctgggcctataaagaaacctccaccacctacaaaagtagaagagctgcctcccaagcccctcgaacagggggatgaaacccccaaacccccaaagccagacccactcaagataaccaaggggaagctagggggccccaaggagaccccacccaatggaaatctttcccctgccccaaggcttcggagggactattcgtatgaaagagtgggtcctacctcttgccggggtcggggccgaggcgagtattttgccagagggaggggttttcgggggacctatgggggacgagggcggggagcccgaagccgggaattccgcagttaccgagagtttcgaggagatgatgggcgtggaggtgggacagggggaccaaaccaccctcctgctccccgaggccgcactgccagcgagacacggagcgagggttcagagtatgaggaaatccccaagcggcgccggcagcggggctcagaaacaggcagcgagacccatgagagtgatctggctccttcagacaaggaggctcccacacccaaggagggaacactcacccaggtccctctcgctcccccaccaccaggagccccaccttcaccagccccagcccgcttcactgcccggggtgggcgagtcttcactcccagaggggtgccatctcgccggggccgaggaggagggaggccccctcctcaagtttgcccaggctggagccctccagccaagtctctggctcccaagaaacctcccacaggccctttgccaccaagtaaggagcctttgaaagagaagttgatcccagggcctctgtcccctgtggcgcgcggaggcagcaatggaggtagcaatgtgggcatggaagatggggagcgaccccgaaggaggcgacatgggagggctcagcagcaggataaaccgcctcgtttccggaggctgaagcaggaacgggagaatgccgcaagggggtctgagggcaagccctccctaacccttccagcctccgctcctggacctgaggaggccctcacaacagtcacagtggccccagcacctcgccgggcagctgccaagtctcctgatctgtcaaaccagaactcagaccaagccaatgaggaatgggagactgcatcagagagcagtgacttcaccagtgagcgccgaggggacaaagaggcacccccaccagtactgctgacacccaaggctgtgggaactcctgggggaggtggaggtggagccgtaccaggtatttcagccatgtcccgcggagatctgagccagagagccaaggatttgagtaaacggagcttctcaagtcagcggccaggcatggaacggcagaatcggcgccctggcccagggggcaaggctggcagcagtggcagcagcagtggaggaggcggtgggggtcctggaggaaggaccgggccaggacgaggcgacaagaggagctggccctctcccaagaaccgaagtcgtcctccagaggagcgtcccccggggcttcccctgcctcccccacctcccagcagttctgctgtcttccgcctggaccaagttatccacagcaaccctgctggcatccaacaggctctggcccagcttagtagccgtcaagggagtgtaactgcaccagggggtcatccaaggcacaagcctgggcttccccaagcccctcagggcccctctcctaggcccccaacccgatacgagccccagagggtcaacagcggcctcagttctgacccccactttgaggagccggggccaatggtgagaggggtgggtgggactcctcgggactctgccggggttagtccctttccccctaaacgtcgggagcggcctcccagaaaaccagagctgctacaggaggaatctttgccacctcctcatagctctggattcttgggctctaagcctgagggcccaggccctcaggcagagtccagagatacaggcacagaggccctgacccctcacatctggaaccgtttacatactgccactagccgaaagagttaccggcccagctccatggagccttggatggagcccctgagtccttttgaggatgtggctggcacagaaatgagtcagtctgacagtggggtggacctgagtggggattctcaggtgtcatcaggtccctgcagccagcgaagttcccctgatggaggactcaagggggcagcagagggaccccccaagaggcctggaggctcctcacccctgaatgctgttccttgtgagggtccacctggctctgaacctcctaggagaccaccacctgccccccacgatggggacagaaaggagctgccccgggagcagcctctgccccctggccccattggcacagaacgatcacagcgtacagaccgaggcacagagcctggccccattcggccatcccatcgacctggtcccccagtccagtttggcactagtgacaaggactcagacttacgcctagtggtaggagacagcttgaaagcagagaaggagctaacagcatcagtcactgaggccattcctgtatcacgagactgggagctgcttcccagtgctgctgcctctgctgagccacaatccaagaacctggattctgggcactgtgtcccggagcccagctcctcaggccagcgcctgtatcctgaggttttctatggcagtgctgggccttccagttctcagatctctgggggagccatggactctcaattacatccaaacagtggaggcttccgccctgggacaccctcactgcacccttacagatcacagcccctatacctaccccccggcccagcccctccctcagcactgctctctggggtagctctcaagggccagtttctggatttctccacaatgcaagctacagagctggggaagttgccggctggaggagttctctaccctccaccttccttcctctactctccggctttctgccccagtcctttgcctgacacatcgttgcttcaggtacgccaggatctgccatccccttcggatttttattctactcctctgcagcctggtggccaaagtggctttctcccttcaggggctcctgcccagcagatgcttctacccatggtagactcacagctgcctgtggtgaactttggctccctgccgccagcaccacctcctgccccacctcccctttctctgttacctgtgggccctgctctgcagccccccagcctggctgtgcggcccccacctgctcctgctactcgggtgctgccttcacctgccaggcccttccccgctagcttggggcgagcagagctgcatccagtggaactaaagccgttccaggattatcaaaaactgagcagcaaccttgggggacctggatcatcacggactcccccaactggaaggtccttctctggcctcaattcccgtctcaaggccacgccttccacctacagtggagtcttccgcacccagcgcgtcgacctttaccagcaggcctccccaccagatgccctgcgctggatacctaagccttgggagcggacagggccgccacctcgagaagggccctcccgacgggcagaggagcctgggtcccgaggggacaaggagcctgggttgcccccaccccgctgagggagttcctcttgccccctacccccggggcttgtatatagattataaatatataagggggaaaggggtgggcggggaggggttgtggggctggggcctcacttcccctcctcccccttcccctggtcccctgtccctggggctgtttgttaaaaaagagtaataaaaggatttaaaaaaaaaaa

SEQ ID NO: 23786 - DNA, 6893 bp, Homo sapiens
  source 1..6893: mol_type = unassigned DNA
cagccgcggagtgagcgagggagacgggaggagccgaacccggcgccatccgccgccatcctcccccgccccaccgccatcccgtcccggggagcccctaggcccgggtcccggatccccgcgcacccggccaggggacagagactgagacacttgctgtctggcccacaggctctggcacgttttgggggaggtgcctgcaggacccaacatactcaatgagcttccagcgcaatgtccgatcgctcggggccgactgccaagggaaaggatggaaagaagtattcctcgctcaacctgtttgatacgtataagggcaagtccttagagatccagaaacccgctgttgcccctcgccatggcctgcagagtctcgggaaagttgccattgcccggcgtatgccacctccagccaaccttccaagcctgaaagccgagaacaaaggcaatgaccccaatgtctcactagtgccaaaagacggaacaggatgggcaagcaaacaggagcagtccgaccccaagagttccgatgcctcaaccgctcagccgctggaatcgcagccactgccggcttcacagacgcctgcctccaaccagccgaaacgacccccagcagcccccgagaacactcctttggttccaagcggggtaaagtcctgggcacaagccagcgtcacccatggagcacatggagatggtggaagggcatcaagcctactgtcacgattctctcgagaggaatttccgaccctgcaggcggctggcgaccaggacaaggctgccaaggaaagggagtctgccgaacagtcgtctgggcccggaccaagcctccgcccccaaaattctacaacttggagggacggaggtgggcgtggccctgatgagctggagggcccggactccaaacttcatcatggtcatgatccccggggtgggctacagccttcaggcccaccccagttccctccctaccgcggaatgatgccgcctttcatgtatcccccatatctcccgttccctccgccctatggaccccaggggccttaccgataccccactcctgatgggcccagccgttttccccgtgtggcgggcccccgaggctcagggccaccaatgcgcttagtagagcctgtgggtcgtccctctattctcaaagaggataatctcaaagagtttgatcagttggatcaggagaatgatgatggttgggcaggggcccatgaagaggttgactacactgaaaagctcaagttcagcgatgaggaagatgggcgagactctgatgaggagggagctgagggccacagggattcccaatcagcttctggtgaggaacggccccctgaagcagatggcaaaaagggcaactcccccaacagcgaaccgcccactcctaagacggcctgggcagaaacctctcggcctccagagacagagccgggacctcctgccccaaagcctcccctacccccacctcaccggggccccgccgggaactggggcccccctggggactacccagatcgtgggggtcctccctgcaagcccccagcacctgaagatgaggatgaggcatggcggcagcgacgaaagcagtcgtcatctgagatttccctggcagtggagcgggcccggcgacggcgagaagaagaggagcggcgcatgcaagaagagcgccgggcagcctgtgctgagaagctcaagcgactcgatgaaaagtttggggcacctgacaagcggctcaaagcagagcctgctgccccacctgctgccccttctaccccagctccaccacctgcagtccctaaagaactccctgcacctccagctccacctccagcatcagccccaacaccagagaaagaacctgaagagccagcacaggcccctcctgcccaatctactcctactccaggtgtggctgcggctcccactctggtgagtggtggtggcagtaccagtagcaccagcagtggcagcttcgaagccagcccagtggaaccacaactgccctcaaaagagggtcctgaaccaccagaagaggttcctcctcctaccacacccccagttccaaaggtggaacccaagggtgatgggattggtcccacccgccagccccctagtcagggcttgggctaccccaaatatcagaagtcgttgcctcctcgtttccagcggcagcagcaggagcagctcctgaagcagcagcagcagcaccagtggcagcagcatcaacagggctctgcccctcctaccccagtgcccccatcaccaccacagcctgtgaccctgggggctgtgccagctccacaggctccacccccgccccccaaggccctgtacccaggtgctctgggccggcccccacccatgcccccaatgaactttgatccccgatggatgatgattcctccttatgtggacccccggctcctccagggtcgtccccctctagacttctaccctcctggtgtgcatccctctggcctagttccccgagagcgttcagacagtgggggctcaagctcagagccatttgaccgtcatgcacctgctatgttacgggaacggggcactccaccggtggatccaaagttggcctgggtaggagatgtcttcaccgccacacccgctgaaccccgcccacttacctcacctctgcgccaggctgcggatgaggatgacaaggggatgaggagcgagactcctccagtacctcccccaccaccctatctggccagttatccaggctttcctgagaatggagcccctgggcccccaatctctcgctttcctctggaggaaccagggccccgtccactcccctggcccccaggcagtgatgaagtggccaagatacaaactccaccacccaagaaggagccccctaaggaggagactgcacagctgacggggccagaagcaggccgaaagcctgcccgcggagtcgggagtggaggccagggccccccaccaccacgcagagagagtcgcacagagacccgctggggccctcgtccagggagcagtcgtcgtggaatccctccagaggagccaggggccccaccccgccgggctgggcctataaagaaacctccaccacctacaaaagtagaagagctgcctcccaagcccctcgaacagggggatgaaacccccaaacccccaaagccagacccactcaagataaccaaggggaagctagggggccccaaggagaccccacccaatggaaatctttcccctgccccaaggcttcggagggactattcgtatgaaagagtgggtcctacctcttgccggggtcggggccgaggcgagtattttgccagagggaggggttttcgggggacctatgggggacgagggcggggagcccgaagccgggaattccgcagttaccgagagtttcgaggagatgatgggcgtggaggtgggacagggggaccaaaccaccctcctgctccccgaggccgcactgccagcgagacacggagcgagggttcagagtatgaggaaatccccaagcggcgccggcagcggggctcagaaacaggcagcgagacccatgagagtgatctggctccttcagacaaggaggctcccacacccaaggagggaacactcacccaggtccctctcgctcccccaccaccaggagccccaccttcaccagccccagcccgcttcactgcccggggtgggcgagtcttcactcccagaggggtgccatctcgccggggccgaggaggagggaggccccctcctcaagtttgcccaggctggagccctccagccaagtctctggctcccaagaaacctcccacaggccctttgccaccaagtaaggagcctttgaaagagaagttgatcccagggcctctgtcccctgtggcgcgcggaggcagcaatggaggtagcaatgtgggcatggaagatggggagcgaccccgaaggaggcgacatgggagggctcagcagcaggataaaccgcctcgtttccggaggctgaagcaggaacgggagaatgccgcaagggggtctgagggcaagccctccctaacccttccagcctccgctcctggacctgaggaggccctcacaacagtcacagtggccccagcacctcgccgggcagctgccaagtctcctgatctgtcaaaccagaactcagaccaagccaatgaggaatgggagactgcatcagagagcagtgacttcaccagtgagcgccgaggggacaaagaggcacccccaccagtactgctgacacccaaggctgtgggaactcctgggggaggtggaggtggagccgtaccaggtatttcagccatgtcccgcggagatctgagccagagagccaaggatttgagtaaacggagcttctcaagtcagcggccaggcatggaacggcagaatcggcgccctggcccagggggcaaggctggcagcagtggcagcagcagtggaggaggcggtgggggtcctggaggaaggaccgggccaggacgaggcgacaagaggagctggccctctcccaagaaccgaagtcgtcctccagaggagcgtcccccggggcttcccctgcctcccccacctcccagcagttctgctgtcttccgcctggaccaagttatccacagcaaccctgctggcatccaacaggctctggcccagcttagtagccgtcaagggagtgtaactgcaccagggggtcatccaaggcacaagcctgggcctccccaagcccctcagggcccctctcctaggcccccaacccgatacgagccccagagggtcaacagcggcctcagttctgacccccactttgaggagccggggccaatggtgagaggggtgggtgggactcctcgggactctgccggggttagtccctttccccctaaacgtcgggagcggcctcccagaaaaccagagctgctacaggaggaatctttgccacctcctcatagctctggattcttgggctctaagcctgagggcccaggccctcaggcagagtccagagatacaggcacagaggccctgacccctcacatctggaaccgtttacatactgccactagccgaaagagttaccggcccagctccatggagccttggatggagcccctgagtccttttgaggatgtggctggcacagaaatgagtcagtctgacagtggggtggacctgagtggggattctcaggtgtcatcaggtccctgcagccagcgaagttcccctgatggaggactcaagggggcagcagagggaccccccaagaggcctggaggctcctcacccctgaatgctgttccttgtgagggtccacctggctctgaacctcctaggagaccaccacctgccccccacgatggggacagaaaggagctgccccgggagcagcctctgccccctggccccattggcacagaacgatcacagcgtacagaccgaggcacagagcctggccccattcggccatcccatcgacctggtcccccagtccagtttggcactagtgacaaggactcagacttacgcctagtggtaggagacagcttgaaagcagagaaggagctaacagcatcagtcactgaggccattcctgtatcacgagactgggagctgcttcccagtgctgctgcctctgctgagccacaatccaagaacctggattctgggcactgtgtcccggagcccagctcctcaggccagcgcctgtatcctgaggttttctatggcagtgctgggccttccagttctcagatctctgggggagccatggactctcaattacatccaaacagtggaggcttccgccctgggacaccctcactgcacccttacagatcacagcccctatacctaccccccggcccagcccctccctcagcactgctctctggggtagctctcaagggccagtttctggatttctccacaatgcaagctacagagctggggaagttgccggctggaggagttctctaccctccaccttccttcctctactctccggctttctgccccagtcctttgcctgacacatcgttgcttcaggtacgccaggatctgccatccccttcggatttttattctactcctctgcagcctggtggccaaagtggctttctcccttcaggggctcctgcccagcagatgcttctacccatggtagactcacagctgcctgtggtgaactttggctccctgccgccagcaccacctcctgccccacctcccctttctctgttacctgtgggccctgctctgcagccccccagcctggctgtgcggcccccacctgctcctgctactcgggtgctgccttcacctgccaggcccttccccgctagcttggggcgagcagagctgcatccagtggaactaaagccgttccaggattatcaaaaactgagcagcaaccttgggggacctggatcatcacggactcccccaactggaaggtccttctctggcctcaattcccgtctcaaggccacgccttccacctacagtggagtcttccgcacccagcgcgtcgacctttaccagcaggcctccccaccagatgccctgcgctggatacctaagccttgggagcggacagggccgccacctcgagaagggccctcccgacgggcagaggagcctgggtcccgaggggacaaggagcctgggttgcccccaccccgctgagggagttcctcttgccccctacccccggggcttgtatatagattataaatatataagggggaaaggggtgggcggggaggggttgtggggctggggcctcacttcccctcctcccccttcccctggtcccctgtccctggggctgtttgttaaaaaagagtaataaaaggatttaaaaaaaaaaa

SEQ ID NO: 23787 - DNA, 6893 bp, Homo sapiens; identical to SEQ ID NO: 23783
  source 1..6893: mol_type = unassigned DNA

SEQ ID NO: 23788 - DNA, 6873 bp, Homo sapiens
  source 1..6873: mol_type = unassigned DNA
agggggtgctcccgggggcggcggttgcccggatgggccgttagtcggggctcagccgcggagtgagcgagggagacgggaggagccgaacccggcgccatccgccgccatcctcccccgccccaccgccatcccgtcccggggagcccctaggcccgggtcccggatccccgcgcacccggccaggctctggcacgttttgggggaggtgcctgcaggacccaacatactcaatgagcttccagcgcaatgtccgatcgctcggggccgactgccaagggaaaggatggaaagaagtattcctcgctcaacctgtttgatacgtataagggcaagtccttagagatccagaaacccgctgttgcccctcgccatggcctgcagagtctcgggaaagttgccattgcccggcgtatgccacctccagccaaccttccaagcctgaaagccgagaacaaaggcaatgaccccaatgtctcactagtgccaaaagacggaacaggatgggcaagcaaacaggagcagtccgaccccaagagttccgatgcctcaaccgctcagccgccggaatcgcagccactgccggcttcacagacgcctgcctccaaccagccgaaacgacccccagcagcccccgagaacactcctttggttccaagcggggtaaagtcctgggcacaagccagcgtcacccatggagcacatggagatggtggaagggcatcaagcctactgtcacgattctctcgagaggaatttccgaccctgcaggcggctggcgaccaggacaaggctgccaaggaaagggagtctgccgaacagtcgtctgggcccggaccaagcctccgcccccaaaattctacaacttggagggacggaggtgggcgtggccctgatgagctggagggcccggactccaaacttcatcatggtcatgatccccggggtgggctacagccttcaggcccaccccagttccctccctaccgcggaatgatgccgcctttcatgtatcccccatatctcccgttccctccgccctatggaccccaggggccttaccgataccccactcctgatgggcccagccgttttccccgtgtggcgggcccccgaggctcagggccaccaatgcgcttagtagagcctgtgggtcgtccctctattctcaaagaggataatctcaaagagtttgatcagttggatcaggagaatgatgatggttgggcaggggcccatgaagaggttgactacactgaaaagctcaagttcagcgatgaggaagatgggcgagactctgatgaggagggtgctgagggccacagggattcccaatcagcttctggtgaggaacggccccctgaagcagatggcaaaaagggcaactcccccaacagcgaaccgcccactcctaagacggcctgggcagaaacctctcggcctccagagacagagccgggacctcctgccccaaagcctcccctacccccacctcaccggggccccgccgggaactggggcccccctggggactacccagatcgtgggggtcctccctgcaagcccccagcacctgaagatgaggatgaggcatggcggcagcgacgaaagcagtcgtcatctgagatttccctggcagtggagcgggcccggcgacggcgagaagaagaggagcggcgcatgcaagaagagcgccgggcagcctgtgctgagaagctcaagcgactcgatgaaaagtttggggcacctgacaagcggctcaaagcagagcctgctgccccacctgctgccccttctaccccagctccaccacctgcagtccctaaagaactccctgcacctccagctccacctccagcatcagccccaacaccagagacagaacctgaagagccagcacaggcccctcctgcccaatctactcctactccaggtgtggctgcggctcccactctggtgagtggtggtggcagtaccagtagcaccagcagtggcagcttcgaagccagcccagtggaaccacaactgccctcaaaagagggtcctgaaccaccagaagaggttcctcctcctaccacacccccagttccaaaggtggaacccaagggtgatgggattggtcccacccgccagccccctagtcagggcttgggctaccccaaatatcagaagtcgttgcctcctcgtttccagcggcagcagcaggagcagctcctgaagcagcagcagcagcaccagtggcagcagcatcaacagggctctgcccctcctaccccagtgcccccatcaccaccacagcctgtgaccctgggggctgtgccagctccacaggctccacccccgccccccaaggccctgtacccaggtgctctgggccggcccccacccatgcccccaatgaactttgatccccgatggatgatgattcctccttatgtggacccccggctcctccagggtcgtccccctctagacttctaccctcctggtgtgcatccctctggcctagttccccgagagcgttcagacagtgggggctcaagctcagagccatttgaccgtcatgcacctgctatgttacgggaacggggcactccaccggtggatccaaagttggcctgggtaggagatgtcttcaccgccacacccgctgaaccccgcccacttacctcacctctgcgccaggctgcggatgaggatgacaaggggatgaggagcgagactcctccagtacctcccccaccaccctatctggccagttatccaggctttcctgagaatggagcccctgggcccccaatctctcgctttcctctggaggaaccagggccccgtccactcccctggcccccaggcagtgatgaagtggccaagatacaaactccaccacccaagaaggagccccctaaggaggagactgcacagctgacggggccagaagcaggccgaaagcctgcccgcggagtcgggagtggaggccagggccccccaccaccacgcagagagagtcgcacagagacccgctggggccctcgtccagggagcagtcgtcgtggaatccctccagaggagccaggggccccaccccgccgggctgggcctataaagaaacctccaccacctacaaaagtagaagagctgcctcccaagcccctcgaacagggggatgaaacccccaaacccccaaagccagacccactcaagataaccaaggggaagctagggggccccaaggagaccccacccaatggaaatctttcccctgccccaaggcttcggagggactattcgtatgaaagagtgggtcctacctcttgccggggtcggggccgaggcgagtattttgccagagggaggggttttcgggggacctatgggggacgagggcggggagccgccgggaattccgcagttaccgagagtttcgaggagatgatgggcgtggaggtgggacagggggaccaaaccaccctcctgctccccgaggccgcactgccagcgagacacggagcgagggttcagagtatgaggaaatccccaagcggcgccggcagcggggctcagaaacaggcagcgagacccatgagagtgatctggctccttcagacaaggaggctcccacacccaaggagggaacactcacccaggtcccgctcccccaccaccaggagccccaccttcccagccccagcccgcttcactcccggggtgggcgagtcttcactcccagaggggatctcgccggggccgaggaggagggagcctcctcaagtttgcccaggctggagccctccagccaagtctctggctcccaagaaacctcccacaggccctttgccaccaagtaaggagcctttgaaagagaagttgatcccagggcctctgtcccctgtggcgcgcggaggcagcaatggaggtagcaatgtgggcatggaagatggggagcgaccccgaaggaggcgacatgggagggctcagcagcaggataaaccgcctcgtttccggaggctgaagcaggaacgggagaatgccgcaagggggtctgagggcaagccctccctaacccttccagcctccgctcctggacctgaggaggccctcacaacagtcacagtggccccagcacctcgccgggcagctgccaagtctcctgatctgtcaaaccagaactcagaccaagccaatgaggaatgggagactgcatcagagagcagtgacttcaccagtgagcgccgaggggacaaagaggcacccccaccagtactgctgacacccaaggctgtgggaactcctgggggaggtggaggtggagccgtaccaggtatttcagccatgtcccgcggagatctgagccagagagccaaggatttgagtaaacggagcttctcaagtcagcggccaggcatggaacggcagaatcggcgccctggcccagggggcaaggctggcagcagtggcagcagcagtggaggaggcggtgggggtcctggaggaaggaccgggccaggacgaggcgacaagaggagctggccctctcccaagaaccgaagtcgtcctccagaggagcgtcccccggggcttcccctgcctcccccacctcccagcagttctgctgtcttccgcctggaccaagttatccacagcaaccctgctggcatccaacaggctctggcccagcttagtagccgtcaagggagtgtaactgcaccagggggtcatccaaggcacaagcctgggcttccccaagcccctcagggcccctctcctaggcccccaacccgatacgagccccagagggtcaacagcggcctcagttctgacccccactttgaggagccggggccaatggtgagaggggtgggtgggactcctcgggactctgccggggttagtccctttccccctaaacgtcgggagcggcctcccagaaaaccagagctgctacaggaggaatctttgccacctcctcatagctctggattcttgggctctaagcctgagggcccaggccctcaggcagagtccagagatacaggcacagaggccctgacccctcacatctggaaccgtttacatactgccactagccgaaagagttaccggcccagctccatggagccttggatggagcccctgagtccttttgaggatgtggctggcacagaaatgagtcagtctgacagtggggtggacctgagtggggattctcaggtgtcatcaggtccctgcagccagcgaagttcccctgatggaggactcaagggggcagcagagggaccccccaagaggcctggaggctcctcacccctgaatgctgttccttgtgagggtccacctggctctgaacctcctaggagaccaccacctgccccccacgatggggacagaaaggagctgccccgggagcagcctctgccccctggccccattggcacagaacgatcacagcgtacagaccgaggcacagagcctggccccattcggccatcccatcgacctggtcccccagtccagtttggcactagtgacaaggactcagacttacgcctagtggtaggagacagcttgaaagcagagaaggagctaacagcatcagtcactgaggccattcctgtatcacgagactgggagctgcttcccagtgctgctgcctctgctgagccacaatccaagaacctggattctgggcactgtgtcccggagcccagctcctcaggccagcgcctgtatcctgaggttttctatggcagtgctgggccttccagttctcagatctctgggggacatggactctcaattacatccaaacagtggaggcgccctgggacaccctcactgcacccttacagatcacagcccctatacctaccccccggcccagcccctccctcagcactgctctctgggttagctctcaagggccagtttctggatttctccacaatgcaagctacagagctggggaagttgccggctggaggagttctctaccctccaccttccttcctctactctccggctttctgccccagtcctttgcctgacacatcgttgcttcaggtacgccaggatctgccatccccttcggatttttattctactcctctgcagcctggtggccaaagtggctttctcccttcaggggctcctgcccagcagatgcttctacccatggtagactcacagctgcctgtggtgaactttggctccctgccgccagcaccacctcctgccccacctcccctttctctgttacctgtgggccctgctctgcagccccccagcctggctgtgcggcccccacctgctcctgctactcgggtgctgccttcacctgccaggcccttccccgctagcttggggcgagcagagctgcatccagtggaactaaagccgttccaggattatcaaaaactgagcagcaaccttgggggacctggatcatcacggactcccccaactggaaggtccttctctggcctcaattcccgtctcaaggccacgccttccacctacagtggagtcttccgcacccagcgcgtcgacctttaccagcaggcctccccaccagatgccctgcgctggatacctaagccttgggagcggacagggccgccacctcgagaagggccctcccgacgggcagaggagcctgggtcccgaggggacaaggagcctgggttgcccccaccccgctgagggagttcctcttgccccctacccccggggcttgtatatagattataaatatataagggggaaaggggtgggcggggaggggttctggggctggggcctcacttcccctcctcccccttcccctggtcccctgtccctggggctgtttgttaaaaaagagtaataaaaggattt

SEQ ID NO: 23789 - DNA, 6893 bp, Homo sapiens
  source 1..6893: mol_type = unassigned DNA
cagccgcggagtgagcgagggagacgggaggagccgaacccggcgccatccgccgccatcctcccccgccccaccgccatcccgtcccggggagcccctaggcccgggtcccggatccccgcgcacccggccaggggacagagactgagacacttgctgtctggcccacaggctctggcacgttttgggggaggtgcctgcaggacccaacatactcaatgagcttccagcgcaatgtccgatcgctcggggccgactgccaagggaaaggatggaaagaagtattcctcgctcaacctgtttgatacgtataagggcaagtccttagagatccagaaacccgctgttgcccctcgccatggcctgcagagtctcgggaaagttgccattgcccggcgtatgccacctccagccaaccttccaagcctgaaagccgagaacaaaggcaatgaccccaatgtctcactagtgccaaaagacggaacaggatgggcaagcaaacaggagcagtccgaccccaagagttccgatgcctcaaccgctcagccgccggaatcgcagccactgccggcttcacagacgcctgcctccaaccagccgaaacgacccccagcagcccccgagaacactcctttggttccaagcggggtaaagtcctgggcacaagccagcgtcacccatggagcacatggagatggtggaagggcatcaagcctactgtcacgattctctcgagaggaatttccgaccctgcaggcggctggcgaccaggacaaggctgccaaggaaagggagtctgccgaacagtcgtctgggcccggaccaagcctccgcccccaaaattctacaacttggagggacggaggtgggcgtggccctgatgagctggagggcccggactccaaacttcatcatggtcatgatccccggggtgggctacagccttcaggcccaccccagttccctccctaccgcggaatgatgccgcctttcatgtatcccccatatctcccgttccctccgccctatggaccccaggggccttaccgataccccactcctgatgggcccagccgttttccccgtgtggcgggcccccgaggctcagggccaccaatgcgcttagtagagcctgtgggtcgtccctctattctcaaagaggataatctcaaagagtttgatcagttggatcaggagaatgatgatggttgggcaggggcccatgaagaggttgactacactgaaaagctcaagttcagcgatgaggaagatgggcgagactctgatgaggagggagctgagggccacagggattcccaatcagcttctggtgaggaacggccccctgaagcagatggcaaaaagggcaactcccccaacagcgaaccgcccactcctaagacggcctgggcagaaacctctcggcctccagagacagagccgggacctcctgccccaaagcctcccctacccccacctcaccggggccccgccgggaactggggcccccctggggactacccagatcgtgggggtcctccctgcaagcccccagcacctgaagatgaggatgaggcatggcggcagcgacgaaagcagtcgtcatctgagatttccctggcagtggagcgggcccggcgacggcgagaagaagaggagcggcgcatgcaagaagagcgccgggcagcctgtgctgagaagctcaagcgactcgatgaaaagtttggggcacctgacaagcggctcaaagcagagcctgctgccccacctgctgccccttctaccccagctccaccacctgcagtccctaaagaactccctgcacctccagctccacctccagcatcagccccaacaccagagaaagaacctgaagagccagcacaggcccctcctgcccaatctactcctactccaggtgtggctgcggctcccactctggtgagtggtggtggcagtaccagtagcaccagcagtggcagcttcgaagccagcccagtggaaccacaactgccctcaaaagagggtcctgaaccaccagaagaggttcctcctcctaccacacccccagttccaaaggtggaacccaagggtgatgggattggtcccacccgccagccccctagtcagggcttgggctaccccaaatatcagaagtcgttgcctcctcgtttccagcggcagcagcaggagcagctcctgaagcagcagcagcagcaccagtggcagcagcatcaacagggctctgcccctcctaccccagtgcccccatcaccaccacagcctgtgaccctgggggctgtgccagctccacaggctccacccccgccccccaaggccctgtacccaggtgctctgggccggcccccacccatgcccccaatgaactttgatccccgatggatgatgattcctccttatgtggacccccggctcctccagggtcgtccccctctagacttctaccctcctggtgtgcatccctctggcctagttccccgagagcgttcagacagtgggggctcaagctcagagccatttgaccgtcatgcacctgctatgttacgggaacggggcactccaccggtggatccaaagttggcctgggtgggagatgtcttcaccgccacacccgctgaaccccgcccacttacctcacctctgcgccaggctgcggatgaggatgacaaggggatgaggagcgagactcctccagtacctcccccaccaccctatctggccagttatccaggctttcctgagaatggagcccctgggcccccaatctctcgctttcctctggaggaaccagggccccgtccactcccctggcccccaggcagtgatgaagtggccaagatacaaactccaccacccaagaaggagccccctaaggaggagactgcacagctgacggggccagaagcaggccgaaagcctgcccgcggagtcgggagtggaggccagggccccccaccaccacgcagagagagtcgcacagagacccgctggggccctcgtccagggagcagtcgtcgtggaatccctccagaggagccaggggccccaccccgccgggctgggcctataaagaaacctccaccacctacaaaagtagaagagctgcctcccaagcccctcgaacagggggatgaaacccccaaacccccaaagccagacccactcaagataaccaaggggaagctagggggccccaaggagaccccacccaatggaaatctttcccctgccccaaggcttcggagggactattcgtatgaaagagtgggtcctacctcttgccggggtcggggccgaggcgagtattttgccagagggaggggttttcgggggacctatgggggacgagggcggggagcccgaagccgggaattccgcagttaccgagagtttcgaggagatgatgggcgtggaggtgggacagggggaccaaaccaccctcctgctccccgaggccgcactgccagcgagacacggagcgagggttcagagtatgaggaaatccccaagcggcgccggcagcggggctcagaaacaggcagcgagacccatgagagtgatctggctccttcagacaaggaggctcccacacccaaggagggaacactcacccaggtccctctcgctcccccaccaccaggagccccaccttcaccagccccagcccgcttcactgcccggggtgggcgagtcttcactcccagaggggtgccatctcgccggggccgaggaggagggaggccccctcctcaagtttgcccaggctggagccctccagccaagtctctggctcccaagaaacctcccacaggccctttgccaccaagtaaggagcctttgaaagagaagttgatcccagggcctctgtcccctgtggcgcgcggaggcagcaatggaggtagcaatgtgggcatggaagatggggagcgaccccgaaggaggcgacatgggagggctcagcagcaggataaaccgcctcgtttccggaggctgaagcaggaacgggagaatgccgcaagggggtctgagggcaagccctccctaacccttccagcctccgctcctggacctgaggaggccctcacaacagtcacagtggccccagcacctcgccgggcagctgccaagtctcctgatctgtcaaaccagaactcagaccaagccaatgaggaatgggagactgcatcagagagcagtgacttcaccagtgagcgccgaggggacaaagaggcacccccaccagtactgctgacacccaaggctgtgggaactcctgggggaggtggaggtggagccgtaccaggtatttcagccatgtcccgcggagatctgagccagagagccaaggatttgagtaaacggagcttctcaagtcagcggccaggcatggaacggcagaatcggcgccctggcccagggggcaaggctggcagcagtggcagcagcagtggaggaggcggtgggggtcctggaggaaggaccgggccaggacgaggcgacaagaggagctggccctctcccaagaaccgaagtcgtcctccagaggagcgtcccccggggcttcccctgcctcccccacctcccagcagttctgctgtcttccgcctggaccaagttatccacagcaaccctgctggcatccaacaggctctggcccagcttagtagccgtcaagggagtgtaactgcaccagggggtcatccaaggcacaagcctgggcctccccaagcccctcagggcccctctcctaggcccccaacccgatacgagccccagagggtcaacagcggcctcagttctgacccccactttgaggagccggggccaatggtgagaggggtgggtgggactcctcgggactctgccggggttagtccctttccccctaaacgtcgggagcggcctcccagaaaaccagagctgctacaggaggaatctttgccacctcctcatagctctggattcttgggctctaagcctgagggcccaggccctcaggcagagtccagagatacaggcacagaggccctgacccctcacatctggaaccgtttacatactgccactagccgaaagagttaccggcccagctccatggagccttggatggagcccctgagtccttttgaggatgtggctggcacagaaatgagtcagtctgacagtggggtggacctgagtggggattctcaggtgtcatcaggtccctgcagccagcgaagttcccctgatggaggactcaagggggcagcagagggaccccccaagaggcctggaggctcctcacccctgaatgctgttccttgtgagggtccacctggctctgaacctcctaggagaccaccacctgccccccacgatggggacagaaaggagctgccccgggagcagcctctgccccctggccccattggcacagaacgatcacagcatacagaccgaggcacagagcctggccccattcggccatcccatcgacctggtcccccagtccagtttggcactagtgacaaggactcagacttacgcctagtggtaggagacagcttgaaagcagagaaggagctaacagcatcagtcactgaggccattcctgtatcacgagactgggagctgcttcccagtgctgctgcctctgctgagccacaatccaagaacctggattctgggcactgtgtcccggagcccagctcctcaggccagcgcctgtatcctgaggttttctatggcagtgctgggccttccagttctcagatctctgggggagccatggactctcagttacatccaaacagtggaggcttccgccctgggacaccctcactgcacccttacagatcacagcccctatacctaccccccggcccagcccctccctcagcactgctctctggggtagctctcaagggccagtttctggatttctccacaatgcaagctacagagctggggaagttgccggctggaggagttctctaccctccaccttccttcctctactctccggctttctgccccagtcctttgcctgacacatcgttgcttcaggtacgccaggatctgccatccccttcggatttttattctactcctctgcagcctggtggccaaagtggctttctcccttcaggggctcctgcccagcagatgcttctacccatggtagactcacagctgcctgtggtgaactttggctccctgccgccagcaccacctcctgccccaccttccctttctctgttacctgtgggccctgctctgcagccccccagcctggctgtgcggcccccacctgctcctgctactcgggtgctgccttcacctgccaggcccttccccgctagcttggggcgagcagagctgcatccagtggaactaaagccgttccaggattatcaaaaactgagcagcaaccttgggggacctggatcatcacggactcccccaactggaaggtccttctctggcctcaattcccgtctcaaggccacgccttccacctacagtggagtcttccgcacccagcgcgtcgacctttaccagcaggcctccccaccagatgccctgcgctggatacctaagccttgggagcggacagggccgccacctcgagaagggccctcccgacgggcagaggagcctgggtcccgaggggacaaggagcctgggttgcccccaccccgctgagggagttcctcttgccccctacccccggggcttgtatatagattataaatatataagggggaaaggggtgggcggggaggggttgtggggctggggcctcacttcccctcctcccccttcccctggtcccctgtccctggggctgtttgttaaaaaagagtaataaaaggatttaaaaaaaaaaa

SEQ ID NO: 23790 - DNA, 6861 bp, Homo sapiens; identical to SEQ ID NO: 23784
  source 1..6861: mol_type = unassigned DNA

SEQ ID NO: 23791 - DNA, 6893 bp, Homo sapiens
  source 1..6893: mol_type = unassigned DNA
cagccgcggagtgagcgagggagacgggaggagccgaacccggcgccatccgccgccatcctcccccgccccaccgccatcccgtcccggggagcccctaggcccgggtcccggatccccgcgcacccggccaggggacagagactgagacacttgctgtctggcccacaggctctggcacgttttgggggaggtgcctgcaggacccaacatactcaatgagcttccagcgcaatgtccgatcgctcggggccgactgccaagggaaaggatggaaagaagtattcctcgctcaacctgtttgatacgtataagggcaagtccttagagatccagaaacccgctgttgcccctcgccatggcctgcagagtctcgggaaagttgccattgcccggcgtatgccacctccagccaaccttccaagcctgaaagccgagaacaaaggcaatgaccccaatgtctcactagtgccaaaagacggaacaggatgggcaagcaaacaggagcagtccgaccccaagagttccgatgcctcaaccgctcagccgccggaatcgcagccactgccggcttcacagacgcctgcctccaaccagccgaaacgacccccagcagcccccgagaacactcctttggttccaagcggggtaaagtcctgggcacaagccagcgtcacccatggagcacatggagatggtggaagggcatcaagcctactgtcacgattctctcgagaggaatttccgaccctgcaggcggctggcgaccaggacaaggctgccaaggaaagggagtctgccgaacagtcgtctgggcccggaccaagcctccgcccccaaaattctacaacttggagggacggaggtgggcgtggccctgatgagctggagggcccggactccaaacttcatcatggtcatgatccccggggtgggctacagccttcaggcccaccccagttccctccctaccgcggaatgatgccgcctttcatgtatcccccatatctcccgttccctccgccctatggaccccaggggccttaccgataccccactcctgatgggcccagccgttttccccgtgtggcgggcccccgaggctcagggccaccaatgcgcttagtagagcctgtgggtcgtccctctattctcaaagaggataatctcaaagagtttgatcagttggatcaggagaatgatgatggttgggcaggggcccatgaagaggttgactacactgaaaagctcaagttcagcgatgaggaagatgggcgagactctgatgaggagggagctgagggccacagggattcccaatcagcttctggtgaggaacggccccctgaagcagatggcaaaaagggcaactcccccaacagcgaaccgcccactcctaagacggcctgggcagaaacctctcggcctccagagacagagccgggacctcctgccccaaagcctcccctacccccacctcaccggggccccgccgggaactggggcccccctggggactacccagatcgtgggggtcctccctgcaagcccccagcacctgaagatgaggatgaggcatggcggcagcgacgaaagcagtcgtcatctgagatttccctggcagtggagcgggcccggcgacggcgagaagaagaggagcggcgcatgcaagaagagcgccgggcagcctgtgctgagaagctcaagcgactcgatgaaaagtttggggcacctgacaagcggctcaaagcagagcctgctgccccacctgctgccccttctaccccagctccaccacctgcagtccctaaagaactccctgcacctccagctccacctccagcatcagccccaacaccagagaaagaacctgaagagccagcacaggcccctcctgcccaatctactcctactccaggtgtggctgcggctcccactctggtgagtggtggtggcagtaccagtagcaccagcagtggcagcttcgaagccagcccagtggaaccacaactgccctcaaaagagggtcctgaaccaccagaagaggttcctcctcctaccacacccccagttccaaaggtggaacccaagggtgatgggattggtcccacccgccagccccctagtcagggcttgggctaccccaaatatcagaagtcgttgcctcctcgtttccagcggcagcagcaggagcagctcctgaagcagcagcagcagcaccagtggcagcagcatcaacagggctctgcccctcctaccccagtgcccccatcaccaccacagcctgtgaccctgggggctgtgccagctccacaggctccacccccgccccccaaggccctgtacccaggtgctctgggccggcccccacccatgcccccaatgaactttgatccccgatggatgatgattcctccttatgtggacccccggctcctccagggtcgtccccctctagacttctaccctcctggtgtgcatccctctggcctagttccccgagagcgttcagacagtgggggctcaagctcagagccatttgaccgtcatgcacctgctatgttacgggaacggggcactccaccggtggatccaaagttggcctgggtaggagatgtcttcaccgccacacccgctgaaccccgcccacttacctcacctctgcgccaggctgcggatgaggatgacaaggggatgaggagcgagactcctccagtacctcccccaccaccctatctggccagttatccaggctttcctgagaatggagcccctgggcccccaatctctcgctttcctctggaggaaccagggccccgtccactcccctggcccccaggcagtgatgaagtggccaagatacaaactccaccacccaagaaggagccccctaaggaggagactgcacagctgacggggccagaagcaggccgaaagcctgcccgcggagtcgggagtggaggccagggccccccaccaccacgcagagagagtcgcacagagacccgctggggccctcgtccagggagcagtcgtcgtggaatccctccagaggagccaggggccccaccccgccgggctgggcctataaagaaacctccaccacctacaaaagtagaagagctgcctcccaagcccctcgaacagggggatgaaacccccaaacccccaaagccagacccactcaagataaccaaggggaagctagggggccccaaggagaccccacccaatggaaatctttcccctgccccaaggcttcggagggactattcgtatgaaagagtgggtcctacctcttgccggggtcggggccgaggcgagtattttgccagagggaggggttttcgggggacctatgggggacgagggcggggagcccgaagccgggaattccgcagttaccgagagtttcgaggagatgatgggcgtggaggtgggacagggggaccaaaccaccctcctgctccccgaggccgcactgccagcgagacacggagcgagggttcagagtatgaggaaatccccaagcggcgccggcagcggggctcagaaacaggcagcgagacccatgagagtgatctggctccttcagacaaggaggctcccacacccaaggagggaacactcacccaggtccctctcgctcccccaccaccaggagccccaccttcaccagccccagcccgcttcactgcccggggtgggcgagtcttcactcccagaggggtgccatctcgccggggccgaggaggagggaggccccctcctcaagtttgcccaggctggagccctccagccaagtctctggctcccaagaaacctcccacaggccctttgccaccaagtaaggagcctttgaaagagaagttgatcccagggcctctgtcccctgtggcgcgcggaggcagcaatggaggtagcaatgtgggcatggaagatggggagcgaccccgaaggaggcgacatgggagggctcagcagcaggataaaccgcctcgtttccggaggctgaagcaggaacgggagaatgccgcaagggggtctgagggcaagccctccctaacccttccagcctccgctcctggacctgaggaggccctcacaacagtcacagtggccccagcacctcgccgggcagctgccaagtctcctgatctgtcaaaccagaactcagaccaagccaatgaggaatgggagactgcatcagagagcagtgacttcaccagtgagcgccgaggggacaaagaggcacccccaccagtactgctgacacccaaggctgtgggaactcctgggggaggtggaggtggagccgtaccaggtatttcagccatgtcccgcggagatctgagccagagagccaaggatttgagtaaacggagcttctcaagtcagcggccaggcatggaacggcagaatcggcgccctggcccagggggcaaggctggcagcagtggcagcagcagtggaggaggcggtgggggtcctggaggaaggaccgggccaggacgaggcgacaagaggagctggccctctcccaagaaccgaagtcgtcctccagaggagcgtcccccggggcttcccctgcctcccccacctcccagcagttctgctgtcttccgcctggaccaagttatccacagcaaccctgctggcatccaacaggctctggcccagcttagtagccgtcaagggagtgtaactgcaccagggggtcatccaaggcacaagcctgggcctccccaagcccctcagggcccctctcctaggcccccaacccgatacgagccccagagggtcaacagcggcctcagttctgacccccactttgaggagccggggccaatggtgagaggggtgggtgggactcctcgggactctgccggggttagtccctttccccctaaacgtcgggagcggcctcccagaaaaccagagctgctacaggaggaatctttgccacctcctcatagctctggattcttgggctctaagcctgagggcccaggccctcaggcagagtccagagatacaggcacagaggccctgacccctcacatctggaaccgtttacatactgccactagccgaaagagttaccggcccagctccatggagccttggatggagcccctgagtccttttgaggatgtggctggcacagaaatgagtcagtctgacagtggggtggacctgagtggggattctcaggtgtcatcaggtccctgcagccagcgaagttcccctgatggaggactcaagggggcagcagagggaccccccaagaggcctggaggctcctcacccctgaatgctgttccttgtgagggtccacctggctctgaacctcctaggagaccaccacctgccccccacgatggggacagaaaggagctgccccgggagcagcctctgccccctggccccattggcacagaacgatcacagcgtacagaccgaggcacagagcctggccccattcggccatcccatcgacctggtcccccagtccagtttggcactagtgacaaggactcagacttacgcctagtggtaggagacagcttgaaagcagagaaggagctaacagcatcagtcactgaggccattcctgtatcacgagactgggagctgcttcccagtgctgctgcctctgctgagccacaatccaagaacctggattctgggcactgtgtcccggagcccagctcctcaggccagcgcctgtatcctgaggttttctatggcagtgctgggccttccagttctcagatctctgggggagccatggactctcaattacatccaaacagtggaggcttccgccctgggacaccctcactgcacccttacagatcacagcccctatacctacccccgggcccagcccctccctcagcactgctctctggggtagctctcaagggccagtttctggatttctccacaatgcaagctacagagctggggaagttgccggctggaggagttctctaccctccaccttccttcctctactctccggctttctgccccagtcctttgcctgacacatcgttgcttcaggtacgccaggatctgccatccccttcggatttttattctactcctctgcagcctggtggccaaagtggatttctcccttcaggggctcctgcccagcagatgcttctacccatggtagactcacagctgcctgtggtgaactttggctccctgccgccagcaccacctcctgccccacctcccctttctctgttacctgtgggccctgctctgcagccccccagcctggctgtgcggcccccacctgctcctgctactcgggtgctgccttcacctgccaggcccttccccgctagcttggggcgagcagagctgcatccagtggaactaaagccgttccaggattatcaaaaactgagcagcaaccttgggggacctggatcatcacggactcccccaactggaaggtccttctctggcctcaattcccgtctcaaggccacgccttccacctacagtggagtcttccgcacccagcgcgtcgacctttaccagcaggcctccccaccagatgccctgcgctggatacctaagccttgggagcggacagggccgccacctcgagaagggccctcccgacgggcagaggagcctgggtcccgaggggacaaggagcctgggttgcccccaccccgctgagggagttcctcttgccccctacccccggggcttgtatatagattataaatatataagggggaaaggggtgggcggggaggggttgtggggctggggcctcacttcccctcctcccccttcccctggtcccctgtccctggggctgtttgttaaaaaagagtaataaaaggatttaaaaaaaaaaa

SEQ ID NO: 23792 - DNA, 6840 bp, Homo sapiens
  source 1..6840: mol_type = unassigned DNA
agggggtgctcccgggggcggcggttgcccggatgggccgttagtcggggctcagccgcggagtgagcgagggagacgggaggagccgaacccggcgccatccgccgccatcctcccccgccccaccgccatcccgtcccggggagcccctaggcccgggtcccggatccccgcgcacccggccaggctctggcacgttttgggggaggtgcctgcaggacccaacatactcaatgagcttccagcgcaatgtccgatcgctcggggccgactgccaagggaaaggatggaaagaagtattcctcgctcaacctgtttgatacgtataagggcaagtccttagagatccagaaacccgctgttgcccctcgccatggcctgcagagtctcgggaaagttgccattgcccggcgtatgccacctccagccaaccttccaagcctgaaagccgagaacaaaggcaatgaccccaatgtctcactagtgccaaaagacggaacaggatgggcaagcaaacaggagcagtccgaccccaagagttccgatgcctcaaccgctcagccgccggaatcgcagccactgccggcttcacagacgcctgcctccaaccagccgaaacgacccccagcagcccccgagaacactcctttggttccaagcggggtaaagtcctgggcacaagccagcgtcacccatggagcacatggagatggtggaagggcatcaagcctactgtcacgattctctcgagaggaatttccgaccctgcaggcggctggcgaccaggacaaggctgccaaggaaagggagtctgccgaacagtcgtctgggcccggaccaagcctccgcccccaaaattctacaacttggagggacggaggtgggcgtggccctgatgagctggagggcccggactccaaacttcatcatggtcatgatccccggggtgggctacagccttcaggcccaccccagttccctccctaccgcggaatgatgccgcctttcatgtatcccccatatctcccgttccctccgccctatggaccccaggggccttaccgataccccactcctgatgggcccagccgttttccccgtgtggcgggcccccgaggctcagggccaccaatgcgcttagtagagcctgtgggtcgtccctctattctcaaagaggataatctcaaagagtttgatcagttggatcaggagaatgatgatggttgggcaggggcccatgaagaggttgactacactgaaaagctcaagttcagcgatgaggaagatgggcgagactctgatgaggagggtgctgagggccacagggattcccaatcagcttctggtgaggaacggccccctgaagcagatggcaaaaagggcaactcccccaacagcgaaccgcccactcctaagacggcctgggcagaaacctctcggcctccagagacagagccgggacctcctgccccaaagcctcccctacccccccctggggactacccagatcgtgggggtcctccctgcaagcccccagcacctgaagatgaggatgaggcatggcggcagcgacgaaagcagtcgtcatctgagatttccctggcagtggagcgggcccggcgacggcgagaagaagaggagcggcgcatgcaagaagagcgccgggcagcctgtgctgagaagctcaagcgactcgatgaaaagtttggggcacctgacaagcggctcaaagcagagcctgctgccccacctgctgccccttctaccccagctccaccacctgcagtccctaaagaactccctgcacctccagctccacctccagcatcagccccaacaccagagacagaacctgaagagccagcacaggcccctcctgcccaatctactcctactccaggtgtggctgcggctcccactctggtgagtggtggtggcagtaccagtagcaccagcagtggcagcttcgaagccagcccagtggaaccacaactgccctcaaaagagggtcctgaaccaccagaagaggttcctcctcctaccacacccccagttccaaaggtggaacccaagggtgatgggattggtcccacccgccagccccctagtcagggcttgggctaccccaaatatcagaagtcgttgcctcctcgtttccagcggcagcagcaggagcagctcctgaagcagcagcagcagcaccagtggcagcagcatcaacagggctctgcccctcctaccccagtgcccccatcaccaccacagcctgtgaccctgggggctgtgccagctccacaggctccacccccgccccccaaggccctgtacccaggtgctctgggccggcccccacccatgcccccaatgaactttgatccccgatggatgatgattcctccttatgtggacccccggctcctccagggtcgtccccctctagacttctaccctcctggtgtgcatccctctggcctagttccccgagagcgttcagacagtgggggctcaagctcagagccatttgaccgtcatgcacctgctatgttacgggaacggggcactccaccggtggatccaaagttggcctgggtaggagatgtcttcaccgccacacccgctgaaccccgcccacttacctcacctctgcgccaggctgcggatgaggatgacaaggggatgaggagcgagactcctccagtacctcccccaccaccctatctggccagttatccaggctttcctgagaatggagcccctgggcccccaatctctcgctttcctctggaggaaccagggccccgtccactcccctggcccccaggcagtgatgaagtggccaagatacaaactccaccacccaagaaggagccccctaaggaggagactgcacagctgacggggccagaagcaggccgaaagcctgcccgcggagtcgggagtggaggccagggccccccaccaccacgcagagagagtcgcacagagacccgctggggccctcgtccagggagcagtcgtcgtggaatccctccagaggagccaggggccccaccccgccgggctgggcctataaagaaacctccaccacctacaaaagtagaagagctgcctcccaagcccctcgaacagggggatgaaacccccaaacccccaaagccagacccactcaagataaccaaggggaagctagggggccccaaggagaccccacccaatggaaatctttcccctgccccaaggcttcggagggactattcgtatgaaagagtgggtcctacctcttgccggggtcggggccgaggcgagtattttgccagagggaggggttttcgggggacctatgggggacgagggcggggagccgccgggaattccgcagttaccgagagtttcgaggagatgatgggcgtggaggtgggacagggggaccaaaccaccctcctgctccccgaggccgcactgccagcgagacacggagcgagggttcagagtatgaggaaatccccaagcggcgccggcagcggggctcagaaacaggcagcgagacccatgagagtgatctggctccttcagacaaggaggctcccacacccaaggagggaacactcacccaggtcccgctcccccaccaccaggagccccaccttcccagccccagcccgcttcactcccggggtgggcgagtcttcactcccagaggggatctcgccggggccgaggaggagggagcctcctcaagtttgcccaggctggagccctccagccaagtctctggctcccaagaaacctcccacaggccctttgccaccaagtaaggagcctttgaaagagaagttgatcccagggcctctgtcccctgtggcgcgcggaggcagcaatggaggtagcaatgtgggcatggaagatggggagcgaccccgaaggaggcgacatgggagggctcagcagcaggataaaccgcctcgtttccggaggctgaagcaggaacgggagaatgccgcaagggggtctgagggcaagccctccctaacccttccagcctccgctcctggacctgaggaggccctcacaacagtcacagtggccccagcacctcgccgggcagctgccaagtctcctgatctgtcaaaccagaactcagaccaagccaatgaggaatgggagactgcatcagagagcagtgacttcaccagtgagcgccgaggggacaaagaggcacccccaccagtactgctgacacccaaggctgtgggaactcctgggggaggtggaggtggagccgtaccaggtatttcagccatgtcccgcggagatctgagccagagagccaaggatttgagtaaacggagcttctcaagtcagcggccaggcatggaacggcagaatcggcgccctggcccagggggcaaggctggcagcagtggcagcagcagtggaggaggcggtgggggtcctggaggaaggaccgggccaggacgaggcgacaagaggagctggccctctcccaagaaccgaagtcgtcctccagaggagcgtcccccggggcttcccctgcctcccccacctcccagcagttctgctgtcttccgcctggaccaagttatccacagcaaccctgctggcatccaacaggctctggcccagcttagtagccgtcaagggagtgtaactgcaccagggggtcatccaaggcacaagcctgggcttccccaagcccctcagggcccctctcctaggcccccaacccgatacgagccccagagggtcaacagcggcctcagttctgacccccactttgaggagccggggccaatggtgagaggggtgggtgggactcctcgggactctgccggggttagtccctttccccctaaacgtcgggagcggcctcccagaaaaccagagctgctacaggaggaatctttgccacctcctcatagctctggattcttgggctctaagcctgagggcccaggccctcaggcagagtccagagatacaggcacagaggccctgacccctcacatctggaaccgtttacatactgccactagccgaaagagttaccggcccagctccatggagccttggatggagcccctgagtccttttgaggatgtggctggcacagaaatgagtcagtctgacagtggggtggacctgagtggggattctcaggtgtcatcaggtccctgcagccagcgaagttcccctgatggaggactcaagggggcagcagagggaccccccaagaggcctggaggctcctcacccctgaatgctgttccttgtgagggtccacctggctctgaacctcctaggagaccaccacctgccccccacgatggggacagaaaggagctgccccgggagcagcctctgccccctggccccattggcacagaacgatcacagcgtacagaccgaggcacagagcctggccccattcggccatcccatcgacctggtcccccagtccagtttggcactagtgacaaggactcagacttacgcctagtggtaggagacagcttgaaagcagagaaggagctaacagcatcagtcactgaggccattcctgtatcacgagactgggagctgcttcccagtgctgctgcctctgctgagccacaatccaagaacctggattctgggcactgtgtcccggagcccagctcctcaggccagcgcctgtatcctgaggttttctatggcagtgctgggccttccagttctcagatctctgggggacatggactctcaattacatccaaacagtggaggcgccctgggacaccctcactgcacccttacagatcacagcccctatacctaccccccggcccagcccctccctcagcactgctctctgggttagctctcaagggccagtttctggatttctccacaatgcaagctacagagctggggaagttgccggctggaggagttctctaccctccaccttccttcctctactctccggctttctgccccagtcctttgcctgacacatcgttgcttcaggtacgccaggatctgccatccccttcggatttttattctactcctctgcagcctggtggccaaagtggctttctcccttcaggggctcctgcccagcagatgcttctacccatggtagactcacagctgcctgtggtgaactttggctccctgccgccagcaccacctcctgccccacctcccctttctctgttacctgtgggccctgctctgcagccccccagcctggctgtgcggcccccacctgctcctgctactcgggtgctgccttcacctgccaggcccttccccgctagcttggggcgagcagagctgcatccagtggaactaaagccgttccaggattatcaaaaactgagcagcaaccttgggggacctggatcatcacggactcccccaactggaaggtccttctctggcctcaattcccgtctcaaggccacgccttccacctacagtggagtcttccgcacccagcgcgtcgacctttaccagcaggcctccccaccagatgccctgcgctggatacctaagccttgggagcggacagggccgccacctcgagaagggccctcccgacgggcagaggagcctgggtcccgaggggacaaggagcctgggttgcccccaccccgctgagggagttcctcttgccccctacccccggggcttgtatatagattataaatatataagggggaaaggggtgggcggggaggggttctggggctggggcctcacttcccctcctcccccttcccctggtcccctgtccctggggctgtttgttaaaaaagagtaataaaaggattt

SEQ ID NO: 23793 - DNA, 6861 bp, Homo sapiens
  source 1..6861: mol_type = unassigned DNA
gggctcagccgcggagtgagcgagggagacgggaggagccgaacccggcgccatccgccgccatcctcccccgccccaccgccatcccgtcccggggagcccctaggcccgggtcccggatccccgcgcacccggccaggctctggcacgttttgggggaggtgcctgcaggacccaacatactcaatgagcttccagcgcaatgtccgatcgctcggggccgactgccaagggaaaggatggaaagaagtattcctcgctcaacctgtttgatacgtataagggcaagtccttagagatccagaaacccgctgttgcccctcgccatggcctgcagagtctcgggaaagttgccattgcccggcgtatgccacctccagccaaccttccaagcctgaaagccgagaacaaaggcaatgaccccaatgtctcactagtgccaaaagacggaacaggatgggcaagcaaacaggagcagtccgaccccaagagttccgatgcctcaaccgctcagccgccggaatcgcagccactgccggcttcacagacgcctgcctccaaccagccgaaacgacccccagcagcccccgagaacactcctttggttccaagcggggtaaagtcctgggcacaagccagcgtcacccatggagcacatggagatggtggaagggcatcaagcctactgtcacgattctctcgagaggaatttccgaccctgcaggcggctggcgaccaggacaaggctgccaaggaaagggagtctgccgaacagtcgtctgggcccggaccaagcctccgcccccaaaattctacaacttggagggacggaggtgggcgtggccctgatgagctggagggcccggactccaaacttcatcatggtcatgatccccggggtgggctacagccttcaggcccaccccagttccctccctaccgcggaatgatgccgcctttcatgtatcccccatatctcccgttccctccgccctatggaccccaggggccttaccgataccccactcctgatgggcccagccgttttccccgtgtggcgggcccccgaggctcagggccaccaatgcgcttagtagagcctgtgggtcgtccctctattctcaaagaggataatctcaaagagtttgatcagttggatcaggagaatgatgatggttgggcaggggcccatgaagaggttgactacactgaaaagctcaagttcagcgatgaggaagatgggcgagactctgatgaggagggagctgagggccacagggattcccaatcagcttctggtgaggaacggccccctgaagcagatggcaaaaagggcaactcccccaacagcgaaccgcccactcctaagacggcctgggcagaaacctctcggcctccagagacagagccgggacctcctgccccaaagcctcccctacccccacctcaccggggccccgccgggaactggggcccccctggggactacccagatcgtgggggtcctccctgcaagcccccagcacctgaagatgaggatgaggcatggcggcagcgacgaaagcagtcgtcatctgagatttccctggcagtggagcgggcccggcgacggcgagaagaagaggagcggcgcatgcaagaagagcgccgggcagcctgtgctgagaagctcaagcgactcgatgaaaagtttggggcacctgacaagcggctcaaagcagagcctgctgccccacctgctgccccttctaccccagctccaccacctgcagtccctaaagaactccctgcacctccagctccacctccagcatcagccccaacaccagagaaagaacctgaagagccagcacaggcccctcctgcccaatctactcctactccaggtgtggctgcggctcccactctggtgagtggtggtggcagtaccagtagcaccagcagtggcagcttcgaagccagcccagtggaaccacaactgccctcaaaagagggtcctgaaccaccagaagaggttcctcctcctaccacacccccagttccaaaggtggaacccaagggtgatgggattggtcccacccgccagccccctagtcagggcttgggctaccccaaatatcagaagtcgttgcctcctcgtttccagcggcagcagcaggagcagctcctgaagcagcagcagcagcaccagtggcagcagcatcaacagggctctgcccctcctaccccagtgcccccatcaccaccacagcctgtgaccctgggggctgtgccagctccacaggctccacccccgccccccaaggccctgtacccaggtgctctgggccggcccccacccatgcccccaatgaactttgatccccgatggatgatgattcctccttatgtggacccccggctcctccagggtcgtccccctctagacttctaccctcctggtgtgcatccctctggcctagttccccgagagcgttcagacagtgggggctcaagctcagagccatttgaccgtcatgcacctgctatgttacgggaacggggcactccaccggtggatccaaagttggcctgggtgggagatgtcttcaccgccacacccgctgaaccccgcccacttacctcacctctgcgccaggctgcggatgaggatgacaaggggatgaggagcgagactcctccagtacctcccccaccaccctatctggccagttatccaggctttcctgagaatggagcccctgggcccccaatctctcgctttcctctggaggaaccagggccccgtccactcccctggcccccaggcagtgatgaagtggccaagatacaaactccaccacccaagaaggagccccctaaggaggagactgcacagctgacggggccagaagcaggccgaaagcctgcccgcggagtcgggagtggaggccagggccccccaccaccacgcagagagagtcgcacagagacccgctggggccctcgtccagggagcagtcgtcgtggaatccctccagaggagccaggggccccaccccgccgggctgggcctataaagaaacctccaccacctacaaaagtagaagagctgcctcccaagcccctcgaacagggggatgaaacccccaaacccccaaagccagacccactcaagataaccaaggggaagctagggggccccaaggagaccccacccaatggaaatctttcccctgccccaaggcttcggagggactattcgtatgaaagagtgggtcctacctcttgccggggtcggggccgaggcgagtattttgccagagggaggggttttcgggggacctatgggggacgagggcggggagcccgaagccgggaattccgcagttaccgagagtttcgaggagatgatgggcgtggaggtgggacagggggaccaaaccaccctcctgctccccgaggccgcactgccagcgagacacggagcgagggttcagagtatgaggaaatccccaagcggcgccggcagcggggctcagaaacaggcagcgagacccatgagagtgatctggctccttcagacaaggaggctcccacacccaaggagggaacactcacccaggtccctctcgctcccccaccaccaggagccccaccttcaccagccccagcccgcttcactgcccggggtgggcgagtcttcactcccagaggggtgccatctcgccggggccgaggaggagggaggccccctcctcaagtttgcccaggctggagccctccagccaagtctctggctcccaagaaacctcccacaggccctttgccaccaagtaaggagcctttgaaagagaagttgatcccagggcctctgtcccctgtggcgcgcggaggcagcaatggaggtagcaatgtgggcatggaagatggggagcgaccccgaaggaggcgacatgggagggctcagcagcaggataaaccgcctcgtttccggaggctgaagcaggaacgggagaatgccgcaagggggtctgagggcaagccctccctaacccttccagcctccgctcctggacctgaggaggccctcacaacagtcacagtggccccagcacctcgccgggcagctgccaagtctcctgatctgtcaaaccagaactcagaccaagccaatgaggaatgggagactgcatcagagagcagtgacttcaccagtgagcgccgaggggacaaagaggcacccccaccagtactgctgacacccaaggctgtgggaactcctgggggaggtggaggtggagccgtaccaggtatttcagccatgtcccgcggagatctgagccagagagccaaggatttgagtaaacggagcttctcaagtcagcggccaggcatggaacggcagaatcggcgccctggcccagggggcaaggctggcagcagtggcagcagcagtggaggaggcggtgggggtcctggaggaaggaccgggccaggacgaggcgacaagaggagctggccctctcccaagaaccgaagtcgtcctccagaggagcgtcccccggggcttcccctgcctcccccacctcccagcagttctgctgtcttccgcctggaccaagttatccacagcaaccctgctggcatccaacaggctctggcccagcttagtagccgtcaagggagtgtaactgcaccagggggtcatccaaggcacaagcctgggcctccccaagcccctcagggcccctctcctaggcccccaacccgatacgagccccagagggtcaacagcggcctcagttctgacccccactttgaggagccggggccaatggtgagaggggtgggtgggactcctcgggactctgccggggttagtccctttccccctaaacgtcgggagcggcctcccagaaaaccagagctgctacaggaggaatctttgccacctcctcatagctctggattcttgggctctaagcctgagggcccaggccctcaggcagagtccagagatacaggcacagaggccctgacccctcacatctggaaccgtttacatactgccactagccgaaagagttaccggcccagctccatggagccttggatggagcccctgagtccttttgaggatgtggctggcacagaaatgagtcagtctgacagtggggtggacctgagtggggattctcaggtgtcatcaggtccctgcagccagcgaagttcccctgatggaggactcaagggggcagcagagggaccccccaagaggcctggaggctcctcacccctgaatgctgttccttgtgagggtccacctggctctgaacctcctaggagaccaccacctgccccccacgatggggacagaaaggagctgccccgggagcagcctctgccccctggccccattggcacagaacgatcacagcatacagaccgaggcacagagcctggccccattcggccatcccatcgacctggtcccccagtccagtttggcactagtgacaaggactcagacttacgcctagtggtaggagacagcttgaaagcagagaaggagctaacagcatcagtcactgaggccattcctgtatcacgagactgggagctgcttcccagtgctgctgcctctgctgagccacaatccaagaacctggattctgggcactgtgtcccggagcccagctcctcaggccagcgcctgtatcctgaggttttctatggcagtgctgggccttccagttctcagatctctgggggagccatggactctcagttacatccaaacagtggaggcttccgccctgggacaccctcactgcacccttacagatcacagcccctatacctaccccccggcccagcccctccctcagcactgctctctggggtagctctcaagggccagtttctggatttctccacaatgcaagctacagagctggggaagttgccggctggaggagttctctaccctccaccttccttcctctactctccggctttctgccccagtcctttgcctgacacatcgttgcttcaggtacgccaggatctgccatccccttcggatttttattctactcctctgcagcctggtggccaaagtggctttctcccttcaggggctcctgcccagcagatgcttctacccatggtagactcacagctgcctgtggtgaactttggctccctgccgccagcaccacctcctgccccaccttccctttctctgttacctgtgggccctgctctgcagccccccagcctggctgtgcggcccccacctgctcctgctactcgggtgctgccttcacctgccaggcccttccccgctagcttggggcgagcagagctgcatccagtggaactaaagccgttccaggattatcaaaaactgagcagcaaccttgggggacctggatcatcacggactcccccaactggaaggtccttctctggcctcaattcccgtctcaaggccacgccttccacctacagtggagtcttccgcacccagcgcgtcgacctttaccagcaggcctccccaccagatgccctgcgctggatacctaagccttgggagcggacagggccgccacctcgagaagggccctcccgacgggcagaggagcctgggtcccgaggggacaaggagcctgggttgcccccaccccgctgagggagttcctcttgccccctacccccggggcttgtatatagattataaatatataagggggaaaggggtgggcggggaggggttgtggggctggggcctcacttcccctcctcccccttcccctggtcccctgtccctggggctgtttgttaaaaaagagtaataaaaggatttaaaaaaaaaaa

SEQ ID NO: 23794 - DNA, 6861 bp, Homo sapiens
  source 1..6861: mol_type = unassigned DNA
gggctcagccgcggagtgagcgagggagacgggaggagccgaacccggcgccatccgccgccatcctcccccgccccaccgccatcccgtcccggggagcccctaggcccgggtcccggatccccgcgcacccggccaggctctggcacgttttgggggaggtgcctgcaggacccaacatactcaatgagcttccagcgcaatgtccgatcgctcggggccgactgccaagggaaaggatggaaagaagtattcctcgctcaacctgtttgatacgtataagggcaagtccttagagatccagaaacccgctgttgcccctcgccatggcctgcagagtctcgggaaagttgccattgcccggcgtatgccacctccagccaaccttccaagcctgaaagccgagaacaaaggcaatgaccccaatgtctcactagtgccaaaagacggaacaggatgggcaagcaaacaggagcagtccgaccccaagagttccgatgcctcaaccgctcagccgctggaatcgcagccactgccggcttcacagacgcctgcctccaaccagccgaaacgacccccagcagcccccgagaacactcctttggttccaagcggggtaaagtcctgggcacaagccagcgtcacccatggagcacatggagatggtggaagggcatcaagcctactgtcacgattctctcgagaggaatttccgaccctgcaggcggctggcgaccaggacaaggctgccaaggaaagggagtctgccgaacagtcgtctgggcccggaccaagcctccgcccccaaaattctacaacttggagggacggaggtgggcgtggccctgatgagctggagggcccggactccaaacttcatcatggtcatgatccccggggtgggctacagccttcaggcccaccccagttccctccctaccgcggaatgatgccgcctttcatgtatcccccatatctcccgttccctccgccctatggaccccaggggccttaccgataccccactcctgatgggcccagccgttttccccgtgtggcgggcccccgaggctcagggccaccaatgcgcttagtagagcctgtgggtcgtccctctattctcaaagaggataatctcaaagagtttgatcagttggatcaggagaatgatgatggttgggcaggggcccatgaagaggttgactacactgaaaagctcaagttcagcgatgaggaagatgggcgagactctgatgaggagggagctgagggccacagggattcccaatcagcttctggtgaggaacggccccctgaagcagatggcaaaaagggcaactcccccaacagcgaaccgcccactcctaagacggcctgggcagaaacctctcggcctccagagacagagccgggacctcctgccccaaagcctcccctacccccacctcaccggggccccgccgggaactggggcccccctggggactacccagatcgtgggggtcctccctgcaagcccccagcacctgaagatgaggatgaggcatggcggcagcgacgaaagcagtcgtcatctgagatttccctggcagtggagcgggcccggcgacggcgagaagaagaggagcggcgcatgcaagaagagcgccgggcagcctgtgctgagaagctcaagcgactcgatgaaaagtttggggcacctgacaagcggctcaaagcagagcctgctgccccacctgctgccccttctaccccagctccaccacctgcagtccctaaagaactccctgcacctccagctccacctccagcatcagccccaacaccagagaaagaacctgaagagccagcacaggcccctcctgcccaatctactcctactccaggtgtggctgcggctcccactctggtgagtggtggtggcagtaccagtagcaccagcagtggcagcttcgaagccagcccagtggaaccacaactgccctcaaaagagggtcctgaaccaccagaagaggttcctcctcctaccacacccccagttccaaaggtggaacccaagggtgatgggattggtcccacccgccagccccctagtcagggcttgggctaccccaaatatcagaagtcgttgcctcctcgtttccagcggcagcagcaggagcagctcctgaagcagcagcagcagcaccagtggcagcagcatcaacagggctctgcccctcctaccccagtgcccccatcaccaccacagcctgtgaccctgggggctgtgccagctccacaggctccacccccgccccccaaggccctgtacccaggtgctctgggccggcccccacccatgcccccaatgaactttgatccccgatggatgatgattcctccttatgtggacccccggctcctccagggtcgtccccctctagacttctaccctcctggtgtgcatccctctggcctagttccccgagagcgttcagacagtgggggctcaagctcagagccatttgaccgtcatgcacctgctatgttacgggaacggggcactccaccggtggatccaaagttggcctgggtaggagatgtcttcaccgccacacccgctgaaccccgcccacttacctcacctctgcgccaggctgcggatgaggatgacaaggggatgaggagcgagactcctccagtacctcccccaccaccctatctggccagttatccaggctttcctgagaatggagcccctgggcccccaatctctcgctttcctctggaggaaccagggccccgtccactcccctggcccccaggcagtgatgaagtggccaagatacaaactccaccacccaagaaggagccccctaaggaggagactgcacagctgacggggccagaagcaggccgaaagcctgcccgcggagtcgggagtggaggccagggccccccaccaccacgcagagagagtcgcacagagacccgctggggccctcgtccagggagcagtcgtcgtggaatccctccagaggagccaggggccccaccccgccgggctgggcctataaagaaacctccaccacctacaaaagtagaagagctgcctcccaagcccctcgaacagggggatgaaacccccaaacccccaaagccagacccactcaagataaccaaggggaagctagggggccccaaggagaccccacccaatggaaatctttcccctgccccaaggcttcggagggactattcgtatgaaagagtgggtcctacctcttgccggggtcggggccgaggcgagtattttgccagagggaggggttttcgggggacctatgggggacgagggcggggagcccgaagccgggaattccgcagttaccgagagtttcgaggagatgatgggcgtggaggtgggacagggggaccaaaccaccctcctgctccccgaggccgcactgccagcgagacacggagcgagggttcagagtatgaggaaatccccaagcggcgccggcagcggggctcagaaacaggcagcgagacccatgagagtgatctggctccttcagacaaggaggctcccacacccaaggagggaacactcacccaggtccctctcgctcccccaccaccaggagccccaccttcaccagccccagcccgcttcactgcccggggtgggcgagtcttcactcccagaggggtgccatctcgccggggccgaggaggagggaggccccctcctcaagtttgcccaggctggagccctccagccaagtctctggctcccaagaaacctcccacaggccctttgccaccaagtaaggagcctttgaaagagaagttgatcccagggcctctgtcccctgtggcgcgcggaggcagcaatggaggtagcaatgtgggcatggaagatggggagcgaccccgaaggaggcgacatgggagggctcagcagcaggataaaccgcctcgtttccggaggctgaagcaggaacgggagaatgccgcaagggggtctgagggcaagccctccctaacccttccagcctccgctcctggacctgaggaggccctcacaacagtcacagtggccccagcacctcgccgggcagctgccaagtctcctgatctgtcaaaccagaactcagaccaagccaatgaggaatgggagactgcatcagagagcagtgacttcaccagtgagcgccgaggggacaaagaggcacccccaccagtactgctgacacccaaggctgtgggaactcctgggggaggtggaggtggagccgtaccaggtatttcagccatgtcccgcggagatctgagccagagagccaaggatttgagtaaacggagcttctcaagtcagcggccaggcatggaacggcagaatcggcgccctggcccagggggcaaggctggcagcagtggcagcagcagtggaggaggcggtgggggtcctggaggaaggaccgggccaggacgaggcgacaagaggagctggccctctcccaagaaccgaagtcgtcctccagaggagcgtcccccggggcttcccctgcctcccccacctcccagcagttctgctgtcttccgcctggaccaagttatccacagcaaccctgctggcatccaacaggctctggcccagcttagtagccgtcaagggagtgtaactgcaccagggggtcatccaaggcacaagcctgggcctccccaagcccctcagggcccctctcctaggcccccaacccgatacgagccccagagggtcaacagcggcctcagttctgacccccactttgaggagccggggccaatggtgagaggggtgggtgggactcctcgggactctgccggggttagtccctttccccctaaacgtcgggagcggcctcccagaaaaccagagctgctacaggaggaatctttgccacctcctcatagctctggattcttgggctctaagcctgagggcccaggccctcaggcagagtccagagatacaggcacagaggccctgacccctcacatctggaaccgtttacatactgccactagccgaaagagttaccggcccagctccatggagccttggatggagcccctgagtccttttgaggatgtggctggcacagaaatgagtcagtctgacagtggggtggacctgagtggggattctcaggtgtcatcaggtccctgcagccagcgaagttcccctgatggaggactcaagggggcagcagagggaccccccaagaggcctggaggctcctcacccctgaatgctgttccttgtgagggtccacctggctctgaacctcctaggagaccaccacctgccccccacgatggggacagaaaggagctgccccgggagcagcctctgccccctggccccattggcacagaacgatcacagcgtacagaccgaggcacagagcctggccccattcggccatcccatcgacctggtcccccagtccagtttggcactagtgacaaggactcagacttacgcctagtggtaggagacagcttgaaagcagagaaggagctaacagcatcagtcactgaggccattcctgtatcacgagactgggagctgcttcccagtgctgctgcctctgctgagccacaatccaagaacctggattctgggcactgtgtcccggagcccagctcctcaggccagcgcctgtatcctgaggttttctatggcagtgctgggccttccagttctcagatctctgggggagccatggactctcaattacatccaaacagtggaggcttccgccctgggacaccctcactgcacccttacagatcacagcccctatacctaccccccggcccagcccctccctcagcactgctctctggggtagctctcaagggccagtttctggatttctccacaatgcaagctacagagctggggaagttgccggctggaggagttctctaccctccaccttccttcctctactctccggctttctgccccagtcctttgcctgacacatcgttgcttcaggtacgccaggatctgccatccccttcggatttttattctactcctctgcagcctggtggccaaagtggctttctcccttcaggggctcctgcccagcagatgcttctacccatggtagactcacagctgcctgtggtgaactttggctccctgccgccagcaccacctcctgccccacctcccctttctctgttacctgtgggccctgctctgcagccccccagcctggctgtgcggcccccacctgctcctgctactcgggtgctgccttcacctgccaggcccttccccgctagcttggggcgagcagagctgcatccagtggaactaaagccgttccaggattatcaaaaactgagcagcaaccttgggggacctggatcatcacggactcccccaactggaaggtccttctctggcctcaattcccgtctcaaggccacgccttccacctacagtggagtcttccgcacccagcgcgtcgacctttaccagcaggcctccccaccagatgccctgcgctggatacctaagccttgggagcggacagggccgccacctcgagaagggccctcccgacgggcagaggagcctgggtcccgaggggacaaggagcctgggttgcccccaccccgctgagggagttcctcttgccccctacccccggggcttgtatatagattataaatatataagggggaaaggggtgggcggggaggggttgtggggctggggcctcacttcccctcctcccccttcccctggtcccctgtccctggggctgtttgttaaaaaagagtaataaaaggatttaaaaaaaaaaa

SEQ ID NO: 23795 - DNA, 6861 bp, Homo sapiens
  source 1..6861: mol_type = unassigned DNA
gggctcagccgcggagtgagcgagggagacgggaggagccgaacccggcgccatccgccgccatcctcccccgccccaccgccatcccgtcccggggagcccctaggcccgggtcccggatccccgcgcacccggccaggctctggcacgttttgggggaggtgcctgcaggacccaacatactcaatgagcttccagcgcaatgtccgatcgctcggggccgactgccaagggaaaggatggaaagaagtattcctcgctcaacctgtttgatacgtataagggcaagtccttagagatccagaaacccgctgttgcccctcgccatggcctgcagagtctcgggaaagttgccattgcccggcgtatgccacctccagccaaccttccaagcctgaaagccgagaacaaaggcaatgaccccaatgtctcactagtgccaaaagacggaacaggatgggcaagcaaacaggagcagtccgaccccaagagttccgatgcctcaaccgctcagccgccggaatcgcagccactgccggcttcacagacgcctgcctccaaccagccgaaacgacccccagcagcccccgagaacactcctttggttccaagcggggtaaagtcctgggcacaagccagcgtcacccatggagcacatggagatggtggaagggcatcaagcctactgtcacgattctctcgagaggaatttccgaccctgcaggcggctggcgaccaggacaaggctgccaaggaaagggagtctgccgaacagtcgtctgggcccggaccaagcctccgcccccaaaattctacaacttggagggacggaggtgggcgtggccctgatgagctggagggcccggactccaaacttcatcatggtcatgatccccggggtgggctacagccttcaggcccaccccagttccctccctaccgcggaatgatgccgcctttcatgtatcccccatatctcccgttccctccgccctatggaccccaggggccttaccgataccccactcctgatgggcccagccgttttccccgtgtggcgggcccccgaggctcagggccaccaatgcgcttagtagagcctgtgggtcgtccctctattctcaaagaggataatctcaaagagtttgatcagttggatcaggagaatgatgatggttgggcaggggcccatgaagaggttgactacactgaaaagctcaagttcagcgatgaggaagatgggcgagactctgatgaggagggagctgagggccacagggattcccaatcagcttctggtgaggaacggccccctgaagcagatggcaaaaagggcaactcccccaacagcgaaccgcccactcctaagacggcctgggcagaaacctctcggcctccagagacagagccgggacctcctgccccaaagcctcccctacccccacctcaccggggccccgccgggaactggggcccccctggggactacccagatcgtgggggtcctccctgcaagcccccagcacctgaagatgaggatgaggcatggcggcagcgacgaaagcagtcgtcatctgagatttccctggcagtggagcgggcccggcgacggcgagaagaagaggagcggcgcatgcaagaagagcgccgggcagcctgtgctgagaagctcaagcgactcgatgaaaagtttggggcacctgacaagcggctcaaagcagagcctgctgccccacctgctgccccttctaccccagctccaccacctgcagtccctaaagaactccctgcacctccagctccacctccagcatcagccccaacaccagagaaagaacctgaagagccagcacaggcccctcctgcccaatctactcctactccaggtgtggctgcggctcccactctggtgagtggtggtggcagtaccagtagcaccagcagtggcagcttcgaagccagcccagtggaaccacaactgccctcaaaagagggtcctgaaccaccagaagaggttcctcctcctaccacacccccagttccaaaggtggaacccaagggtgatgggattggtcccacccgccagccccctagtcagggcttgggctaccccaaatatcagaagtcgttgcctcctcgtttccagcggcagcagcaggagcagctcctgaagcagcagcagcagcaccagtggcagcagcatcaacagggctctgcccctcctaccccagtgcccccatcaccaccacagcctgtgaccctgggggctgtgccagctccacaggctccacccccgccccccaaggccctgtacccaggtgctctgggccggcccccacccatgcccccaatgaactttgatccccgatggatgatgattcctccttatgtggacccccggctcctccagggtcgtccccctctagacttctaccctcctggtgtgcatccctctggcctagttccccgagagcgttcagacagtgggggctcaagctcagagccatttgaccgtcatgcacctgctatgttacgggaacggggcactccaccggtggatccaaagttggcctgggtaggagatgtcttcaccgccacacccgctgaaccccgcccacttacctcacctctgcgccaggctgcggatgaggatgacaaggggatgaggagcgagactcctccagtacctcccccaccaccctatctggccagttatccaggctttcctgagaatggagcccctgggcccccaatctctcgctttcctctggaggaaccagggccccgtccactcccctggcccccaggcagtgatgaagtggccaagatacaaactccaccacccaagaaggagccccctaaggaggagactgcacagctgacggggccagaagcaggccgaaagcctgcccgcggagtcgggagtggaggccagggccccccaccaccacgcagagagagtcgcacagagacccgctggggccctcgtccagggagcagtcgtcgtggaatccctccagaggagccaggggccccaccccgccgggctgggcctataaagaaacctccaccacctacaaaagtagaagagctgcctcccaagcccctcgaacagggggatgaaacccccaaacccccaaagccagacccactcaagataaccaaggggaagctagggggccccaaggagaccccacccaatggaaatctttcccctgccccaaggcttcggagggactattcgtatgaaagagtgggtcctacctcttgccggggtcggggccgaggcgagtattttgccagagggaggggttttcgggggacctatgggggacgagggcggggagcccgaagccgggaattccgcagttaccgagagtttcgaggagatgatgggcgtggaggtgggacagggggaccaaaccaccctcctgctccccgaggccgcactgccagcgagacacggagcgagggttcagagtatgaggaaatccccaagcggcgccggcagcggggctcagaaacaggcagcgagacccatgagagtgatctggctccttcagacaaggaggctcccacacccaaggagggaacactcacccaggtccctctcgctcccccaccaccaggagccccaccttcaccagccccagcccgcttcactgcccggggtgggcgagtcttcactcccagaggggtgccatctcgccggggccgaggaggagggaggccccctcctcaagtttgcccaggctggagccctccagccaagtctctggctcccaagaaacctcccacaggccctttgccaccaagtaaggagcctttgaaagagaagttgatcccagggcctctgtcccctgtggcgcgcggaggcagcaatggaggtagcaatgtgggcatggaagatggggagcgaccccgaaggaggcgacatgggagggctcagcagcaggataaaccgcctcgtttccggaggctgaagcaggaacgggagaatgccgcaagggggtctgagggcaagccctccctaacccttccagcctccgctcctggacctgaggaggccctcacaacagtcacagtggccccagcacctcgccgggcagctgccaagtctcctgatctgtcaaaccagaactcagaccaagccaatgaggaatgggagactgcatcagagagcagtgacttcaccagtgagcgccgaggggacaaagaggcacccccaccagtactgctgacacccaaggctgtgggaactcctgggggaggtggaggtggagccgtaccaggtatttcagccatgtcccgcggagatctgagccagagagccaaggatttgagtaaacggagcttctcaagtcagcggccaggcatggaacggcagaatcggcgccctggcccagggggcaaggctggcagcagtggcagcagcagtggaggaggcggtgggggtcctggaggaaggaccgggccaggacgaggcgacaagaggagctggccctctcccaagaaccgaagtcgtcctccagaggagcgtcccccggggcttcccctgcctcccccacctcccagcagttctgctgtcttccgcctggaccaagttatccacagcaaccctgctggcatccaacaggctctggcccagcttagtagccgtcaagggagtgtaactgcaccagggggtcatccaaggcacaagcctgggcctccccaagcccctcagggcccctctcctaggcccccaacccgatacgagccccagagggtcaacagcggcctcagttctgacccccactttgaggagccggggccaatggtgagaggggtgggtgggactcctcgggactctgccggggttagtccctttccccctaaacgtcgggagcggcctcccagaaaaccagagctgctacaggaggaatctttgccacctcctcatagctctggattcttgggctctaagcctgagggcccaggccctcaggcagagtccagagatacaggcacagaggccctgacccctcacatctggaaccgtttacatactgccactagccgaaagagttaccggcccagctccatggagccttggatggagcccctgagtccttttgaggatgtggctggcacagaaatgagtcagtctgacagtggggtggacctgagtggggattctcaggtgtcatcaggtccctgcagccagcgaagttcccctgatggaggactcaagggggcagcagagggaccccccaagaggcctggaggctcctcacccctgaatgctgttccttgtgagggtccacctggctctgaacctcctaggagaccaccacctgccccccacgatggggacagaaaggagctgccccgggagcagcctctgccccctggccccattggcacagaacgatcacagcgtacagaccgaggcacagagcctggccccattcggccatcccatcgacctggtcccccagtccagtttggcactagtgacaaggactcagacttacgcctagtggtaggagacagcttgaaagcagagaaggagctaacagcatcagtcactgaggccattcctgtatcacgagactgggagctgcttcccagtgctgctgcctctgctgagccacaatccaagaacctggattctgggcactgtgtcccggagcccagctcctcaggccagcgcctgtatcctgaggttttctatggcagtgctgggccttccagttctcagatctctgggggagccatggactctcaattacatccaaacagtggaggcttccgccctgggacaccctcactgcacccttacagatcacagcccctatacctacccccgggcccagcccctccctcagcactgctctctggggtagctctcaagggccagtttctggatttctccacaatgcaagctacagagctggggaagttgccggctggaggagttctctaccctccaccttccttcctctactctccggctttctgccccagtcctttgcctgacacatcgttgcttcaggtacgccaggatctgccatccccttcggatttttattctactcctctgcagcctggtggccaaagtggatttctcccttcaggggctcctgcccagcagatgcttctacccatggtagactcacagctgcctgtggtgaactttggctccctgccgccagcaccacctcctgccccacctcccctttctctgttacctgtgggccctgctctgcagccccccagcctggctgtgcggcccccacctgctcctgctactcgggtgctgccttcacctgccaggcccttccccgctagcttggggcgagcagagctgcatccagtggaactaaagccgttccaggattatcaaaaactgagcagcaaccttgggggacctggatcatcacggactcccccaactggaaggtccttctctggcctcaattcccgtctcaaggccacgccttccacctacagtggagtcttccgcacccagcgcgtcgacctttaccagcaggcctccccaccagatgccctgcgctggatacctaagccttgggagcggacagggccgccacctcgagaagggccctcccgacgggcagaggagcctgggtcccgaggggacaaggagcctgggttgcccccaccccgctgagggagttcctcttgccccctacccccggggcttgtatatagattataaatatataagggggaaaggggtgggcggggaggggttgtggggctggggcctcacttcccctcctcccccttcccctggtcccctgtccctggggctgtttgttaaaaaagagtaataaaaggatttaaaaaaaaaaa

SEQ ID NO: 23796 - DNA, 6861 bp, Homo sapiens
  source 1..6861: mol_type = unassigned DNA
gggctcagccgcggagtgagcgagggagacgggaggagccgaacccggcgccatccgccgccatcctcccccgccccaccgccatcccgtcccggggagcccctaggcccgggtcccggatccccgcgcacccggccaggctctggcacgttttgggggaggtgcctgcaggacccaacatactcaatgagcttccagcgcaatgtccgatcgctcggggccgactgccaagggaaaggatggaaagaagtattcctcgctcaacctgtttgatacgtataagggcaagtccttagagatccagaaacccgctgttgcccctcgccatggcctgcagagtctcgggaaagttgccattgcccggcgtatgccacctccagccaaccttccaagcctgaaagccgagaacaaaggcaatgaccccaatgtctcactagtgccaaaagacggaacaggatgggcaagcaaacaggagcagtccgaccccaagagttccgatgcctcaaccgctcagccgccggaatcgcagccactgccggcttcacagacgcctgcctccaaccagccgaaacgacccccagcagcccccgagaacactcctttggttccaagcggggtaaagtcctgggcacaagccagcgtcacccatggagcacatggagatggtggaagggcatcaagcctactgtcacgattctctcgagaggaatttccgaccctgcaggcggctggcgaccaggacaaggctgccaaggaaagggagtctgccgaacagtcgtctgggcccggaccaagcctccgcccccaaaattctacaacttggagggacggaggtgggcgtggccctgatgagctggagggcccggactccaaacttcatcatggtcatgatccccggggtgggctacagccttcaggcccaccccagttccctccctaccgcggaatgatgccgcctttcatgtatcccccatatctcccgttccctccgccctatggaccccaggggccttaccgataccccactcctgatgggcccagccgttttccccgtgtggcgggcccccgaggctcagggccaccaatgcgcttagtagagcctgtgggtcgtccctctattctcaaagaggataatctcaaagagtttgatcagttggatcaggagaatgatgatggttgggcaggggcccatgaagaggttgactacactgaaaagctcaagttcagcgatgaggaagatgggcgagactctgatgaggagggagctgagggccacagggattcccaatcagcttctggtgaggaacggccccctgaagcagatggcaaaaagggcaactcccccaacagcgaaccgcccactcctaagacggcctgggcagaaacctctcggcctccagagacagagccgggacctcctgccccaaagcctcccctacccccacctcaccggggccccgccgggaactggggcccccctggggactacccagatcgtgggggtcctccctgcaagcccccagcacctgaagatgaggatgaggcatggcggcagcgacgaaagcagtcgtcatctgagatttccctggcagtggagcgggcccggcgacggcgagaagaagaggagcggcgcatgcaagaagagcgccgggcagcctgtgctgagaagctcaagcgactcgatgaaaagtttggggcacctgacaagcggctcaaagcagagcctgctgccccacctgctgccccttctaccccagctccaccacctgcagtccctaaagaactccctgcacctccagctccacctccagcatcagccccaacaccagagacagaacctgaagagccagcacaggcccctcctgcccaatctactcctactccaggtgtggctgcggctcccactctggtgagtggtggtggcagtaccagtagcaccagcagtggcagcttcgaagccagcccagtggaaccacaactgccctcaaaagagggtcctgaaccaccagaagaggttcctcctcctaccacacccccagttccaaaggtggaacccaagggtgatgggattggtcccacccgccagccccctagtcagggcttgggctaccccaaatatcagaagtcgttgcctcctcgtttccagcggcagcagcaggagcagctcctgaagcagcagcagcagcaccagtggcagcagcatcaacagggctctgcccctcctaccccagtgcccccatcaccaccacagcctgtgaccctgggggctgtgccagctccacaggctccacccccgccccccaaggccctgtacccaggtgctctgggccggcccccacccatgcccccaatgaactttgatccccgatggatgatgattcctccttatgtggacccccggctcctccagggtcgtccccctctagacttctaccctcctggtgtgcatccctctggcctagttccccgagagcgttcagacagtgggggctcaagctcagagccatttgaccgtcatgcacctgctatgttacgggaacggggcactccaccggtggatccaaagttggcctgggtaggagatgtcttcaccgccacacccgctgaaccccgcccacttacctcacctctgcgccaggctgcggatgaggatgacaaggggatgaggagcgagactcctccagtacctcccccaccaccctatctggccagttatccaggctttcctgagaatggagcccctgggcccccaatctctcgctttcctctggaggaaccagggccccgtccactcccctggcccccaggcagtgatgaagtggccaagatacaaactccaccacccaagaaggagccccctaaggaggagactgcacagctgacggggccagaagcaggccgaaagcctgcccgcggagtcgggagtggaggccagggccccccaccaccacgcagagagagtcgcacagagacccgctggggccctcgtccagggagcagtcgtcgtggaatccctccagaggagccaggggccccaccccgccgggctgggcctataaagaaacctccaccacctacaaaagtagaagagctgcctcccaagcccctcgaacagggggatgaaacccccaaacccccaaagccagacccactcaagataaccaaggggaagctagggggccccaaggagaccccacccaatggaaatctttcccctgccccaaggcttcggagggactattcgtatgaaagagtgggtcctacctcttgccggggtcggggccgaggcgagtattttgccagagggaggggttttcgggggacctatgggggacgagggcggggagcccgaagccgggaattccgcagttaccgagagtttcgaggagatgatgggcgtggaggtgggacagggggaccaaaccaccctcctgctccccgaggccgcactgccagcgagacacggagcgagggttcagagtatgaggaaatccccaagcggcgccggcagcggggctcagaaacaggcagcgagacccatgagagtgatctggctccttcagacaaggaggctcccacacccaaggagggaacactcacccaggtccctctcgctcccccaccaccaggagccccaccttcaccagccccagcccgcttcactgcccggggtgggcgagtcttcactcccagaggggtgccatctcgccggggccgaggaggagggaggccccctcctcaagtttgcccaggctggagccctccagccaagtctctggctcccaagaaacctcccacaggccctttgccaccaagtaaggagcctttgaaagagaagttgatcccagggcctctgtcccctgtggcgcgcggaggcagcaatggaggtagcaatgtgggcatggaagatggggagcgaccccgaaggaggcgacatgggagggctcagcagcaggataaaccgcctcgtttccggaggctgaagcaggaacgggagaatgccgcaagggggtctgagggcaagccctccctaacccttccagcctccgctcctggacctgaggaggccctcacaacagtcacagtggccccagcacctcgccgggcagctgccaagtctcctgatctgtcaaaccagaactcagaccaagccaatgaggaatgggagactgcatcagagagcagtgacttcaccagtgagcgccgaggggacaaagaggcacccccaccagtactgctgacacccaaggctgtgggaactcctgggggaggtggaggtggagccgtaccaggtatttcagccatgtcccgcggagatctgagccagagagccaaggatttgagtaaacggagcttctcaagtcagcggccaggcatggaacggcagaatcggcgccctggcccagggggcaaggctggcagcagtggcagcagcagtggaggaggcggtgggggtcctggaggaaggaccgggccaggacgaggcgacaagaggagctggccctctcccaagaaccgaagtcgtcctccagaggagcgtcccccggggcttcccctgcctcccccacctcccagcagttctgctgtcttccgcctggaccaagttatccacagcaaccctgctggcatccaacaggctctggcccagcttagtagccgtcaagggagtgtaactgcaccagggggtcatccaaggcacaagcctgggcttccccaagcccctcagggcccctctcctaggcccccaacccgatacgagccccagagggtcaacagcggcctcagttctgacccccactttgaggagccggggccaatggtgagaggggtgggtgggactcctcgggactctgccggggttagtccctttccccctaaacgtcgggagcggcctcccagaaaaccagagctgctacaggaggaatctttgccacctcctcatagctctggattcttgggctctaagcctgagggcccaggccctcaggcagagtccagagatacaggcacagaggccctgacccctcacatctggaaccgtttacatactgccactagccgaaagagttaccggcccagctccatggagccttggatggagcccctgagtccttttgaggatgtggctggcacagaaatgagtcagtctgacagtggggtggacctgagtggggattctcaggtgtcatcaggtccctgcagccagcgaagttcccctgatggaggactcaagggggcagcagagggaccccccaagaggcctggaggctcctcacccctgaatgctgttccttgtgagggtccacctggctctgaacctcctaggagaccaccacctgccccccacgatggggacagaaaggagctgccccgggagcagcctctgccccctggccccattggcacagaacgatcacagcgtacagaccgaggcacagagcctggccccattcggccatcccatcgacctggtcccccagtccagtttggcactagtgacaaggactcagacttacgcctagtggtaggagacagcttgaaagcagagaaggagctaacagcatcagtcactgaggccattcctgtatcacgagactgggagctgcttcccagtgctgctgcctctgctgagccacaatccaagaacctggattctgggcactgtgtcccggagcccagctcctcaggccagcgcctgtatcctgaggttttctatggcagtgctgggccttccagttctcagatctctgggggagccatggactctcaattacatccaaacagtggaggcttccgccctgggacaccctcactgcacccttacagatcacagcccctatacctaccccccggcccagcccctccctcagcactgctctctggggtagctctcaagggccagtttctggatttctccacaatgcaagctacagagctggggaagttgccggctggaggagttctctaccctccaccttccttcctctactctccggctttctgccccagtcctttgcctgacacatcgttgcttcaggtacgccaggatctgccatccccttcggatttttattctactcctctgcagcctggtggccaaagtggctttctcccttcaggggctcctgcccagcagatgcttctacccatggtagactcacagctgcctgtggtgaactttggctccctgccgccagcaccacctcctgccccacctcccctttctctgttacctgtgggccctgctctgcagccccccagcctggctgtgcggcccccacctgctcctgctactcgggtgctgccttcacctgccaggcccttccccgctagcttggggcgagcagagctgcatccagtggaactaaagccgttccaggattatcaaaaactgagcagcaaccttgggggacctggatcatcacggactcccccaactggaaggtccttctctggcctcaattcccgtctcaaggccacgccttccacctacagtggagtcttccgcacccagcgcgtcgacctttaccagcaggcctccccaccagatgccctgcgctggatacctaagccttgggagcggacagggccgccacctcgagaagggccctcccgacgggcagaggagcctgggtcccgaggggacaaggagcctgggttgcccccaccccgctgagggagttcctcttgccccctacccccggggcttgtatatagattataaatatataagggggaaaggggtgggcggggaggggttgtggggctggggcctcacttcccctcctcccccttcccctggtcccctgtccctggggctgtttgttaaaaaagagtaataaaaggatttaaaaaaaaaaa

SEQ ID NO: 23797 - DNA, 6873 bp, Homo sapiens
  source 1..6873: mol_type = unassigned DNA
agggggtgctcccgggggcggcggttgcccggatgggccgttagtcggggctcagccgcggagtgagcgagggagacgggaggagccgaacccggcgccatccgccgccatcctcccccgccccaccgccatcccgtcccggggagcccctaggcccgggtcccggatccccgcgcacccggccaggctctggcacgttttgggggaggtgcctgcaggacccaacatactcaatgagcttccagcgcaatgtccgatcgctcggggccgactgccaagggaaaggatggaaagaagtattcctcgctcaacctgtttgatacgtataagggcaagtccttagagatccagaaacccgctgttgcccctcgccatggcctgcagagtctcgggaaagttgccattgcccggcgtatgccacctccagccaaccttccaagcctgaaagccgagaacaaaggcaatgaccccaatgtctcactagtgccaaaagacggaacaggatgggcaagcaaacaggagcagtccgaccccaagagttccgatgcctcaaccgctcagccgccggaatcgcagccactgccggcttcacagacgcctgcctccaaccagccgaaacgacccccagcagcccccgagaacactcctttggttccaagcggggtaaagtcctgggcacaagccagcgtcacccatggagcacatggagatggtggaagggcatcaagcctactgtcacgattctctcgagaggaatttccgaccctgcaggcggctggcgaccaggacaaggctgccaaggaaagggagtctgccgaacagtcgtctgggcccggaccaagcctccgcccccaaaattctacaacttggagggacggaggtgggcgtggccctgatgagctggagggcccggactccaaacttcatcatggtcatgatccccggggtgggctacagccttcaggcccaccccagttccctccctaccgcggaatgatgccgcctttcatgtatcccccatatctcccgttccctccgccctatggaccccaggggccttaccgataccccactcctgatgggcccagccgttttccccgtgtggcgggcccccgaggctcagggccaccaatgcgcttagtagagcctgtgggtcgtccctctattctcaaagaggataatctcaaagagtttgatcagttggatcaggagaatgatgatggttgggcaggggcccatgaagaggttgactacactgaaaagctcaagttcagcgatgaggaagatgggcgagactctgatgaggagggagctgagggccacagggattcccaatcagcttctggtgaggaacggccccctgaagcagatggcaaaaagggcaactcccccaacagcgaaccgcccactcctaagacggcctgggcagaaacctctcggcctccagagacagagccgggacctcctgccccaaagcctcccctacccccacctcaccggggccccgccgggaactggggcccccctggggactacccagatcgtgggggtcctccctgcaagcccccagcacctgaagatgaggatgaggcatggcggcagcgacgaaagcagtcgtcatctgagatttccctggcagtggagcgggcccggcgacggcgagaagaagaggagcggcgcatgcaagaagagcgccgggcagcctgtgctgagaagctcaagcgactcgatgaaaagtttggggcacctgacaagcggctcaaagcagagcctgctgccccacctgctgccccttctaccccagctccaccacctgcagtccctaaagaactccctgcacctccagctccacctccagcatcagccccaacaccagagacagaacctgaagagccagcacaggcccctcctgcccaatctactcctactccaggtgtggctgcggctcccactctggtgagtggtggtggcagtaccagtagcaccagcagtggcagcttcgaagccagcccagtggaaccacaactgccctcaaaagagggtcctgaaccaccagaagaggttcctcctcctaccacacccccagttccaaaggtggaacccaagggtgatgggattggtcccacccgccagccccctagtcagggcttgggctaccccaaatatcagaagtcgttgcctcctcgtttccagcggcagcagcaggagcagctcctgaagcagcagcagcagcaccagtggcagcagcatcaacagggctctgcccctcctaccccagtgcccccatcaccaccacagcctgtgaccctgggggctgtgccagctccacaggctccacccccgccccccaaggccctgtacccaggtgctctgggccggcccccacccatgcccccaatgaactttgatccccgatggatgatgattcctccttatgtggacccccggctcctccagggtcgtccccctctagacttctaccctcctggtgtgcatccctctggcctagttccccgagagcgttcagacagtgggggctcaagctcagagccatttgaccgtcatgcacctgctatgttacgggaacggggcactccaccggtggatccaaagttggcctgggtaggagatgtcttcaccgccacacccgctgaaccccgcccacttacctcacctctgcgccaggctgcggatgaggatgacaaggggatgaggagcgagactcctccagtacctcccccaccaccctatctggccagttatccaggctttcctgagaatggagcccctgggcccccaatctctcgctttcctctggaggaaccagggccccgtccactcccctggcccccaggcagtgatgaagtggccaagatacaaactccaccacccaagaaggagccccctaaggaggagactgcacagctgacggggccagaagcaggccgaaagcctgcccgcggagtcgggagtggaggccagggccccccaccaccacgcagagagagtcgcacagagacccgctggggccctcgtccagggagcagtcgtcgtggaatccctccagaggagccaggggccccaccccgccgggctgggcctataaagaaacctccaccacctacaaaagtagaagagctgcctcccaagcccctcgaacagggggatgaaacccccaaacccccaaagccagacccactcaagataaccaaggggaagctagggggccccaaggagaccccacccaatggaaatctttcccctgccccaaggcttcggagggactattcgtatgaaagagtgggtcctacctcttgccggggtcggggccgaggcgagtattttgccagagggaggggttttcgggggacctatgggggacgagggcggggagccgccgggaattccgcagttaccgagagtttcgaggagatgatgggcgtggaggtgggacagggggaccaaaccaccctcctgctccccgaggccgcactgccagcgagacacggagcgagggttcagagtatgaggaaatccccaagcggcgccggcagcggggctcagaaacaggcagcgagacccatgagagtgatctggctccttcagacaaggaggctcccacacccaaggagggaacactcacccaggtcccgctcccccaccaccaggagccccaccttcccagccccagcccgcttcactcccggggtgggcgagtcttcactcccagaggggatctcgccggggccgaggaggagggagcctcctcaagtttgcccaggctggagccctccagccaagtctctggctcccaagaaacctcccacaggccctttgccaccaagtaaggagcctttgaaagagaagttgatcccagggcctctgtcccctgtggcgcgcggaggcagcaatggaggtagcaatgtgggcatggaagatggggagcgaccccgaaggaggcgacatgggagggctcagcagcaggataaaccgcctcgtttccggaggctgaagcaggaacgggagaatgccgcaagggggtctgagggcaagccctccctaacccttccagcctccgctcctggacctgaggaggccctcacaacagtcacagtggccccagcacctcgccgggcagctgccaagtctcctgatctgtcaaaccagaactcagaccaagccaatgaggaatgggagactgcatcagagagcagtgacttcaccagtgagcgccgaggggacaaagaggcacccccaccagtactgctgacacccaaggctgtgggaactcctgggggaggtggaggtggagccgtaccaggtatttcagccatgtcccgcggagatctgagccagagagccaaggatttgagtaaacggagcttctcaagtcagcggccaggcatggaacggcagaatcggcgccctggcccagggggcaaggctggcagcagtggcagcagcagtggaggaggcggtgggggtcctggaggaaggaccgggccaggacgaggcgacaagaggagctggccctctcccaagaaccgaagtcgtcctccagaggagcgtcccccggggcttcccctgcctcccccacctcccagcagttctgctgtcttccgcctggaccaagttatccacagcaaccctgctggcatccaacaggctctggcccagcttagtagccgtcaagggagtgtaactgcaccagggggtcatccaaggcacaagcctgggcttccccaagcccctcagggcccctctcctaggcccccaacccgatacgagccccagagggtcaacagcggcctcagttctgacccccactttgaggagccggggccaatggtgagaggggtgggtgggactcctcgggactctgccggggttagtccctttccccctaaacgtcgggagcggcctcccagaaaaccagagctgctacaggaggaatctttgccacctcctcatagctctggattcttgggctctaagcctgagggcccaggccctcaggcagagtccagagatacaggcacagaggccctgacccctcacatctggaaccgtttacatactgccactagccgaaagagttaccggcccagctccatggagccttggatggagcccctgagtccttttgaggatgtggctggcacagaaatgagtcagtctgacagtggggtggacctgagtggggattctcaggtgtcatcaggtccctgcagccagcgaagttcccctgatggaggactcaagggggcagcagagggaccccccaagaggcctggaggctcctcacccctgaatgctgttccttgtgagggtccacctggctctgaacctcctaggagaccaccacctgccccccacgatggggacagaaaggagctgccccgggagcagcctctgccccctggccccattggcacagaacgatcacagcgtacagaccgaggcacagagcctggccccattcggccatcccatcgacctggtcccccagtccagtttggcactagtgacaaggactcagacttacgcctagtggtaggagacagcttgaaagcagagaaggagctaacagcatcagtcactgaggccattcctgtatcacgagactgggagctgcttcccagtgctgctgcctctgctgagccacaatccaagaacctggattctgggcactgtgtcccggagcccagctcctcaggccagcgcctgtatcctgaggttttctatggcagtgctgggccttccagttctcagatctctgggggacatggactctcaattacatccaaacagtggaggcgccctgggacaccctcactgcacccttacagatcacagcccctatacctaccccccggcccagcccctccctcagcactgctctctggggtagctctcaagggccagtttctggatttctccacaatgcaagctacagagctggggaagttgccggctggaggagttctctaccctccaccttccttcctctactctccggctttctgccccagtcctttgcctgacacatcgttgcttcaggtacgccaggatctgccatccccttcggatttttattctactcctctgcagcctggtggccaaagtggctttctcccttcaggggctcctgcccagcagatgcttctacccatggtagactcacagctgcctgtggtgaactttggctccctgccgccagcaccacctcctgccccacctcccctttctctgttacctgtgggccctgctctgcagccccccagcctggctgtgcggcccccacctgctcctgctactcgggtgctgccttcacctgccaggcccttccccgctagcttggggcgagcagagctgcatccagtggaactaaagccgttccaggattatcaaaaactgagcagcaaccttgggggacctggatcatcacggactcccccaactggaaggtccttctctggcctcaattcccgtctcaaggccacgccttccacctacagtggagtcttccgcacccagcgcgtcgacctttaccagcaggcctccccaccagatgccctgcgctggatacctaagccttgggagcggacagggccgccacctcgagaagggccctcccgacgggcagaggagcctgggtcccgaggggacaaggagcctgggttgcccccaccccgctgagggagttcctcttgccccctacccccggggcttgtatatagattataaatatataagggggaaaggggtgggcggggaggggttgtggggctggggcctcacttcccctcctcccccttcccctggtcccctgtccctggggctgtttgttaaaaaagagtaataaaaggattt

SEQ ID NO: 23798 - DNA, 1972 bp, Homo sapiens
  source 1..1972: mol_type = unassigned DNA
gttagtcggggctcagccgcggagtgagcgagggagacgggaggagccgaacccggcgccatccgccgccatcctcccccgccccaccgccatcccgtcccggggagcccctaggcccgggtcccggatccccgcgcacccggccaggctctggcacgttttgggggaggtgcctgcaggacccaacatactcaatgagcttccagcgcaatgtccgatcgctcggggccgactgccaagggaaaggatggaaagaagtattcctcgctcaacctgtttgatacgtataagggcaagtccttagagatccagaaacccgctgttgcccctcgccatggcctgcagagtctcgggaaagttgccattgcccggcgtatgccacctccagccaaccttccaagcctgaaagccgagaacaaaggcaatgaccccaatgtctcactagtgccaaaagacggaacaggatgggcaagcaaacaggagcagtccgaccccaagagttccgatgcctcaaccgctcagccgccggaatcgcagccactgccggcttcacagacgcctgcctccaaccagccgaaacgacccccagcagcccccgagaacactcctttggttccaagcggggtaaagtcctgggcacaagccagcgtcacccatggagcacatggagatggtggaagggcatcaagcctactgtcacgattctctcgagaggaatttccgaccctgcaggcggctggcgaccaggacaaggctgccaaggaaagggagtctgccgaacagtcgtctgggcccggaccaagcctccgcccccaaaattctacaacttggagggacggaggtgggcgtggccctgatgagctggagggcccggactccaaacttcatcatggtcatgatccccggggtgggctacagccttcaggcccaccccagttccctccctaccgcggaatgatgccgcctttcatgtatcccccatatctcccgttccctccgccctatggaccccaggggccttaccgataccccactcctgatgggcccagccgttttccccgtgtggcgggcccccgaggctcagggccaccaatgcgcttagtagagcctgtgggtcgtccctctattctcaaagaggataatctcaaagagtttgatcagttggatcaggagaatgatgatggttgggcaggggcccatgaagaggttgactacactgaaaagctcaagttcagcgatgaggaagatgggcgagactctgatgaggagggagctgagggccacagggattcccaatcagcttctggtgaggaacggccccctgaagcagatggcaaaaagggcaactcccccaacagcgaaccgcccactcctaagacggcctgggcagaaacctctcggcctccagagacagagccgggacctcctgccccaaagcctcccctacccccacctcaccggggccccgccgggaactggggcccccctggggactacccagatcgtgggggtcctccctgcaagcccccagcacctgaagatgaggatgaggcatggcggcagcgacgaaagcagtcgtcatctgagatttccctggcagtggagcgggcccggcgacggcgagaagaagaggagcggcgcatgcaagaagagcgccgggcagcctgtgctgagaagctcaagcgactcgatgaaaagtttggggcacctgacaagcggctcaaagcagagcctgctgccccacctgctgccccttctaccccagctccaccacctgcagccagcgaagttcccctgatggaggactcaagggggcagcagagggaccccccaagaggcctggaggctcctcacccctgaatgctgttccttgtgagggtccacctggctctgaacctcctaggagaccaccacctgccccccacgatggggacagaaaggagctgccccgggagcagcctctgccccctgg

SEQ ID NO: 23799 - DNA, 6840 bp, Homo sapiens
  source 1..6840: mol_type = unassigned DNA
agggggtgctcccgggggcggcggttgcccggatgggccgttagtcggggctcagccgcggagtgagcgagggagacgggaggagccgaacccggcgccatccgccgccatcctcccccgccccaccgccatcccgtcccggggagcccctaggcccgggtcccggatccccgcgcacccggccaggctctggcacgttttgggggaggtgcctgcaggacccaacatactcaatgagcttccagcgcaatgtccgatcgctcggggccgactgccaagggaaaggatggaaagaagtattcctcgctcaacctgtttgatacgtataagggcaagtccttagagatccagaaacccgctgttgcccctcgccatggcctgcagagtctcgggaaagttgccattgcccggcgtatgccacctccagccaaccttccaagcctgaaagccgagaacaaaggcaatgaccccaatgtctcactagtgccaaaagacggaacaggatgggcaagcaaacaggagcagtccgaccccaagagttccgatgcctcaaccgctcagccgccggaatcgcagccactgccggcttcacagacgcctgcctccaaccagccgaaacgacccccagcagcccccgagaacactcctttggttccaagcggggtaaagtcctgggcacaagccagcgtcacccatggagcacatggagatggtggaagggcatcaagcctactgtcacgattctctcgagaggaatttccgaccctgcaggcggctggcgaccaggacaaggctgccaaggaaagggagtctgccgaacagtcgtctgggcccggaccaagcctccgcccccaaaattctacaacttggagggacggaggtgggcgtggccctgatgagctggagggcccggactccaaacttcatcatggtcatgatccccggggtgggctacagccttcaggcccaccccagttccctccctaccgcggaatgatgccgcctttcatgtatcccccatatctcccgttccctccgccctatggaccccaggggccttaccgataccccactcctgatgggcccagccgttttccccgtgtggcgggcccccgaggctcagggccaccaatgcgcttagtagagcctgtgggtcgtccctctattctcaaagaggataatctcaaagagtttgatcagttggatcaggagaatgatgatggttgggcaggggcccatgaagaggttgactacactgaaaagctcaagttcagcgatgaggaagatgggcgagactctgatgaggagggagctgagggccacagggattcccaatcagcttctggtgaggaacggccccctgaagcagatggcaaaaagggcaactcccccaacagcgaaccgcccactcctaagacggcctgggcagaaacctctcggcctccagagacagagccgggacctcctgccccaaagcctcccctacccccccctggggactacccagatcgtgggggtcctccctgcaagcccccagcacctgaagatgaggatgaggcatggcggcagcgacgaaagcagtcgtcatctgagatttccctggcagtggagcgggcccggcgacggcgagaagaagaggagcggcgcatgcaagaagagcgccgggcagcctgtgctgagaagctcaagcgactcgatgaaaagtttggggcacctgacaagcggctcaaagcagagcctgctgccccacctgctgccccttctaccccagctccaccacctgcagtccctaaagaactccctgcacctccagctccacctccagcatcagccccaacaccagagaaagaacctgaagagccagcacaggcccctcctgcccaatctactcctactccaggtgtggctgcggctcccactctggtgagtggtggtggcagtaccagtagcaccagcagtggcagcttcgaagccagcccagtggaaccacaactgccctcaaaagagggtcctgaaccaccagaagaggttcctcctcctaccacacccccagttccaaaggtggaacccaagggtgatgggattggtcccacccgccagccccctagtcagggcttgggctaccccaaatatcagaagtcgttgcctcctcgtttccagcggcagcagcaggagcagctcctgaagcagcagcagcagcaccagtggcagcagcatcaacagggctctgcccctcctaccccagtgcccccatcaccaccacagcctgtgaccctgggggctgtgccagctccacaggctccacccccgccccccaaggccctgtacccaggtgctctgggccggcccccacccatgcccccaatgaactttgatccccgatggatgatgattcctccttatgtggacccccggctcctccagggtcgtccccctctagacttctaccctcctggtgtgcatccctctggcctagttccccgagagcgttcagacagtgggggctcaagctcagagccatttgaccgtcatgcacctgctatgttacgggaacggggcactccaccggtggatccaaagttggcctgggtgggagatgtcttcaccgccacacccgctgaaccccgcccacttacctcacctctgcgccaggctgcggatgaggatgacaaggggatgaggagcgagactcctccagtacctcccccaccaccctatctggccagttatccaggctttcctgagaatggagcccctgggcccccaatctctcgctttcctctggaggaaccagggccccgtccactcccctggcccccaggcagtgatgaagtggccaagatacaaactccaccacccaagaaggagccccctaaggaggagactgcacagctgacggggccagaagcaggccgaaagcctgcccgcggagtcgggagtggaggccagggccccccaccaccacgcagagagagtcgcacagagacccgctggggccctcgtccagggagcagtcgtcgtggaatccctccagaggagccaggggccccaccccgccgggctgggcctataaagaaacctccaccacctacaaaagtagaagagctgcctcccaagcccctcgaacagggggatgaaacccccaaacccccaaagccagacccactcaagataaccaaggggaagctagggggccccaaggagaccccacccaatggaaatctttcccctgccccaaggcttcggagggactattcgtatgaaagagtgggtcctacctcttgccggggtcggggccgaggcgagtattttgccagagggaggggttttcgggggacctatgggggacgagggcggggagccgccgggaattccgcagttaccgagagtttcgaggagatgatgggcgtggaggtgggacagggggaccaaaccaccctcctgctccccgaggccgcactgccagcgagacacggagcgagggttcagagtatgaggaaatccccaagcggcgccggcagcggggctcagaaacaggcagcgagacccatgagagtgatctggctccttcagacaaggaggctcccacacccaaggagggaacactcacccaggtcccgctcccccaccaccaggagccccaccttcccagccccagcccgcttcactcccggggtgggcgagtcttcactcccagaggggatctcgccggggccgaggaggagggagcctcctcaagtttgcccaggctggagccctccagccaagtctctggctcccaagaaacctcccacaggccctttgccaccaagtaaggagcctttgaaagagaagttgatcccagggcctctgtcccctgtggcgcgcggaggcagcaatggaggtagcaatgtgggcatggaagatggggagcgaccccgaaggaggcgacatgggagggctcagcagcaggataaaccgcctcgtttccggaggctgaagcaggaacgggagaatgccgcaagggggtctgagggcaagccctccctaacccttccagcctccgctcctggacctgaggaggccctcacaacagtcacagtggccccagcacctcgccgggcagctgccaagtctcctgatctgtcaaaccagaactcagaccaagccaatgaggaatgggagactgcatcagagagcagtgacttcaccagtgagcgccgaggggacaaagaggcacccccaccagtactgctgacacccaaggctgtgggaactcctgggggaggtggaggtggagccgtaccaggtatttcagccatgtcccgcggagatctgagccagagagccaaggatttgagtaaacggagcttctcaagtcagcggccaggcatggaacggcagaatcggcgccctggcccagggggcaaggctggcagcagtggcagcagcagtggaggaggcggtgggggtcctggaggaaggaccgggccaggacgaggcgacaagaggagctggccctctcccaagaaccgaagtcgtcctccagaggagcgtcccccggggcttcccctgcctcccccacctcccagcagttctgctgtcttccgcctggaccaagttatccacagcaaccctgctggcatccaacaggctctggcccagcttagtagccgtcaagggagtgtaactgcaccagggggtcatccaaggcacaagcctgggcctccccaagcccctcagggcccctctcctaggcccccaacccgatacgagccccagagggtcaacagcggcctcagttctgacccccactttgaggagccggggccaatggtgagaggggtgggtgggactcctcgggactctgccggggttagtccctttccccctaaacgtcgggagcggcctcccagaaaaccagagctgctacaggaggaatctttgccacctcctcatagctctggattcttgggctctaagcctgagggcccaggccctcaggcagagtccagagatacaggcacagaggccctgacccctcacatctggaaccgtttacatactgccactagccgaaagagttaccggcccagctccatggagccttggatggagcccctgagtccttttgaggatgtggctggcacagaaatgagtcagtctgacagtggggtggacctgagtggggattctcaggtgtcatcaggtccctgcagccagcgaagttcccctgatggaggactcaagggggcagcagagggaccccccaagaggcctggaggctcctcacccctgaatgctgttccttgtgagggtccacctggctctgaacctcctaggagaccaccacctgccccccacgatggggacagaaaggagctgccccgggagcagcctctgccccctggccccattggcacagaacgatcacagcatacagaccgaggcacagagcctggccccattcggccatcccatcgacctggtcccccagtccagtttggcactagtgacaaggactcagacttacgcctagtggtaggagacagcttgaaagcagagaaggagctaacagcatcagtcactgaggccattcctgtatcacgagactgggagctgcttcccagtgctgctgcctctgctgagccacaatccaagaacctggattctgggcactgtgtcccggagcccagctcctcaggccagcgcctgtatcctgaggttttctatggcagtgctgggccttccagttctcagatctctgggggacatggactctcagttacatccaaacagtggaggcgccctgggacaccctcactgcacccttacagatcacagcccctatacctaccccccggcccagcccctccctcagcactgctctctggggtagctctcaagggccagtttctggatttctccacaatgcaagctacagagctggggaagttgccggctggaggagttctctaccctccaccttccttcctctactctccggctttctgccccagtcctttgcctgacacatcgttgcttcaggtacgccaggatctgccatccccttcggatttttattctactcctctgcagcctggtggccaaagtggctttctcccttcaggggctcctgcccagcagatgcttctacccatggtagactcacagctgcctgtggtgaactttggctccctgccgccagcaccacctcctgccccaccttccctttctctgttacctgtgggccctgctctgcagccccccagcctggctgtgcggcccccacctgctcctgctactcgggtgctgccttcacctgccaggcccttccccgctagcttggggcgagcagagctgcatccagtggaactaaagccgttccaggattatcaaaaactgagcagcaaccttgggggacctggatcatcacggactcccccaactggaaggtccttctctggcctcaattcccgtctcaaggccacgccttccacctacagtggagtcttccgcacccagcgcgtcgacctttaccagcaggcctccccaccagatgccctgcgctggatacctaagccttgggagcggacagggccgccacctcgagaagggccctcccgacgggcagaggagcctgggtcccgaggggacaaggagcctgggttgcccccaccccgctgagggagttcctcttgccccctacccccggggcttgtatatagattataaatatataagggggaaaggggtgggcggggaggggttctggggctggggcctcacttcccctcctcccccttcccctggtcccctgtccctggggctgtttgttaaaaaagagtaataaaaggattt

SEQ ID NO: 23800 - DNA, 6873 bp, Homo sapiens
  source 1..6873: mol_type = unassigned DNA
agggggtgctcccgggggcggcggttgcccggatgggccgttagtcggggctcagccgcggagtgagcgagggagacgggaggagccgaacccggcgccatccgccgccatcctcccccgccccaccgccatcccgtcccggggagcccctaggcccgggtcccggatccccgcgcacccggccaggctctggcacgttttgggggaggtgcctgcaggacccaacatactcaatgagcttccagcgcaatgtccgatcgctcggggccgactgccaagggaaaggatggaaagaagtattcctcgctcaacctgtttgatacgtataagggcaagtccttagagatccagaaacccgctgttgcccctcgccatggcctgcagagtctcgggaaagttgccattgcccggcgtatgccacctccagccaaccttccaagcctgaaagccgagaacaaaggcaatgaccccaatgtctcactagtgccaaaagacggaacaggatgggcaagcaaacaggagcagtccgaccccaagagttccgatgcctcaaccgctcagccgccggaatcgcagccactgccggcttcacagacgcctgcctccaaccagccgaaacgacccccagcagcccccgagaacactcctttggttccaagcggggtaaagtcctgggcacaagccagcgtcacccatggagcacatggagatggtggaagggcatcaagcctactgtcacgattctctcgagaggaatttccgaccctgcaggcggctggcgaccaggacaaggctgccaaggaaagggagtctgccgaacagtcgtctgggcccggaccaagcctccgcccccaaaattctacaacttggagggacggaggtgggcgtggccctgatgagctggagggcccggactccaaacttcatcatggtcatgatccccggggtgggctacagccttcaggcccaccccagttccctccctaccgcggaatgatgccgcctttcatgtatcccccatatctcccgttccctccgccctatggaccccaggggccttaccgataccccactcctgatgggcccagccgttttccccgtgtggcgggcccccgaggctcagggccaccaatgcgcttagtagagcctgtgggtcgtccctctattctcaaagaggataatctcaaagagtttgatcagttggatcaggagaatgatgatggttgggcaggggcccatgaagaggttgactacactgaaaagctcaagttcagcgatgaggaagatgggcgagactctgatgaggagggagctgagggccacagggattcccaatcagcttctggtgaggaacggccccctgaagcagatggcaaaaagggcaactcccccaacagcgaaccgcccactcctaagacggcctgggcagaaacctctcggcctccagagacagagccgggacctcctgccccaaagcctcccctacccccacctcaccggggccccgccgggaactggggcccccctggggactacccagatcgtgggggtcctccctgcaagcccccagcacctgaagatgaggatgaggcatggcggcagcgacgaaagcagtcgtcatctgagatttccctggcagtggagcgggcccggcgacggcgagaagaagaggagcggcgcatgcaagaagagcgccgggcagcctgtgctgagaagctcaagcgactcgatgaaaagtttggggcacctgacaagcggctcaaagcagagcctgctgccccacctgctgccccttctaccccagctccaccacctgcagtccctaaagaactccctgcacctccagctccacctccagcatcagccccaacaccagagaaagaacctgaagagccagcacaggcccctcctgcccaatctactcctactccaggtgtggctgcggctcccactctggtgagtggtggtggcagtaccagtagcaccagcagtggcagcttcgaagccagcccagtggaaccacaactgccctcaaaagagggtcctgaaccaccagaagaggttcctcctcctaccacacccccagttccaaaggtggaacccaagggtgatgggattggtcccacccgccagccccctagtcagggcttgggctaccccaaatatcagaagtcgttgcctcctcgtttccagcggcagcagcaggagcagctcctgaagcagcagcagcagcaccagtggcagcagcatcaacagggctctgcccctcctaccccagtgcccccatcaccaccacagcctgtgaccctgggggctgtgccagctccacaggctccacccccgccccccaaggccctgtacccaggtgctctgggccggcccccacccatgcccccaatgaactttgatccccgatggatgatgattcctccttatgtggacccccggctcctccagggtcgtccccctctagacttctaccctcctggtgtgcatccctctggcctagttccccgagagcgttcagacagtgggggctcaagctcagagccatttgaccgtcatgcacctgctatgttacgggaacggggcactccaccggtggatccaaagttggcctgggtgggagatgtcttcaccgccacacccgctgaaccccgcccacttacctcacctctgcgccaggctgcggatgaggatgacaaggggatgaggagcgagactcctccagtacctcccccaccaccctatctggccagttatccaggctttcctgagaatggagcccctgggcccccaatctctcgctttcctctggaggaaccagggccccgtccactcccctggcccccaggcagtgatgaagtggccaagatacaaactccaccacccaagaaggagccccctaaggaggagactgcacagctgacggggccagaagcaggccgaaagcctgcccgcggagtcgggagtggaggccagggccccccaccaccacgcagagagagtcgcacagagacccgctggggccctcgtccagggagcagtcgtcgtggaatccctccagaggagccaggggccccaccccgccgggctgggcctataaagaaacctccaccacctacaaaagtagaagagctgcctcccaagcccctcgaacagggggatgaaacccccaaacccccaaagccagacccactcaagataaccaaggggaagctagggggccccaaggagaccccacccaatggaaatctttcccctgccccaaggcttcggagggactattcgtatgaaagagtgggtcctacctcttgccggggtcggggccgaggcgagtattttgccagagggaggggttttcgggggacctatgggggacgagggcggggagccgccgggaattccgcagttaccgagagtttcgaggagatgatgggcgtggaggtgggacagggggaccaaaccaccctcctgctccccgaggccgcactgccagcgagacacggagcgagggttcagagtatgaggaaatccccaagcggcgccggcagcggggctcagaaacaggcagcgagacccatgagagtgatctggctccttcagacaaggaggctcccacacccaaggagggaacactcacccaggtcccgctcccccaccaccaggagccccaccttcccagccccagcccgcttcactcccggggtgggcgagtcttcactcccagaggggatctcgccggggccgaggaggagggagcctcctcaagtttgcccaggctggagccctccagccaagtctctggctcccaagaaacctcccacaggccctttgccaccaagtaaggagcctttgaaagagaagttgatcccagggcctctgtcccctgtggcgcgcggaggcagcaatggaggtagcaatgtgggcatggaagatggggagcgaccccgaaggaggcgacatgggagggctcagcagcaggataaaccgcctcgtttccggaggctgaagcaggaacgggagaatgccgcaagggggtctgagggcaagccctccctaacccttccagcctccgctcctggacctgaggaggccctcacaacagtcacagtggccccagcacctcgccgggcagctgccaagtctcctgatctgtcaaaccagaactcagaccaagccaatgaggaatgggagactgcatcagagagcagtgacttcaccagtgagcgccgaggggacaaagaggcacccccaccagtactgctgacacccaaggctgtgggaactcctgggggaggtggaggtggagccgtaccaggtatttcagccatgtcccgcggagatctgagccagagagccaaggatttgagtaaacggagcttctcaagtcagcggccaggcatggaacggcagaatcggcgccctggcccagggggcaaggctggcagcagtggcagcagcagtggaggaggcggtgggggtcctggaggaaggaccgggccaggacgaggcgacaagaggagctggccctctcccaagaaccgaagtcgtcctccagaggagcgtcccccggggcttcccctgcctcccccacctcccagcagttctgctgtcttccgcctggaccaagttatccacagcaaccctgctggcatccaacaggctctggcccagcttagtagccgtcaagggagtgtaactgcaccagggggtcatccaaggcacaagcctgggcctccccaagcccctcagggcccctctcctaggcccccaacccgatacgagccccagagggtcaacagcggcctcagttctgacccccactttgaggagccggggccaatggtgagaggggtgggtgggactcctcgggactctgccggggttagtccctttccccctaaacgtcgggagcggcctcccagaaaaccagagctgctacaggaggaatctttgccacctcctcatagctctggattcttgggctctaagcctgagggcccaggccctcaggcagagtccagagatacaggcacagaggccctgacccctcacatctggaaccgtttacatactgccactagccgaaagagttaccggcccagctccatggagccttggatggagcccctgagtccttttgaggatgtggctggcacagaaatgagtcagtctgacagtggggtggacctgagtggggattctcaggtgtcatcaggtccctgcagccagcgaagttcccctgatggaggactcaagggggcagcagagggaccccccaagaggcctggaggctcctcacccctgaatgctgttccttgtgagggtccacctggctctgaacctcctaggagaccaccacctgccccccacgatggggacagaaaggagctgccccgggagcagcctctgccccctggccccattggcacagaacgatcacagcatacagaccgaggcacagagcctggccccattcggccatcccatcgacctggtcccccagtccagtttggcactagtgacaaggactcagacttacgcctagtggtaggagacagcttgaaagcagagaaggagctaacagcatcagtcactgaggccattcctgtatcacgagactgggagctgcttcccagtgctgctgcctctgctgagccacaatccaagaacctggattctgggcactgtgtcccggagcccagctcctcaggccagcgcctgtatcctgaggttttctatggcagtgctgggccttccagttctcagatctctgggggacatggactctcagttacatccaaacagtggaggcgccctgggacaccctcactgcacccttacagatcacagcccctatacctaccccccggcccagcccctccctcagcactgctctctggggtagctctcaagggccagtttctggatttctccacaatgcaagctacagagctggggaagttgccggctggaggagttctctaccctccaccttccttcctctactctccggctttctgccccagtcctttgcctgacacatcgttgcttcaggtacgccaggatctgccatccccttcggatttttattctactcctctgcagcctggtggccaaagtggctttctcccttcaggggctcctgcccagcagatgcttctacccatggtagactcacagctgcctgtggtgaactttggctccctgccgccagcaccacctcctgccccaccttccctttctctgttacctgtgggccctgctctgcagccccccagcctggctgtgcggcccccacctgctcctgctactcgggtgctgccttcacctgccaggcccttccccgctagcttggggcgagcagagctgcatccagtggaactaaagccgttccaggattatcaaaaactgagcagcaaccttgggggacctggatcatcacggactcccccaactggaaggtccttctctggcctcaattcccgtctcaaggccacgccttccacctacagtggagtcttccgcacccagcgcgtcgacctttaccagcaggcctccccaccagatgccctgcgctggatacctaagccttgggagcggacagggccgccacctcgagaagggccctcccgacgggcagaggagcctgggtcccgaggggacaaggagcctgggttgcccccaccccgctgagggagttcctcttgccccctacccccggggcttgtatatagattataaatatataagggggaaaggggtgggcggggaggggttctggggctggggcctcacttcccctcctcccccttcccctggtcccctgtccctggggctgtttgttaaaaaagagtaataaaaggattt

SEQ ID NO: 23801 - DNA, 1972 bp, Homo sapiens; identical to SEQ ID NO: 23798
  source 1..1972: mol_type = unassigned DNA

SEQ ID NO: 23802 - DNA, 1972 bp, Homo sapiens; identical to SEQ ID NO: 23798
  source 1..1972: mol_type = unassigned DNA

SEQ ID NO: 23803 - DNA, 4303 bp, Homo sapiens
  source 1..4303: mol_type = unassigned DNA
ttcttcaggcctagttccccgagagcgttcagacagtgggggctcaagctcagagccatttgaccgtcatgcacctgctatgttacgggaacggggcactccaccggtggatccaaagttggcctgggtgggagatgtcttcaccgccacacccgctgaaccccgcccacttacctcacctctgcgccaggctgcggatgaggatgacaaggggatgaggagcgagactcctccagtacctcccccaccaccctatctggccagttatccaggctttcctgagaatggagcccctgggcccccaatctctcgctttcctctggaggaaccagggccccgtccactcccctggcccccaggcagtgatgaagtggccaagatacaaactccaccacccaagaaggagccccctaaggaggagactgcacagctgacggggccagaagcaggccgaaagcctgcccgcggagtcgggagtggaggccagggccccccaccaccacgcagagagagtcgcacagagacccgctggggccctcgtccagggagcagtcgtcgtggaatccctccagaggagccaggggccccaccccgccgggctgggcctataaagaaacctccaccacctacaaaagtagaagagctgcctcccaagcccctcgaacagggggatgaaacccccaaacccccaaagccagacccactcaagataaccaaggggaagctagggggccccaaggagaccccacccaatggaaatctttcccctgccccaaggcttcggagggactattcgtatgaaagagtgggtcctacctcttgccggggtcggggccgaggcgagtattttgccagagggaggggttttcgggggacctatgggggacgagggcggggagcccgaagccgggaattccgcagttaccgagagtttcgaggagatgatgggcgtggaggtgggacagggggaccaaaccaccctcctgctccccgaggccgcactgccagcgagacacggagcgagggttcagagtatgaggaaatccccaagcggcgccggcagcggggctcagaaacaggcagcgagacccatgagagtgatctggctccttcagacaaggaggctcccacacccaaggagggaacactcacccaggtccctctcgctcccccaccaccaggagccccaccttcaccagccccagcccgcttcactgcccggggtgggcgagtcttcactcccagaggggtgccatctcgccggggccgaggaggagggaggccccctcctcaagtttgcccaggctggagccctccagccaagtctctggctcccaagaaacctcccacaggccctttgccaccaagtaaggagcctttgaaagagaagttgatcccagggcctctgtcccctgtggcgcgcggaggcagcaatggaggtagcaatgtgggcatggaagatggggagcgaccccgaaggaggcgacatgggagggctcagcagcaggataaaccgcctcgtttccggaggctgaagcaggaacgggagaatgccgcaagggggtctgagggcaagccctccctaacccttccagcctccgctcctggacctgaggaggccctcacaacagtcacagtggccccagcacctcgccgggcagctgccaagtctcctgatctgtcaaaccagaactcagaccaagccaatgaggaatgggagactgcatcagagagcagtgacttcaccagtgagcgccgaggggacaaagaggcacccccaccagtactgctgacacccaaggctgtgggaactcctgggggaggtggaggtggagccgtaccaggtatttcagccatgtcccgcggagatctgagccagagagccaaggatttgagtaaacggagcttctcaagtcagcggccaggcatggaacggcagaatcggcgccctggcccagggggcaaggctggcagcagtggcagcagcagtggaggaggcggtgggggtcctggaggaaggaccgggccaggacgaggcgacaagaggagctggccctctcccaagaaccgaagtcgtcctccagaggagcgtcccccggggcttcccctgcctcccccacctcccagcagttctgctgtcttccgcctggaccaagttatccacagcaaccctgctggcatccaacaggctctggcccagcttagtagccgtcaagggagtgtaactgcaccagggggtcatccaaggcacaagcctgggcctccccaagcccctcagggcccctctcctaggcccccaacccgatacgagccccagagggtcaacagcggcctcagttctgacccccactttgaggagccggggccaatggtgagaggggtgggtgggactcctcgggactctgccggggttagtccctttccccctaaacgtcgggagcggcctcccagaaaaccagagctgctacaggaggaatctttgccacctcctcatagctctggattcttgggctctaagcctgagggcccaggccctcaggcagagtccagagatacaggcacagaggccctgacccctcacatctggaaccgtttacatactgccactagccgaaagagttaccggcccagctccatggagccttggatggagcccctgagtccttttgaggatgtggctggcacagaaatgagtcagtctgacagtggggtggacctgagtggggattctcaggtgtcatcaggtccctgcagccagcgaagttcccctgatggaggactcaagggggcagcagagggaccccccaagaggcctggaggctcctcacccctgaatgctgttccttgtgagggtccacctggctctgaacctcctaggagaccaccacctgccccccacgatggggacagaaaggagctgccccgggagcagcctctgccccctggccccattggcacagaacgatcacagcatacagaccgaggcacagagcctggccccattcggccatcccatcgacctggtcccccagtccagtttggcactagtgacaaggactcagacttacgcctagtggtaggagacagcttgaaagcagagaaggagctaacagcatcagtcactgaggccattcctgtatcacgagactgggagctgcttcccagtgctgctgcctctgctgagccacaatccaagaacctggattctgggcactgtgtcccggagcccagctcctcaggccagcgcctgtatcctgaggttttctatggcagtgctgggccttccagttctcagatctctgggggagccatggactctcagttacatccaaacagtggaggcttccgccctgggacaccctcactgcacccttacagatcacagcccctatacctaccccccggcccagcccctccctcagcactgctctctggggtagctctcaagggccagtttctggatttctccacaatgcaagctacagagctggggaagttgccggctggaggagttctctaccctccaccttccttcctctactctccggctttctgccccagtcctttgcctgacacatcgttgcttcaggtacgccaggatctgccatccccttcggatttttattctactcctctgcagcctggtggccaaagtggctttctcccttcaggggctcctgcccagcagatgcttctacccatggtagactcacagctgcctgtggtgaactttggctccctgccgccagcaccacctcctgccccaccttccctttctctgttacctgtgggccctgctctgcagccccccagcctggctgtgcggcccccacctgctcctgctactcgggtgctgccttcacctgccaggcccttccccgctagcttggggcgagcagagctgcatccagtggaactaaagccgttccaggattatcaaaaactgagcagcaaccttgggggacctggatcatcacggactcccccaactggaaggtccttctctggcctcaattcccgtctcaaggccacgccttccacctacagtggagtcttccgcacccagcgcgtcgacctttaccagcaggcctccccaccagatgccctgcgctggatacctaagccttgggagcggacagggccgccacctcgagaagggccctcccgacgggcagaggagcctgggtcccgaggggacaaggagcctgggttgcccccaccccgctgagggagttcctcctcccccttcccctggtcccctgtccctggggctgtttgttaaaaaagagtaataaaaggattt

SEQ ID NO: 23804 - DNA, 6840 bp, Homo sapiens
  source 1..6840: mol_type = unassigned DNA
agggggtgctcccgggggcggcggttgcccggatgggccgttagtcggggctcagccgcggagtgagcgagggagacgggaggagccgaacccggcgccatccgccgccatcctcccccgccccaccgccatcccgtcccggggagcccctaggcccgggtcccggatccccgcgcacccggccaggctctggcacgttttgggggaggtgcctgcaggacccaacatactcaatgagcttccagcgcaatgtccgatcgctcggggccgactgccaagggaaaggatggaaagaagtattcctcgctcaacctgtttgatacgtataagggcaagtccttagagatccagaaacccgctgttgcccctcgccatggcctgcagagtctcgggaaagttgccattgcccggcgtatgccacctccagccaaccttccaagcctgaaagccgagaacaaaggcaatgaccccaatgtctcactagtgccaaaagacggaacaggatgggcaagcaaacaggagcagtccgaccccaagagttccgatgcctcaaccgctcagccgctggaatcgcagccactgccggcttcacagacgcctgcctccaaccagccgaaacgacccccagcagcccccgagaacactcctttggttccaagcggggtaaagtcctgggcacaagccagcgtcacccatggagcacatggagatggtggaagggcatcaagcctactgtcacgattctctcgagaggaatttccgaccctgcaggcggctggcgaccaggacaaggctgccaaggaaagggagtctgccgaacagtcgtctgggcccggaccaagcctccgcccccaaaattctacaacttggagggacggaggtgggcgtggccctgatgagctggagggcccggactccaaacttcatcatggtcatgatccccggggtgggctacagccttcaggcccaccccagttccctccctaccgcggaatgatgccgcctttcatgtatcccccatatctcccgttccctccgccctatggaccccaggggccttaccgataccccactcctgatgggcccagccgttttccccgtgtggcgggcccccgaggctcagggccaccaatgcgcttagtagagcctgtgggtcgtccctctattctcaaagaggataatctcaaagagtttgatcagttggatcaggagaatgatgatggttgggcaggggcccatgaagaggttgactacactgaaaagctcaagttcagcgatgaggaagatgggcgagactctgatgaggagggagctgagggccacagggattcccaatcagcttctggtgaggaacggccccctgaagcagatggcaaaaagggcaactcccccaacagcgaaccgcccactcctaagacggcctgggcagaaacctctcggcctccagagacagagccgggacctcctgccccaaagcctcccctacccccccctggggactacccagatcgtgggggtcctccctgcaagcccccagcacctgaagatgaggatgaggcatggcggcagcgacgaaagcagtcgtcatctgagatttccctggcagtggagcgggcccggcgacggcgagaagaagaggagcggcgcatgcaagaagagcgccgggcagcctgtgctgagaagctcaagcgactcgatgaaaagtttggggcacctgacaagcggctcaaagcagagcctgctgccccacctgctgccccttctaccccagctccaccacctgcagtccctaaagaactccctgcacctccagctccacctccagcatcagccccaacaccagagaaagaacctgaagagccagcacaggcccctcctgcccaatctactcctactccaggtgtggctgcggctcccactctggtgagtggtggtggcagtaccagtagcaccagcagtggcagcttcgaagccagcccagtggaaccacaactgccctcaaaagagggtcctgaaccaccagaagaggttcctcctcctaccacacccccagttccaaaggtggaacccaagggtgatgggattggtcccacccgccagccccctagtcagggcttgggctaccccaaatatcagaagtcgttgcctcctcgtttccagcggcagcagcaggagcagctcctgaagcagcagcagcagcaccagtggcagcagcatcaacagggctctgcccctcctaccccagtgcccccatcaccaccacagcctgtgaccctgggggctgtgccagctccacaggctccacccccgccccccaaggccctgtacccaggtgctctgggccggcccccacccatgcccccaatgaactttgatccccgatggatgatgattcctccttatgtggacccccggctcctccagggtcgtccccctctagacttctaccctcctggtgtgcatccctctggcctagttccccgagagcgttcagacagtgggggctcaagctcagagccatttgaccgtcatgcacctgctatgttacgggaacggggcactccaccggtggatccaaagttggcctgggtaggagatgtcttcaccgccacacccgctgaaccccgcccacttacctcacctctgcgccaggctgcggatgaggatgacaaggggatgaggagcgagactcctccagtacctcccccaccaccctatctggccagttatccaggctttcctgagaatggagcccctgggcccccaatctctcgctttcctctggaggaaccagggccccgtccactcccctggcccccaggcagtgatgaagtggccaagatacaaactccaccacccaagaaggagccccctaaggaggagactgcacagctgacggggccagaagcaggccgaaagcctgcccgcggagtcgggagtggaggccagggccccccaccaccacgcagagagagtcgcacagagacccgctggggccctcgtccagggagcagtcgtcgtggaatccctccagaggagccaggggccccaccccgccgggctgggcctataaagaaacctccaccacctacaaaagtagaagagctgcctcccaagcccctcgaacagggggatgaaacccccaaacccccaaagccagacccactcaagataaccaaggggaagctagggggccccaaggagaccccacccaatggaaatctttcccctgccccaaggcttcggagggactattcgtatgaaagagtgggtcctacctcttgccggggtcggggccgaggcgagtattttgccagagggaggggttttcgggggacctatgggggacgagggcggggagccgccgggaattccgcagttaccgagagtttcgaggagatgatgggcgtggaggtgggacagggggaccaaaccaccctcctgctccccgaggccgcactgccagcgagacacggagcgagggttcagagtatgaggaaatccccaagcggcgccggcagcggggctcagaaacaggcagcgagacccatgagagtgatctggctccttcagacaaggaggctcccacacccaaggagggaacactcacccaggtcccgctcccccaccaccaggagccccaccttcccagccccagcccgcttcactcccggggtgggcgagtcttcactcccagaggggatctcgccggggccgaggaggagggagcctcctcaagtttgcccaggctggagccctccagccaagtctctggctcccaagaaacctcccacaggccctttgccaccaagtaaggagcctttgaaagagaagttgatcccagggcctctgtcccctgtggcgcgcggaggcagcaatggaggtagcaatgtgggcatggaagatggggagcgaccccgaaggaggcgacatgggagggctcagcagcaggataaaccgcctcgtttccggaggctgaagcaggaacgggagaatgccgcaagggggtctgagggcaagccctccctaacccttccagcctccgctcctggacctgaggaggccctcacaacagtcacagtggccccagcacctcgccgggcagctgccaagtctcctgatctgtcaaaccagaactcagaccaagccaatgaggaatgggagactgcatcagagagcagtgacttcaccagtgagcgccgaggggacaaagaggcacccccaccagtactgctgacacccaaggctgtgggaactcctgggggaggtggaggtggagccgtaccaggtatttcagccatgtcccgcggagatctgagccagagagccaaggatttgagtaaacggagcttctcaagtcagcggccaggcatggaacggcagaatcggcgccctggcccagggggcaaggctggcagcagtggcagcagcagtggaggaggcggtgggggtcctggaggaaggaccgggccaggacgaggcgacaagaggagctggccctctcccaagaaccgaagtcgtcctccagaggagcgtcccccggggcttcccctgcctcccccacctcccagcagttctgctgtcttccgcctggaccaagttatccacagcaaccctgctggcatccaacaggctctggcccagcttagtagccgtcaagggagtgtaactgcaccagggggtcatccaaggcacaagcctgggcctccccaagcccctcagggcccctctcctaggcccccaacccgatacgagccccagagggtcaacagcggcctcagttctgacccccactttgaggagccggggccaatggtgagaggggtgggtgggactcctcgggactctgccggggttagtccctttccccctaaacgtcgggagcggcctcccagaaaaccagagctgctacaggaggaatctttgccacctcctcatagctctggattcttgggctctaagcctgagggcccaggccctcaggcagagtccagagatacaggcacagaggccctgacccctcacatctggaaccgtttacatactgccactagccgaaagagttaccggcccagctccatggagccttggatggagcccctgagtccttttgaggatgtggctggcacagaaatgagtcagtctgacagtggggtggacctgagtggggattctcaggtgtcatcaggtccctgcagccagcgaagttcccctgatggaggactcaagggggcagcagagggaccccccaagaggcctggaggctcctcacccctgaatgctgttccttgtgagggtccacctggctctgaacctcctaggagaccaccacctgccccccacgatggggacagaaaggagctgccccgggagcagcctctgccccctggccccattggcacagaacgatcacagcgtacagaccgaggcacagagcctggccccattcggccatcccatcgacctggtcccccagtccagtttggcactagtgacaaggactcagacttacgcctagtggtaggagacagcttgaaagcagagaaggagctaacagcatcagtcactgaggccattcctgtatcacgagactgggagctgcttcccagtgctgctgcctctgctgagccacaatccaagaacctggattctgggcactgtgtcccggagcccagctcctcaggccagcgcctgtatcctgaggttttctatggcagtgctgggccttccagttctcagatctctgggggacatggactctcaattacatccaaacagtggaggcgccctgggacaccctcactgcacccttacagatcacagcccctatacctaccccccggcccagcccctccctcagcactgctctctggggtagctctcaagggccagtttctggatttctccacaatgcaagctacagagctggggaagttgccggctggaggagttctctaccctccaccttccttcctctactctccggctttctgccccagtcctttgcctgacacatcgttgcttcaggtacgccaggatctgccatccccttcggatttttattctactcctctgcagcctggtggccaaagtggctttctcccttcaggggctcctgcccagcagatgcttctacccatggtagactcacagctgcctgtggtgaactttggctccctgccgccagcaccacctcctgccccacctcccctttctctgttacctgtgggccctgctctgcagccccccagcctggctgtgcggcccccacctgctcctgctactcgggtgctgccttcacctgccaggcccttccccgctagcttggggcgagcagagctgcatccagtggaactaaagccgttccaggattatcaaaaactgagcagcaaccttgggggacctggatcatcacggactcccccaactggaaggtccttctctggcctcaattcccgtctcaaggccacgccttccacctacagtggagtcttccgcacccagcgcgtcgacctttaccagcaggcctccccaccagatgccctgcgctggatacctaagccttgggagcggacagggccgccacctcgagaagggccctcccgacgggcagaggagcctgggtcccgaggggacaaggagcctgggttgcccccaccccgctgagggagttcctcttgccccctacccccggggcttgtatatagattataaatatataagggggaaaggggtgggcggggaggggttgtggggctggggcctcacttcccctcctcccccttcccctggtcccctgtccctggggctgtttgttaaaaaagagtaataaaaggattt

SEQ ID NO: 23805 - DNA, 6840 bp, Homo sapiens
  source 1..6840: mol_type = unassigned DNA
agggggtgctcccgggggcggcggttgcccggatgggccgttagtcggggctcagccgcggagtgagcgagggagacgggaggagccgaacccggcgccatccgccgccatcctcccccgccccaccgccatcccgtcccggggagcccctaggcccgggtcccggatccccgcgcacccggccaggctctggcacgttttgggggaggtgcctgcaggacccaacatactcaatgagcttccagcgcaatgtccgatcgctcggggccgactgccaagggaaaggatggaaagaagtattcctcgctcaacctgtttgatacgtataagggcaagtccttagagatccagaaacccgctgttgcccctcgccatggcctgcagagtctcgggaaagttgccattgcccggcgtatgccacctccagccaaccttccaagcctgaaagccgagaacaaaggcaatgaccccaatgtctcactagtgccaaaagacggaacaggatgggcaagcaaacaggagcagtccgaccccaagagttccgatgcctcaaccgctcagccgccggaatcgcagccactgccggcttcacagacgcctgcctccaaccagccgaaacgacccccagcagcccccgagaacactcctttggttccaagcggggtaaagtcctgggcacaagccagcgtcacccatggagcacatggagatggtggaagggcatcaagcctactgtcacgattctctcgagaggaatttccgaccctgcaggcggctggcgaccaggacaaggctgccaaggaaagggagtctgccgaacagtcgtctgggcccggaccaagcctccgcccccaaaattctacaacttggagggacggaggtgggcgtggccctgatgagctggagggcccggactccaaacttcatcatggtcatgatccccggggtgggctacagccttcaggcccaccccagttccctccctaccgcggaatgatgccgcctttcatgtatcccccatatctcccgttccctccgccctatggaccccaggggccttaccgataccccactcctgatgggcccagccgttttccccgtgtggcgggcccccgaggctcagggccaccaatgcgcttagtagagcctgtgggtcgtccctctattctcaaagaggataatctcaaagagtttgatcagttggatcaggagaatgatgatggttgggcaggggcccatgaagaggttgactacactgaaaagctcaagttcagcgatgaggaagatgggcgagactctgatgaggagggagctgagggccacagggattcccaatcagcttctggtgaggaacggccccctgaagcagatggcaaaaagggcaactcccccaacagcgaaccgcccactcctaagacggcctgggcagaaacctctcggcctccagagacagagccgggacctcctgccccaaagcctcccctacccccccctggggactacccagatcgtgggggtcctccctgcaagcccccagcacctgaagatgaggatgaggcatggcggcagcgacgaaagcagtcgtcatctgagatttccctggcagtggagcgggcccggcgacggcgagaagaagaggagcggcgcatgcaagaagagcgccgggcagcctgtgctgagaagctcaagcgactcgatgaaaagtttggggcacctgacaagcggctcaaagcagagcctgctgccccacctgctgccccttctaccccagctccaccacctgcagtccctaaagaactccctgcacctccagctccacctccagcatcagccccaacaccagagaaagaacctgaagagccagcacaggcccctcctgcccaatctactcctactccaggtgtggctgcggctcccactctggtgagtggtggtggcagtaccagtagcaccagcagtggcagcttcgaagccagcccagtggaaccacaactgccctcaaaagagggtcctgaaccaccagaagaggttcctcctcctaccacacccccagttccaaaggtggaacccaagggtgatgggattggtcccacccgccagccccctagtcagggcttgggctaccccaaatatcagaagtcgttgcctcctcgtttccagcggcagcagcaggagcagctcctgaagcagcagcagcagcaccagtggcagcagcatcaacagggctctgcccctcctaccccagtgcccccatcaccaccacagcctgtgaccctgggggctgtgccagctccacaggctccacccccgccccccaaggccctgtacccaggtgctctgggccggcccccacccatgcccccaatgaactttgatccccgatggatgatgattcctccttatgtggacccccggctcctccagggtcgtccccctctagacttctaccctcctggtgtgcatccctctggcctagttccccgagagcgttcagacagtgggggctcaagctcagagccatttgaccgtcatgcacctgctatgttacgggaacggggcactccaccggtggatccaaagttggcctgggtgggagatgtcttcaccgccacacccgctgaaccccgcccacttacctcacctctgcgccaggctgcggatgaggatgacaaggggatgaggagcgagactcctccagtacctcccccaccaccctatctggccagttatccaggctttcctgagaatggagcccctgggcccccaatctctcgctttcctctggaggaaccagggccccgtccactcccctggcccccaggcagtgatgaagtggccaagatacaaactccaccacccaagaaggagccccctaaggaggagactgcacagctgacggggccagaagcaggccgaaagcctgcccgcggagtcgggagtggaggccagggccccccaccaccacgcagagagagtcgcacagagacccgctggggccctcgtccagggagcagtcgtcgtggaatccctccagaggagccaggggccccaccccgccgggctgggcctataaagaaacctccaccacctacaaaagtagaagagctgcctcccaagcccctcgaacagggggatgaaacccccaaacccccaaagccagacccactcaagataaccaaggggaagctagggggccccaaggagaccccacccaatggaaatctttcccctgccccaaggcttcggagggactattcgtatgaaagagtgggtcctacctcttgccggggtcggggccgaggcgagtattttgccagagggaggggttttcgggggacctatgggggacgagggcggggagccgccgggaattccgcagttaccgagagtttcgaggagatgatgggcgtggaggtgggacagggggaccaaaccaccctcctgctccccgaggccgcactgccagcgagacacggagcgagggttcagagtatgaggaaatccccaagcggcgccggcagcggggctcagaaacaggcagcgagacccatgagagtgatctggctccttcagacaaggaggctcccacacccaaggagggaacactcacccaggtcccgctcccccaccaccaggagccccaccttcccagccccagcccgcttcactcccggggtgggcgagtcttcactcccagaggggatctcgccggggccgaggaggagggagcctcctcaagtttgcccaggctggagccctccagccaagtctctggctcccaagaaacctcccacaggccctttgccaccaagtaaggagcctttgaaagagaagttgatcccagggcctctgtcccctgtggcgcgcggaggcagcaatggaggtagcaatgtgggcatggaagatggggagcgaccccgaaggaggcgacatgggagggctcagcagcaggataaaccgcctcgtttccggaggctgaagcaggaacgggagaatgccgcaagggggtctgagggcaagccctccctaacccttccagcctccgctcctggacctgaggaggccctcacaacagtcacagtggccccagcacctcgccgggcagctgccaagtctcctgatctgtcaaaccagaactcagaccaagccaatgaggaatgggagactgcatcagagagcagtgacttcaccagtgagcgccgaggggacaaagaggcacccccaccagtactgctgacacccaaggctgtgggaactcctgggggaggtggaggtggagccgtaccaggtatttcagccatgtcccgcggagatctgagccagagagccaaggatttgagtaaacggagcttctcaagtcagcggccaggcatggaacggcagaatcggcgccctggcccagggggcaaggctggcagcagtggcagcagcagtggaggaggcggtgggggtcctggaggaaggaccgggccaggacgaggcgacaagaggagctggccctctcccaagaaccgaagtcgtcctccagaggagcgtcccccggggcttcccctgcctcccccacctcccagcagttctgctgtcttccgcctggaccaagttatccacagcaaccctgctggcatccaacaggctctggcccagcttagtagccgtcaagggagtgtaactgcaccagggggtcatccaaggcacaagcctgggcctccccaagcccctcagggcccctctcctaggcccccaacccgatacgagccccagagggtcaacagcggcctcagttctgacccccactttgaggagccggggccaatggtgagaggggtgggtgggactcctcgggactctgccggggttagtccctttccccctaaacgtcgggagcggcctcccagaaaaccagagctgctacaggaggaatctttgccacctcctcatagctctggattcttgggctctaagcctgagggcccaggccctcaggcagagtccagagatacaggcacagaggccctgacccctcacatctggaaccgtttacatactgccactagccgaaagagttaccggcccagctccatggagccttggatggagcccctgagtccttttgaggatgtggctggcacagaaatgagtcagtctgacagtggggtggacctgagtggggattctcaggtgtcatcaggtccctgcagccagcgaagttcccctgatggaggactcaagggggcagcagagggaccccccaagaggcctggaggctcctcacccctgaatgctgttccttgtgagggtccacctggctctgaacctcctaggagaccaccacctgccccccacgatggggacagaaaggagctgccccgggagcagcctctgccccctggccccattggcacagaacgatcacagcatacagaccgaggcacagagcctggccccattcggccatcccatcgacctggtcccccagtccagtttggcactagtgacaaggactcagacttacgcctagtggtaggagacagcttgaaagcagagaaggagctaacagcatcagtcactgaggccattcctgtatcacgagactgggagctgcttcccagtgctgctgcctctgctgagccacaatccaagaacctggattctgggcactgtgtcccggagcccagctcctcaggccagcgcctgtatcctgaggttttctatggcagtgctgggccttccagttctcagatctctgggggacatggactctcagttacatccaaacagtggaggcgccctgggacaccctcactgcacccttacagatcacagcccctatacctaccccccggcccagcccctccctcagcactgctctctggggtagctctcaagggccagtttctggatttctccacaatgcaagctacagagctggggaagttgccggctggaggagttctctaccctccaccttccttcctctactctccggctttctgccccagtcctttgcctgacacatcgttgcttcaggtacgccaggatctgccatccccttcggatttttattctactcctctgcagcctggtggccaaagtggctttctcccttcaggggctcctgcccagcagatgcttctacccatggtagactcacagctgcctgtggtgaactttggctccctgccgccagcaccacctcctgccccaccttccctttctctgttacctgtgggccctgctctgcagccccccagcctggctgtgcggcccccacctgctcctgctactcgggtgctgccttcacctgccaggcccttccccgctagcttggggcgagcagagctgcatccagtggaactaaagccgttccaggattatcaaaaactgagcagcaaccttgggggacctggatcatcacggactcccccaactggaaggtccttctctggcctcaattcccgtctcaaggccacgccttccacctacagtggagtcttccgcacccagcgcgtcgacctttaccagcaggcctccccaccagatgccctgcgctggatacctaagccttgggagcggacagggccgccacctcgagaagggccctcccgacgggcagaggagcctgggtcccgaggggacaaggagcctgggttgcccccaccccgctgagggagttcctcttgccccctacccccggggcttgtatatagattataaatatataagggggaaaggggtgggcggggaggggttgtggggctggggcctcacttcccctcctcccccttcccctggtcccctgtccctggggctgtttgttaaaaaagagtaataaaaggattt

SEQ ID NO: 23806 - DNA, 6840 bp, Homo sapiens
  source 1..6840: mol_type = unassigned DNA
agggggtgctcccgggggcggcggttgcccggatgggccgttagtcggggctcagccgcggagtgagcgagggagacgggaggagccgaacccggcgccatccgccgccatcctcccccgccccaccgccatcccgtcccggggagcccctaggcccgggtcccggatccccgcgcacccggccaggctctggcacgttttgggggaggtgcctgcaggacccaacatactcaatgagcttccagcgcaatgtccgatcgctcggggccgactgccaagggaaaggatggaaagaagtattcctcgctcaacctgtttgatacgtataagggcaagtccttagagatccagaaacccgctgttgcccctcgccatggcctgcagagtctcgggaaagttgccattgcccggcgtatgccacctccagccaaccttccaagcctgaaagccgagaacaaaggcaatgaccccaatgtctcactagtgccaaaagacggaacaggatgggcaagcaaacaggagcagtccgaccccaagagttccgatgcctcaaccgctcagccgccggaatcgcagccactgccggcttcacagacgcctgcctccaaccagccgaaacgacccccagcagcccccgagaacactcctttggttccaagcggggtaaagtcctgggcacaagccagcgtcacccatggagcacatggagatggtggaagggcatcaagcctactgtcacgattctctcgagaggaatttccgaccctgcaggcggctggcgaccaggacaaggctgccaaggaaagggagtctgccgaacagtcgtctgggcccggaccaagcctccgcccccaaaattctacaacttggagggacggaggtgggcgtggccctgatgagctggagggcccggactccaaacttcatcatggtcatgatccccggggtgggctacagccttcaggcccaccccagttccctccctaccgcggaatgatgccgcctttcatgtatcccccatatctcccgttccctccgccctatggaccccaggggccttaccgataccccactcctgatgggcccagccgttttccccgtgtggcgggcccccgaggctcagggccaccaatgcgcttagtagagcctgtgggtcgtccctctattctcaaagaggataatctcaaagagtttgatcagttggatcaggagaatgatgatggttgggcaggggcccatgaagaggttgactacactgaaaagctcaagttcagcgatgaggaagatgggcgagactctgatgaggagggagctgagggccacagggattcccaatcagcttctggtgaggaacggccccctgaagcagatggcaaaaagggcaactcccccaacagcgaaccgcccactcctaagacggcctgggcagaaacctctcggcctccagagacagagccgggacctcctgccccaaagcctcccctacccccccctggggactacccagatcgtgggggtcctccctgcaagcccccagcacctgaagatgaggatgaggcatggcggcagcgacgaaagcagtcgtcatctgagatttccctggcagtggagcgggcccggcgacggcgagaagaagaggagcggcgcatgcaagaagagcgccgggcagcctgtgctgagaagctcaagcgactcgatgaaaagtttggggcacctgacaagcggctcaaagcagagcctgctgccccacctgctgccccttctaccccagctccaccacctgcagtccctaaagaactccctgcacctccagctccacctccagcatcagccccaacaccagagacagaacctgaagagccagcacaggcccctcctgcccaatctactcctactccaggtgtggctgcggctcccactctggtgagtggtggtggcagtaccagtagcaccagcagtggcagcttcgaagccagcccagtggaaccacaactgccctcaaaagagggtcctgaaccaccagaagaggttcctcctcctaccacacccccagttccaaaggtggaacccaagggtgatgggattggtcccacccgccagccccctagtcagggcttgggctaccccaaatatcagaagtcgttgcctcctcgtttccagcggcagcagcaggagcagctcctgaagcagcagcagcagcaccagtggcagcagcatcaacagggctctgcccctcctaccccagtgcccccatcaccaccacagcctgtgaccctgggggctgtgccagctccacaggctccacccccgccccccaaggccctgtacccaggtgctctgggccggcccccacccatgcccccaatgaactttgatccccgatggatgatgattcctccttatgtggacccccggctcctccagggtcgtccccctctagacttctaccctcctggtgtgcatccctctggcctagttccccgagagcgttcagacagtgggggctcaagctcagagccatttgaccgtcatgcacctgctatgttacgggaacggggcactccaccggtggatccaaagttggcctgggtaggagatgtcttcaccgccacacccgctgaaccccgcccacttacctcacctctgcgccaggctgcggatgaggatgacaaggggatgaggagcgagactcctccagtacctcccccaccaccctatctggccagttatccaggctttcctgagaatggagcccctgggcccccaatctctcgctttcctctggaggaaccagggccccgtccactcccctggcccccaggcagtgatgaagtggccaagatacaaactccaccacccaagaaggagccccctaaggaggagactgcacagctgacggggccagaagcaggccgaaagcctgcccgcggagtcgggagtggaggccagggccccccaccaccacgcagagagagtcgcacagagacccgctggggccctcgtccagggagcagtcgtcgtggaatccctccagaggagccaggggccccaccccgccgggctgggcctataaagaaacctccaccacctacaaaagtagaagagctgcctcccaagcccctcgaacagggggatgaaacccccaaacccccaaagccagacccactcaagataaccaaggggaagctagggggccccaaggagaccccacccaatggaaatctttcccctgccccaaggcttcggagggactattcgtatgaaagagtgggtcctacctcttgccggggtcggggccgaggcgagtattttgccagagggaggggttttcgggggacctatgggggacgagggcggggagccgccgggaattccgcagttaccgagagtttcgaggagatgatgggcgtggaggtgggacagggggaccaaaccaccctcctgctccccgaggccgcactgccagcgagacacggagcgagggttcagagtatgaggaaatccccaagcggcgccggcagcggggctcagaaacaggcagcgagacccatgagagtgatctggctccttcagacaaggaggctcccacacccaaggagggaacactcacccaggtcccgctcccccaccaccaggagccccaccttcccagccccagcccgcttcactcccggggtgggcgagtcttcactcccagaggggatctcgccggggccgaggaggagggagcctcctcaagtttgcccaggctggagccctccagccaagtctctggctcccaagaaacctcccacaggccctttgccaccaagtaaggagcctttgaaagagaagttgatcccagggcctctgtcccctgtggcgcgcggaggcagcaatggaggtagcaatgtgggcatggaagatggggagcgaccccgaaggaggcgacatgggagggctcagcagcaggataaaccgcctcgtttccggaggctgaagcaggaacgggagaatgccgcaagggggtctgagggcaagccctccctaacccttccagcctccgctcctggacctgaggaggccctcacaacagtcacagtggccccagcacctcgccgggcagctgccaagtctcctgatctgtcaaaccagaactcagaccaagccaatgaggaatgggagactgcatcagagagcagtgacttcaccagtgagcgccgaggggacaaagaggcacccccaccagtactgctgacacccaaggctgtgggaactcctgggggaggtggaggtggagccgtaccaggtatttcagccatgtcccgcggagatctgagccagagagccaaggatttgagtaaacggagcttctcaagtcagcggccaggcatggaacggcagaatcggcgccctggcccagggggcaaggctggcagcagtggcagcagcagtggaggaggcggtgggggtcctggaggaaggaccgggccaggacgaggcgacaagaggagctggccctctcccaagaaccgaagtcgtcctccagaggagcgtcccccggggcttcccctgcctcccccacctcccagcagttctgctgtcttccgcctggaccaagttatccacagcaaccctgctggcatccaacaggctctggcccagcttagtagccgtcaagggagtgtaactgcaccagggggtcatccaaggcacaagcctgggcttccccaagcccctcagggcccctctcctaggcccccaacccgatacgagccccagagggtcaacagcggcctcagttctgacccccactttgaggagccggggccaatggtgagaggggtgggtgggactcctcgggactctgccggggttagtccctttccccctaaacgtcgggagcggcctcccagaaaaccagagctgctacaggaggaatctttgccacctcctcatagctctggattcttgggctctaagcctgagggcccaggccctcaggcagagtccagagatacaggcacagaggccctgacccctcacatctggaaccgtttacatactgccactagccgaaagagttaccggcccagctccatggagccttggatggagcccctgagtccttttgaggatgtggctggcacagaaatgagtcagtctgacagtggggtggacctgagtggggattctcaggtgtcatcaggtccctgcagccagcgaagttcccctgatggaggactcaagggggcagcagagggaccccccaagaggcctggaggctcctcacccctgaatgctgttccttgtgagggtccacctggctctgaacctcctaggagaccaccacctgccccccacgatggggacagaaaggagctgccccgggagcagcctctgccccctggccccattggcacagaacgatcacagcgtacagaccgaggcacagagcctggccccattcggccatcccatcgacctggtcccccagtccagtttggcactagtgacaaggactcagacttacgcctagtggtaggagacagcttgaaagcagagaaggagctaacagcatcagtcactgaggccattcctgtatcacgagactgggagctgcttcccagtgctgctgcctctgctgagccacaatccaagaacctggattctgggcactgtgtcccggagcccagctcctcaggccagcgcctgtatcctgaggttttctatggcagtgctgggccttccagttctcagatctctgggggacatggactctcaattacatccaaacagtggaggcgccctgggacaccctcactgcacccttacagatcacagcccctatacctaccccccggcccagcccctccctcagcactgctctctggggtagctctcaagggccagtttctggatttctccacaatgcaagctacagagctggggaagttgccggctggaggagttctctaccctccaccttccttcctctactctccggctttctgccccagtcctttgcctgacacatcgttgcttcaggtacgccaggatctgccatccccttcggatttttattctactcctctgcagcctggtggccaaagtggctttctcccttcaggggctcctgcccagcagatgcttctacccatggtagactcacagctgcctgtggtgaactttggctccctgccgccagcaccacctcctgccccacctcccctttctctgttacctgtgggccctgctctgcagccccccagcctggctgtgcggcccccacctgctcctgctactcgggtgctgccttcacctgccaggcccttccccgctagcttggggcgagcagagctgcatccagtggaactaaagccgttccaggattatcaaaaactgagcagcaaccttgggggacctggatcatcacggactcccccaactggaaggtccttctctggcctcaattcccgtctcaaggccacgccttccacctacagtggagtcttccgcacccagcgcgtcgacctttaccagcaggcctccccaccagatgccctgcgctggatacctaagccttgggagcggacagggccgccacctcgagaagggccctcccgacgggcagaggagcctgggtcccgaggggacaaggagcctgggttgcccccaccccgctgagggagttcctcttgccccctacccccggggcttgtatatagattataaatatataagggggaaaggggtgggcggggaggggttgtggggctggggcctcacttcccctcctcccccttcccctggtcccctgtccctggggctgtttgttaaaaaagagtaataaaaggattt

SEQ ID NO: 23807 - DNA, 6840 bp, Homo sapiens; identical to SEQ ID NO: 23799
  source 1..6840: mol_type = unassigned DNA

SEQ ID NO: 23808 - DNA, 6840 bp, Homo sapiens
  source 1..6840: mol_type = unassigned DNA
agggggtgctcccgggggcggcggttgcccggatgggccgttagtcggggctcagccgcggagtgagcgagggagacgggaggagccgaacccggcgccatccgccgccatcctcccccgccccaccgccatcccgtcccggggagcccctaggcccgggtcccggatccccgcgcacccggccaggctctggcacgttttgggggaggtgcctgcaggacccaacatactcaatgagcttccagcgcaatgtccgatcgctcggggccgactgccaagggaaaggatggaaagaagtattcctcgctcaacctgtttgatacgtataagggcaagtccttagagatccagaaacccgctgttgcccctcgccatggcctgcagagtctcgggaaagttgccattgcccggcgtatgccacctccagccaaccttccaagcctgaaagccgagaacaaaggcaatgaccccaatgtctcactagtgccaaaagacggaacaggatgggcaagcaaacaggagcagtccgaccccaagagttccgatgcctcaaccgctcagccgccggaatcgcagccactgccggcttcacagacgcctgcctccaaccagccgaaacgacccccagcagcccccgagaacactcctttggttccaagcggggtaaagtcctgggcacaagccagcgtcacccatggagcacatggagatggtggaagggcatcaagcctactgtcacgattctctcgagaggaatttccgaccctgcaggcggctggcgaccaggacaaggctgccaaggaaagggagtctgccgaacagtcgtctgggcccggaccaagcctccgcccccaaaattctacaacttggagggacggaggtgggcgtggccctgatgagctggagggcccggactccaaacttcatcatggtcatgatccccggggtgggctacagccttcaggcccaccccagttccctccctaccgcggaatgatgccgcctttcatgtatcccccatatctcccgttccctccgccctatggaccccaggggccttaccgataccccactcctgatgggcccagccgttttccccgtgtggcgggcccccgaggctcagggccaccaatgcgcttagtagagcctgtgggtcgtccctctattctcaaagaggataatctcaaagagtttgatcagttggatcaggagaatgatgatggttgggcaggggcccatgaagaggttgactacactgaaaagctcaagttcagcgatgaggaagatgggcgagactctgatgaggagggagctgagggccacagggattcccaatcagcttctggtgaggaacggccccctgaagcagatggcaaaaagggcaactcccccaacagcgaaccgcccactcctaagacggcctgggcagaaacctctcggcctccagagacagagccgggacctcctgccccaaagcctcccctacccccccctggggactacccagatcgtgggggtcctccctgcaagcccccagcacctgaagatgaggatgaggcatggcggcagcgacgaaagcagtcgtcatctgagatttccctggcagtggagcgggcccggcgacggcgagaagaagaggagcggcgcatgcaagaagagcgccgggcagcctgtgctgagaagctcaagcgactcgatgaaaagtttggggcacctgacaagcggctcaaagcagagcctgctgccccacctgctgccccttctaccccagctccaccacctgcagtccctaaagaactccctgcacctccagctccacctccagcatcagccccaacaccagagaaagaacctgaagagccagcacaggcccctcctgcccaatctactcctactccaggtgtggctgcggctcccactctggtgagtggtggtggcagtaccagtagcaccagcagtggcagcttcgaagccagcccagtggaaccacaactgccctcaaaagagggtcctgaaccaccagaagaggttcctcctcctaccacacccccagttccaaaggtggaacccaagggtgatgggattggtcccacccgccagccccctagtcagggcttgggctaccccaaatatcagaagtcgttgcctcctcgtttccagcggcagcagcaggagcagctcctgaagcagcagcagcagcaccagtggcagcagcatcaacagggctctgcccctcctaccccagtgcccccatcaccaccacagcctgtgaccctgggggctgtgccagctccacaggctccacccccgccccccaaggccctgtacccaggtgctctgggccggcccccacccatgcccccaatgaactttgatccccgatggatgatgattcctccttatgtggacccccggctcctccagggtcgtccccctctagacttctaccctcctggtgtgcatccctctggcctagttccccgagagcgttcagacagtgggggctcaagctcagagccatttgaccgtcatgcacctgctatgttacgggaacggggcactccaccggtggatccaaagttggcctgggtaggagatgtcttcaccgccacacccgctgaaccccgcccacttacctcacctctgcgccaggctgcggatgaggatgacaaggggatgaggagcgagactcctccagtacctcccccaccaccctatctggccagttatccaggctttcctgagaatggagcccctgggcccccaatctctcgctttcctctggaggaaccagggccccgtccactcccctggcccccaggcagtgatgaagtggccaagatacaaactccaccacccaagaaggagccccctaaggaggagactgcacagctgacggggccagaagcaggccgaaagcctgcccgcggagtcgggagtggaggccagggccccccaccaccacgcagagagagtcgcacagagacccgctggggccctcgtccagggagcagtcgtcgtggaatccctccagaggagccaggggccccaccccgccgggctgggcctataaagaaacctccaccacctacaaaagtagaagagctgcctcccaagcccctcgaacagggggatgaaacccccaaacccccaaagccagacccactcaagataaccaaggggaagctagggggccccaaggagaccccacccaatggaaatctttcccctgccccaaggcttcggagggactattcgtatgaaagagtgggtcctacctcttgccggggtcggggccgaggcgagtattttgccagagggaggggttttcgggggacctatgggggacgagggcggggagccgccgggaattccgcagttaccgagagtttcgaggagatgatgggcgtggaggtgggacagggggaccaaaccaccctcctgctccccgaggccgcactgccagcgagacacggagcgagggttcagagtatgaggaaatccccaagcggcgccggcagcggggctcagaaacaggcagcgagacccatgagagtgatctggctccttcagacaaggaggctcccacacccaaggagggaacactcacccaggtcccgctcccccaccaccaggagccccaccttcccagccccagcccgcttcactcccggggtgggcgagtcttcactcccagaggggatctcgccggggccgaggaggagggagcctcctcaagtttgcccaggctggagccctccagccaagtctctggctcccaagaaacctcccacaggccctttgccaccaagtaaggagcctttgaaagagaagttgatcccagggcctctgtcccctgtggcgcgcggaggcagcaatggaggtagcaatgtgggcatggaagatggggagcgaccccgaaggaggcgacatgggagggctcagcagcaggataaaccgcctcgtttccggaggctgaagcaggaacgggagaatgccgcaagggggtctgagggcaagccctccctaacccttccagcctccgctcctggacctgaggaggccctcacaacagtcacagtggccccagcacctcgccgggcagctgccaagtctcctgatctgtcaaaccagaactcagaccaagccaatgaggaatgggagactgcatcagagagcagtgacttcaccagtgagcgccgaggggacaaagaggcacccccaccagtactgctgacacccaaggctgtgggaactcctgggggaggtggaggtggagccgtaccaggtatttcagccatgtcccgcggagatctgagccagagagccaaggatttgagtaaacggagcttctcaagtcagcggccaggcatggaacggcagaatcggcgccctggcccagggggcaaggctggcagcagtggcagcagcagtggaggaggcggtgggggtcctggaggaaggaccgggccaggacgaggcgacaagaggagctggccctctcccaagaaccgaagtcgtcctccagaggagcgtcccccggggcttcccctgcctcccccacctcccagcagttctgctgtcttccgcctggaccaagttatccacagcaaccctgctggcatccaacaggctctggcccagcttagtagccgtcaagggagtgtaactgcaccagggggtcatccaaggcacaagcctgggcctccccaagcccctcagggcccctctcctaggcccccaacccgatacgagccccagagggtcaacagcggcctcagttctgacccccactttgaggagccggggccaatggtgagaggggtgggtgggactcctcgggactctgccggggttagtccctttccccctaaacgtcgggagcggcctcccagaaaaccagagctgctacaggaggaatctttgccacctcctcatagctctggattcttgggctctaagcctgagggcccaggccctcaggcagagtccagagatacaggcacagaggccctgacccctcacatctggaaccgtttacatactgccactagccgaaagagttaccggcccagctccatggagccttggatggagcccctgagtccttttgaggatgtggctggcacagaaatgagtcagtctgacagtggggtggacctgagtggggattctcaggtgtcatcaggtccctgcagccagcgaagttcccctgatggaggactcaagggggcagcagagggaccccccaagaggcctggaggctcctcacccctgaatgctgttccttgtgagggtccacctggctctgaacctcctaggagaccaccacctgccccccacgatggggacagaaaggagctgccccgggagcagcctctgccccctggccccattggcacagaacgatcacagcgtacagaccgaggcacagagcctggccccattcggccatcccatcgacctggtcccccagtccagtttggcactagtgacaaggactcagacttacgcctagtggtaggagacagcttgaaagcagagaaggagctaacagcatcagtcactgaggccattcctgtatcacgagactgggagctgcttcccagtgctgctgcctctgctgagccacaatccaagaacctggattctgggcactgtgtcccggagcccagctcctcaggccagcgcctgtatcctgaggttttctatggcagtgctgggccttccagttctcagatctctgggggacatggactctcaattacatccaaacagtggaggcgccctgggacaccctcactgcacccttacagatcacagcccctatacctacccccgggcccagcccctccctcagcactgctctctggggtagctctcaagggccagtttctggatttctccacaatgcaagctacagagctggggaagttgccggctggaggagttctctaccctccaccttccttcctctactctccggctttctgccccagtcctttgcctgacacatcgttgcttcaggtacgccaggatctgccatccccttcggatttttattctactcctctgcagcctggtggccaaagtggatttctcccttcaggggctcctgcccagcagatgcttctacccatggtagactcacagctgcctgtggtgaactttggctccctgccgccagcaccacctcctgccccacctcccctttctctgttacctgtgggccctgctctgcagccccccagcctggctgtgcggcccccacctgctcctgctactcgggtgctgccttcacctgccaggcccttccccgctagcttggggcgagcagagctgcatccagtggaactaaagccgttccaggattatcaaaaactgagcagcaaccttgggggacctggatcatcacggactcccccaactggaaggtccttctctggcctcaattcccgtctcaaggccacgccttccacctacagtggagtcttccgcacccagcgcgtcgacctttaccagcaggcctccccaccagatgccctgcgctggatacctaagccttgggagcggacagggccgccacctcgagaagggccctcccgacgggcagaggagcctgggtcccgaggggacaaggagcctgggttgcccccaccccgctgagggagttcctcttgccccctacccccggggcttgtatatagattataaatatataagggggaaaggggtgggcggggaggggttgtggggctggggcctcacttcccctcctcccccttcccctggtcccctgtccctggggctgtttgttaaaaaagagtaataaaaggattt

SEQ ID NO: 23809 - DNA, 4303 bp, Homo sapiens
  source 1..4303: mol_type = unassigned DNA
ttcttcaggcctagttccccgagagcgttcagacagtgggggctcaagctcagagccatttgaccgtcatgcacctgctatgttacgggaacggggcactccaccggtggatccaaagttggcctgggtaggagatgtcttcaccgccacacccgctgaaccccgcccacttacctcacctctgcgccaggctgcggatgaggatgacaaggggatgaggagcgagactcctccagtacctcccccaccaccctatctggccagttatccaggctttcctgagaatggagcccctgggcccccaatctctcgctttcctctggaggaaccagggccccgtccactcccctggcccccaggcagtgatgaagtggccaagatacaaactccaccacccaagaaggagccccctaaggaggagactgcacagctgacggggccagaagcaggccgaaagcctgcccgcggagtcgggagtggaggccagggccccccaccaccacgcagagagagtcgcacagagacccgctggggccctcgtccagggagcagtcgtcgtggaatccctccagaggagccaggggccccaccccgccgggctgggcctataaagaaacctccaccacctacaaaagtagaagagctgcctcccaagcccctcgaacagggggatgaaacccccaaacccccaaagccagacccactcaagataaccaaggggaagctagggggccccaaggagaccccacccaatggaaatctttcccctgccccaaggcttcggagggactattcgtatgaaagagtgggtcctacctcttgccggggtcggggccgaggcgagtattttgccagagggaggggttttcgggggacctatgggggacgagggcggggagcccgaagccgggaattccgcagttaccgagagtttcgaggagatgatgggcgtggaggtgggacagggggaccaaaccaccctcctgctccccgaggccgcactgccagcgagacacggagcgagggttcagagtatgaggaaatccccaagcggcgccggcagcggggctcagaaacaggcagcgagacccatgagagtgatctggctccttcagacaaggaggctcccacacccaaggagggaacactcacccaggtccctctcgctcccccaccaccaggagccccaccttcaccagccccagcccgcttcactgcccggggtgggcgagtcttcactcccagaggggtgccatctcgccggggccgaggaggagggaggccccctcctcaagtttgcccaggctggagccctccagccaagtctctggctcccaagaaacctcccacaggccctttgccaccaagtaaggagcctttgaaagagaagttgatcccagggcctctgtcccctgtggcgcgcggaggcagcaatggaggtagcaatgtgggcatggaagatggggagcgaccccgaaggaggcgacatgggagggctcagcagcaggataaaccgcctcgtttccggaggctgaagcaggaacgggagaatgccgcaagggggtctgagggcaagccctccctaacccttccagcctccgctcctggacctgaggaggccctcacaacagtcacagtggccccagcacctcgccgggcagctgccaagtctcctgatctgtcaaaccagaactcagaccaagccaatgaggaatgggagactgcatcagagagcagtgacttcaccagtgagcgccgaggggacaaagaggcacccccaccagtactgctgacacccaaggctgtgggaactcctgggggaggtggaggtggagccgtaccaggtatttcagccatgtcccgcggagatctgagccagagagccaaggatttgagtaaacggagcttctcaagtcagcggccaggcatggaacggcagaatcggcgccctggcccagggggcaaggctggcagcagtggcagcagcagtggaggaggcggtgggggtcctggaggaaggaccgggccaggacgaggcgacaagaggagctggccctctcccaagaaccgaagtcgtcctccagaggagcgtcccccggggcttcccctgcctcccccacctcccagcagttctgctgtcttccgcctggaccaagttatccacagcaaccctgctggcatccaacaggctctggcccagcttagtagccgtcaagggagtgtaactgcaccagggggtcatccaaggcacaagcctgggcttccccaagcccctcagggcccctctcctaggcccccaacccgatacgagccccagagggtcaacagcggcctcagttctgacccccactttgaggagccggggccaatggtgagaggggtgggtgggactcctcgggactctgccggggttagtccctttccccctaaacgtcgggagcggcctcccagaaaaccagagctgctacaggaggaatctttgccacctcctcatagctctggattcttgggctctaagcctgagggcccaggccctcaggcagagtccagagatacaggcacagaggccctgacccctcacatctggaaccgtttacatactgccactagccgaaagagttaccggcccagctccatggagccttggatggagcccctgagtccttttgaggatgtggctggcacagaaatgagtcagtctgacagtggggtggacctgagtggggattctcaggtgtcatcaggtccctgcagccagcgaagttcccctgatggaggactcaagggggcagcagagggaccccccaagaggcctggaggctcctcacccctgaatgctgttccttgtgagggtccacctggctctgaacctcctaggagaccaccacctgccccccacgatggggacagaaaggagctgccccgggagcagcctctgccccctggccccattggcacagaacgatcacagcgtacagaccgaggcacagagcctggccccattcggccatcccatcgacctggtcccccagtccagtttggcactagtgacaaggactcagacttacgcctagtggtaggagacagcttgaaagcagagaaggagctaacagcatcagtcactgaggccattcctgtatcacgagactgggagctgcttcccagtgctgctgcctctgctgagccacaatccaagaacctggattctgggcactgtgtcccggagcccagctcctcaggccagcgcctgtatcctgaggttttctatggcagtgctgggccttccagttctcagatctctgggggagccatggactctcaattacatccaaacagtggaggcttccgccctgggacaccctcactgcacccttacagatcacagcccctatacctaccccccggcccagcccctccctcagcactgctctctggggtagctctcaagggccagtttctggatttctccacaatgcaagctacagagctggggaagttgccggctggaggagttctctaccctccaccttccttcctctactctccggctttctgccccagtcctttgcctgacacatcgttgcttcaggtacgccaggatctgccatccccttcggatttttattctactcctctgcagcctggtggccaaagtggctttctcccttcaggggctcctgcccagcagatgcttctacccatggtagactcacagctgcctgtggtgaactttggctccctgccgccagcaccacctcctgccccacctcccctttctctgttacctgtgggccctgctctgcagccccccagcctggctgtgcggcccccacctgctcctgctactcgggtgctgccttcacctgccaggcccttccccgctagcttggggcgagcagagctgcatccagtggaactaaagccgttccaggattatcaaaaactgagcagcaaccttgggggacctggatcatcacggactcccccaactggaaggtccttctctggcctcaattcccgtctcaaggccacgccttccacctacagtggagtcttccgcacccagcgcgtcgacctttaccagcaggcctccccaccagatgccctgcgctggatacctaagccttgggagcggacagggccgccacctcgagaagggccctcccgacgggcagaggagcctgggtcccgaggggacaaggagcctgggttgcccccaccccgctgagggagttcctcctcccccttcccctggtcccctgtccctggggctgtttgttaaaaaagagtaataaaaggattt

SEQ ID NO: 23810 - DNA, 6873 bp, Homo sapiens
  source 1..6873: mol_type = unassigned DNA
agggggtgctcccgggggcggcggttgcccggatgggccgttagtcggggctcagccgcggagtgagcgagggagacgggaggagccgaacccggcgccatccgccgccatcctcccccgccccaccgccatcccgtcccggggagcccctaggcccgggtcccggatccccgcgcacccggccaggctctggcacgttttgggggaggtgcctgcaggacccaacatactcaatgagcttccagcgcaatgtccgatcgctcggggccgactgccaagggaaaggatggaaagaagtattcctcgctcaacctgtttgatacgtataagggcaagtccttagagatccagaaacccgctgttgcccctcgccatggcctgcagagtctcgggaaagttgccattgcccggcgtatgccacctccagccaaccttccaagcctgaaagccgagaacaaaggcaatgaccccaatgtctcactagtgccaaaagacggaacaggatgggcaagcaaacaggagcagtccgaccccaagagttccgatgcctcaaccgctcagccgccggaatcgcagccactgccggcttcacagacgcctgcctccaaccagccgaaacgacccccagcagcccccgagaacactcctttggttccaagcggggtaaagtcctgggcacaagccagcgtcacccatggagcacatggagatggtggaagggcatcaagcctactgtcacgattctctcgagaggaatttccgaccctgcaggcggctggcgaccaggacaaggctgccaaggaaagggagtctgccgaacagtcgtctgggcccggaccaagcctccgcccccaaaattctacaacttggagggacggaggtgggcgtggccctgatgagctggagggcccggactccaaacttcatcatggtcatgatccccggggtgggctacagccttcaggcccaccccagttccctccctaccgcggaatgatgccgcctttcatgtatcccccatatctcccgttccctccgccctatggaccccaggggccttaccgataccccactcctgatgggcccagccgttttccccgtgtggcgggcccccgaggctcagggccaccaatgcgcttagtagagcctgtgggtcgtccctctattctcaaagaggataatctcaaagagtttgatcagttggatcaggagaatgatgatggttgggcaggggcccatgaagaggttgactacactgaaaagctcaagttcagcgatgaggaagatgggcgagactctgatgaggagggagctgagggccacagggattcccaatcagcttctggtgaggaacggccccctgaagcagatggcaaaaagggcaactcccccaacagcgaaccgcccactcctaagacggcctgggcagaaacctctcggcctccagagacagagccgggacctcctgccccaaagcctcccctacccccacctcaccggggccccgccgggaactggggcccccctggggactacccagatcgtgggggtcctccctgcaagcccccagcacctgaagatgaggatgaggcatggcggcagcgacgaaagcagtcgtcatctgagatttccctggcagtggagcgggcccggcgacggcgagaagaagaggagcggcgcatgcaagaagagcgccgggcagcctgtgctgagaagctcaagcgactcgatgaaaagtttggggcacctgacaagcggctcaaagcagagcctgctgccccacctgctgccccttctaccccagctccaccacctgcagtccctaaagaactccctgcacctccagctccacctccagcatcagccccaacaccagagaaagaacctgaagagccagcacaggcccctcctgcccaatctactcctactccaggtgtggctgcggctcccactctggtgagtggtggtggcagtaccagtagcaccagcagtggcagcttcgaagccagcccagtggaaccacaactgccctcaaaagagggtcctgaaccaccagaagaggttcctcctcctaccacacccccagttccaaaggtggaacccaagggtgatgggattggtcccacccgccagccccctagtcagggcttgggctaccccaaatatcagaagtcgttgcctcctcgtttccagcggcagcagcaggagcagctcctgaagcagcagcagcagcaccagtggcagcagcatcaacagggctctgcccctcctaccccagtgcccccatcaccaccacagcctgtgaccctgggggctgtgccagctccacaggctccacccccgccccccaaggccctgtacccaggtgctctgggccggcccccacccatgcccccaatgaactttgatccccgatggatgatgattcctccttatgtggacccccggctcctccagggtcgtccccctctagacttctaccctcctggtgtgcatccctctggcctagttccccgagagcgttcagacagtgggggctcaagctcagagccatttgaccgtcatgcacctgctatgttacgggaacggggcactccaccggtggatccaaagttggcctgggtaggagatgtcttcaccgccacacccgctgaaccccgcccacttacctcacctctgcgccaggctgcggatgaggatgacaaggggatgaggagcgagactcctccagtacctcccccaccaccctatctggccagttatccaggctttcctgagaatggagcccctgggcccccaatctctcgctttcctctggaggaaccagggccccgtccactcccctggcccccaggcagtgatgaagtggccaagatacaaactccaccacccaagaaggagccccctaaggaggagactgcacagctgacggggccagaagcaggccgaaagcctgcccgcggagtcgggagtggaggccagggccccccaccaccacgcagagagagtcgcacagagacccgctggggccctcgtccagggagcagtcgtcgtggaatccctccagaggagccaggggccccaccccgccgggctgggcctataaagaaacctccaccacctacaaaagtagaagagctgcctcccaagcccctcgaacagggggatgaaacccccaaacccccaaagccagacccactcaagataaccaaggggaagctagggggccccaaggagaccccacccaatggaaatctttcccctgccccaaggcttcggagggactattcgtatgaaagagtgggtcctacctcttgccggggtcggggccgaggcgagtattttgccagagggaggggttttcgggggacctatgggggacgagggcggggagccgccgggaattccgcagttaccgagagtttcgaggagatgatgggcgtggaggtgggacagggggaccaaaccaccctcctgctccccgaggccgcactgccagcgagacacggagcgagggttcagagtatgaggaaatccccaagcggcgccggcagcggggctcagaaacaggcagcgagacccatgagagtgatctggctccttcagacaaggaggctcccacacccaaggagggaacactcacccaggtcccgctcccccaccaccaggagccccaccttcccagccccagcccgcttcactcccggggtgggcgagtcttcactcccagaggggatctcgccggggccgaggaggagggagcctcctcaagtttgcccaggctggagccctccagccaagtctctggctcccaagaaacctcccacaggccctttgccaccaagtaaggagcctttgaaagagaagttgatcccagggcctctgtcccctgtggcgcgcggaggcagcaatggaggtagcaatgtgggcatggaagatggggagcgaccccgaaggaggcgacatgggagggctcagcagcaggataaaccgcctcgtttccggaggctgaagcaggaacgggagaatgccgcaagggggtctgagggcaagccctccctaacccttccagcctccgctcctggacctgaggaggccctcacaacagtcacagtggccccagcacctcgccgggcagctgccaagtctcctgatctgtcaaaccagaactcagaccaagccaatgaggaatgggagactgcatcagagagcagtgacttcaccagtgagcgccgaggggacaaagaggcacccccaccagtactgctgacacccaaggctgtgggaactcctgggggaggtggaggtggagccgtaccaggtatttcagccatgtcccgcggagatctgagccagagagccaaggatttgagtaaacggagcttctcaagtcagcggccaggcatggaacggcagaatcggcgccctggcccagggggcaaggctggcagcagtggcagcagcagtggaggaggcggtgggggtcctggaggaaggaccgggccaggacgaggcgacaagaggagctggccctctcccaagaaccgaagtcgtcctccagaggagcgtcccccggggcttcccctgcctcccccacctcccagcagttctgctgtcttccgcctggaccaagttatccacagcaaccctgctggcatccaacaggctctggcccagcttagtagccgtcaagggagtgtaactgcaccagggggtcatccaaggcacaagcctgggcctccccaagcccctcagggcccctctcctaggcccccaacccgatacgagccccagagggtcaacagcggcctcagttctgacccccactttgaggagccggggccaatggtgagaggggtgggtgggactcctcgggactctgccggggttagtccctttccccctaaacgtcgggagcggcctcccagaaaaccagagctgctacaggaggaatctttgccacctcctcatagctctggattcttgggctctaagcctgagggcccaggccctcaggcagagtccagagatacaggcacagaggccctgacccctcacatctggaaccgtttacatactgccactagccgaaagagttaccggcccagctccatggagccttggatggagcccctgagtccttttgaggatgtggctggcacagaaatgagtcagtctgacagtggggtggacctgagtggggattctcaggtgtcatcaggtccctgcagccagcgaagttcccctgatggaggactcaagggggcagcagagggaccccccaagaggcctggaggctcctcacccctgaatgctgttccttgtgagggtccacctggctctgaacctcctaggagaccaccacctgccccccacgatggggacagaaaggagctgccccgggagcagcctctgccccctggccccattggcacagaacgatcacagcgtacagaccgaggcacagagcctggccccattcggccatcccatcgacctggtcccccagtccagtttggcactagtgacaaggactcagacttacgcctagtggtaggagacagcttgaaagcagagaaggagctaacagcatcagtcactgaggccattcctgtatcacgagactgggagctgcttcccagtgctgctgcctctgctgagccacaatccaagaacctggattctgggcactgtgtcccggagcccagctcctcaggccagcgcctgtatcctgaggttttctatggcagtgctgggccttccagttctcagatctctgggggacatggactctcaattacatccaaacagtggaggcgccctgggacaccctcactgcacccttacagatcacagcccctatacctacccccgggcccagcccctccctcagcactgctctctggggtagctctcaagggccagtttctggatttctccacaatgcaagctacagagctggggaagttgccggctggaggagttctctaccctccaccttccttcctctactctccggctttctgccccagtcctttgcctgacacatcgttgcttcaggtacgccaggatctgccatccccttcggatttttattctactcctctgcagcctggtggccaaagtggatttctcccttcaggggctcctgcccagcagatgcttctacccatggtagactcacagctgcctgtggtgaactttggctccctgccgccagcaccacctcctgccccacctcccctttctctgttacctgtgggccctgctctgcagccccccagcctggctgtgcggcccccacctgctcctgctactcgggtgctgccttcacctgccaggcccttccccgctagcttggggcgagcagagctgcatccagtggaactaaagccgttccaggattatcaaaaactgagcagcaaccttgggggacctggatcatcacggactcccccaactggaaggtccttctctggcctcaattcccgtctcaaggccacgccttccacctacagtggagtcttccgcacccagcgcgtcgacctttaccagcaggcctccccaccagatgccctgcgctggatacctaagccttgggagcggacagggccgccacctcgagaagggccctcccgacgggcagaggagcctgggtcccgaggggacaaggagcctgggttgcccccaccccgctgagggagttcctcttgccccctacccccggggcttgtatatagattataaatatataagggggaaaggggtgggcggggaggggttgtggggctggggcctcacttcccctcctcccccttcccctggtcccctgtccctggggctgtttgttaaaaaagagtaataaaaggattt

SEQ ID NO: 23811 - DNA, 6873 bp, Homo sapiens
  source 1..6873: mol_type = unassigned DNA
agggggtgctcccgggggcggcggttgcccggatgggccgttagtcggggctcagccgcggagtgagcgagggagacgggaggagccgaacccggcgccatccgccgccatcctcccccgccccaccgccatcccgtcccggggagcccctaggcccgggtcccggatccccgcgcacccggccaggctctggcacgttttgggggaggtgcctgcaggacccaacatactcaatgagcttccagcgcaatgtccgatcgctcggggccgactgccaagggaaaggatggaaagaagtattcctcgctcaacctgtttgatacgtataagggcaagtccttagagatccagaaacccgctgttgcccctcgccatggcctgcagagtctcgggaaagttgccattgcccggcgtatgccacctccagccaaccttccaagcctgaaagccgagaacaaaggcaatgaccccaatgtctcactagtgccaaaagacggaacaggatgggcaagcaaacaggagcagtccgaccccaagagttccgatgcctcaaccgctcagccgctggaatcgcagccactgccggcttcacagacgcctgcctccaaccagccgaaacgacccccagcagcccccgagaacactcctttggttccaagcggggtaaagtcctgggcacaagccagcgtcacccatggagcacatggagatggtggaagggcatcaagcctactgtcacgattctctcgagaggaatttccgaccctgcaggcggctggcgaccaggacaaggctgccaaggaaagggagtctgccgaacagtcgtctgggcccggaccaagcctccgcccccaaaattctacaacttggagggacggaggtgggcgtggccctgatgagctggagggcccggactccaaacttcatcatggtcatgatccccggggtgggctacagccttcaggcccaccccagttccctccctaccgcggaatgatgccgcctttcatgtatcccccatatctcccgttccctccgccctatggaccccaggggccttaccgataccccactcctgatgggcccagccgttttccccgtgtggcgggcccccgaggctcagggccaccaatgcgcttagtagagcctgtgggtcgtccctctattctcaaagaggataatctcaaagagtttgatcagttggatcaggagaatgatgatggttgggcaggggcccatgaagaggttgactacactgaaaagctcaagttcagcgatgaggaagatgggcgagactctgatgaggagggagctgagggccacagggattcccaatcagcttctggtgaggaacggccccctgaagcagatggcaaaaagggcaactcccccaacagcgaaccgcccactcctaagacggcctgggcagaaacctctcggcctccagagacagagccgggacctcctgccccaaagcctcccctacccccacctcaccggggccccgccgggaactggggcccccctggggactacccagatcgtgggggtcctccctgcaagcccccagcacctgaagatgaggatgaggcatggcggcagcgacgaaagcagtcgtcatctgagatttccctggcagtggagcgggcccggcgacggcgagaagaagaggagcggcgcatgcaagaagagcgccgggcagcctgtgctgagaagctcaagcgactcgatgaaaagtttggggcacctgacaagcggctcaaagcagagcctgctgccccacctgctgccccttctaccccagctccaccacctgcagtccctaaagaactccctgcacctccagctccacctccagcatcagccccaacaccagagaaagaacctgaagagccagcacaggcccctcctgcccaatctactcctactccaggtgtggctgcggctcccactctggtgagtggtggtggcagtaccagtagcaccagcagtggcagcttcgaagccagcccagtggaaccacaactgccctcaaaagagggtcctgaaccaccagaagaggttcctcctcctaccacacccccagttccaaaggtggaacccaagggtgatgggattggtcccacccgccagccccctagtcagggcttgggctaccccaaatatcagaagtcgttgcctcctcgtttccagcggcagcagcaggagcagctcctgaagcagcagcagcagcaccagtggcagcagcatcaacagggctctgcccctcctaccccagtgcccccatcaccaccacagcctgtgaccctgggggctgtgccagctccacaggctccacccccgccccccaaggccctgtacccaggtgctctgggccggcccccacccatgcccccaatgaactttgatccccgatggatgatgattcctccttatgtggacccccggctcctccagggtcgtccccctctagacttctaccctcctggtgtgcatccctctggcctagttccccgagagcgttcagacagtgggggctcaagctcagagccatttgaccgtcatgcacctgctatgttacgggaacggggcactccaccggtggatccaaagttggcctgggtaggagatgtcttcaccgccacacccgctgaaccccgcccacttacctcacctctgcgccaggctgcggatgaggatgacaaggggatgaggagcgagactcctccagtacctcccccaccaccctatctggccagttatccaggctttcctgagaatggagcccctgggcccccaatctctcgctttcctctggaggaaccagggccccgtccactcccctggcccccaggcagtgatgaagtggccaagatacaaactccaccacccaagaaggagccccctaaggaggagactgcacagctgacggggccagaagcaggccgaaagcctgcccgcggagtcgggagtggaggccagggccccccaccaccacgcagagagagtcgcacagagacccgctggggccctcgtccagggagcagtcgtcgtggaatccctccagaggagccaggggccccaccccgccgggctgggcctataaagaaacctccaccacctacaaaagtagaagagctgcctcccaagcccctcgaacagggggatgaaacccccaaacccccaaagccagacccactcaagataaccaaggggaagctagggggccccaaggagaccccacccaatggaaatctttcccctgccccaaggcttcggagggactattcgtatgaaagagtgggtcctacctcttgccggggtcggggccgaggcgagtattttgccagagggaggggttttcgggggacctatgggggacgagggcggggagccgccgggaattccgcagttaccgagagtttcgaggagatgatgggcgtggaggtgggacagggggaccaaaccaccctcctgctccccgaggccgcactgccagcgagacacggagcgagggttcagagtatgaggaaatccccaagcggcgccggcagcggggctcagaaacaggcagcgagacccatgagagtgatctggctccttcagacaaggaggctcccacacccaaggagggaacactcacccaggtcccgctcccccaccaccaggagccccaccttcccagccccagcccgcttcactcccggggtgggcgagtcttcactcccagaggggatctcgccggggccgaggaggagggagcctcctcaagtttgcccaggctggagccctccagccaagtctctggctcccaagaaacctcccacaggccctttgccaccaagtaaggagcctttgaaagagaagttgatcccagggcctctgtcccctgtggcgcgcggaggcagcaatggaggtagcaatgtgggcatggaagatggggagcgaccccgaaggaggcgacatgggagggctcagcagcaggataaaccgcctcgtttccggaggctgaagcaggaacgggagaatgccgcaagggggtctgagggcaagccctccctaacccttccagcctccgctcctggacctgaggaggccctcacaacagtcacagtggccccagcacctcgccgggcagctgccaagtctcctgatctgtcaaaccagaactcagaccaagccaatgaggaatgggagactgcatcagagagcagtgacttcaccagtgagcgccgaggggacaaagaggcacccccaccagtactgctgacacccaaggctgtgggaactcctgggggaggtggaggtggagccgtaccaggtatttcagccatgtcccgcggagatctgagccagagagccaaggatttgagtaaacggagcttctcaagtcagcggccaggcatggaacggcagaatcggcgccctggcccagggggcaaggctggcagcagtggcagcagcagtggaggaggcggtgggggtcctggaggaaggaccgggccaggacgaggcgacaagaggagctggccctctcccaagaaccgaagtcgtcctccagaggagcgtcccccggggcttcccctgcctcccccacctcccagcagttctgctgtcttccgcctggaccaagttatccacagcaaccctgctggcatccaacaggctctggcccagcttagtagccgtcaagggagtgtaactgcaccagggggtcatccaaggcacaagcctgggcctccccaagcccctcagggcccctctcctaggcccccaacccgatacgagccccagagggtcaacagcggcctcagttctgacccccactttgaggagccggggccaatggtgagaggggtgggtgggactcctcgggactctgccggggttagtccctttccccctaaacgtcgggagcggcctcccagaaaaccagagctgctacaggaggaatctttgccacctcctcatagctctggattcttgggctctaagcctgagggcccaggccctcaggcagagtccagagatacaggcacagaggccctgacccctcacatctggaaccgtttacatactgccactagccgaaagagttaccggcccagctccatggagccttggatggagcccctgagtccttttgaggatgtggctggcacagaaatgagtcagtctgacagtggggtggacctgagtggggattctcaggtgtcatcaggtccctgcagccagcgaagttcccctgatggaggactcaagggggcagcagagggaccccccaagaggcctggaggctcctcacccctgaatgctgttccttgtgagggtccacctggctctgaacctcctaggagaccaccacctgccccccacgatggggacagaaaggagctgccccgggagcagcctctgccccctggccccattggcacagaacgatcacagcgtacagaccgaggcacagagcctggccccattcggccatcccatcgacctggtcccccagtccagtttggcactagtgacaaggactcagacttacgcctagtggtaggagacagcttgaaagcagagaaggagctaacagcatcagtcactgaggccattcctgtatcacgagactgggagctgcttcccagtgctgctgcctctgctgagccacaatccaagaacctggattctgggcactgtgtcccggagcccagctcctcaggccagcgcctgtatcctgaggttttctatggcagtgctgggccttccagttctcagatctctgggggacatggactctcaattacatccaaacagtggaggcgccctgggacaccctcactgcacccttacagatcacagcccctatacctaccccccggcccagcccctccctcagcactgctctctggggtagctctcaagggccagtttctggatttctccacaatgcaagctacagagctggggaagttgccggctggaggagttctctaccctccaccttccttcctctactctccggctttctgccccagtcctttgcctgacacatcgttgcttcaggtacgccaggatctgccatccccttcggatttttattctactcctctgcagcctggtggccaaagtggctttctcccttcaggggctcctgcccagcagatgcttctacccatggtagactcacagctgcctgtggtgaactttggctccctgccgccagcaccacctcctgccccacctcccctttctctgttacctgtgggccctgctctgcagccccccagcctggctgtgcggcccccacctgctcctgctactcgggtgctgccttcacctgccaggcccttccccgctagcttggggcgagcagagctgcatccagtggaactaaagccgttccaggattatcaaaaactgagcagcaaccttgggggacctggatcatcacggactcccccaactggaaggtccttctctggcctcaattcccgtctcaaggccacgccttccacctacagtggagtcttccgcacccagcgcgtcgacctttaccagcaggcctccccaccagatgccctgcgctggatacctaagccttgggagcggacagggccgccacctcgagaagggccctcccgacgggcagaggagcctgggtcccgaggggacaaggagcctgggttgcccccaccccgctgagggagttcctcttgccccctacccccggggcttgtatatagattataaatatataagggggaaaggggtgggcggggaggggttgtggggctggggcctcacttcccctcctcccccttcccctggtcccctgtccctggggctgtttgttaaaaaagagtaataaaaggattt

SEQ ID NO: 23812 - DNA, 4303 bp, Homo sapiens
  source 1..4303: mol_type = unassigned DNA
ttcttcaggcctagttccccgagagcgttcagacagtgggggctcaagctcagagccatttgaccgtcatgcacctgctatgttacgggaacggggcactccaccggtggatccaaagttggcctgggtaggagatgtcttcaccgccacacccgctgaaccccgcccacttacctcacctctgcgccaggctgcggatgaggatgacaaggggatgaggagcgagactcctccagtacctcccccaccaccctatctggccagttatccaggctttcctgagaatggagcccctgggcccccaatctctcgctttcctctggaggaaccagggccccgtccactcccctggcccccaggcagtgatgaagtggccaagatacaaactccaccacccaagaaggagccccctaaggaggagactgcacagctgacggggccagaagcaggccgaaagcctgcccgcggagtcgggagtggaggccagggccccccaccaccacgcagagagagtcgcacagagacccgctggggccctcgtccagggagcagtcgtcgtggaatccctccagaggagccaggggccccaccccgccgggctgggcctataaagaaacctccaccacctacaaaagtagaagagctgcctcccaagcccctcgaacagggggatgaaacccccaaacccccaaagccagacccactcaagataaccaaggggaagctagggggccccaaggagaccccacccaatggaaatctttcccctgccccaaggcttcggagggactattcgtatgaaagagtgggtcctacctcttgccggggtcggggccgaggcgagtattttgccagagggaggggttttcgggggacctatgggggacgagggcggggagcccgaagccgggaattccgcagttaccgagagtttcgaggagatgatgggcgtggaggtgggacagggggaccaaaccaccctcctgctccccgaggccgcactgccagcgagacacggagcgagggttcagagtatgaggaaatccccaagcggcgccggcagcggggctcagaaacaggcagcgagacccatgagagtgatctggctccttcagacaaggaggctcccacacccaaggagggaacactcacccaggtccctctcgctcccccaccaccaggagccccaccttcaccagccccagcccgcttcactgcccggggtgggcgagtcttcactcccagaggggtgccatctcgccggggccgaggaggagggaggccccctcctcaagtttgcccaggctggagccctccagccaagtctctggctcccaagaaacctcccacaggccctttgccaccaagtaaggagcctttgaaagagaagttgatcccagggcctctgtcccctgtggcgcgcggaggcagcaatggaggtagcaatgtgggcatggaagatggggagcgaccccgaaggaggcgacatgggagggctcagcagcaggataaaccgcctcgtttccggaggctgaagcaggaacgggagaatgccgcaagggggtctgagggcaagccctccctaacccttccagcctccgctcctggacctgaggaggccctcacaacagtcacagtggccccagcacctcgccgggcagctgccaagtctcctgatctgtcaaaccagaactcagaccaagccaatgaggaatgggagactgcatcagagagcagtgacttcaccagtgagcgccgaggggacaaagaggcacccccaccagtactgctgacacccaaggctgtgggaactcctgggggaggtggaggtggagccgtaccaggtatttcagccatgtcccgcggagatctgagccagagagccaaggatttgagtaaacggagcttctcaagtcagcggccaggcatggaacggcagaatcggcgccctggcccagggggcaaggctggcagcagtggcagcagcagtggaggaggcggtgggggtcctggaggaaggaccgggccaggacgaggcgacaagaggagctggccctctcccaagaaccgaagtcgtcctccagaggagcgtcccccggggcttcccctgcctcccccacctcccagcagttctgctgtcttccgcctggaccaagttatccacagcaaccctgctggcatccaacaggctctggcccagcttagtagccgtcaagggagtgtaactgcaccagggggtcatccaaggcacaagcctgggcctccccaagcccctcagggcccctctcctaggcccccaacccgatacgagccccagagggtcaacagcggcctcagttctgacccccactttgaggagccggggccaatggtgagaggggtgggtgggactcctcgggactctgccggggttagtccctttccccctaaacgtcgggagcggcctcccagaaaaccagagctgctacaggaggaatctttgccacctcctcatagctctggattcttgggctctaagcctgagggcccaggccctcaggcagagtccagagatacaggcacagaggccctgacccctcacatctggaaccgtttacatactgccactagccgaaagagttaccggcccagctccatggagccttggatggagcccctgagtccttttgaggatgtggctggcacagaaatgagtcagtctgacagtggggtggacctgagtggggattctcaggtgtcatcaggtccctgcagccagcgaagttcccctgatggaggactcaagggggcagcagagggaccccccaagaggcctggaggctcctcacccctgaatgctgttccttgtgagggtccacctggctctgaacctcctaggagaccaccacctgccccccacgatggggacagaaaggagctgccccgggagcagcctctgccccctggccccattggcacagaacgatcacagcgtacagaccgaggcacagagcctggccccattcggccatcccatcgacctggtcccccagtccagtttggcactagtgacaaggactcagacttacgcctagtggtaggagacagcttgaaagcagagaaggagctaacagcatcagtcactgaggccattcctgtatcacgagactgggagctgcttcccagtgctgctgcctctgctgagccacaatccaagaacctggattctgggcactgtgtcccggagcccagctcctcaggccagcgcctgtatcctgaggttttctatggcagtgctgggccttccagttctcagatctctgggggagccatggactctcaattacatccaaacagtggaggcttccgccctgggacaccctcactgcacccttacagatcacagcccctatacctaccccccggcccagcccctccctcagcactgctctctggggtagctctcaagggccagtttctggatttctccacaatgcaagctacagagctggggaagttgccggctggaggagttctctaccctccaccttccttcctctactctccggctttctgccccagtcctttgcctgacacatcgttgcttcaggtacgccaggatctgccatccccttcggatttttattctactcctctgcagcctggtggccaaagtggctttctcccttcaggggctcctgcccagcagatgcttctacccatggtagactcacagctgcctgtggtgaactttggctccctgccgccagcaccacctcctgccccacctcccctttctctgttacctgtgggccctgctctgcagccccccagcctggctgtgcggcccccacctgctcctgctactcgggtgctgccttcacctgccaggcccttccccgctagcttggggcgagcagagctgcatccagtggaactaaagccgttccaggattatcaaaaactgagcagcaaccttgggggacctggatcatcacggactcccccaactggaaggtccttctctggcctcaattcccgtctcaaggccacgccttccacctacagtggagtcttccgcacccagcgcgtcgacctttaccagcaggcctccccaccagatgccctgcgctggatacctaagccttgggagcggacagggccgccacctcgagaagggccctcccgacgggcagaggagcctgggtcccgaggggacaaggagcctgggttgcccccaccccgctgagggagttcctcctcccccttcccctggtcccctgtccctggggctgtttgttaaaaaagagtaataaaaggattt

SEQ ID NO: 23813 - DNA, 4303 bp, Homo sapiens
  source 1..4303: mol_type = unassigned DNA
ttcttcaggcctagttccccgagagcgttcagacagtgggggctcaagctcagagccatttgaccgtcatgcacctgctatgttacgggaacggggcactccaccggtggatccaaagttggcctgggtaggagatgtcttcaccgccacacccgctgaaccccgcccacttacctcacctctgcgccaggctgcggatgaggatgacaaggggatgaggagcgagactcctccagtacctcccccaccaccctatctggccagttatccaggctttcctgagaatggagcccctgggcccccaatctctcgctttcctctggaggaaccagggccccgtccactcccctggcccccaggcagtgatgaagtggccaagatacaaactccaccacccaagaaggagccccctaaggaggagactgcacagctgacggggccagaagcaggccgaaagcctgcccgcggagtcgggagtggaggccagggccccccaccaccacgcagagagagtcgcacagagacccgctggggccctcgtccagggagcagtcgtcgtggaatccctccagaggagccaggggccccaccccgccgggctgggcctataaagaaacctccaccacctacaaaagtagaagagctgcctcccaagcccctcgaacagggggatgaaacccccaaacccccaaagccagacccactcaagataaccaaggggaagctagggggccccaaggagaccccacccaatggaaatctttcccctgccccaaggcttcggagggactattcgtatgaaagagtgggtcctacctcttgccggggtcggggccgaggcgagtattttgccagagggaggggttttcgggggacctatgggggacgagggcggggagcccgaagccgggaattccgcagttaccgagagtttcgaggagatgatgggcgtggaggtgggacagggggaccaaaccaccctcctgctccccgaggccgcactgccagcgagacacggagcgagggttcagagtatgaggaaatccccaagcggcgccggcagcggggctcagaaacaggcagcgagacccatgagagtgatctggctccttcagacaaggaggctcccacacccaaggagggaacactcacccaggtccctctcgctcccccaccaccaggagccccaccttcaccagccccagcccgcttcactgcccggggtgggcgagtcttcactcccagaggggtgccatctcgccggggccgaggaggagggaggccccctcctcaagtttgcccaggctggagccctccagccaagtctctggctcccaagaaacctcccacaggccctttgccaccaagtaaggagcctttgaaagagaagttgatcccagggcctctgtcccctgtggcgcgcggaggcagcaatggaggtagcaatgtgggcatggaagatggggagcgaccccgaaggaggcgacatgggagggctcagcagcaggataaaccgcctcgtttccggaggctgaagcaggaacgggagaatgccgcaagggggtctgagggcaagccctccctaacccttccagcctccgctcctggacctgaggaggccctcacaacagtcacagtggccccagcacctcgccgggcagctgccaagtctcctgatctgtcaaaccagaactcagaccaagccaatgaggaatgggagactgcatcagagagcagtgacttcaccagtgagcgccgaggggacaaagaggcacccccaccagtactgctgacacccaaggctgtgggaactcctgggggaggtggaggtggagccgtaccaggtatttcagccatgtcccgcggagatctgagccagagagccaaggatttgagtaaacggagcttctcaagtcagcggccaggcatggaacggcagaatcggcgccctggcccagggggcaaggctggcagcagtggcagcagcagtggaggaggcggtgggggtcctggaggaaggaccgggccaggacgaggcgacaagaggagctggccctctcccaagaaccgaagtcgtcctccagaggagcgtcccccggggcttcccctgcctcccccacctcccagcagttctgctgtcttccgcctggaccaagttatccacagcaaccctgctggcatccaacaggctctggcccagcttagtagccgtcaagggagtgtaactgcaccagggggtcatccaaggcacaagcctgggcctccccaagcccctcagggcccctctcctaggcccccaacccgatacgagccccagagggtcaacagcggcctcagttctgacccccactttgaggagccggggccaatggtgagaggggtgggtgggactcctcgggactctgccggggttagtccctttccccctaaacgtcgggagcggcctcccagaaaaccagagctgctacaggaggaatctttgccacctcctcatagctctggattcttgggctctaagcctgagggcccaggccctcaggcagagtccagagatacaggcacagaggccctgacccctcacatctggaaccgtttacatactgccactagccgaaagagttaccggcccagctccatggagccttggatggagcccctgagtccttttgaggatgtggctggcacagaaatgagtcagtctgacagtggggtggacctgagtggggattctcaggtgtcatcaggtccctgcagccagcgaagttcccctgatggaggactcaagggggcagcagagggaccccccaagaggcctggaggctcctcacccctgaatgctgttccttgtgagggtccacctggctctgaacctcctaggagaccaccacctgccccccacgatggggacagaaaggagctgccccgggagcagcctctgccccctggccccattggcacagaacgatcacagcgtacagaccgaggcacagagcctggccccattcggccatcccatcgacctggtcccccagtccagtttggcactagtgacaaggactcagacttacgcctagtggtaggagacagcttgaaagcagagaaggagctaacagcatcagtcactgaggccattcctgtatcacgagactgggagctgcttcccagtgctgctgcctctgctgagccacaatccaagaacctggattctgggcactgtgtcccggagcccagctcctcaggccagcgcctgtatcctgaggttttctatggcagtgctgggccttccagttctcagatctctgggggagccatggactctcaattacatccaaacagtggaggcttccgccctgggacaccctcactgcacccttacagatcacagcccctatacctacccccgggcccagcccctccctcagcactgctctctggggtagctctcaagggccagtttctggatttctccacaatgcaagctacagagctggggaagttgccggctggaggagttctctaccctccaccttccttcctctactctccggctttctgccccagtcctttgcctgacacatcgttgcttcaggtacgccaggatctgccatccccttcggatttttattctactcctctgcagcctggtggccaaagtggatttctcccttcaggggctcctgcccagcagatgcttctacccatggtagactcacagctgcctgtggtgaactttggctccctgccgccagcaccacctcctgccccacctcccctttctctgttacctgtgggccctgctctgcagccccccagcctggctgtgcggcccccacctgctcctgctactcgggtgctgccttcacctgccaggcccttccccgctagcttggggcgagcagagctgcatccagtggaactaaagccgttccaggattatcaaaaactgagcagcaaccttgggggacctggatcatcacggactcccccaactggaaggtccttctctggcctcaattcccgtctcaaggccacgccttccacctacagtggagtcttccgcacccagcgcgtcgacctttaccagcaggcctccccaccagatgccctgcgctggatacctaagccttgggagcggacagggccgccacctcgagaagggccctcccgacgggcagaggagcctgggtcccgaggggacaaggagcctgggttgcccccaccccgctgagggagttcctcctcccccttcccctggtcccctgtccctggggctgtttgttaaaaaagagtaataaaaggattt

SEQ ID NO: 23814 - DNA, 6873 bp, Homo sapiens; identical to SEQ ID NO: 23800
  source 1..6873: mol_type = unassigned DNA

SEQ ID NO: 23815 - DNA, 4303 bp, Homo sapiens; identical to SEQ ID NO: 23803
  source 1..4303: mol_type = unassigned DNA

SEQ ID NO: 23816 - DNA, 6873 bp, Homo sapiens
  source 1..6873: mol_type = unassigned DNA
agggggtgctcccgggggcggcggttgcccggatgggccgttagtcggggctcagccgcggagtgagcgagggagacgggaggagccgaacccggcgccatccgccgccatcctcccccgccccaccgccatcccgtcccggggagcccctaggcccgggtcccggatccccgcgcacccggccaggctctggcacgttttgggggaggtgcctgcaggacccaacatactcaatgagcttccagcgcaatgtccgatcgctcggggccgactgccaagggaaaggatggaaagaagtattcctcgctcaacctgtttgatacgtataagggcaagtccttagagatccagaaacccgctgttgcccctcgccatggcctgcagagtctcgggaaagttgccattgcccggcgtatgccacctccagccaaccttccaagcctgaaagccgagaacaaaggcaatgaccccaatgtctcactagtgccaaaagacggaacaggatgggcaagcaaacaggagcagtccgaccccaagagttccgatgcctcaaccgctcagccgccggaatcgcagccactgccggcttcacagacgcctgcctccaaccagccgaaacgacccccagcagcccccgagaacactcctttggttccaagcggggtaaagtcctgggcacaagccagcgtcacccatggagcacatggagatggtggaagggcatcaagcctactgtcacgattctctcgagaggaatttccgaccctgcaggcggctggcgaccaggacaaggctgccaaggaaagggagtctgccgaacagtcgtctgggcccggaccaagcctccgcccccaaaattctacaacttggagggacggaggtgggcgtggccctgatgagctggagggcccggactccaaacttcatcatggtcatgatccccggggtgggctacagccttcaggcccaccccagttccctccctaccgcggaatgatgccgcctttcatgtatcccccatatctcccgttccctccgccctatggaccccaggggccttaccgataccccactcctgatgggcccagccgttttccccgtgtggcgggcccccgaggctcagggccaccaatgcgcttagtagagcctgtgggtcgtccctctattctcaaagaggataatctcaaagagtttgatcagttggatcaggagaatgatgatggttgggcaggggcccatgaagaggttgactacactgaaaagctcaagttcagcgatgaggaagatgggcgagactctgatgaggagggagctgagggccacagggattcccaatcagcttctggtgaggaacggccccctgaagcagatggcaaaaagggcaactcccccaacagcgaaccgcccactcctaagacggcctgggcagaaacctctcggcctccagagacagagccgggacctcctgccccaaagcctcccctacccccacctcaccggggccccgccgggaactggggcccccctggggactacccagatcgtgggggtcctccctgcaagcccccagcacctgaagatgaggatgaggcatggcggcagcgacgaaagcagtcgtcatctgagatttccctggcagtggagcgggcccggcgacggcgagaagaagaggagcggcgcatgcaagaagagcgccgggcagcctgtgctgagaagctcaagcgactcgatgaaaagtttggggcacctgacaagcggctcaaagcagagcctgctgccccacctgctgccccttctaccccagctccaccacctgcagtccctaaagaactccctgcacctccagctccacctccagcatcagccccaacaccagagaaagaacctgaagagccagcacaggcccctcctgcccaatctactcctactccaggtgtggctgcggctcccactctggtgagtggtggtggcagtaccagtagcaccagcagtggcagcttcgaagccagcccagtggaaccacaactgccctcaaaagagggtcctgaaccaccagaagaggttcctcctcctaccacacccccagttccaaaggtggaacccaagggtgatgggattggtcccacccgccagccccctagtcagggcttgggctaccccaaatatcagaagtcgttgcctcctcgtttccagcggcagcagcaggagcagctcctgaagcagcagcagcagcaccagtggcagcagcatcaacagggctctgcccctcctaccccagtgcccccatcaccaccacagcctgtgaccctgggggctgtgccagctccacaggctccacccccgccccccaaggccctgtacccaggtgctctgggccggcccccacccatgcccccaatgaactttgatccccgatggatgatgattcctccttatgtggacccccggctcctccagggtcgtccccctctagacttctaccctcctggtgtgcatccctctggcctagttccccgagagcgttcagacagtgggggctcaagctcagagccatttgaccgtcatgcacctgctatgttacgggaacggggcactccaccggtggatccaaagttggcctgggtgggagatgtcttcaccgccacacccgctgaaccccgcccacttacctcacctctgcgccaggctgcggatgaggatgacaaggggatgaggagcgagactcctccagtacctcccccaccaccctatctggccagttatccaggctttcctgagaatggagcccctgggcccccaatctctcgctttcctctggaggaaccagggccccgtccactcccctggcccccaggcagtgatgaagtggccaagatacaaactccaccacccaagaaggagccccctaaggaggagactgcacagctgacggggccagaagcaggccgaaagcctgcccgcggagtcgggagtggaggccagggccccccaccaccacgcagagagagtcgcacagagacccgctggggccctcgtccagggagcagtcgtcgtggaatccctccagaggagccaggggccccaccccgccgggctgggcctataaagaaacctccaccacctacaaaagtagaagagctgcctcccaagcccctcgaacagggggatgaaacccccaaacccccaaagccagacccactcaagataaccaaggggaagctagggggccccaaggagaccccacccaatggaaatctttcccctgccccaaggcttcggagggactattcgtatgaaagagtgggtcctacctcttgccggggtcggggccgaggcgagtattttgccagagggaggggttttcgggggacctatgggggacgagggcggggagccgccgggaattccgcagttaccgagagtttcgaggagatgatgggcgtggaggtgggacagggggaccaaaccaccctcctgctccccgaggccgcactgccagcgagacacggagcgagggttcagagtatgaggaaatccccaagcggcgccggcagcggggctcagaaacaggcagcgagacccatgagagtgatctggctccttcagacaaggaggctcccacacccaaggagggaacactcacccaggtcccgctcccccaccaccaggagccccaccttcccagccccagcccgcttcactcccggggtgggcgagtcttcactcccagaggggatctcgccggggccgaggaggagggagcctcctcaagtttgcccaggctggagccctccagccaagtctctggctcccaagaaacctcccacaggccctttgccaccaagtaaggagcctttgaaagagaagttgatcccagggcctctgtcccctgtggcgcgcggaggcagcaatggaggtagcaatgtgggcatggaagatggggagcgaccccgaaggaggcgacatgggagggctcagcagcaggataaaccgcctcgtttccggaggctgaagcaggaacgggagaatgccgcaagggggtctgagggcaagccctccctaacccttccagcctccgctcctggacctgaggaggccctcacaacagtcacagtggccccagcacctcgccgggcagctgccaagtctcctgatctgtcaaaccagaactcagaccaagccaatgaggaatgggagactgcatcagagagcagtgacttcaccagtgagcgccgaggggacaaagaggcacccccaccagtactgctgacacccaaggctgtgggaactcctgggggaggtggaggtggagccgtaccaggtatttcagccatgtcccgcggagatctgagccagagagccaaggatttgagtaaacggagcttctcaagtcagcggccaggcatggaacggcagaatcggcgccctggcccagggggcaaggctggcagcagtggcagcagcagtggaggaggcggtgggggtcctggaggaaggaccgggccaggacgaggcgacaagaggagctggccctctcccaagaaccgaagtcgtcctccagaggagcgtcccccggggcttcccctgcctcccccacctcccagcagttctgctgtcttccgcctggaccaagttatccacagcaaccctgctggcatccaacaggctctggcccagcttagtagccgtcaagggagtgtaactgcaccagggggtcatccaaggcacaagcctgggcctccccaagcccctcagggcccctctcctaggcccccaacccgatacgagccccagagggtcaacagcggcctcagttctgacccccactttgaggagccggggccaatggtgagaggggtgggtgggactcctcgggactctgccggggttagtccctttccccctaaacgtcgggagcggcctcccagaaaaccagagctgctacaggaggaatctttgccacctcctcatagctctggattcttgggctctaagcctgagggcccaggccctcaggcagagtccagagatacaggcacagaggccctgacccctcacatctggaaccgtttacatactgccactagccgaaagagttaccggcccagctccatggagccttggatggagcccctgagtccttttgaggatgtggctggcacagaaatgagtcagtctgacagtggggtggacctgagtggggattctcaggtgtcatcaggtccctgcagccagcgaagttcccctgatggaggactcaagggggcagcagagggaccccccaagaggcctggaggctcctcacccctgaatgctgttccttgtgagggtccacctggctctgaacctcctaggagaccaccacctgccccccacgatggggacagaaaggagctgccccgggagcagcctctgccccctggccccattggcacagaacgatcacagcatacagaccgaggcacagagcctggccccattcggccatcccatcgacctggtcccccagtccagtttggcactagtgacaaggactcagacttacgcctagtggtaggagacagcttgaaagcagagaaggagctaacagcatcagtcactgaggccattcctgtatcacgagactgggagctgcttcccagtgctgctgcctctgctgagccacaatccaagaacctggattctgggcactgtgtcccggagcccagctcctcaggccagcgcctgtatcctgaggttttctatggcagtgctgggccttccagttctcagatctctgggggacatggactctcagttacatccaaacagtggaggcgccctgggacaccctcactgcacccttacagatcacagcccctatacctaccccccggcccagcccctccctcagcactgctctctggggtagctctcaagggccagtttctggatttctccacaatgcaagctacagagctggggaagttgccggctggaggagttctctaccctccaccttccttcctctactctccggctttctgccccagtcctttgcctgacacatcgttgcttcaggtacgccaggatctgccatccccttcggatttttattctactcctctgcagcctggtggccaaagtggctttctcccttcaggggctcctgcccagcagatgcttctacccatggtagactcacagctgcctgtggtgaactttggctccctgccgccagcaccacctcctgccccaccttccctttctctgttacctgtgggccctgctctgcagccccccagcctggctgtgcggcccccacctgctcctgctactcgggtgctgccttcacctgccaggcccttccccgctagcttggggcgagcagagctgcatccagtggaactaaagccgttccaggattatcaaaaactgagcagcaaccttgggggacctggatcatcacggactcccccaactggaaggtccttctctggcctcaattcccgtctcaaggccacgccttccacctacagtggagtcttccgcacccagcgcgtcgacctttaccagcaggcctccccaccagatgccctgcgctggatacctaagccttgggagcggacagggccgccacctcgagaagggccctcccgacgggcagaggagcctgggtcccgaggggacaaggagcctgggttgcccccaccccgctgagggagttcctcttgccccctacccccggggcttgtatatagattataaatatataagggggaaaggggtgggcggggaggggttgtggggctggggcctcacttcccctcctcccccttcccctggtcccctgtccctggggctgtttgttaaaaaagagtaataaaaggattt

SEQ ID NO: 23817 - DNA, 1972 bp, Homo sapiens; identical to SEQ ID NO: 23798
  source 1..1972: mol_type = unassigned DNA

SEQ ID NO: 23818 - DNA, 1972 bp, Homo sapiens; identical to SEQ ID NO: 23798
  source 1..1972: mol_type = unassigned DNA

SEQ ID NO: 23819 - DNA, 4303 bp, Homo sapiens; identical to SEQ ID NO: 23803
  source 1..4303: mol_type = unassigned DNA

SEQ ID NO: 23820 - DNA, 2065 bp, Homo sapiens
  source 1..2065: mol_type = unassigned DNA
tgttccgcgatcttctcaggctctcctagcagcatccatcgccgccaccctatcttcactggcttcattcaccttctccttctctcttcgttgctgagcgacaagcttcctagcgctatgactgtcgtctccgtcccgcagcgggagccgctcgtcctgggtggccgccttgcgccgcttggcttttcctcccgaggttactttggggccctcccgatggtgaccacggctccgcctcctttaccccggatcccggacccccgggcactgcccccgaccctcttcctccctcatttcctagggggagatggcccgtgtctgaccccccagcctcgcgctccagcagctctgcccaaccgcagcctcgccgtggcgggaggcactcctcgggcagcgccgaagaagcggcgaaagaagaaggtgcgggccagccccgcagggcagctgcccagccgcttccaccagtaccagcagcaccggccgagtctggagggcggccggagccccgcgaccggcccgagcggagcgcaggaggtcccgggcccggccgccgccttggccccgagtcctgcagccgcagccggcacggagggagccagccccgaccttgccccgctgcggcccgcggctcccggccaaacccccctcaggaaagaggttttaaaatcaaagatgggaaaatcggagaaaattgcccttccccatggccagcttgttcatggtatacacttgtatgagcaaccaaagataaacagacagaaaagcaaatataacttgccactaaccaagatcacctctgcaaaaagaaatgaaaacaacttttggcaggattctgtttcatctgacagaattcagaagcaggaaaaaaagccttttaaaaataccgagaacattaaaaattcgcatttgaagaaatcagcatttctaactgaagtgagccaaaaggaaaattatgctggggcaaagtttagtgatccaccttctcctagtgttcttccaaagcctcctagtcactggatgggaagcactgttgaaaattccaaccaaaacagggagctgatggcagtacacttaaaaacgctcctcaaagttcaaacttagatttcagatttcagtatgtgtgtaaaacataatttttcccatatccctggactcttgagaaaattggtacagaaatggaaatttgccttgttgcaacatacaattgcaaaagatgagtttaaaaaattacatacaaacagcttgtattatattttatattttgtaaatactgtataccatgtattatgtgtatattgttcatacttgagaggtatattatagttttgttatgaaagtatgtattttgccctgcccacattgcaggtgttttgtatatatacaatggataaattttaagtgtgtgctaaggcacatggaagaccgattttatttgcacaaggtactgagatttttttcaagaaacagctgtcaaatctcaaggtgaagatctaaatgtgaacagtttactaatgcactactgaagtttaaatctgtggcacaatcaatgtaagcatggggtttgtttctctaaattgatttgtaatctgaaattactgaacaactcctattcccatttttgctaaactcaatttctggttttggtatatatccattccagcttaatgcctctaattttaatgccaacaaaattggttgtaatcaaattttaaaataataataatttggcccccccttttaaaatagtcttgactctttgtgtgtgactgtttctcatgtttgaatgtgtgactaggagatgattttgtgtggttggatttttttgacttctactttactggctgagtgtgagccgccatgcctggccataatctacattttcttaccaggagcagcattgaggtttttgagcatagtacttgactactctagaggctgagacgggagcatctcttgagcctgagaagtggagattgcaattgagctaggatcaggccactgcactccagcctgggtaacagacgctgtctcaaaaaaaaggccaagagaaagtaagggagacaga

SEQ ID NO: 23821 - DNA, 599 bp, Homo sapiens
  source 1..599: mol_type = unassigned DNA
tattgacgtggaaagttgtggtcctctttcgtgtcgtgtcttgcttactaccgcgttacaagtgttggtagtgcagtgatctagtggattaccttacgcttttccatcctttcaagacttcctataaggcccacttaagttgggaaagattaaggttttaaaatcaaagatgggaaaatcggagaaaattgcccttccccatggccagcttgttcatggtatacacttgtatgagcaaccaaagataaacagacagaaaagcaaatataacttgccactaaccaagatcacctctgcaaaaagaaatgaaaacaacttttggcaggattctgtttcatctgacagaattcagaagcaggaaaaaaagccttttaaaaataccgagaacattaaaaattcgcatttgaagaaatcagcatttctaactgaagtgagccaaaaggaaaattatgctggggcaaagtttagtgatccaccttctcctagtgttcttccaaagcctcctagtcactggatgggaagcactgttgaaaattccaaccaaaacagggagctgatggcagtacacttaaaaacgctcctcaaagttcaaacttaga

SEQ ID NO: 23822 - DNA, 816 bp, Homo sapiens
  source 1..816: mol_type = unassigned DNA
gttgctgcgccgccaccgcccgagtcatgttccgcgatcttctcaggctctcctagcagcatccatcgccgccaccctatcttcactggcttcattcaccttctccttctctcttcgttgctgagcgacaagcttcctagcgctatgactgtcgtctccgtcccgcagcgggagccgctcgtcctgggtggccgccttgcgccgcttggcttttcctcccgaggttttaaaatcaaagatgggaaaatcggagaaaattgcccttccccatggccagcttgttcatggtatacacttgtatgagcaaccaaagataaacagacagaaaagcaaatataacttgccactaaccaagatcacctctgcaaaaagaaatgaaaacaacttttggcaggattctgtttcatctgacagaattcagaagcaggaaaaaaagccttttaaaaataccgagaacattaaaaattcgcatttgaagaaatcagcatttctaactgaagtgagccaaaaggaaaattatgctggggcaaagtttagtgatccaccttctcctagtgttcttccaaagcctcctagtcactggatgggaagcactgttgaaaattccaaccaaaacagggagctgatggcagtacacttaaaaacgctcctcaaagttcaaacttagatttcagatttcagtatgtgtgtaaaacataatttttcccatatccctggactcttgagaaaattggtacagaaatggaaatttgccttgttgcaacatacaattgcaaaagatgagtttaaaaaattacatacaaacagcttgtatta

SEQ ID NO: 23823 - DNA, 2416 bp, Homo sapiens
  source 1..2416: mol_type = unassigned DNA
ctgccgactccattttgtcggtagaggcagaaggagaaggtcgggttgtagaagctggggtggccggcagctcgctcatcggtgttcgtgggctttgtcggtccgtgcctcgtctctccctggaaagggagggaggcttcgacgtcgagagggagccgctgccgcgttagttccgagcttgaagtcactaggacttctctcaaacttgtgtgctgaggagactcagatgttggcctcagctcctaggctgaactcagcagatcggcccatgaaaacttctgtattgagacaaaggaagggatctgtcagaaagcaacacttgttatcttgggcttggcagcaaggaagaggacaggtagtggagatcctgcaatctgaaaagcagactgaaaggtgacaaagaagctgaagatgggtggtggagagaggtataacattccagcccctcaatctagaaatgttagtaagaaccaacaacagcttaacagacagaagaccaaggaacagaattcccagatgaagattgttcataagaaaaaagaaagaggacatggttataactcatcagcagctgcctggcaggccatgcaaaatggggggaagaacaaaaattttccaaataatcaaagttggaattctagcttatcaggtcccaggttactttttaaatctcaagctaatcagaactatgctggtgccaaatttagtgagccgccatcaccaagtgttcttcccaaaccaccaagccactgggtccctgtttcctttaatccttcagataaggaaataatgacatttcaacttaaaaccttacttaaagtacaggtataaaataagacaaatgtttaaatttagttatgttcacggatagttgtcaattggtctgaaacaaattcgctagggaatctatttgtgtagaactaattaatgtaaaaaaaatagaccatctcgtgttgtgtgcactgtgatataatggtagtatcagtgcaacttaaactaatgattgtacttgatattaagtgttctcaactgagtaacttttaagtggaaaccaagtttagatttggggagtggtaaaggaatcagctttttctattgttaggggaagacagtaatttatcattcatggaccagtagattgttgaaagttggtgaatcggattataagcttctagctaacacaaggattcagaattaggtaaacatctgaaggtttagtatattagaaacacccaaaccagtaatatgctaacctgatgcactgctgaaagaaaatgtgaatttttcgtaataattgcattttagtgaattgtacagtgggtggaaagggcatttggagctcattagaatgagacatagtacaccccaatggccctgtttattaaatgtagtggattaagtgtctgtcaacaaatacaccaaaaccattttttatagaaacagtatttaatggtcactcaatagctttcaaaatacatttttgtattacagcactgcacaagctattctaatagtgctctggcctcatcattcctgcaaagcttgctttggggagttggataatgtgaaaattttaagtacctaggggagaaagagccatgtaaatatctgtaataaacttgtagcatatgtaaagttttcttggcctttatcttacaaaaatggagtattttagtatgaatttgctgaatgtaagaccgtggactgttttttataatatggcctaattttaaaggtccaaaataacttgtttttaaagtttgcccttgtgctaaagtgccagtgtatgtatgttatacttgatttggttgtaaactatatttcaaagtaaaccctagtgtaataagttttataactaaaaaggtttaagctgctaaaactatttttaagagatgtgaaatgcagtatgggactatctttttttcctcctctaagcccaaagattaactagagtccctccaaccttatagattgttggctttcacaatcttataacctaggatacaggtagtttcgagtatggtgccagtgatgttttgtttttgtttggtcaaggggtaggtgcaacccaatggaccacttatgcaaaagatgtaaactcttgcataatacattgataacatgttttgccaactttaaatgcttaaacataagcgaaaccagtagcaagtatgtgggtcagcttaaaaattttgattgttaatgccctattttctaatttggcacctcttgatgcctaagcaggtaagcagatgcctaagctgtatttctccaaataaatcaagatgaagtactgcccaagttaaatattgatagcctaaagacaagtttatgtagtacttaatgtacatgatatgaatgtgaagcataaaattaaataaaatttttccccattggcttggttttattttaaaaa

SEQ ID NO: 23824 - DNA, 814 bp, Homo sapiens
  source 1..814: mol_type = unassigned DNA
gtcggtagaggcagaaggagaaggtcgggttgtagaagctggggtggccggcagctcgctcatcggtgttcgtgggctttgtcggtccgtgcctcgtctctccctggaaagggagggaggcttcgacgtcgagagggagccgctgccgcgttagttccgagcttgaagtcagacttctctcaaacttgtgtgctgaggagactcagatgttggcctcagctcctaggctgaactcagcagatcggcccatgaaaacttctgtattgagacaaaggaagggatctgtcagaaagcaacacttgttatcttgggcttggcagcaaggaagaggacaggtagtggagatcctgcaatctgaaaagcagactgaaaggtgacaaagaagctgaagatgggtggtggagagaggtataacattccagcccctcaatctagaaatgttagtaagaaccaacaacagcttaacagacagaagaccaaggaacagaattcccagatgaagattgttcataagaaaaaagaaagaggacatggttataactcatcagcagctgcctggcaggccatgcaaaatggggggaagaacaaaaattttccaaataatcaaagttggaattctagcttatcaggtcccaggttactttttaaatctcaagctaatcagaactatgctggtgccaaatttagtgagccgccatcaccaagtgttcttcccaaaccaccaagccactgggtccctgtttcctttaatccttcagataaggaaataatgacatttcaacttaaaaccttacttaaagtacaggtataaaat

SEQ ID NO: 23825 - DNA, 775 bp, Homo sapiens
  source 1..775: mol_type = unassigned DNA
agcacagagttgggagtgactccagagcctcctgcaagatgctgttgattctgctgtcagtggccttgctggccctgagctcagctcagaacttaaatgaagatgtcagccaggaagaatctccctccctaatagcaggaaatccacaaggaccatccccacaaggaggcaacaagccccagggccccccacctcctccaggaaagccacaaggaccacccccacaaggaggcaacaaacctcaaggtcccccacctccaggaaagccacaaggaccacccccacaaggggacaagtcccgaagtccccgatctcctccaggaaaaccacaaggaccacccccacaaggaggaaagccacaaggaccacccccacaaggaggcaacaaacctcaaggtcccccacctccaggaaagccacaaggaccacccgcacaaggaggcagcaagtcccaaagtgcccgatctcctccaggaaagccacaaggaccaccccaacaagaaggcaacaatcctcaaggtcccccacctccagcaggaggcaatccccagcagcctcaggcacctcctgctggacagccccagggaccaccacgccctcctcaagggggcagaccttccagacctccccagtgacagcctccccagtcatctaggattcaatgacaggaagtgaataagaagatgagagtgattcaaatgattcaaattccatgacattggaaaaaggtcatcatagctctaacttcaatataccaataaaataatcagcttgc

SEQ ID NO: 23826 - DNA, 710 bp, Homo sapiens
  source 1..710: mol_type = unassigned DNA
agagttgggagtgactccagagcctcctgcaagatgctgttgattctgctgtcagtggccttgctggccctgagctcagctcagaacttaaatgaagatgtcagccaggaagaatctccctccctaatagcaggaaatccacaaggaccatccccacaaggaggcaacaagccccagggccccccacctcctccaggaaagccacaaggaccacccccacaaggaggcaacaaacctcaaggtcccccacctccaggaaagccacaaggaccacccccacaaggggacaagtcccgaagtccccgatctcctccaggaaaaccacaaggaccacccccacaaggaggaaagccacaaggaccacccgcacaaggaggcagcaagtcccaaagtgcccgatctcctccaggaaagccacaaggaccaccccaacaagaaggcaacaatcctcaaggtcccccacctccagcaggaggcaatccccagcagcctcaggcacctcctgctggacagccccagggaccaccacgccctcctcaagggggcagaccttccagacctccccagtgacagcctccccagtcatctaggattcaatgacaggaagtgaataagaagatgagagtgattcaaatgattcaaattccatgacattggaaaaaggtcatcatagctctaacttcaatataccaataaaataatcagcttgc

SEQ ID NO: 23827 - DNA, 774 bp, Homo sapiens
  source 1..774: mol_type = unassigned DNA
gcacagagttgggagtgactccagagcctcctgcaagatgctgttgattctgctgtcagtggccttgctggccctgagctcagctcagaacttaaatgaagatgtcagccaggaagaatctccctccctaatagcaggaaatccacaaggaccatccccacaaggaggcaacaagccccagggccccccacctcctccaggaaagccacaaggaccacccccacaaggaggcaacaaacctcaaggtcccccacctccaggaaagccacaaggaccacccccacaaggggacaagtcccgaagtccccgatctcctccaggaaaaccacaaggaccacccccacaaggaggaaagccacaaggaccacccccacaaggaggcaacaaacctcaaggtcccccacctccaggaaagccacaaggaccacccgcacaaggaggcagcaagtcccaaagtgcccgatctcctccaggaaagccacaaggaccaccccaacaagaaggcaacaatcctcaaggtcccccacctccagcaggaggcaatccccagcagcctcaggcacctcctgctggacagccccagggaccaccacgccctcctcaagggggcagaccttccagacctccccagtgacagcctccccagtcatctaggattcaatgacaggaagtgaataagaagatgagagtgattcaaatgattcaaattccatgacattggaaaaaggtcatcatagctctaacttcaatataccaataaaataatcagcttgc

SEQ ID NO: 23828 - DNA, 1427 bp, Homo sapiens
  source 1..1427: mol_type = unassigned DNA
cacagagttgggagtgactccagagcctcctgcaagatgctgttgattctgctgtcagtggccttgctggccctgagctcagctcagaacttaaatgaagatgtcagccaggaagaatctccctccctaatagcaggaaatccacaaggagcacccccacaaggaggcaacaaacctcaaggtcccccatctcctccaggaaagccacaaggaccacccccacaaggaggcaaccagcctcaaggtcccccacctcctccaggaaagccacaaggaccacccccacaaggaggcaacaaacctcaaggtcccccacctccaggaaagccacaaggaccacccccacaaggagacaagtcccgaagtccccgatctcctccaggaaagccacaaggaccacccccacaaggaggcaaccagcctcaaggtcctccacctcctccaggaaagccacaaggaccacccccacaaggaggcaacaaacctcaaggtcccccacctccaggaaagccacaaggaccacccccacaaggagacaacaagtcccgaagttctcgatctcctccaggaaagccacaaggaccacccccacaaggaggcaaccagccccaaggtcccccacctcctccaggaaagccacaaggaccacccccacaaggaggcaacaaacctcaaggtcccccacctccaggaaagccacaaggaccacccccacaaggagacaacaagtcccaaagtgcccgatctcctccaggaaagccacaaggaccacccccacaaggaggcaaccagccccaaggtcccccacctcctccaggaaagccacaaggaccacccccacaaggaggcaacaaacctcaaggtcccccacctccaggaaagccacaaggaccacccccacaaggaggcagcaagtcccgaagttctcgatctcctccaggaaagccacaaggaccacccccacaaggaggcaaccagcctcaaggtcccccacctcctccaggaaagccacaaggaccacccccacaaggaggcaacaaacctcaaggtcccccacctccaggaaagccacaaggaccacccccacaaggaggcagcaagtcccgaagtgcccgatctcctccaggaaagccacaaggaccaccccaacaagaaggcaacaatcctcaaggtcccccacctccagcaggaggcaatccccagcagcctcaggcacctcctgctggacagccccagggaccaccacgccctcctcaagggggcagaccttccagacctccccagtgacagcctccccagtcatctaggattcaatgacaggaagtgaataagaagatgagagtgattcaaatgattcaaatgccatgacattggaaaaaggtcatcatagctctaacttctgtataccaataaaataattagcttgc

SEQ ID NO: 23829 - DNA, 913 bp, Homo sapiens
  source 1..913: mol_type = unassigned DNA
cagagttgggagtgactccagagcctccagcgagatgctgctgattctgctgtcagtggccctgctggccctgagctcagctgagagttcaagtgaagatgtcagccaggaagaatctctcttcctaatatcaggaaagccagaaggacgacgcccacaaggaggaaaccagccccaacgtcccccacctcctccaggaaagccacaaggaccacccccacaaggaggaaaccagtcccaaggtcccccacctcctccaggaaagccagaaggacgacccccacaaggaggcaaccagtcccaaggtcccccacctcatccaggaaagccagaaagaccacccccacaaggaggaaaccagtcccaaggtaccccacctcctccaggaaagccagaaagaccacccccacaaggaggcaaccagtcccaccgtcccccacctcctccaggaaagccagaaagaccacccccacaaggaggtaaccagtcccaaggtcccccacctcatccaggaaagccagaaggaccacccccacaggaaggaaacaagtcccgaagtgcccgatctcctccaggaaagccacaaggaccaccccaacaagaaggcaacaagcctcaaggtcccccacctcctggaaagccacaaggcccacccccagcaggaggcaatccccagcagcctcaggcacctcctgctggaaagccccaggggccacctccacctcctcaagggggcaggccacccagacctgcccagggacaacagcctccccagtaatctaggattcaatgacaggaagtgaataagaagatatcagtgaattcaaataattcaattgctacaaatgccgtgacattggaacaaggtcatcatagctctaactttaatataccaataaaataatcagcttgc

SEQ ID NO: 23830 - DNA, 796 bp, Homo sapiens
  source 1..796: mol_type = unassigned DNA
cagagttgggagtgactccagagcctccagcgagatgctgctgattctgctgtcagtggccctgctggccctgagctcagctgagagttcaagtgaagatgtcagccaggaagaatctctcttcctaatatcaggaaagccagaaggacgacgcccacaaggaggaaaccagccccaacgtcccccacctcctccaggaaagccacaaggaccacccccacaaggaggaaaccagtcccaaggtcccccacctcctccaggaaagccagaaggacgacccccacaaggaggcaaccagtcccaaggtcccccacctcatccaggaaagccagaaagaccacccccacaaggaggaaaccagtcccaaggtaccccacctcctccaggaaagccagaaagaccacccccacaaggaggcaaccagtcccaccgtcccccacctcctccaggaaagccagaaagaccacccccacaaggaggtaaccagtcccaaggtcccccacctcatccaggaaagccagaaggaccacccccacaggaaggaaacaagtcccgaagtgcccgatctcctccaggaaagccacaaggaccaccccaacaagaaggcaacaagcctcaaggtcccccacctcctggaaagccacaaggcccacccccagcaggaggcaatccccagcagcctcaggcacctcctgctggaaagccccaggggccacctccacctcctcaagggggcaggccacccagacctgcccagggacaacagcctccccagtaatctaggattcaatgacag

SEQ ID NO: 23831 - DNA, 586 bp, Homo sapiens
  source 1..586: mol_type = unassigned DNA
gcacagagttgggagtgactccagagcctccagcgagatgctgctgattctgctgtcagtggccctgctggccctgagctcagctgagagttcaagtgaagatgtcagccaggaagaatctctcttcctaatatcaggaaagccagaaggacgacgcccacaaggaggaaaccagccccaacgtcccccacctcctccaggaaagccacaaggaccacccccacaaggaggaaaccagtcccaaggtcccccacctcctccaggaaagccagaaggacgacccccacaaggaggcaaccagtcccaaggtcccccacctcatccaggaaagccagaaagaccacccccacaaggaggaaaccagtcccaaggaaagccacaaggaccaccccaacaagaaggcaacaagcctcaaggtcccccacctcctggaaagccacaaggcccacccccagcaggaggcaatccccagcagcctcaggcacctcctgctggaaagccccaggggccacctccacctcctcaagggggcaggccacccagacctgcccagggacaacagcctccccagtaatctaggattcaa

SEQ ID NO: 23832 - DNA, 603 bp, Homo sapiens
  source 1..603: mol_type = unassigned DNA
agcacaaagttgggagtgacaccagagcctcctgcaagatgcttctgattctgctgtcagtggccctgctggccttcagctcagctcaggatttaaatgaagatgtcagccaggaagatgttcccctcgtaatatcagatggaggagactctgagcagttcctagatgaggagcgtcagggaccacctttgggaggacagcaatctcaaccctctgctggtgatgggaaccaggatgatggccctcagcagggaccaccccaacaaggaggccagcagcaacaaggtccaccacctcctcagggaaagccacaaggaccaccccaacagggaggccatccccctcctcctcaaggaaggccacaaggaccaccccaacagggaggccatccccgtcctcctcgaggaaggccacaaggaccaccccaacagggaggccatcagcaaggtcctcccccacctcctcctggaaagccccagggaccacctccccaagggggccgcccacaaggacctccacaggggcagtctcctcagtaatctaggattcaatgacaggaagtgaataagaagataacagtgtttcaaatgccgtgaaacatgg

SEQ ID NO: 23833 - DNA, 1864 bp, Homo sapiens
  source 1..1864: mol_type = unassigned DNA
cataaagttgggagtgacaccagagccttctgcaagatgcttctgattctgctgtcagtggccctgctggccttcagctcagctcaggacttagatgaagatgtcagccaagaagacgttcccttggtaatatcagatggaggagactctgagcagttcatagatgaggaaggccacaaggaccaccccaacagggaggccatcagcaaggtcctcccccacctcctcctggaaagccccagggaccacctccccaagggggccgcccacaaggacctccacaggggcagtctcctcagtaatctaggattcaatgataggaagtgaataagaagatgacagtgtttcaaatgccttgaaacataatgtgatcatgctctaacttcaatataccaataaaataatcagcttgcaatttctgattatagcatctccttctgagtgtttgggactctggaatctgagacccatgttcacattgtaagaacatccaggaccccttctccttgatgtttccagcaagcttctttcctccttatccttattaagtcatctgcctggggaaggagttccactgtttctttccttctctgtcttcttagctcgaatttaaattgcacaattattttcaggtcatttcctgatagtctagtcagcttatgaatgtaagcaaaacaggaccaatgaaagaaagtcccagaagctgagagaaactttaacaagtttgagagtaacttattttgttttctaggaaagtgagtatggttctatgcctgtattccccagaagccactagacctattttcccctattttatcactgatcagttctgtccctgcctatgattcttaccattcttaagaaaacctgaatggatttcatcaaggcggcagcataatttgaagggcaattgcgtgtgaaaattgatgtgacttgatttacacaatagtcagaaaacattttagaaattgatgactttataatgcaaccaggagtattgaaaaaaaagtaagcaatgagctcaaataattaaaaaagagagacaaaatacacttgggagaacagaaataagaattaatgaaaatttaaaagattaaatgaatgagaagaaatgattcataaattttgaactaacagtaataacttcttgaaaatccaataaaattggcaaaagattgtgaaaattctggaagaataagggaaacagataatcttcagagtaatcaggtaaagcttaaacaagtgttttaaaagatgagtttttcctacattctgaaaagcaaacatgaaaaactgaacacagtttttacagatatacaatatggagtgacttatatacaaaatgaccttaaaaatatattaaactcattatagtagttaatatctaagtaaaatatgatgaaatttaatagagaattcactcctcccaaaagcaccttcatggaagattcctcattaacaggcagtcctttagtatgctgatttatacaaaatgctgaaaagaagagaaataccccaagttcttgaaaaaaaattttttgatatgactactctaacagtaataactataaatctcactttaaataatttaaaacaaattaaagtgatatatgagttaaatgaccaagcagacttgattccaggaatgttaaggaatgttcattatttgttttggataatgaagtcagcagaggaaaaaaaaatatgaccatctcaaaagatgccaacgttgtctttgataatatttaatatattttttaaaaaacaattcttgtaaaatacttttttgattagccttctgaccatgattaaaatggtgtacctcaaagtagctgctaaccttatgtgtatctgcaacaccctg

SEQ ID NO: 23834 - DNA, 641 bp, Homo sapiens
  source 1..641: mol_type = unassigned DNA
agcataaagttgggagtgacaccagagccttctgcaagatgcttctgattctgctgtcagtggccctgctggccttcagctcagctcaggacttagatgaagatgtcagccaagaagacgttcccttggtaatatcagatggaggagactctgagcagttcatagatgaggagcgtcagggaccacctttgggaggacagcaatctcaaccctctgctggtgatgggaaccagaatgatggccctcagcagggaccaccccaacaaggaggccagcagcaacaaggtccaccacctcctcagggaaagccacaaggaccaccccaacagggaggccatccccctcctcctcaaggaaggccacaaggaccaccccaacagggaggccatccccgtcctcctcgaggaaggccacaaggaccaccccaacagggaggccatcagcaaggtcctcccccacctcctcctggaaagccccagggaccacctccccaagggggccgcccacaaggacctccacaggggcagtctcctcagtaatctaggattcaatgataggtatgattccagtttattatccatcaaaggctccaactgctacagttctccaacttcattgtgccagtgaatctattgaaaagc

SEQ ID NO: 23835 - DNA, 673 bp, Homo sapiens
  source 1..673: mol_type = unassigned DNA
agcataaagttgggagtgacaccagagccttctgcaagatgcttctgattctgctgtcagtggccctgctggccttcagctcagctcaggacttagatgaagatgtcagccaagaagacgttcccttggtaatatcagatggaggagactctgagcagttcatagatgaggagcgtcagggaccacctttgggaggacagcaatctcaaccctctgctggtgatgggaaccagaatgatggccctcagcagggaccaccccaacaaggaggccagcagcaacaaggtccaccacctcctcagggaaagccacaaggaccaccccaacagggaggccatccccctcctcctcaaggaaggccacaaggaccaccccaacagggaggccatccccgtcctcctcgaggaaggccacaaggaccaccccaacagggaggccatcagcaaggtcctcccccacctcctcctggaaagccccagggaccacctccccaagggggccgcccacaaggacctccacaggggcagtctcctcagtaatctaggattcaatgataggaagtgaataagaagatgacagtgtttcaaatgccttgaaacataatgtgatcatgctctaacttcaatataccaataaaataatcagcttgcaatttctgattatagcatctcct

SEQ ID NO: 23836 - DNA, 3000 bp, Homo sapiens
  source 1..3000: mol_type = unassigned DNA
agctgacttgctccctcccgggctgcggctgctgcaaaagccagcagcggcagcgggagctgtccggaggccggcgtcgaggtgagacccgggcagactgaggctgcggggtttgccgctgtctctgctattccatcctccccataggggctctctcccctctcccatctcaagatggcagccagcagctctgagatctctgagatgaagggggttgaggagagtcccaaggttccaggcgaagggcctggccattctgaagctgaaactggccctccccaggtcctagcaggggtaccagaccagccagaggccccgcagccaggtccaaacaccactgcggcccctgtggactcagggcccaaggctgggctggctccagaaaccacagagaccccggctggggcctcagaaacagcccaggccacagacctcagcttaagcccaggaggggaatcaaaggccaactgcagccccgaagacccatgccaagaaacagtgtccaaaccagaagtgagcaaagaggccactgcagaccaggggtccaggctggagtctgcagccccacctgaaccagccccagagcctgctccccaaccagacccccggccagattcccagcctacccccaagccagcccttcaaccagagctccctacccaggaggaccccacccctgagattctgtctgagagtgtaggggaaaagcaagagaatggggcagtggtgcccctgcaggctggtgatggggaagagggcccagcccctgagcctcactcaccaccctcaaaaaaatcccccccagccaatggggcccccccccgagtgctgcagcagctggttgaggaggatcgaatgagaagggcacacagtgggcatccaggatctccccgaggtagcctgagccgccaccccagctcccagttggcaggtcctggggtggaggggggtgaaggcacccagaaacctcgggactacatcatccttgccatcctgtcctgcttctgccccatgtggcctgtcaacatcgtggccttcgcttatgctgtcatggtgagccccatgggaccctagcccaggcctgctgtggctcccagcttcccgccagcgctgcaatagagcctctggagtaatcatgccttccttcccctctcctctctgcatggatcccacctccccaattccagggcctttgtttgcctctccctaggacctaaccctctgagccaccactgccctgcccctttgggtgggagggatatggaaacacgtgtcacacagcctcgctgacctgtgccctcctccccctgccccttcactcctccttcctcccttacccgccatctatggggctggcctctctctcttctggatgacttttccacctgatcccttctgggctggcttctcctgaccccggctatgtgcctccacccctcgccctaaccccagtcccggaacagcctgcagcagggggacgtggacggggcccagcgtctgggccgggtagccaagctcttaagcatcgtggcgctggtggggggagtcctcatcatcatcgcctcctgcgtcatcaacttaggcggtgagtgggggcttgggacaggcaggggaggaatggaagggttggcaagggcagctttactaacccctgcccctgctctctcctgtctgtcctccttacctctcctttgtctctccttgtctccccctccccccgtctgtccttccctctcctctcccacagtgtataagtgaggggctctgccccgcatcccaagacttttcttcctgttgggagctgccttgggcccatccctcccctggggggagcccaactgatggccctggcccccacccctaaggaccaagggagcctgagcggccttgtttacagcttctgtcctgctcctgcatcttgccaggctcctctgccaactgtaggcctgcctcatccctgcactggttccaacctccctgcactaatgcctgcatcccctccggcctcttggccccctatccctgcacttctggaaacctccctgcactctggaaacctccctgaacacctccccaactctgcgctctcagcctccctgcatctctcctggcctccctgcacttcttccagccccccaaattctctggacctccaccctggccgcctcctcccaactttcattgtcttggcatctctcaaccctcagtcctctcttccttcccttctttatcatctcccctttcctctccacgtcccgcccccttcctcttcctgcctcctcatctcccttaagcatcctcttctccaacctcccgtcaccgtttactctgcaaaattgacagcacttagacgaggcttgggggcagggagcagtgttgggagagggctccccaaccccaggctcggactgttctctgctgggaccacccagggtcggacacccaagggtgcctggcaggtcgcagagttggcaagccgggcctcgtatggggactcgggtgagggtggcgagtactggttccgaacgcacgcaggggagaagggagggacgcggcgctgacccttccaggtcagctggagttgacccgcccacctgggcttttcaaccccagtccgcgagtttctttcttgaaggtgtgggggctagattcattcacgtgcttcgtaatgaaataatccaaaaaataggaccaaagcgcccactggcaggagcgagggcggggcgccgcgctctataattattttctaagatgatgggggaggtttgttgcacgcgacagcccgctgaggaggcggggaccgagctacaacgcggttcggatttggcgggggtttttttccttaaaaaaaaaaaaaaaaaaaaaaaaaaagtctgggggaagaaaaaaactaaaattcttaaaaaaaaaaaaaaaaggctattatcaaactgatttctccctttttgtatgccggatgctgcatgagtctgaaacaccaataaacggagactgcatgag

SEQ ID NO: 23837 - DNA, 2549 bp, Homo sapiens
  source 1..2549: mol_type = unassigned DNA
gggctggcgggaggggccggaggctcgcgaggggcgggggcggcgacggcggcggagcgtaggggaggggaccggagaggaggggatgagcacacgggagaggagaagagggagacccgccgcctccctccctccctagctgacttgctccctcccgggctgcggctgctgcaaaagccagcagcggcagcgggagctgtccggaggccggcgtcgagggtttgccgctgtctctgctattccatcctccccataggggctctctcccctctcccatctcaagatggcagccagcagctctgagatctctgagatgaagggggttgaggagagtcccaaggttccaggcgaagggcctggccattctgaagctgaaactggccctccccaggtcctagcaggggtaccagaccagccagaggccccgcagccaggtccaaacaccactgcggcccctgtggactcagggcccaaggctgggctggctccagaaaccacagagaccccggctggggcctcagaaacagcccaggccacagacctcagcttaagcccaggaggggaatcaaaggccaactgcagccccgaagacccatgccaagaaacagtgtccaaaccagaagtgagcaaagaggccactgcagaccaggggtccaggctggagtctgcagccccacctgaaccagccccagagcctgctccccaaccagacccccggccagattcccagcctacccccaagccagcccttcaaccagagctccctacccaggaggaccccacccctgagattctgtctgagagtgtaggggaaaagcaagagaatggggcagtggtgcccctgcaggctggtgatggggaagagggcccagcccctgagcctcactcaccaccctcaaaaaaatcccccccagccaatggggcccccccccgagtgctgcagcagctggttgaggaggatcgaatgagaagggcacacagtgggcatccaggatctccccgaggtagcctgagccgccaccccagctcccagttggcaggtcctggggtggaggggggtgaaggcacccagaaacctcgggactacatcatccttgccatcctgtcctgcttctgccccatgtggcctgtcaacatcgtggccttcgcttatgctgtcatgtcccggaacagcctgcagcagggggacgtggacggggcccagcgtctgggccgggtagccaagctcttaagcatcgtggcgctggtggggggagtcctcatcatcatcgcctcctgcgtcatcaacttaggcgtgtataagtgaggggctctgccccgcatcccaagacttttcttcctgttgggagctgccttgggcccatccctcccctggggggagcccaactgatggccctggcccccacccctaaggaccaagggagcctgagcggccttgtttacagcttctgtcctgctcctgcatcttgccaggctcctctgccaactgtaggcctgcctcatccctgcactggttccaacctccctgcactaatgcctgcatcccctccggcctcttggccccctatccctgcacttctggaaacctccctgcactctggaaacctccctgaacacctccccaactctgcgctctcagcctccctgcatctctcctggcctccctgcacttcttccagccccccaaattctctggacctccaccctggccgcctcctcccaactttcattgtcttggcatctctcaaccctcagtcctctcttccttcccttctttatcatctcccctttcctctccacgtcccgcccccttcctcttcctgcctcctcatctcccttaagcatcctcttctccaacctcccgtcaccgtttactctgcaaaattgacagcacttagacgaggcttgggggcagggagcagtgttgggagagggctccccaaccccaggctcggactgttctctgctgggaccacccagggtcggacacccaagggtgcctggcaggtcgcagagttggcaagccgggcctcgtatggggactcgggtgagggtggcgagtactggttccgaacgcacgcaggggagaagggagggacgcggcgctgacccttccaggtcagctggagttgacccgcccacctgggcttttcaaccccagtccgcgagtttctttcttgaaggtgtgggggctagattcattcacgtgcttcgtaatgaaataatccaaaaaataggaccaaagcgcccactggcaggagcgagggcggggcgccgcgctctataattattttctaagatgatgggggaggtttgttgcacgcgacagcccgctgaggaggcggggaccgagctacaacgcggttcggatttggcgggggtttttttccttaaaaaaaaaaaaaaaaaaaaaaaaaaagtctgggggaagaaaaaaactaaaattcttaaaaaaaaaaaaaaaaggctattatcaaactgatttctccctttttgtatgccggatgctgcatgagtctgaaacaccaataaacggagactgcatgaga

SEQ ID NO: 23838 - DNA, 1798 bp, Homo sapiens
  source 1..1798: mol_type = unassigned DNA
acaaaccttcctgcgcaggcctcgggctgcctgcctgcctgcctgcctggcccggcccgagctccagcctgcctcttccactggccactgcctcccacccagggctggcatccctgctccctgccctgggtcccagactgtgtcctccatcaccgcagggtcggtgaggggctgggctggacaccagggcccgccctcccatcactgagctccactccttcctcattttgctgctgattctagccccaaacaaaacaggttgagctttttcctcccctcagaagctcctctctggctcgtggctgccttctgagtgttgcagacggcgccggccgggaaggggggcctgggccagccctgccaggactgggacgctgctgctggcgcctggccctccatcaggccagcctgtggcaggagagtgagctttgccgcggcagacgcctgaggatgatgccccagctgcagttcaaagatgccttttggtgcagggacttcacagcccacacgggctacgaggtgctgctgcagcggcttctggatggcaggaagatgtgcaaagacatggaggagctactgaggcagagggcccaggcggaggagcggtacgggaaggagctggtgcagatcgcacggaaggcaggtggccagacggagatcaactccctgagggcctcctttgactccttgaagcagcaaatggagaatgtgggcagctcacacatccagctggccctgaccctgcgtgaggagctgcggagtctcgaggagtttcgtgagaggcagaaggagcagaggaagaagtatgaggccgtcatggaccgggtccagaagagcaagctgtcgctctacaagaaggccatggagtccaagaagacatacgagcagaagtgccgggacgcggacgacgcggagcaggccttcgagcgcattagcgccaacggccaccagaagcaggtggagaagagtcagaacaaagccaggcagtgcaaggactcggccaccgaggcagagcgggtatacaggcagagcattgcgcagctggagaaggtccgggctgagtgggagcaggagcaccggaccacctgtgaggcctttcagctgcaagagtttgaccggctgaccattctccgcaacgccctgtgggtgcacagcaaccagctctccatgcagtgtgtcaaggatgatgagctctacgaggaagtgcggctgacgctggaaggctgcagcatagacgccgacatcgacagtttcatccaggccaagagcacgggcacagagccccccggtgaggtccggcttgcggacagcgcagcctctaggttctctggactgctgcacggaagtcccaagaccacttcgttggcagcttctgctgcgtccacagagaccctgacccccacccccgagcggaatgagggtgtctacacagccatcgcagtgcaggagatacagggaaacccggcctcaccagcccaggagtaccgggcgctctacgattatacagcgcagaacccagatgagctggacctgtccgcgggagacatcctggaggtgatcctggaaggggaggatggctggtggactgtggagaggaacgggcagcgtggcttcgtccctggttcctacctggagaagctttgaggaagggccaggagccccttcggacctgccctgccagtggagccagcagtgcccccagcactgtccccaccttgctagggcccagaaccaagcgtcccccagccccgagagggagcctgtcgtctcccagggaataaaggagtgcgttctgttc

SEQ ID NO: 23839 - DNA, 1896 bp, Homo sapiens
  source 1..1896: mol_type = unassigned DNA
tgtgggcgagggccctgtgcctgccccgggggaggttgcacaaaccttcctgcgcaggcctcgggctgcctgcctgcctgcctgcctggcccggcccgagctccagcctgcctcttccactggccactgcctcccacccagggctggcatccctgctccctgccctgggtcccagactgtgtcctccatcaccgcagggtcggtgaggggctgggctggacaccagggcccgccctcccatcactgagctccactccttcctcattttgctgctgattctagccccaaacaaaacaggttgagctttttcctcccctcagaagctcctctctggctcgtggctgccttctgagtgttgcagacggcgccggccgggaaggggggcctgggccagccctgccaggactgggacgctgctgctggcgcctggccctccatcaggccagcctgtggcaggagagtgagctttgccgcggcagacgcctgaggatgatgccccagctgcagttcaaagatgccttttggtgcagggacttcacagcccacacgggctacgaggtgctgctgcagcggcttctggatggcaggaagatgtgcaaagacatggaggagctactgaggcagagggcccaggcggaggagcggtacgggaaggagctggtgcagatcgcacggaaggcaggtggccagacggagatcaactccctgagggcctcctttgactccttgaagcagcaaatggagaatgtgggcagctcacacatccagctggccctgaccctgcgtgaggagctgcggagtctcgaggagtttcgtgagaggcagaaggagcagaggaagaagtatgaggccgtcatggaccgggtccagaagagcaagctgtcgctctacaagaaggccatggagtccaagaagacatacgagcagaagtgccgggacgcggacgacgcggagcaggccttcgagcgcattagcgccaacggccaccagaagcaggtggagaagagtcagaacaaagccaggcagtgcaaggactcggccaccgaggcagagcgggtatacaggcagagcattgcgcagctggagaaggtccgggctgagtgggagcaggagcaccggaccacctgtgaggcctttcagctgcaagagtttgaccggctgaccattctccgcaacgccctgtgggtgcacagcaaccagctctccatgcagtgtgtcaaggatgatgagctctacgaggaagtgcggctgacgctggaaggctgcagcatagacgccgacatcgacagtttcatccaggccaagagcacgggcacagagccccccgctccggtgccctaccagaactattacgatcgggaggtcaccccgctgaccagcagccctggcatacagccgtcctgcggcatgataaagaggttctctggactgctgcacggaagtcccaagaccacttcgttggcagcttctgctgcgtccacagagaccctgacccccacccccgagcggaatgagggtgtctacacagccatcgcagtgcaggagatacagggaaacccggcctcaccagcccaggagtaccgggcgctctacgattatacagcgcagaacccagatgagctggacctgtccgcgggagacatcctggaggtgatcctggaaggggaggatggctggtggactgtggagaggaacgggcagcgtggcttcgtccctggttcctacctggagaagctttgaggaagggccaggagccccttcggacctgccctgccagtggagccagcagtgcccccagcactgtccccaccttgctagggcccagaaccaagcgtcccccagccccgagagggagcctgtcgtctcccagggaataaaggagtgcgttctgttctc

SEQ ID NO: 23840 - DNA, 2844 bp, Homo sapiens
  source 1..2844: mol_type = unassigned DNA
ggggcgctggtgtgatcgagctcacgtagcgagggctgcagtcgcctcctccctggcgctgccatcgcggcctagaggttataaaagggctaacgggctccctctgctgcccagtcgcgccgccagcgggctgagggtaggaagtagccgctccgagtggaggcgactgggggctgaagagcgcgccgccctctcgtcccactttccaggtgtgtgatcctgtaaaattaaatcttccaagatgatctggtatatattaattataggaattctgcttccccagtctttggctcatccaggcttttttacttcaattggtcagatgactgatttgatccatactgagaaagatctggtgacttctctgaaagattatattaaggcagaagaggacaagttagaacaaataaaaaaatgggcagagaagttagatcggctaactagtacagcgacaaaagatccagaaggatttgttgggcatccagtaaatgcattcaaattaatgaaacgtctgaatactgagtggagtgagttggagaatctggtccttaaggatatgtcagatggctttatctctaacctaaccattcagagacagtactttcctaatgatgaagatcaggttggggcagccaaagctctgttacgtctccaggatacctacaatttggatacagataccatctcaaagggtaatcttccaggagtgaaacacaaatcttttctaacggctgaggactgctttgagttgggcaaagtggcctatacagaagcagattattaccatacggaactgtggatggaacaagccctaaggcaactggatgaaggcgagatttctaccatagataaagtctctgttctagattatttgagctatgcggtatatcagcagggagacctggataaggcacttttgctcacaaagaagcttcttgaactagatcctgaacatcagagagctaatggtaacttaaaatattttgagtatataatggctaaagaaaaagatgtcaataagtctgcttcagatgaccaatctgatcagaaaactacaccaaagaaaaaaggggttgctgtggattacctgccagagagacagaagtacgaaatgctgtgccgtggggagggtatcaaaatgacccctcggagacagaaaaaactcttttgccgctaccatgatggaaaccgtaatcctaaatttattctggctccagctaaacaggaggatgaatgggacaagcctcgtattattcgcttccatgatattatttctgatgcagaaattgaaatcgtcaaagacctagcaaaaccaaggctgagccgagctacagtacatgaccctgagactggaaaattgaccacagcacagtacagagtatctaagagtgcctggctctctggctatgaaaatcctgtggtgtctcgaattaatatgagaatacaagatctaacaggactagatgtttccacagcagaggaattacaggtagcaaattatggagttggaggacagtatgaaccccattttgactttgcacggaaagatgagccagatgctttcaaagagctggggacaggaaatagaattgctacatggctgttttatatgagtgatgtgtctgcaggaggagccactgtttttcctgaagttggagctagtgtttggcccaaaaaaggaactgctgttttctggtataatctgtttgccagtggagaaggagattatagtacacggcatgcagcctgtccagtgctagttggcaacaaatgggtatccaataaatggctccatgaacgtggacaagaatttcgaagaccttgtacgttgtcagaattggaatgacaaacaggcttccctttttctcctattgttgtactcttatgtgtctgatatacacatttcctagtcttaactttcaggagtttacaattgactaacactccatgattgattcagtcatgaacctcatcccatgtttcatctgtggacaattgcttactttgtgggttcttttaaaagtaacacgaaatcatcatattgcataaaaccttaaagttctgttggtatcacagaagacaaggcagagtttaaagtgaggaattttatatttaaagaactttttggttggataaaaacataatttgagcatccagttttagtatttcactacatctcagttggtgggtgttaagctagaatgggctgtgtgataggaaacaaatgccttacagatgtgcctaggtgttctgtttacctagtgtcttactctgttttctggatctgaagactagtaataaactaggacactaactgggttccatgtgattgccctttcatatgatcttctaagttgatttttttcctcccaagtcttttttaaagaaagtatactgtattttaccaaccccctctcttttcttttagctcctctgtggtgaattaaacgtacttgagttaaaatatttcgattttttttttttttttaatggaaagtcctgcataacaacactgggccttcttaactaaaatgctcaccacttagcctgtttttttatcccttttttaaaatgacagatgattttgttcaggaattttgctgtttttcttagtgctaataccttgcctcttattcctgctacagcagggtggtaatattggcattctgattaaatactgtgccttaggagactggaagtttaaaaatgtacaagtcctttcagtgatgagggaattgattttttttaaaagtctttttcttagaaagccaaaatgtttgtttttttaagattctgaaatgtgttgtgacaacaatgacctatttatgatcttaaatctttttt

SEQ ID NO: 23841 - DNA, 2727 bp, Homo sapiens
  source 1..2727: mol_type = unassigned DNA
agcgggctgagggtaggaagtagccgctccgagtggaggcgactgggggctgaagagcgcgccgccctctcgtcccactttccaggtgtgtgatcctgtaaaattaaatcttccaagatgatctggtatatattaattataggaattctgcttccccagtctttggctcatccaggcttttttacttcaattggtcagatgactgatttgatccatactgagaaagatctggtgacttctctgaaagattatattaaggcagaagaggacaagttagaacaaataaaaaaatgggcagagaagttagatcggctaactagtacagcgacaaaagatccagaaggatttgttgggcatccagtaaatgcattcaaattaatgaaacgtctgaatactgagtggagtgagttggagaatctggtccttaaggatatgtcagatggctttatctctaacctaaccattcagagacagtactttcctaatgatgaagatcaggttggggcagccaaagctctgttacgtctccaggatacctacaatttggatacagataccatctcaaagggtaatcttccaggagtgaaacacaaatcttttctaacggctgaggactgctttgagttgggcaaagtggcctatacagaagcagattattaccatacggaactgtggatggaacaagccctaaggcaactggatgaaggcgagatttctaccatagataaagtctctgttctagattatttgagctatgcggtatatcagcagggagacctggataaggcacttttgctcacaaagaagcttcttgaactagatcctgaacatcagagagctaatggtaacttaaaatattttgagtatataatggctaaagaaaaagatgtcaataagtctgcttcagatgaccaatctgatcagaaaactacaccaaagaaaaaaggggttgctgtggattacctgccagagagacagaagtacgaaatgctgtgccgtggggagggtatcaaaatgacccctcggagacagaaaaaactcttttgccgctaccatgatggaaaccgtaatcctaaatttattctggctccagctaaacaggaggatgaatgggacaagcctcgtattattcgcttccatgatattatttctgatgcagaaattgaaatcgtcaaagacctagcaaaaccaaggctgaggcgagccaccatttcaaacccaataacaggagacttggagacggtacattacagaattagcaaaagtgcctggctctctggctatgaaaatcctgtggtgtctcgaattaatatgagaatacaagatctaacaggactagatgtttccacagcagaggaattacaggtagcaaattatggagttggaggacagtatgaaccccattttgactttgcacggaaagatgagccagatgctttcaaagagctggggacaggaaatagaattgctacatggctgttttatatgagtgatgtgtctgcaggaggagccactgtttttcctgaagttggagctagtgtttggcccaaaaaaggaactgctgttttctggtataatctgtttgccagtggagaaggagattatagtacacggcatgcagcctgtccagtgctagttggcaacaaatgggtatccaataaatggctccatgaacgtggacaagaatttcgaagaccttgtacgttgtcagaattggaatgacaaacaggcttccctttttctcctattgttgtactcttatgtgtctgatatacacatttcctagtcttaactttcaggagtttacaattgactaacactccatgattgattcagtcatgaacctcatcccatgtttcatctgtggacaattgcttactttgtgggttcttttaaaagtaacacgaaatcatcatattgcataaaaccttaaagttctgttggtatcacagaagacaaggcagagtttaaagtgaggaattttatatttaaagaactttttggttggataaaaacataatttgagcatccagttttagtatttcactacatctcagttggtgggtgttaagctagaatgggctgtgtgataggaaacaaatgccttacagatgtgcctaggtgttctgtttacctagtgtcttactctgttttctggatctgaagactagtaataaactaggacactaactgggttccatgtgattgccctttcatatgatcttctaagttgatttttttcctcccaagtcttttttaaagaaagtatactgtattttaccaaccccctctcttttcttttagctcctctgtggtgaattaaacgtacttgagttaaaatatttcgattttttttttttttttaatggaaagtcctgcataacaacactgggccttcttaactaaaatgctcaccacttagcctgtttttttatcccttttttaaaatgacagatgattttgttcaggaattttgctgtttttcttagtgctaataccttgcctcttattcctgctacagcagggtggtaatattggcattctgattaaatactgtgccttaggagactggaagtttaaaaatgtacaagtcctttcagtgatgagggaattgattttttttaaaagtctttttcttagaaagccaaaatgtttgtttttttaagattctgaaatgtgttgtgacaacaatgacctatttatgatcttaaatcttttttaaaaaaa

SEQ ID NO: 23842 - DNA, 2695 bp, Homo sapiens
  source 1..2695: mol_type = unassigned DNA
agcgggctgagggtaggaagtagccgctccgagtggaggcgactgggggctgaagagcgcgccgccctctcgtcccactttccagatgatctggtatatattaattataggaattctgcttccccagtctttggctcatccaggcttttttacttcaattggtcagatgactgatttgatccatactgagaaagatctggtgacttctctgaaagattatattaaggcagaagaggacaagttagaacaaataaaaaaatgggcagagaagttagatcggctaactagtacagcgacaaaagatccagaaggatttgttgggcatccagtaaatgcattcaaattaatgaaacgtctgaatactgagtggagtgagttggagaatctggtccttaaggatatgtcagatggctttatctctaacctaaccattcagagacagtactttcctaatgatgaagatcaggttggggcagccaaagctctgttacgtctccaggatacctacaatttggatacagataccatctcaaagggtaatcttccaggagtgaaacacaaatcttttctaacggctgaggactgctttgagttgggcaaagtggcctatacagaagcagattattaccatacggaactgtggatggaacaagccctaaggcaactggatgaaggcgagatttctaccatagataaagtctctgttctagattatttgagctatgcggtatatcagcagggagacctggataaggcacttttgctcacaaagaagcttcttgaactagatcctgaacatcagagagctaatggtaacttaaaatattttgagtatataatggctaaagaaaaagatgtcaataagtctgcttcagatgaccaatctgatcagaaaactacaccaaagaaaaaaggggttgctgtggattacctgccagagagacagaagtacgaaatgctgtgccgtggggagggtatcaaaatgacccctcggagacagaaaaaactcttttgccgctaccatgatggaaaccgtaatcctaaatttattctggctccagctaaacaggaggatgaatgggacaagcctcgtattattcgcttccatgatattatttctgatgcagaaattgaaatcgtcaaagacctagcaaaaccaaggctgagccgagctacagtacatgaccctgagactggaaaattgaccacagcacagtacagagtatctaagagtgcctggctctctggctatgaaaatcctgtggtgtctcgaattaatatgagaatacaagatctaacaggactagatgtttccacagcagaggaattacaggtagcaaattatggagttggaggacagtatgaaccccattttgactttgcacggaaagatgagccagatgctttcaaagagctggggacaggaaatagaattgctacatggctgttttatatgagtgatgtgtctgcaggaggagccactgtttttcctgaagttggagctagtgtttggcccaaaaaaggaactgctgttttctggtataatctgtttgccagtggagaaggagattatagtacacggcatgcagcctgtccagtgctagttggcaacaaatgggtatccaataaatggctccatgaacgtggacaagaatttcgaagaccttgtacgttgtcagaattggaatgacaaacaggcttccctttttctcctattgttgtactcttatgtgtctgatatacacatttcctagtcttaactttcaggagtttacaattgactaacactccatgattgattcagtcatgaacctcatcccatgtttcatctgtggacaattgcttactttgtgggttcttttaaaagtaacacgaaatcatcatattgcataaaaccttaaagttctgttggtatcacagaagacaaggcagagtttaaagtgaggaattttatatttaaagaactttttggttggataaaaacataatttgagcatccagttttagtatttcactacatctcagttggtgggtgttaagctagaatgggctgtgtgataggaaacaaatgccttacagatgtgcctaggtgttctgtttacctagtgtcttactctgttttctggatctgaagactagtaataaactaggacactaactgggttccatgtgattgccctttcatatgatcttctaagttgatttttttcctcccaagtcttttttaaagaaagtatactgtattttaccaaccccctctcttttcttttagctcctctgtggtgaattaaacgtacttgagttaaaatatttcgattttttttttttttttaatggaaagtcctgcataacaacactgggccttcttaactaaaatgctcaccacttagcctgtttttttatcccttttttaaaatgacagatgattttgttcaggaattttgctgtttttcttagtgctaataccttgcctcttattcctgctacagcagggtggtaatattggcattctgattaaatactgtgccttaggagactggaagtttaaaaatgtacaagtcctttcagtgatgagggaattgattttttttaaaagtctttttcttagaaagccaaaatgtttgtttttttaagattctgaaatgtgttgtgacaacaatgacctatttatgatcttaaatcttttttaaaaaaa

SEQ ID NO: 23843 - DNA, 2844 bp, Homo sapiens
  source 1..2844: mol_type = unassigned DNA
ggggcgctggtgtgatcgagctcacgtagcgagggctgcagtcgcctcctccctggcgctgccatcgcggcctagaggttataaaagggctaacgggctccctctgctgcccagtcgcgccgccagcgggctgagggtaggaagtagccgctccgagtggaggcgactgggggctgaagagcgcgccgccctctcgtcccactttccaggtgtgtgatcctgtaaaattaaatcttccaagatgatctggtatatattaattataggaattctgcttccccagtctttggctcatccaggcttttttacttcaattggtcagatgactgatttgatccatactgagaaagatctggtgacttctctgaaagattatattaaggcagaagaggacaagttagaacaaataaaaaaatgggcagagaagttagatcggctaactagtacagcgacaaaagatccagaaggatttgttgggcatccagtaaatgcattcaaattaatgaaacgtctgaatactgagtggagtgagttggagaatctggtccttaaggatatgtcagatggctttatctctaacctaaccattcagagacagtactttcctaatgatgaagatcaggttggggcagccaaagctctgttacgtctccaggatacctacaatttggatacagataccatctcaaagggtaatcttccaggagtgaaacacaaatcttttctaacggctgaggactgctttgagttgggcaaagtggcctatacagaagcagattattaccatacggaactgtggatggaacaagccctaaggcaactggatgaaggcgagatttctaccatagataaagtctctgttctagattatttgagctatgcggtatatcagcagggagacctggataaggcacttttgctcacaaagaagcttcttgaactagatcctgaacatcagagagctaatggtaacttaaaatattttgagtatataatggctaaagaaaaagatgtcaataagtctgcttcagatgaccaatctgatcagaaaactacaccaaagaaaaaaggggttgctgtggattacctgccagagagacagaagtacgaaatgctgtgccgtggggagggtatcaaaatgacccctcggagacagaaaaaactcttttgccgctaccatgatggaaaccgtaatcctaaatttattctggctccagctaaacaggaggatgaatgggacaagcctcgtattattcgcttccatgatattatttctgatgcagaaattgaaatcgtcaaagacctagcaaaaccaaggctgaggcgagccaccatttcaaacccaataacaggagacttggagacggtacattacagaattagcaaaagtgcctggctctctggctatgaaaatcctgtggtgtctcgaattaatatgagaatacaagatctaacaggactagatgtttccacagcagaggaattacaggtagcaaattatggagttggaggacagtatgaaccccattttgactttgcacggaaagatgagccagatgctttcaaagagctggggacaggaaatagaattgctacatggctgttttatatgagtgatgtgtctgcaggaggagccactgtttttcctgaagttggagctagtgtttggcccaaaaaaggaactgctgttttctggtataatctgtttgccagtggagaaggagattatagtacacggcatgcagcctgtccagtgctagttggcaacaaatgggtatccaataaatggctccatgaacgtggacaagaatttcgaagaccttgtacgttgtcagaattggaatgacaaacaggcttccctttttctcctattgttgtactcttatgtgtctgatatacacatttcctagtcttaactttcaggagtttacaattgactaacactccatgattgattcagtcatgaacctcatcccatgtttcatctgtggacaattgcttactttgtgggttcttttaaaagtaacacgaaatcatcatattgcataaaaccttaaagttctgttggtatcacagaagacaaggcagagtttaaagtgaggaattttatatttaaagaactttttggttggataaaaacataatttgagcatccagttttagtatttcactacatctcagttggtgggtgttaagctagaatgggctgtgtgataggaaacaaatgccttacagatgtgcctaggtgttctgtttacctagtgtcttactctgttttctggatctgaagactagtaataaactaggacactaactgggttccatgtgattgccctttcatatgatcttctaagttgatttttttcctcccaagtcttttttaaagaaagtatactgtattttaccaaccccctctcttttcttttagctcctctgtggtgaattaaacgtacttgagttaaaatatttcgattttttttttttttttaatggaaagtcctgcataacaacactgggccttcttaactaaaatgctcaccacttagcctgtttttttatcccttttttaaaatgacagatgattttgttcaggaattttgctgtttttcttagtgctaataccttgcctcttattcctgctacagcagggtggtaatattggcattctgattaaatactgtgccttaggagactggaagtttaaaaatgtacaagtcctttcagtgatgagggaattgattttttttaaaagtctttttcttagaaagccaaaatgtttgtttttttaagattctgaaatgtgttgtgacaacaatgacctatttatgatcttaaatctttttt

SEQ ID NO: 23844 - DNA, 2937 bp, Homo sapiens
  source 1..2937: mol_type = unassigned DNA
ggggcgctggtgtgatcgagctcacgtagcgagggctgcagtcgcctcctccctggcgctgccatcgcggcctagaggttataaaagggctaacgggctccctctgctgcccagtcgcgccgccagcgggctgagggtaggaagtagccgctccgagtggaggcgactgggggctgaagagcgcgccgccctctcgtcccactttccagagatgaagtcttgctatgttgcccggcctggtctcaaactcctgagctcaagtgatcctctttccttggcctcccaaagtactgggattacaggtgtgtgatcctgtaaaattaaatcttccaagatgatctggtatatattaattataggaattctgcttccccagtctttggctcatccaggcttttttacttcaattggtcagatgactgatttgatccatactgagaaagatctggtgacttctctgaaagattatattaaggcagaagaggacaagttagaacaaataaaaaaatgggcagagaagttagatcggctaactagtacagcgacaaaagatccagaaggatttgttgggcatccagtaaatgcattcaaattaatgaaacgtctgaatactgagtggagtgagttggagaatctggtccttaaggatatgtcagatggctttatctctaacctaaccattcagagacagtactttcctaatgatgaagatcaggttggggcagccaaagctctgttacgtctccaggatacctacaatttggatacagataccatctcaaagggtaatcttccaggagtgaaacacaaatcttttctaacggctgaggactgctttgagttgggcaaagtggcctatacagaagcagattattaccatacggaactgtggatggaacaagccctaaggcaactggatgaaggcgagatttctaccatagataaagtctctgttctagattatttgagctatgcggtatatcagcagggagacctggataaggcacttttgctcacaaagaagcttcttgaactagatcctgaacatcagagagctaatggtaacttaaaatattttgagtatataatggctaaagaaaaagatgtcaataagtctgcttcagatgaccaatctgatcagaaaactacaccaaagaaaaaaggggttgctgtggattacctgccagagagacagaagtacgaaatgctgtgccgtggggagggtatcaaaatgacccctcggagacagaaaaaactcttttgccgctaccatgatggaaaccgtaatcctaaatttattctggctccagctaaacaggaggatgaatgggacaagcctcgtattattcgcttccatgatattatttctgatgcagaaattgaaatcgtcaaagacctagcaaaaccaaggctgaggcgagccaccatttcaaacccaataacaggagacttggagacggtacattacagaattagcaaaagtgcctggctctctggctatgaaaatcctgtggtgtctcgaattaatatgagaatacaagatctaacaggactagatgtttccacagcagaggaattacaggtagcaaattatggagttggaggacagtatgaaccccattttgactttgcacggaaagatgagccagatgctttcaaagagctggggacaggaaatagaattgctacatggctgttttatatgagtgatgtgtctgcaggaggagccactgtttttcctgaagttggagctagtgtttggcccaaaaaaggaactgctgttttctggtataatctgtttgccagtggagaaggagattatagtacacggcatgcagcctgtccagtgctagttggcaacaaatgggtatccaataaatggctccatgaacgtggacaagaatttcgaagaccttgtacgttgtcagaattggaatgacaaacaggcttccctttttctcctattgttgtactcttatgtgtctgatatacacatttcctagtcttaactttcaggagtttacaattgactaacactccatgattgattcagtcatgaacctcatcccatgtttcatctgtggacaattgcttactttgtgggttcttttaaaagtaacacgaaatcatcatattgcataaaaccttaaagttctgttggtatcacagaagacaaggcagagtttaaagtgaggaattttatatttaaagaactttttggttggataaaaacataatttgagcatccagttttagtatttcactacatctcagttggtgggtgttaagctagaatgggctgtgtgataggaaacaaatgccttacagatgtgcctaggtgttctgtttacctagtgtcttactctgttttctggatctgaagactagtaataaactaggacactaactgggttccatgtgattgccctttcatatgatcttctaagttgatttttttcctcccaagtcttttttaaagaaagtatactgtattttaccaaccccctctcttttcttttagctcctctgtggtgaattaaacgtacttgagttaaaatatttcgattttttttttttttttaatggaaagtcctgcataacaacactgggccttcttaactaaaatgctcaccacttagcctgtttttttatcccttttttaaaatgacagatgattttgttcaggaattttgctgtttttcttagtgctaataccttgcctcttattcctgctacagcagggtggtaatattggcattctgattaaatactgtgccttaggagactggaagtttaaaaatgtacaagtcctttcagtgatgagggaattgattttttttaaaagtctttttcttagaaagccaaaatgtttgtttttttaagattctgaaatgtgttgtgacaacaatgacctatttatgatcttaaatctttttt

SEQ ID NO: 23845 - DNA, 2790 bp, Homo sapiens
  source 1..2790: mol_type = unassigned DNA
ggggcgctggtgtgatcgagctcacgtagcgagggctgcagtcgcctcctccctggcgctgccatcgcggcctagaggttataaaagggctaacgggctccctctgctgcccagtcgcgccgccagcgggctgagggtaggaagtagccgctccgagtggaggcgactgggggctgaagagcgcgccgccctctcgtcccactttccaggtgtgtgatcctgtaaaattaaatcttccaagatgatctggtatatattaattataggaattctgcttccccagtctttggctcatccaggcttttttacttcaattggtcagatgactgatttgatccatactgagaaagatctggtgacttctctgaaagattatattaaggcagaagaggacaagttagaacaaataaaaaaatgggcagagaagttagatcggctaactagtacagcgacaaaagatccagaaggatttgttgggcatccagtaaatgcattcaaattaatgaaacgtctgaatactgagtggagtgagttggagaatctggtccttaaggatatgtcagatggctttatctctaacctaaccattcagagacagtactttcctaatgatgaagatcaggttggggcagccaaagctctgttacgtctccaggatacctacaatttggatacagataccatctcaaagggtaatcttccaggagtgaaacacaaatcttttctaacggctgaggactgctttgagttgggcaaagtggcctatacagaagcagattattaccatacggaactgtggatggaacaagccctaaggcaactggatgaaggcgagatttctaccatagataaagtctctgttctagattatttgagctatgcggtatatcagcagggagacctggataaggcacttttgctcacaaagaagcttcttgaactagatcctgaacatcagagagctaatggtaacttaaaatattttgagtatataatggctaaagaaaaagatgtcaataagtctgcttcagatgaccaatctgatcagaaaactacaccaaagaaaaaaggggttgctgtggattacctgccagagagacagaagtacgaaatgctgtgccgtggggagggtatcaaaatgacccctcggagacagaaaaaactcttttgccgctaccatgatggaaaccgtaatcctaaatttattctggctccagctaaacaggaggatgaatgggacaagcctcgtattattcgcttccatgatattatttctgatgcagaaattgaaatcgtcaaagacctagcaaaaccaaggctgagccgagctacagtacatgaccctgagactggaaaattgaccacagcacagtacagagtatctaagagtgcctggctctctggctatgaaaatcctgtggtgtctcgaattaatatgagaatacaagatctaacaggactagatgtttccacagcagaggaattacagaaagatgagccagatgctttcaaagagctggggacaggaaatagaattgctacatggctgttttatatgagtgatgtgtctgcaggaggagccactgtttttcctgaagttggagctagtgtttggcccaaaaaaggaactgctgttttctggtataatctgtttgccagtggagaaggagattatagtacacggcatgcagcctgtccagtgctagttggcaacaaatgggtatccaataaatggctccatgaacgtggacaagaatttcgaagaccttgtacgttgtcagaattggaatgacaaacaggcttccctttttctcctattgttgtactcttatgtgtctgatatacacatttcctagtcttaactttcaggagtttacaattgactaacactccatgattgattcagtcatgaacctcatcccatgtttcatctgtggacaattgcttactttgtgggttcttttaaaagtaacacgaaatcatcatattgcataaaaccttaaagttctgttggtatcacagaagacaaggcagagtttaaagtgaggaattttatatttaaagaactttttggttggataaaaacataatttgagcatccagttttagtatttcactacatctcagttggtgggtgttaagctagaatgggctgtgtgataggaaacaaatgccttacagatgtgcctaggtgttctgtttacctagtgtcttactctgttttctggatctgaagactagtaataaactaggacactaactgggttccatgtgattgccctttcatatgatcttctaagttgatttttttcctcccaagtcttttttaaagaaagtatactgtattttaccaaccccctctcttttcttttagctcctctgtggtgaattaaacgtacttgagttaaaatatttcgattttttttttttttttaatggaaagtcctgcataacaacactgggccttcttaactaaaatgctcaccacttagcctgtttttttatcccttttttaaaatgacagatgattttgttcaggaattttgctgtttttcttagtgctaataccttgcctcttattcctgctacagcagggtggtaatattggcattctgattaaatactgtgccttaggagactggaagtttaaaaatgtacaagtcctttcagtgatgagggaattgattttttttaaaagtctttttcttagaaagccaaaatgtttgtttttttaagattctgaaatgtgttgtgacaacaatgacctatttatgatcttaaatctttttt

SEQ ID NO: 23846 - DNA, 2230 bp, Homo sapiens
  source 1..2230: mol_type = unassigned DNA
ggaggcgccgagctgaccgggcgacgccgcgggaggttctggaaacgccgggagctgcgagtgtccagctgcggagacccgtgataattcgttaactaattcaacaaacgggacccttctgtgtgccagaaaccgcaagcagttgctaacccagtgggacaggcggattggaagagcgggaaggtcctggcccagagcagtgtgacacttccctctgtgaccatgaaactctgggtgtctgcattgctgatggcctggtttggtgtcctgagctgtgtgcaggccgaattcttcacctctattgggcacatgactgacctgatttatgcagagaaagagctggtgcagtctctgaaagagtacatccttgtggaggaagccaagctttccaagattaagagctgggccaacaaaatggaagccttgactagcaagtcagctgctgatgctgagggctacctggctcaccctgtgaatgcctacaaactggtgaagcggctaaacacagactggcctgcgctggaggaccttgtcctgcaggactcagctgcaggttttatcgccaacctctctgtgcagcggcagttcttccccactgatgaggacgagataggagctgccaaagccctgatgagacttcaggacacatacaggctggacccaggcacaatttccagaggggaacttccaggaaccaagtaccaggcaatgctgagtgtggatgactgctttgggatgggccgctcggcctacaatgaaggggactattatcatacggtgttgtggatggagcaggtgctaaagcagcttgatgccggggaggaggccaccacaaccaagtcacaggtgctggactacctcagctatgctgtcttccagttgggtgatctgcaccgtgccctggagctcacccgccgcctgctctcccttgacccaagccacgaacgagctggagggaatctgcggtactttgagcagttattggaggaagagagagaaaaaacgttaacaaatcagacagaagctgagctagcaaccccagaaggcatctatgagaggcctgtggactacctgcctgagagggatgtttacgagagcctctgtcgtggggagggtgtcaaactgacaccccgtagacagaagaggcttttctgtaggtaccaccatggcaacagggccccacagctgctcattgcccccttcaaagaggaggacgagtgggacagcccgcacatcgtcaggtactacgatgtcatgtctgatgaggaaatcgagaggatcaaggagatcgcaaaacctaaacttgcacgagccaccgttcgtgatcccaagacaggagtcctcactgtcgccagctaccgggtttccaaaagctcctggctagaggaagatgatgaccctgttgtggcccgagtaaatcgtcggatgcagcatatcacagggttaacagtaaagactgcagaattgttacaggttgcaaattatggagtgggaggacagtatgaaccgcacttcgacttctctaggaatgatgagcgagatactttcaagcatttagggacggggaatcgtgtggctactttcttaaactacatgagtgatgtagaagctggtggtgccaccgtcttccctgatctgggggctgcaatttggcctaagaagggtacagctgtgttctggtacaacctcttgcggagcggggaaggtgactaccgaacaagacatgctgcctgccctgtgcttgtgggctgcaagtgggtctccaataagtggttccatgaacgaggacaggagttcttgagaccttgtggatcaacagaagttgactgacatccttttctgtccttccccttcctggtccttcagcccatgtcaacgtgacagacacctttgtatgttcctttgtatgttcctatcaggctgatttttggagaaatgaatgtttgtctggagcagagggagaccatactagggcgactcctgtgtgactgaagtcccagcccttccattcagcctgtgccatccctggccccaaggctaggatcaaagtggctgcagcagagttagctgtctagcgcctagcaaggtgcctttgtacctcaggtgttttaggtgtgagatgtttcagtgaaccaaagttctgataccttgtttacatgtttgtttttatggcatttctatctattgtggctttaccaaaaaataaaatgtccctaccagaagccttaaa

SEQ ID NO: 23847 - DNA, 2313 bp, Homo sapiens
  source 1..2313: mol_type = unassigned DNA
atgaagggcgcgggcggccagctccggctccggctccggctccggctcccgcgaggccgggtagcctgggcgttcccaggggtcgcagaggacggcgaaccccggcggagccaccggagctggggaccaggacgcaggcaggcgtgtggagcgtgaggtggggacgtggcggcggctcaagtgggcggagccccggcagcggcccgaggcggagtcgccaagggaggaggcgccgagctgaccgggcgacgccgcgggaggttctggaaacgccgggagctgcgagtgtccagacacttccctctgtgaccatgaaactctgggtgtctgcattgctgatggcctggtttggtgtcctgagctgtgtgcaggccgaattcttcacctctattgggcacatgactgacctgatttatgcagagaaagagctggtgcagtctctgaaagagtacatccttgtggaggaagccaagctttccaagattaagagctgggccaacaaaatggaagccttgactagcaagtcagctgctgatgctgagggctacctggctcaccctgtgaatgcctacaaactggtgaagcggctaaacacagactggcctgcgctggaggaccttgtcctgcaggactcagctgcaggttttatcgccaacctctctgtgcagcggcagttcttccccactgatgaggacgagataggagctgccaaagccctgatgagacttcaggacacatacaggctggacccaggcacaatttccagaggggaacttccaggaaccaagtaccaggcaatgctgagtgtggatgactgctttgggatgggccgctcggcctacaatgaaggggactattatcatacggtgttgtggatggagcaggtgctaaagcagcttgatgccggggaggaggccaccacaaccaagtcacaggtgctggactacctcagctatgctgtcttccagttgggtgatctgcaccgtgccctggagctcacccgccgcctgctctcccttgacccaagccacgaacgagctggagggaatctgcggtactttgagcagttattggaggaagagagagaaaaaacgttaacaaatcagacagaagctgagctagcaaccccagaaggcatctatgagaggcctgtggactacctgcctgagagggatgtttacgagagcctctgtcgtggggagggtgtcaaactgacaccccgtagacagaagaggcttttctgtaggtaccaccatggcaacagggccccacagctgctcattgcccccttcaaagaggaggacgagtgggacagcccgcacatcgtcaggtactacgatgtcatgtctgatgaggaaatcgagaggatcaaggagatcgcaaaacctaaacttgcacgagccaccgttcgtgatcccaagacaggagtcctcactgtcgccagctaccgggtttccaaaagctcctggctagaggaagatgatgaccctgttgtggcccgagtaaatcgtcggatgcagcatatcacagggttaacagtaaagactgcagaattgttacaggttgcaaattatggagtgggaggacagtatgaaccgcacttcgacttctctaggcgaccttttgacagcggcctcaaaacagaggggaataggttagcgacgtttcttaactacatgagtgatgtagaagctggtggtgccaccgtcttccctgatctgggggctgcaatttggcctaagaagggtacagctgtgttctggtacaacctcttgcggagcggggaaggtgactaccgaacaagacatgctgcctgccctgtgcttgtgggctgcaagtgggtctccaataagtggttccatgaacgaggacaggagttcttgagaccttgtggatcaacagaagttgactgacatccttttctgtccttccccttcctggtccttcagcccatgtcaacgtgacagacacctttgtatgttcctttgtatgttcctatcaggctgatttttggagaaatgaatgtttgtctggagcagagggagaccatactagggcgactcctgtgtgactgaagtcccagcccttccattcagcctgtgccatccctggccccaaggctaggatcaaagtggctgcagcagagttagctgtctagcgcctagcaaggtgcctttgtacctcaggtgttttaggtgtgagatgtttcagtgaaccaaagttctgataccttgtttacatgtttgtttttatggcatttctatctattgtggctttaccaaaaaataaaatgtccctaccagaagccttaaa

SEQ ID NO: 23848 - DNA, 2223 bp, Homo sapiens
  source 1..2223: mol_type = unassigned DNA
ctggaaacgccgggagctgcgagtgtccagacatccttgtggaaccagcgttgtttttccttggcagctgcggagacccgtgataattcgttaactaattcaacaaacgggacccttctgtgtgccagaaaccgcaagcagttgctaacccagtgggacaggcggattggaagagcgggaaggtcctggcccagagcagtgtgacacttccctctgtgaccatgaaactctgggtgtctgcattgctgatggcctggtttggtgtcctgagctgtgtgcaggccgaattcttcacctctattgggcacatgactgacctgatttatgcagagaaagagctggtgcagtctctgaaagagtacatccttgtggaggaagccaagctttccaagattaagagctgggccaacaaaatggaagccttgactagcaagtcagctgctgatgctgagggctacctggctcaccctgtgaatgcctacaaactggtgaagcggctaaacacagactggcctgcgctggaggaccttgtcctgcaggactcagctgcaggttttatcgccaacctctctgtgcagcggcagttcttccccactgatgaggacgagataggagctgccaaagccctgatgagacttcaggacacatacaggctggacccaggcacaatttccagaggggaacttccaggaaccaagtaccaggcaatgctgagtgtggatgactgctttgggatgggccgctcggcctacaatgaaggggactattatcatacggtgttgtggatggagcaggtgctaaagcagcttgatgccggggaggaggccaccacaaccaagtcacaggtgctggactacctcagctatgctgtcttccagttgggtgatctgcaccgtgccctggagctcacccgccgcctgctctcccttgacccaagccacgaacgagctggagggaatctgcggtactttgagcagttattggaggaagagagagaaaaaacgttaacaaatcagacagaagctgagctagcaaccccagaaggcatctatgagaggcctgtggactacctgcctgagagggatgtttacgagagcctctgtcgtggggagggtgtcaaactgacaccccgtagacagaagaggcttttctgtaggtaccaccatggcaacagggccccacagctgctcattgcccccttcaaagaggaggacgagtgggacagcccgcacatcgtcaggtactacgatgtcatgtctgatgaggaaatcgagaggatcaaggagatcgcaaaacctaaacttgcacgagccaccgttcgtgatcccaagacaggagtcctcactgtcgccagctaccgggtttccaaaagctcctggctagaggaagatgatgaccctgttgtggcccgagtaaatcgtcggatgcagcatatcacagggttaacagtaaagactgcagaattgttacaggttgcaaattatggagtgggaggacagtatgaaccgcacttcgacttctctaggcgaccttttgacagcggcctcaaaacagaggggaataggttagcgacgtttcttaactacatgagtgatgtagaagctggtggtgccaccgtcttccctgatctgggggctgcaatttggcctaagaagggtacagctgtgttctggtacaacctcttgcggagcggggaaggtgactaccgaacaagacatgctgcctgccctgtgcttgtgggctgcaagtgggtctccaataagtggttccatgaacgaggacaggagttcttgagaccttgtggatcaacagaagttgactgacatccttttctgtccttccccttcctggtccttcagcccatgtcaacgtgacagacacctttgtatgttcctttgtatgttcctatcaggctgatttttggagaaatgaatgtttgtctggagcagagggagaccatactagggcgactcctgtgtgactgaagtcccagcccttccattcagcctgtgccatccctggccccaaggctaggatcaaagtggctgcagcagagttagctgtctagcgcctagcaaggtgcctttgtacctcaggtgttttaggtgtgagatgtttcagtgaaccaaagttctgataccttgtttacatgtttgtttttatggcatttctatctattgtggctttaccaaaaaataaaatgtccctaccagaagccttaaa

SEQ ID NO: 23849 - DNA, 2563 bp, Homo sapiens
  source 1..2563: mol_type = unassigned DNA
agcgttgtttttccttggcagctgcggagacccgtgataattcgttaactaattcaacaaacgggacccttctgtgtgccagaaaccgcaagcagttgctaacccagtgggacaggcggattggaagagcgggaaggtcctggcccagagcagtgtggtgagcgctgtgctggaagggaatgcgggcagtgggtacttggtagagcactgactgcctccggccagaggacttcccggaggaggtgacccatgagctggagtggtcagaggaaggctggcaaaagggcatcgtggacagaggaacagcctatgtgagtgggagcagagaccttggccaatgccattccttatggccttgtagtggaagcaaggtgatggggaaggaacactgtaggggatagctgtccacggacgctgtctacaagaccctggagtgagataacgtgcctggtactgtgccctgcatgtgtaagatgcccagttgaccttcgcagcaggagcctggatcagggcacttcctgcctcaggtattgctggacagcccagacacttccctctgtgaccatgaaactctgggtgtctgcattgctgatggcctggtttggtgtcctgagctgtgtgcaggccgaattcttcacctctattgggcacatgactgacctgatttatgcagagaaagagctggtgcagtctctgaaagagtacatccttgtggaggaagccaagctttccaagattaagagctgggccaacaaaatggaagccttgactagcaagtcagctgctgatgctgagggctacctggctcaccctgtgaatgcctacaaactggtgaagcggctaaacacagactggcctgcgctggaggaccttgtcctgcaggactcagctgcaggttttatcgccaacctctctgtgcagcggcagttcttccccactgatgaggacgagataggagctgccaaagccctgatgagacttcaggacacatacaggctggacccaggcacaatttccagaggggaacttccaggaaccaagtaccaggcaatgctgagtgtggatgactgctttgggatgggccgctcggcctacaatgaaggggactattatcatacggtgttgtggatggagcaggtgctaaagcagcttgatgccggggaggaggccaccacaaccaagtcacaggtgctggactacctcagctatgctgtcttccagttgggtgatctgcaccgtgccctggagctcacccgccgcctgctctcccttgacccaagccacgaacgagctggagggaatctgcggtactttgagcagttattggaggaagagagagaaaaaacgttaacaaatcagacagaagctgagctagcaaccccagaaggcatctatgagaggcctgtggactacctgcctgagagggatgtttacgagagcctctgtcgtggggagggtgtcaaactgacaccccgtagacagaagaggcttttctgtaggtaccaccatggcaacagggccccacagctgctcattgcccccttcaaagaggaggacgagtgggacagcccgcacatcgtcaggtactacgatgtcatgtctgatgaggaaatcgagaggatcaaggagatcgcaaaacctaaacttgcacgagccaccgttcgtgatcccaagacaggagtcctcactgtcgccagctaccgggtttccaaaagctcctggctagaggaagatgatgaccctgttgtggcccgagtaaatcgtcggatgcagcatatcacagggttaacagtaaagactgcagaattgttacaggttgcaaattatggagtgggaggacagtatgaaccgcacttcgacttctctaggcgaccttttgacagcggcctcaaaacagaggggaataggttagcgacgtttcttaactacatgagtgatgtagaagctggtggtgccaccgtcttccctgatctgggggctgcaatttggcctaagaagggtacagctgtgttctggtacaacctcttgcggagcggggaaggtgactaccgaacaagacatgctgcctgccctgtgcttgtgggctgcaagtgggtctccaataagtggttccatgaacgaggacaggagttcttgagaccttgtggatcaacagaagttgactgacatccttttctgtccttccccttcctggtccttcagcccatgtcaacgtgacagacacctttgtatgttcctttgtatgttcctatcaggctgatttttggagaaatgaatgtttgtctggagcagagggagaccatactagggcgactcctgtgtgactgaagtcccagcccttccattcagcctgtgccatccctggccccaaggctaggatcaaagtggctgcagcagagttagctgtctagcgcctagcaaggtgcctttgtacctcaggtgttttaggtgtgagatgtttcagtgaaccaaagttctgataccttgtttacatgtttgtttttatggcatttctatctattgtggctttaccaaaaaataaaatgtccctaccagaagcctt

SEQ ID NO: 23850 - DNA, 2569 bp, Homo sapiens
  source 1..2569: mol_type = unassigned DNA
agcgttgtttttccttggcagctgcggagacccgtgataattcgttaactaattcaacaaacgggacccttctgtgtgccagaaaccgcaagcagttgctaacccagtgggacaggcggattggaagagcgggaaggtcctggcccagagcagtgtggtgagcgctgtgctggaagggaatgcgggcagtgggtacttggtagagcactgactgcctccggccagaggacttcccggaggaggtgacccatgagctggagtggtcagaggaaggctggcaaaagggcatcgtggacagaggaacagcctatgtgagtgggagcagagaccttggccaatgccattccttatggccttgtagtggaagcaaggtgatggggaaggaacactgtaggggatagctgtccacggacgctgtctacaagaccctggagtgagataacgtgcctggtactgtgccctgcatgtgtaagatgcccagttgaccttcgcagcaggagcctggatcagggcacttcctgcctcaggtattgctggacagcccagacacttccctctgtgaccatgaaactctgggtgtctgcattgctgatggcctggtttggtgtcctgagctgtgtgcaggccgaattcttcacctctattgggcacatgactgacctgatttatgcagagaaagagctggtgcagtctctgaaagagtacatccttgtggaggaagccaagctttccaagattaagagctgggccaacaaaatggaagccttgactagcaagtcagctgctgatgctgagggctacctggctcaccctgtgaatgcctacaaactggtgaagcggctaaacacagactggcctgcgctggaggaccttgtcctgcaggactcagctgcaggttttatcgccaacctctctgtgcagcggcagttcttccccactgatgaggacgagataggagctgccaaagccctgatgagacttcaggacacatacaggctggacccaggcacaatttccagaggggaacttccaggaaccaagtaccaggcaatgctgagtgtggatgactgctttgggatgggccgctcggcctacaatgaaggggactattatcatacggtgttgtggatggagcaggtgctaaagcagcttgatgccggggaggaggccaccacaaccaagtcacaggtgctggactacctcagctatgctgtcttccagttgggtgatctgcaccgtgccctggagctcacccgccgcctgctctcccttgacccaagccacgaacgagctggagggaatctgcggtactttgagcagttattggaggaagagagagaaaaaacgttaacaaatcagacagaagctgagctagcaaccccagaaggcatctatgagaggcctgtggactacctgcctgagagggatgtttacgagagcctctgtcgtggggagggtgtcaaactgacaccccgtagacagaagaggcttttctgtaggtaccaccatggcaacagggccccacagctgctcattgcccccttcaaagaggaggacgagtgggacagcccgcacatcgtcaggtactacgatgtcatgtctgatgaggaaatcgagaggatcaaggagatcgcaaaacctaaacttgcacgagccaccgttcgtgatcccaagacaggagtcctcactgtcgccagctaccgggtttccaaaagctcctggctagaggaagatgatgaccctgttgtggcccgagtaaatcgtcggatgcagcatatcacagggttaacagtaaagactgcagaattgttacaggttgcaaattatggagtgggaggacagtatgaaccgcacttcgacttctctaggaatgatgagcgagatactttcaagcatttagggacggggaatcgtgtggctactttcttaaactacatgagtgatgtagaagctggtggtgccaccgtcttccctgatctgggggctgcaatttggcctaagaagggtacagctgtgttctggtacaacctcttgcggagcggggaaggtgactaccgaacaagacatgctgcctgccctgtgcttgtgggctgcaagtgggtctccaataagtggttccatgaacgaggacaggagttcttgagaccttgtggatcaacagaagttgactgacatccttttctgtccttccccttcctggtccttcagcccatgtcaacgtgacagacacctttgtatgttcctttgtatgttcctatcaggctgatttttggagaaatgaatgtttgtctggagcagagggagaccatactagggcgactcctgtgtgactgaagtcccagcccttccattcagcctgtgccatccctggccccaaggctaggatcaaagtggctgcagcagagttagctgtctagcgcctagcaaggtgcctttgtacctcaggtgttttaggtgtgagatgtttcagtgaaccaaagttctgataccttgtttacatgtttgtttttatggcatttctatctattgtggctttaccaaaaaataaaatgtccctaccagaagcctt

SEQ ID NO: 23851 - DNA, 568 bp, Homo sapiens
  source 1..568: mol_type = unassigned DNA
gcatttgggttgcagctgggagcttggcagagattctgcctgatgagacacttccctctgtgaccatgaaactctgggtgtctgcattgctgatggcctggtttggtgtcctgagctgtgtgcaggccgaattcttcacctctattgggcacatgactgacctgatttatgcagagaaagagctggtgcagtctctgaaagagtacatccttgtggaggaagccaagctttccaagattaagagctgggccaacaaaatggaagccttgactagcaagtcagctgctgatgctgagggctacctggctcaccctgtgaatgcctacaaactggtgaagcggctaaacacagactggcctgcgctggaggaccttgtcctgcaggactcagctgcaggttttatcgccaacctctctgtgcagcggcagttcttccccactgatgaggacgagataggagctgccaaagccctgatgagacttcaggacacatacaggctggacccaggcacaatttccagaggggaacttccaggaaccaagtaccaggcaatgctgagtgtggatga

SEQ ID NO: 23852 - DNA, 3349 bp, Homo sapiens
  source 1..3349: mol_type = unassigned DNA
aaacgccgggagctgcgagtgtccagctgcggagacccgtgataattcgttaactaattcaacaaacgggacccttctgtgtgccagaaaccgcaagcagttgctaacccagtgggacaggcggattggaagagcgggaaggtcctggcccagagcagtgtggtgagcgctgtgctggaagggaatgcgggcagtgggtacttggtagagcactgactgcctccggccagaggacttcccggaggaggtgacccatgagctggagtggtcagaggaaggctggcaaaagggcatcgtggacagaggaacagcctatgtgagtgggagcagagaccttggccaatgccattccttatggccttgtagtggaagcaaggtgatggggaaggaacactgtaggggatagctgtccacggacgctgtctacaagaccctggagtgagataacgtgcctggtactgtgccctgcatgtgtaagatgcccagttgaccttcgcagcaggagcctggatcagggcacttcctgcctcaggtattgctggacagcccagacacttccctctgtgaccatgaaactctgggtgtctgcattgctgatggcctggtttggtgtcctgagctgtgtgcaggccgaattcttcacctctattgggcacatgactgacctgatttatgcagagaaagagctggtgcagtctctgaaagagtacatccttgtggaggaagccaagctttccaagattaagagctgggccaacaaaatggaagccttgactagcaagtcagctgctgatgctgagggctacctggctcaccctgtgaatgcctacaaactggtgaagcggctaaacacagactggcctgcgctggaggaccttgtcctgcaggactcagctgcaggttttatcgccaacctctctgtgcagcggcagttcttccccactgatgaggacgagataggagctgccaaagccctgatgagacttcaggacacatacaggctggacccaggcacaatttccagaggggaacttccaggaaccaagtaccaggcaatgctgagtgtggatgactgctttgggatgggccgctcggcctacaatgaaggggactattatcatacggtgttgtggatggagcaggtgctaaagcagcttgatgccggggaggaggccaccacaaccaagtcacaggtgctggactacctcagctatgctgtcttccagttgggtgatctgcaccgtgccctggagctcacccgccgcctgctctcccttgacccaagccacgaacgagctggagggaatctgcggtactttgagcagttattggaggaagagagagaaaaaacgttaacaaatcagacagaagctgagctagcaaccccagaaggcatctatgagaggcctgtggactacctgcctgagagggatgtttacgagagcctctgtcgtggggagggtgtcaaactgacaccccgtagacagaagaggcttttctgtaggtaccaccatggcaacagggccccacagctgctcattgcccccttcaaagaggaggacgagtgggacagcccgcacatcgtcaggtactacgatgtcatgtctgatgaggaaatcgagaggatcaaggagatcgcaaaacctaaacttgcacgagccaccgttcgtgatcccaagacaggagtcctcactgtcgccagctaccgggtttccaaaagctcctggctagaggaagatgatgaccctgttgtggcccgagtaaatcgtcggatgcagcatatcacagggttaacagtaaagactgcagaattgttacaggttgcaaattatggagtgggaggacagtatgaaccgcacttcgacttctctaggaatgatgagcgagatactttcaagcatttagggacggggaatcgtgtggctactttcttaaactacatgagtgatgtagaagctggtggtgccaccgtcttccctgatctgggggctgcaatttggcctaagaagggtacagctgtgttctggtacaacctcttgcggagcggggaaggtgactaccgaacaagacatgctgcctgccctgtgcttgtgggctgcaagtgggtctccaataagtggttccatgaacgaggacaggagttcttgagaccttgtggatcaacagaagttgactgacatccttttctgtccttccccttcctggtccttcagcccatgtcaacgtgacagacacctttgtatgttcctttgtatgttcctatcaggctgatttttggagaaatgaatgtttgtctggagcagagggagaccatactagggcgactcctgtgtgactgaagtcccagcccttccattcagcctgtgccatccctggccccaaggctaggatcaaagtggctgcagcagagttagctgtctagcgcctagcaaggtgcctttgtacctcaggtgttttaggtgtgagatgtttcagtgaaccaaagttctgataccttgtttacatgtttgtttttatggcatttctatctattgtggctttaccaaaaaataaaatgtccctaccagaagccttaaagagccttacttggagtatttttaagactggaagcttttaccaggttcatcatttcctatgcatcaccttcatgcaggcagagtctggataatgaatgctttagcagcaaaaaagcatcttgggtcttggatttcagacctggtttcaacacttgtgttccctctaagtgtcagtgtccttttctggaaagtagggtaaatagtttctctttgtctcccagagaacatagcacatgtgttcatgattgtaatgctgttataatgtgtacttcatttttaaattttgagataagaattgttcatgatacacagatgtatacttaaaaaaatatgaaggtgagcaggagcacctgtgtcaacaccaagttagaaaagagaacgttttcaagtcagtacctcaggagccccttgggaacccctcctagatcacatctccttcactgcccccagcactttggagataaatcattgtctcatgatgtgtggtactcattcctttgcttgtctttatagttttaccatctatgattagatccctaaataagtagttattctgttttccctgattttgaacttttactaatagaatgagagtaaatatttttgggtatgtggcttcttttgttcaacattgttttaagattcatccgtgttgcttgtgtagctgtaatttgttttaatctttatagtacattcagttttgttaatgcttattgtaggactgtaccataatacaggcagcatgctgctgataaacactggaattgatttca

SEQ ID NO: 23853 - DNA, 582 bp, Homo sapiens
  source 1..582: mol_type = unassigned DNA
cgtaatgaccaatgtttgacccctagatgccaagatattcatcagcaagatctttaaacaatgcctgtagaatagaaaactcttcataaagatgcttatttaacctctccagtggtcacgagtcttggcaagaaagtctgaagacgggaccagctgcacatgttttaccctaagagcttgctatataaaggatactttctggaaggctggttggtgtgaggattcagtcttgcagccactcgagacatcacttctgttcacacttccctctgtgaccatgaaactctgggtgtctgcattgctgatggcctggtttggtgtcctgagctgtgtgcaggccgaattcttcacctctattgggcacatgactgacctgatttatgcagagaaagagctggtgcagtctctgaaagagtacatccttgtggaggaagccaagctttccaagattaagagctgggccaacaaaatggaagccttgactagcaagtcagctgctgatgctgagggctacctggctcaccctgtgaatgcctacaaactggtgaagcggctaaacacagactggcctgcgctggagga

SEQ ID NO: 23854 - DNA, 1023 bp, Homo sapiens
  source 1..1023: mol_type = unassigned DNA
tccaggtgagcgccccgcccgctcagccgccagatcaaccttagcgctggggcgcgggctggggtcgccaggcggtgcgttctgcccgcgcggggctgagagttaggggccggggccggatccggggccgggggtcgcgccgctagccgccagcagcgcagtccgggccgccaccctgcaccctccgccctgtttctgcacccgtctgggttcttgtgccgccgcccgcaagccttcccgagctcagggtggtgagctgcggagacccgtgataattcgttaactaattcaacaaacgggacccttctgtgtgccagaaaccgcaagcagttgctaacccagtgggacaggcggattggaagagcgggaaggtcctggcccagagcagtgtgacacttccctctgtgaccatgaaactctgggtgtctgcattgctgatggcctggtttggtgtcctgagctgtgtgcaggccgaattcttcacctctattgggcacatgactgacctgatttatgcagagaaagagctggtgcagtctctgaaagagtacatccttgtggaggaagccaagctttccaagattaagagctgggccaacaaaatggaagccttgactagcaagtcagctgctgatgctgagggctacctggctcaccctgtgaatgcctacaaactggtgaagcggctaaacacagactggcctgcgctggaggaccttgtcctgcaggactcagctgcaggttttatcgccaacctctctgtgcagcggcagttcttccccactgatgaggacgagataggagctgccaaagccctgatgagacttcaggacacatacaggctggacccaggcacaatttccagaggggaacttccaggaaccaagtaccaggcaatgctgagtgtggatgactgctttgggatgggccgctcggcctacaatgaaggggactattatcatacggtgttgtggatggagcaggtgctaaagcagcttgatgccggggaggaggccaccacaa

SEQ ID NO: 23855 - DNA, 568 bp, Homo sapiens
  source 1..568: mol_type = unassigned DNA
gacgccgcgggaggttctggaaacgccgggagctgcgagtgtccagctgcggagacccgtgataattcgttaactaattcaacaaacgggacccttctgtgtgccagaaaccgcaagcagttgctaacccagtgggacaggcggattggaagagcgggaaggtcctggcccagagcagtgtgtgattgtcattgaatgcctttcagacacttccctctgtgaccatgaaactctgggtgtctgcattgctgatggcctggtttggtgtcctgagctgtgtgcaggccgaattcttcacctctattgggcacatgactgacctgatttatgcagagaaagagctggtgcagtctctgaaagagtacatccttgtggaggaagccaagctttccaagattaagagctgggccaacaaaatggaagccttgactagcaagtcagctgctgatgctgagggctacctggctcaccctgtgaatgcctacaaactggtgaagcggctaaacacagactggcctgcgctggaggaccttgtcctgcaggactcagctgcaggttttatcgccaa

SEQ ID NO: 23856 - DNA, 751 bp, Homo sapiens
  source 1..751: mol_type = unassigned DNA
tattggctaagcccgttctgcaccctcccaagggctgggagtcctaggtcttgtccgggcagggtccagcttggagcccattagatgggccattggatcagaaagtcttttctcccccagacatccttgtggaaccagcgttgtttttccttggcagctgcggagacccgtgataattcgttaactaattcaacaaacgggacccttctgtgtgccagaaaccgcaagcagttgctaacccagtgggacaggcggattggaagagcgggaaggtcctggcccagagcagtgtgacacttccctctgtgaccatgaaactctgggtgtctgcattgctgatggcctggtttggtgtcctgagctgtgtgcaggccgaattcttcacctctattgggcacatgactgacctgatttatgcagagaaagagctggtgcagtctctgaaagagtacatccttgtggaggaagccaagctttccaagattaagagctgggccaacaaaatggaagccttgactagcaagtcagctgctgatgctgagggctacctggctcaccctgtgaatgcctacaaactggtgaagcggctaaacacagactggcctgcgctggaggaccttgtcctgcaggactcagctgcaggttttatcgccaacctctctgtgcagcggcagttcttccccactgatgaggacgagataggagctgccaaagccctgatgagacttcaggacacatacaggctggaccc

SEQ ID NO: 23857 - DNA, 427 bp, Homo sapiens
  source 1..427: mol_type = unassigned DNA
aggcagggaaatccgtcagcctccagggacgctctccctacagccccggcgaggggatcgggtcgtggcgacctctccagacgcccaggggctgggcaggagggcgggccaaggcccgcagctgcggagacccgtgataattcgttaactaattcaacaaacgggacccttctgtgtgccagaaaccgcaagcagttgctaacccagtgggacaggcggattggaagagcgggaaggtcctggcccagagcagtgtgacacttccctctgtgaccatgaaactctgggtgtctgcattgctgatggcctggtttggtgtcctgagctgtgtgcaggccgaattcttcacctctattgggcacatgactgacctgatttatgcagagaaagagctggtgcagtctctgaaagagtacatccttgtgga

SEQ ID NO: 23858 - DNA, 866 bp, Homo sapiens
  source 1..866: mol_type = unassigned DNA
ctcactgcagcctcgaactcctgggctcaaggggtcctcccacctcagccttctgagtagtttggactataggtgcatgccgccacagctggctattttttttttcatttttattttttctagagagggggtctcgctatgttgcccagtggtcacgagtcttggcaagaaagtctgaagacgggaccagctgcacatgttttaccctaagagcttgctatataaaggatactttctggaaggctggttggtgtgaggattcagtcttgcagccactcgagacatcacttctgttcacacttccctctgtgaccatgaaactctgggtgtctgcattgctgatggcctggtttggtgtcctgagctgtgtgcaggccgaattcttcacctctattgggcacatgactgacctgatttatgcagagaaagagctggtgcagtctctgaaagagtacatccttgtggaggaagccaagctttccaagattaagagctgggccaacaaaatggaagccttgactagcaagtcagctgctgatgctgagggctacctggctcaccctgtgaatgcctacaaactggtgaagcggctaaacacagactggcctgcgctggaggaccttgtcctgcaggactcagctgcaggttttatcgccaacctctctgtgcagcggcagttcttccccactgatgaggacgagataggagctgccaaagccctgatgagacttcaggacacatacaggctggacccaggcacaatttccagaggggaacttccaggaaccaagtaccaggcaatgctgagtgtggatgactgctttgggatgggccgctcggcctacaatgaaggggactattatcat

SEQ ID NO: 23859 - DNA, 819 bp, Homo sapiens
  source 1..819: mol_type = unassigned DNA
gggcgacgccgcgggaggttctggaaacgccgggagctgcgagtgtccagctgcggagacccgtgataattcgttaactaattcaacaaacgggacccttctgtgtgccagaaaccgcaagcagttgctaacccagtgggacaggcggattggaagagcgggaaggtcctggcccagagcagtgtggtgagcgctgtgctggaagggaatgcgggcagtgggtacttggtagagcactgactgcctccggccagaggacttcccggaggaggtgacccatgagctggagtggtcagaggaaggctggcaaaagggcatcgtggacagaggaacagcctatacacttccctctgtgaccatgaaactctgggtgtctgcattgctgatggcctggtttggtgtcctgagctgtgtgcaggccgaattcttcacctctattgggcacatgactgacctgatttatgcagagaaagagctggtgcagtctctgaaagagtacatccttgtggaggaagccaagctttccaagattaagagctgggccaacaaaatggaagccttgactagcaagtcagctgctgatgctgagggctacctggctcaccctgtgaatgcctacaaactggtgaagcggctaaacacagactggcctgcgctggaggaccttgtcctgcaggactcagctgcaggttttatcgccaacctctctgtgcagcggcagttcttccccactgatgaggacgagataggagctgccaaagccctgatgagacttcaggacacatacaggctggacccaggcacaatttccagagggga

SEQ ID NO: 23860 - DNA, 2274 bp, Homo sapiens
  source 1..2274: mol_type = unassigned DNA
gccgcgcggccaggactgtctgaggggaagttcgcgagcgctggctatgggtcctggggcgcggctggcggcgctgctggcggtgctggcgctcgggacaggagacccagaaagggctgcggctcggggcgacacgttctcggcgctgaccagcgtggcgcgcgccctggcgcccgagcgccggctgctggggctgctgaggcggtacctgcgcggggaggaggcgcggctgcgggacctgactagattctacgacaaggtactttctttgcatgaggattcaacaacccctgtggctaaccctctgcttgcatttactctcatcaaacgcctgcagtctgactggaggaatgtggtacatagtctggaggccagtgagaacatccgagctctgaaggatggctatgagaaggtggagcaagaccttccagcctttgaggaccttgagggagcagcaagggccctgatgcggctgcaggacgtgtacatgctcaatgtgaaaggcctggcccgaggtgtctttcagagagtcactggctctgccatcactgacctgtacagccccaaacggctcttttctctcacaggggatgactgcttccaagttggcaaggtggcctatgacatgggggattattaccatgccattccatggctggaggaggctgtcagtctcttccgaggatcttacggagagtggaagacagaggatgaggcaagtctagaagatgccttggatcacttggcctttgcttatttccgggcaggaaatgtttcgtgtgccctcagcctctctcgggagtttcttctctacagcccagataataagaggatggccaggaatgtcttgaaatatgaaaggctcttggcagagagccccaaccacgtggtagctgaggctgtcatccagaggcccaatataccccacctgcagaccagagacacctacgaggggctatgtcagaccctgggttcccagcccactctctaccagatccctagcctctactgttcctatgagaccaattccaacgcctacctgctgctccagcccatccggaaggaggtcatccacctggagccctacattgctctctaccatgacttcgtcagtgactcagaggctcagaaaattagagaacttgcagaaccatggctacagaggtcagtggtggcatcaggggagaagcagttacaagtggagtaccgcatcagcaaaagtgcctggctgaaggacactgttgacccaaaactggtgaccctcaaccaccgcattgctgccctcacaggccttgatgtccggcctccctatgcagagtatctgcaggtggtgaactatggcatcggaggacactatgagcctcactttgaccatgctacgtcaccaagcagccccctctacagaatgaagtcaggaaaccgagttgcaacatttatgatctatctgagctcggtggaagctggaggagccacagccttcatctatgccaacctcagcgtgcctgtggttaggaatgcagcactgttttggtggaacctgcacaggagtggtgaaggggacagtgacacacttcatgctggctgtcctgtcctggtgggagataagtgggtggccaacaagtggatacatgagtatggacaggaattccgcagaccctgcagctccagccctgaagactgaactgttggcagagagaagctggtggagtcctgtggctttccagagaagccaggagccaaaagctggggtaggagaggagaaagcagagcagcctcctggaagaaggccttgtcagctttgtctgtgcctcgcaaatcagaggcaagggagaggttgttaccaggggacactgagaatgtacatttgatctgccccagccacggaagtcagagtaggatgcacagtacaaaggaggggggagtggaggcctgagagggaagtttctggagttcagatactctctgttgggaacaggacatctcaacagtctcaggttcgatcagtgggtcttttggcactttgaaccttgaccacagggaccaagaagtggcaatgaggacacctgcaggaggggctagcctgactcccagaactttaagactttctccccactgccttctgctgcagcccaagcagggagtgtccccctcccagaagcatatcccagatgagtggtacattatataaggattttttttaagttgaaaacaactttcttttctttttgtatgatggttttttaacacagtcattaaaaatgtttataaatcatt

SEQ ID NO: 23861 - DNA, 2248 bp, Homo sapiens
  source 1..2248: mol_type = unassigned DNA
gtctgaggggaagttcgcgagcgctggctatgggtcctggggcgcggctggcggcgctgctggcggtgctggcgctcgggacaggagacccagaaagggctgcggctcggggcgacacgttctcggcgctgaccagcgtggcgcgcgccctggcgcccgagcgccggctgctggggctgctgaggcggtacctgcgcggggaggaggcgcggctgcgggacctgactagattctacgacaaggtactttctttgcatgaggattcaacaacccctgtggctaaccctctgcttgcatttactctcatcaaacgcctgcagtctgactggaggaatgtggtacatagtctggaggccagtgagaacatccgagctctgaaggatggctatgagaaggtggagcaagaccttccagcctttgaggaccttgagggagcagcaagggccctgatgcggctgcaggacgtgtacatgctcaatgtgaaaggcctggcccgaggtgtctttcagagagtcactggctctgccatcactgacctgtacagccccaaacggctcttttctctcacaggggatgactgcttccaagttggcaaggtggcctatgacatgggggattattaccatgccattccatggctggaggaggctgtcagtctcttccgaggatcttacggagagtggaagacagaggatgaggcaagtctagaagatgccttggatcacttggcctttgcttatttccgggcaggaaatgtttcgtgtgccctcagcctctctcgggagtttcttctctacagcccagataataagaggatggccaggaatgtcttgaaatatgaaaggctcttggcagagagccccaaccacgtggtagctgaggctgtcatccagaggcccaatataccccacctgcagaccagagacacctacgaggggctatgtcagaccctgggttcccagcccactctctaccagatccctagcctctactgttcctatgagaccaattccaacgcctacctgctgctccagcccatccggaaggaggtcatccacctggagccctacattgctctctaccatgacttcgtcagtgactcagaggctcagaaaattagagaacttgcagaaccatggctacagaggtcagtggtggcatcaggggagaagcagttacaagtggagtaccgcatcagcaaaagtgcctggctgaaggacactgttgacccaaaactggtgaccctcaaccaccgcattgctgccctcacaggccttgatgtccggcctccctatgcagagtatctgcaggtggtgaactatggcatcggaggacactatgagcctcactttgaccatgctacgtcaccaagcagccccctctacagaatgaagtcaggaaaccgagttgcaacatttatgatctatctgagctcggtggaagctggaggagccacagccttcatctatgccaacctcagcgtgcctgtggttaggcactgttttggtggaacctgcacaggagtggtgaaggggacagtgacacacttcatgctggctgtcctgtcctggtgggagataagtgggtggccaacaagtggatacatgagtatggacaggaattccgcagaccctgcagctccagccctgaagactgaactgttggcagagagaagctggtggagtcctgtggctttccagagaagccaggagccaaaagctggggtaggagaggagaaagcagagcagcctcctggaagaaggccttgtcagctttgtctgtgcctcgcaaatcagaggcaagggagaggttgttaccaggggacactgagaatgtacatttgatctgccccagccacggaagtcagagtaggatgcacagtacaaaggaggggggagtggaggcctgagagggaagtttctggagttcagatactctctgttgggaacaggacatctcaacagtctcaggttcgatcagtgggtcttttggcactttgaaccttgaccacagggaccaagaagtggcaatgaggacacctgcaggaggggctagcctgactcccagaactttaagactttctccccactgccttctgctgcagcccaagcagggagtgtccccctcccagaagcatatcccagatgagtggtacattatataaggattttttttaagttgaaaacaactttcttttctttttgtatgatggttttttaacacagtcattaaaaatgtttataaatca

SEQ ID NO: 23862 - DNA, 2576 bp, Homo sapiens
  source 1..2576: mol_type = unassigned DNA
cgagcctcgaagtccgccggccaatcgaaggcgggccccagcggcgcgtgcgcgccgcggccagcgcgcgcgggcgggggggcaggcgcgccccggacccaggatttataaaggcgaggccgggaccggcgcgcgctctcgtcgcccccgctgtcccggcggcgccaaccgaagcgccccgcctgatccgtgtccgacatgctgcgccgcgctctgctgtgcctggccgtggccgccctggtgcgcgccgacgcccccgaggaggaggaccacgtcctggtgctgcggaaaagcaacttcgcggaggcgctggcggcccacaagtacctgctggtggagttctatgccccttggtgtggccactgcaaggctctggcccctgagtatgccaaagccgctgggaagctgaaggcagaaggttccgagatcaggttggccaaggtggacgccacggaggagtctgacctggcccagcagtacggcgtgcgcggctatcccaccatcaagttcttcaggaatggagacacggcttcccccaaggaatatacagctggcagagaggctgatgacatcgtgaactggctgaagaagcgcacgggcccggctgccaccaccctgcctgacggcgcagctgcagagtccttggtggagtccagcgaggtggctgtcatcggcttcttcaaggacgtggagtcggactctgccaagcagtttttgcaggcagcagaggccatcgatgacataccatttgggatcacttccaacagtgacgtgttctccaaataccagctcgacaaagatggggttgtcctctttaagaagtttgatgaaggccggaacaactttgaaggggaggtcaccaaggagaacctgctggactttatcaaacacaaccagctgccccttgtcatcgagttcaccgagcagacagccccgaagatttttggaggtgaaatcaagactcacatcctgctgttcttgcccaagagtgtgtctgactatgacggcaaactgagcaacttcaaaacagcagccgagagcttcaagggcaagatcctgttcatcttcatcgacagcgaccacaccgacaaccagcgcatcctcgagttctttggcctgaagaaggaagagtgcccggccgtgcgcctcatcaccctggaggaggagatgaccaagtacaagcccgaatcggaggagctgacggcagagaggatcacagagttctgccaccgcttcctggagggcaaaatcaagccccacctgatgagccaggagctgccggaggactgggacaagcagcctgtcaaggtgcttgttgggaagaactttgaagacgtggcttttgatgagaaaaaaaacgtctttgtggagttctatgccccatggtgtggtcactgcaaacagttggctcccatttgggataaactgggagagacgtacaaggaccatgagaacatcgtcatcgccaagatggactcgactgccaacgaggtggaggccgtcaaagtgcacagcttccccacactcaagttctttcctgccagtgccgacaggacggtcattgattacaacggggaacgcacgctggatggttttaagaaattcctggagagcggtggccaggatggggcaggggatgatgacgatctcgaggacctggaagaagcagaggagccagacatggaggaagacgatgatcagaaagctgtgaaagatgaactgtaatacgcaaagccagacccgggcgctgccgagacccctcgggggctgcacacccagcagcagcgcacgcctccgaagcctgcggcctcgcttgaaggagggcgtcgccggaaacccagggaacctctctgaagtgacacctcacccctacacaccgtccgttcacccccgtctcttccttctgcttttcggtttttggaaagggatccatctccaggcagcccaccctggtggggcttgtttcctgaaaccatgatgtactttttcatacatgagtctgtccagagtgcttgctaccgtgttcggagtctcgctgcctccctcccgcgggaggtttctcctctttttgaaaattccgtctgtgggatttttagacatttttcgacatcagggtatttgttccaccttggccaggcctcctcggagaagcttgtcccccgtgtgggagggacggagccggactggacatggtcactcagtaccgcctgcagtgtcgccatgactgatcatggctcttgcatttttgggtaaatggagacttccggatcctgtcagggtgtcccccatgcctggaagaggagctggtggctgccagccctggggcccggcacaggcctgggccttccccttccctcaagccagggctcctcctcctgtcgtgggctcattgtgaccactggcctctctacagcacggcctgtggcctgttcaaggcagaaccacgacccttgactcccgggtggggaggtggccaaggatgctggagctgaatcagacgctgacagttcttcaggcatttctatttcacaatcgaattgaacacattggccaaataaagttgaaattttaccacc

SEQ ID NO: 23863 - DNA, 2022 bp, Homo sapiens
  source 1..2022: mol_type = unassigned DNA
cgctctcgtcgcccccgctgtcccggcggcgccaaccgaagcgccccgcctgatccgtgtccgacatgctgcgccgcgctctgctgtgcctggccgtggccgccctggtgcgcgccgacgcccccgaggaggaggaccacaagtacctgctggtggagttctatgccccttggtgtggccactgcaaggctctggcccctgagtatgccaaagccgctgggaagctgaaggcagaaggttccgagatcaggttggccaaggtggacgccacggaggagtctgacctggcccagcagtacggcgtgcgcggctatcccaccatcaagttcttcaggaatggagacacggcttcccccaaggaatatacagctggcagagaggctgatgacatcgtgaactggctgaagaagcgcacgggcccggctgccaccaccctgcctgacggcgcagctgcagagtccttggtggagtccagcgaggtggctgtcatcggcttcttcaaggacgtggagtcggactctgccaagcagtttttgcaggcagcagaggccatcgatgacataccatttgggatcacttccaacagtgacgtgttctccaaataccagctcgacaaagatggggttgtcctctttaagaagtttgatgaaggccggaacaactttgaaggggaggtcaccaaggagaacctgctggactttatcaaacacaaccagctgccccttgtcatcgagttcaccgagcagacagccccgaagatttttggaggtgaaatcaagactcacatcctgctgttcttgcccaagagtgtgtctgactatgacggcaaactgagcaacttcaaaacagcagccgagagcttcaagggcaagatcctgttcatcttcatcgacagcgaccacaccgacaaccagcgcatcctcgagttctttggcctgaagaaggaagagtgcccggccgtgcgcctcatcaccctggaggaggagatgaccaagtacaagcccgaatcggaggagctgacggcagagaggatcacagagttctgccaccgcttcctggagggcaaaatcaagccccacctgatgagccaggagctgccggaggactgggacaagcagcctgtcaaggtgcttgttgggaagaactttgaagacgtggcttttgatgagaaaaaaaacgtctttgtggagttctatgccccatggtgtggtcactgcaaacagttggctcccatttgggataaactgggagagacgtacaaggaccatgagaacatcgtcatcgccaagatggactcgactgccaacgaggtggaggccgtcaaagtgcacagcttccccacactcaagttctttcctgccagtgccgacaggacggtcattgattacaacggggaacgcacgctggatggttttaagaaattcctggagagcggtggccaggatggggcaggggatgatgacgatctcgaggacctggaagaagcagaggagccagacatggaggaagacgatgatcagaaagctgtgaaagatgaactgtaatacgcaaagccagacccgggcgctgccgagacccctcgggggctgcacacccagcagcagcgcacgcctccgaagcctgcggcctcgcttgaaggagggcgtcgccggaaacccagggaacctctctgaagtgacacctcacccctacacaccgtccgttcacccccgtctcttccttctgcttttcggtttttggaaagggatccatctccaggcagcccaccctggtggggcttgtttcctgaaaccatgatgtactttttcatacatgagtctgtccagagtgcttgctaccgtgttcggagtctcgctgcctccctcccgcgggaggtttctcctctttttgaaaattccgtctgtgggatttttagacatttttcgacatcagggtatttgttccaccttggccaggcctcctcggagaagcttgtcccccgtgtgggagggacggagccggactggacatggtcactcagta

SEQ ID NO: 23864 - DNA, 1737 bp, Homo sapiens
  source 1..1737: mol_type = unassigned DNA
tttataaaggcgaggccgggaccggcgcgcgctctcgtcgcccccgctgtcccggcggcgccaaccgaagcgccccgcctgatccgtgtccgacatgctgcgccgcgctctgctgtgcctggccgtggccgccctggtgcgcgccgacgcccccgaggaggaggaccacgtcctggtgctgcggaaaagcaacttcgcggaggcgctggcggcccacaagtacctgctggtggagttctatgccccttggtgtggccactgcaaggctctggcccctgagtatgccaaagccgctgggaagctgaaggcagaaggttccgagatcaggttggccaaggtggacgccacggaggagtctgacctggcccagcagtacggcgtgcgcggctatcccaccatcaagttcttcaggaatggagacacggcttcccccaaggaatatacagctggcagagaggctgatgacataccatttgggatcacttccaacagtgacgtgttctccaaataccagctcgacaaagatggggttgtcctctttaagaagtttgatgaaggccggaacaactttgaaggggaggtcaccaaggagaacctgctggactttatcaaacacaaccagctgccccttgtcatcgagttcaccgagcagacagccccgaagatttttggaggtgaaatcaagactcacatcctgctgttcttgcccaagagtgtgtctgactatgacggcaaactgagcaacttcaaaacagcagccgagagcttcaagggcaagatcctgttcatcttcatcgacagcgaccacaccgacaaccagcgcatcctcgagttctttggcctgaagaaggaagagtgcccggccgtgcgcctcatcaccctggaggaggagatgaccaagtacaagcccgaatcggaggagctgacggcagagaggatcacagagttctgccaccgcttcctggagggcaaaatcaagccccacctgatgagccaggagctgccggaggactgggacaagcagcctgtcaaggtgcttgttgggaagaactttgaagacgtggcttttgatgagaaaaaaaacgtctttgtggagttctatgccccatggtgtggtcactgcaaacagttggctcccatttgggataaactgggagagacgtacaaggaccatgagaacatcgtcatcgccaagatggactcgactgccaacgaggtggaggccgtcaaagtgcacagcttccccacactcaagttctttcctgccagtgccgacaggacggtcattgattacaacggggaacgcacgctggatggttttaagaaattcctggagagcggtggccaggatggggcaggggatgatgacgatctcgaggacctggaagaagcagaggagccagacatggaggaagacgatgatcagaaagctgtgaaagatgaactgtaatacgcaaagccagacccgggcgctgccgagacccctcgggggctgcacacccagcagcagcgcacgcctccgaagcctgcggcctcgctttttgaaaattccgtctgtgggatttttagacatttttcgacatcagggtatttgttccaccttggccaggcctcctcggagaagcttgtcccccgtgtgggagggacggagccggactggacatggtcactcagtaccgcctgcagtgtcgccatgactgatcatggctcttgcatttttgggtaaatggagacttc

SEQ ID NO: 23865 - DNA, 2905 bp, Homo sapiens
  source 1..2905: mol_type = unassigned DNA
ctgctttctgcacgtcctcgccgccgcgccgccagtccgtttgtgctagctctggccgtgagccggccgcccgctgccgccggccgccccgcagctgcctgcgccccagccgcgcctcgcggccagcccggctagctcaggtccgctcccggagcccgcgcccctccacgctgccccctgcctgtccccggccatgctgtcccttcagtaccccgacgtgtaccgcgacgagaccgccgtacaggattatcatggtcataaaatttgtgacccttacgcctggcttgaagaccccgacagtgaacagactaaggcctttgtggaggcccagaataagattactgtgccatttcttgagcagtgtcccatcagaggtttatacaaagagagaatgactgaactatatgattatcccaagtatagttgccacttcaagaaaggaaaacggtatttttatttttacaatacaggtttgcagaaccagcgagtattatatgtacaggattccttagagggtgaggccagagtgttcctggaccccaacatactgtctgacgatggcacagtggcactccgaggttatgcgttcagcgaagatggtgaatattttgcctatggtctgagtgccagtggctcagactgggtgacaatcaagttcatgaaagttgatggtgccaaagagcttccagatgtgcttgaaagagtcaagttcagctgtatggcctggacccatgatgggaagggaatgttctacaactcataccctcaacaggatggaaaaagtgatggcacagagacatctaccaatctccaccaaaagctctactaccatgtcttgggaaccgatcagtcagaagatattttgtgtgctgagtttcctgatgaacctaaatggatgggtggagctgagttatctgatgatggccgctatgtcttgttatcaataagggaaggatgtgatccagtaaaccgactctggtactgtgacctacagcaggaatccagtggcatcgcgggaatcctgaagtgggtaaaactgattgacaactttgaaggggaatatgactacgtgaccaatgaggggacggtgttcacattcaagacgaatcgccagtctcccaactatcgcgtgatcaacattgacttcagggatcctgaagagtctaagtggaaagtacttgttcctgagcatgagaaagatgtcttagaatggatagcttgtgtcaggtccaacttcttggtcttatgctacctccatgacgtcaagaacattctgcagctccatgacctgactactggtgctctccttaagaccttcccgctcgatgtcggcagcattgtagggtacagcggtcagaagaaggacactgaaatcttctatcagtttacttcctttttatctccaggtatcatttatcactgtgatcttaccaaagaggagctggagccaagagttttccgagaggtgaccgtaaaaggaattgatgcttctgattaccagacagtccagattttctaccctagcaaggatggtacgaagattccaatgttcattgtgcataaaaaaggcataaaattggatggctctcatccagctttcttatatggctatggcggcttcaacatatccatcacacccaactacagtgtttccaggcttatttttgtgagacacatgggtggtatcctggcagtggccaacatcagaggaggtggcgaatatggagagacgtggcataaaggtggtatcttggccaacaaacaaaactgctttgatgactttcagtgtgctgctgagtatctgatcaaggaaggttacacatctcccaagaggctgactattaatggaggttcaaatggaggcctcttagtggctgcttgtgcaaatcagagacctgacctctttggttgtgttattgcccaagttggagtaatggacatgctgaagtttcataaatataccatcggccatgcttggaccactgattatgggtgctcggacagcaaacaacactttgaatggcttgtcaaatactctccattgcataatgtgaagttaccagaagcagatgacatccagtacccgtccatgctgctcctcactgctgaccatgatgaccgcgtggtcccgcttcactccctgaagttcattgccacccttcagtacatcgtgggccgcagcaggaagcaaagcaaccccctgcttatccacgtggacaccaaggcgggccacggggcggggaagcccacagccaaagtgatagaggaagtctcagacatgtttgcgttcatcgcgcggtgcctgaacgtcgactggattccataaacagttttcgtgcttcctcctgacagcgacagaaaacctcaagggctttcccacgttgacaccaagaaaccactgggcataatgcttccccacgggaacattattcctgcactcacaggctacagttgaacagaactgccgtgggaattttatcttttttaggcttctcctttttagcaaggccttggtgtttctttttccaccctgtctaggcacatgtggttttttggtgttttttttaagggcatgttgggataaatagctaaatggcaacaaacacattgtgaatattagattgctgaattaaggatcatagtcgggcatacttatctatatccataacctctatatctttaaataaatgtgagaactgttctcatggagaagacttctttgcaacaataataaatgttatttaagaatgacaggcttttacttccggtttcttcatattgaggggcaactccagaagtggagttttctgtgagaataaagcatttcacctttctgcaacaagttagttttcaagcagttaagtcatagaatgtttgttagctttgaaaataagttgttcatcca

SEQ ID NO: 23866 - DNA, 961 bp, Homo sapiens
  source 1..961: mol_type = unassigned DNA
gtatcatttatcactgtgatcttaccaaagaggagctggagccaagagttttccgagaggtgaccgtaaaaggaattgatgcttctgattaccagacagtccagctccccaagggtactgagtcttccagaaactgaatcactggttgattgatgatgacgaagaatgtctctgttcctttgcaatgagaggtcaccaatagggcaccaggtgtttatcaaggcccctcccacctggagggctggaccacacaggccacagattaggaatcagaacattgtttgtgaaggaagatgagaataaagagcgctggatgttccccacaatgtttctgtgaaactagggcattattatagcttggtgaattacccttcaattgtctagaaatggtctagatgataggctacatctagatcatgaataaagctttgtttactaaaacaggtggtgggctggatttggtgtagagctatgatttatcagcccctgttctacatcagcagttggcaaactggcctcctgttttattggagaacacatgcccatttgtttacatattgcctgtggttgctttggcacttagagtggttgcaacagaaactctatgtcccagaaggcctgaaatatttaatatatggcctttaagaaaaagtttgcagaatcttcatctatgtaaatagcatttaaaagtacaacattcttgatagacatacagggccgagaagacatacagggtcaagaagctctgtcagacaggcctgaaatccacgtggggcaagtcatttaacctttctgccacagttttttcaactgtaaagtagagattgatagtatctgttttttaggattcctgtgggattattaagagataaggtatattcaagatctggcaatagaatataatctatttttttcaatcaacgttagaaataaatgtaacagacttttagtttcctattta

SEQ ID NO: 23867 - DNA, 332 bp, Homo sapiens
  source 1..332: mol_type = unassigned DNA
ggatagcttgtgtcaggtccaacttcttggtcttatgctacctccatgacgtcaagaacattctgcagctccatgacctgactactggtgctctccttaagaccttcccgctcgatgtcggcagcattgtagggtacagcggtcagaagaaggacactgaaatcttctatcagtttacttcctttttatctccaggtatcatttatcactgtgatcttaccaaagaggagctggagccaagagttttccgagaggtgaccgtaaaaggaattgatgcttctgattaccagacagtccagctccccaagggtactgagtcttccagaaactga

SEQ ID NO: 23868 - DNA, 3672 bp, Homo sapiens
  source 1..3672: mol_type = unassigned DNA
gaagaaactgaggcccggagacacagttaagtgtaggagctaagacctcaacccaggtctctctgactcttaactacttattagcaatcaaggttaataaaagctacctcctgacaaaccagagatggccttacattttatttgtgcatcttgcaggggttttttgttgtttttaattaaagcgctaaatacctttttaacattaaaaatccgaagttgagtatgtccagtatttggaaccgaaccaaattggattttttgctatacagcttactgtacaagtgacctggaacagttgcttagaacctcccacagccacagtttggcaacctgtaaaatgtgcatggtaatatctactttattaagtccatataaaatttaaattagacaaacaagataaaagcacctggcagttagttaacactcaacaataattaatcttccctcccccacctttattaaataattaggcttttccagtttatcttccacatatataccaaagatacgttcataattatgtaagaccaaagggctttttaccttttacagccctgagttcctgagataccccattaagtctgtgtacttatttgcaaatttatattttgtttcttgttttgttttttgttttagtttaacccctatgtgtgccagagtcagtgctgcatagtttgagcctgataggattaactttacaaatgagacatttaagtcacatctgccaagaattatgatttgaatgaaactttaacttacacaggtttttagatttagttagcctaagttatcagctgtctgaagttattcataacctaagtggggcatggccctgaaaaggagggatgagaactgctgatcttagttactctgagaacccactactctgtaatcatacctataaaatcattcgtgtgctggcagccccaaaaggagcataaaccagggactttgatatcatgcagcagaagaccaaattatttctccaagctttgaagtatagtattcctcaccttggaaaatgcatgcagaaacagcatttgaatcactataacttcgctgatcattgttacaatagaataaaattgaaaaaatatcacctaaccaagtgtcttcagaataaacccaagatatcagagttagcaagaaacatcccaagtcggagcttctcatgtaaggatcttcagcctgttaaacaagaaaacgaaaaaccccttccagaaaacatggatgcatttgaaaaagtgagaacaaaattagaaacacagccacaagaagaatatgaaatcatcaatgtggaagttaaacatggtggttttgtttattaccaagaaggttgttgcttggttcgttccaaagatgaagaagcagacaatgataattatgaagttttattcaatttggaggaacttaagttagaccagcccttcattgattgtatcagagttgctccagatgaaaaatatgtggctgccaagataagaactgaagattctgaagcatctacctgtgtaattataaagctcagcgatcagcccgtaatggaagcttctttcccgaatgtgtccagttttgaatgggtaaaggacgaggaagatgaagatgttttattctacaccttccagaggaaccttcgctgtcatgacgtatatcgagccacttttggtgataacaaacgtaatgaacgcttttacacagaaaaagacccaagctactttgttttcctttatcttacaaaagacagtcgtttcctcaccataaatattatgaacaagactacttctgaagtgtggttgatagatggcctgagcccttgggacccaccagtacttatccagaagcgaatacatggggtcctttactatgttgaacacagagatgatgaattatacattctcactaatgttggagaacctacagaatttaagctaatgagaacagcggctgatacccctgcaattatgaattgggatttattttttacaatgaagagaaatacaaaagtgatagacttggacatgtttaaggatcactgtgttctatttctgaagcacagcaatctcctttatgttaatgtgattggtctggctgatgattcagttcggtctctaaagctccctccttgggcctgtggattcataatggatacaaattctgacccaaagaactgcccctttcaactttgctctccaatacgtcccccaaaatattacacatacaagtttgcagaaggcaaactgtttgaggaaactgggcatgaagacccaatcacaaagactagtcgcgttttacgtctagaagccaaaagcaaggatggaaaattagtgccaatgactgttttccacaaaactgactctgaggacttgcagaagaaacctctcttggtacatgtatatggagcttatggaatggatttgaaaatgaatttcaggcctgagaggcgggtcctggtggatgatggatggatattagcatactgccatgttcgaggtggtggtgagttaggcctccagtggcacgctgatggccgcctaactaaaaaactcaatggccttgctgatttagaggcttgcattaagacgcttcatggccaaggcttttctcagccaagtctaacaaccctgactgctttcagtgctggaggggtgcttgcaggagcattgtgtaattctaatccagagctggtgagagcggtgactttggaggcacctttcttggatgttctcaacaccatgatggacactacacttcctctgacattagaagaattagaagaatgggggaatccttcatctgatgaaaaacacaagaactacataaaacgttactgtccctatcaaaatattaaacctcagcattatccttcaattcacataacggcatatgaaaacgatgaacgggtacctctgaaaggaattgtaagttatactgagaaactcaaggaagccatcgcggagcatgctaaggacacaggtgaaggctatcagacccctaatattattctagatattcagcctggaggcaatcatgtaattgaggattctcacaaaaagattacagcccaaattaaattcctgtacgaggaacttggacttgacagcaccagtgttttcgaggatcttaagaaatacctgaaattctgaaacactgcattcaactgggaattggaaacacactgaaatatttcatagtcttacttccaattgagttagcaaaaaaaaaattaataacttgagacttttaagttattaattttttaaaatgtgcttctccatctaaattttgcttagtctacatctcacttgcttatactattctctccattgatgcacatgcccattaacctaggaaagtaattttcaaatcatgctccttagaaggatgtggagtagagggaagggaaggattggtgatagcagagctccaggcctcccttccagtcagaacagttgagcagtttacaaattagtgtcctgcctctttgctagcaaatgcttttagacactgtggcagtgagtcatcctctaatttctatgactgcattttaagggaaaagataaaattcttccccttaaaattcgttaaagtttttgaataatctggggtcctaatgtgttctggtcatccctgattgatgctatctgaataaagttataagctcctataagccat

SEQ ID NO: 23869 - DNA, 2315 bp, Homo sapiens
  source 1..2315: mol_type = unassigned DNA
cccaaaaggagcataaaccagggactttgatatcatgcagcagaagaccaaattatttctccaagctttgaagtatagtattcctcaccttggaaaatgcatgcagaaacagcatttgaatcactataacttcgctgatcattgttacaatagaataaaattgaaaaaatatcacctaaccaagtgtcttcagaataaacccaagatatcagagttagcaagaaacatcccaagtcggagcttctcatgtaaggatcttcagcctgttaaacaagaaaacgaaaaaccccttccagaaaacatggatgcatttgaaaaagtgagaacaaaattagaaacacagccacaagaagaatatgaaatcatcaatgtggaagttaaacatggtggttttgtttattaccaagaaggttgttgcttggttcgttccaaagatgaagaagcagacaatgataattatgaagttttattcaatttggaggaacttaagttagaccagcccttcattgattgtatcagagttgctccagatgaaaaatatgtggctgccaagataagaactgaagattctgaagcatctacctgtgtaattataaagctcagcgatcagcccgtaatggaagcttctttcccgaatgtgtccagttttgaatgggtaaaggacgaggaagatgaagatgttttattctacaccttccagaggaaccttcgctgtcatgacgtatatcgagccacttttggtgataacaaacgtaatgaacgcttttacacagaaaaagacccaagctactttgttttcctttatcttacaaaagacagtcgtttcctcaccataaatattatgaacaagactacttctgaagtgtggttgatagatggcctgagcccttgggacccaccagtacttatccagaagcgaatacatggggtcctttactatgttgaacacagagatgatgaattatacattctcactaatgttggagaacctacagaatttaagctccctccttgggcctgtggattcataatggatacaaattctgacccaaagaactgcccctttcaactttgctctccaatacgtcccccaaaatattacacatacaagtttgcagaaggcaaactgtttgaggaaactgggcatgaagacccaatcacaaagactagtcgcgttttacgtctagaagccaaaagcaaggatggaaaattagtgccaatgactgttttccacaaaactgactctgaggacttgcagaagaaacctctcttggtacatgtatatggagcttatggaatggatttgaaaatgaatttcaggcctgagaggcgggtcctggtggatgatggatggatattagcatactgccatgttcgaggtggtggtgagttaggcctccagtggcacgctgatggccgcctaactaaaaaactcaatggccttgctgatttagaggcttgcattaagacgcttcatggccaaggcttttctcagccaagtctaacaaccctgactgctttcagtgctggaggggtgcttgcaggagcattgtgtaattctaatccagagctggtgagagcggtgactttggaggcacctttcttggatgttctcaacaccatgatggacactacacttcctctgacattagaagaattagaagaatgggggaatccttcatctgatgaaaaacacaagaactacataaaacgttactgtccctatcaaaatattaaacctcagcattatccttcaattcacataacggcatatgaaaacgatgaacgggtacctctgaaaggaattgtaagttatactgagaaactcaaggaagccatcgcggagcatgctaaggacacaggtgaaggctatcagacccctaatattattctagatattcagcctggaggcaatcatgtaattgaggattctcacaaaaagattacagcccaaattaaattcctgtacgaggaacttggacttgacagcaccagtgttttcgaggatcttaagaaatacctgaaattctgaaacactgcattcaactgggaattggaaacacactgaaatatttcatagtcttacttccaattgagttagcaaaaaaaaaattaataacttgagacttttaagttattaattttttaaaatgtgcttctccatctaaattttgcttagtctacatctcacttgcttatactattctctccattgatgcacatgcccattaacctaggaaagtaattttcaaatcatgctccttagaaggatgtggagtagagggaagggaaggattggtgatagcagagctcca

SEQ ID NO: 23870 - DNA, 2308 bp, Homo sapiens
  source 1..2308: mol_type = unassigned DNA
cccaaaaggagcataaaccagggactttgatatcatgcagcagaagaccaaattatttctccaagctttgaagtatagtattcctcaccttggaaaatgcatgcagaaacagcatttgaatcactataacttcgctgatcattgttacaatagaataaaattgaaaaaatatcacctaaccaagtgtcttcagaataaacccaagatatcagagttagcaagaaacatcccaagtcggagcttctcatgtaaggatcttcagcctgttaaacaagaaaacgaaaaaccccttccagaaaacatggatgcatttgaaaaagtgagaacaaaattagaaacacagccacaagaagaatatgaaatcatcaatgtggaagttaaacatggtggttttgtttattaccaagaaggttgttgcttggttcgttccaaagatgaagaagcagacaatgataattatgaagttttattcaatttggaggaacttaagttagaccagcccttcattgattgtatcagagttgctccagatgaaaaatatgtggctgccaagataagaactgaagattctgaagcatctacctgtgtaattataaagctcagcgatcagcccgtaatggaagcttctttcccgaatgtgtccagttttgaatgggtaaaggacgaggaagatgaagatgttttattctacaccttccagaggaaccttcgctgtcatgacgtatatcgagccacttttggtgataacaaacgtaatgaacgcttttacacagaaaaagacccaagctactttgttttcctttatcttacaaaagacagtcgtttcctcaccataaatattatgaacaagactacttctgaagtgtggttgatagatggcctgagcccttgggacccaccagtacttatccagaagcgaatacatggggtcctttactatgttgaacacagagatgatgaattatacattctcactaatgttggagaacctacagaatttaagctaatgagaacagcggctgatacccctgcaattatgaattgggatttattttttacaatgaagagaaatacaaaagtgatagacttggacatgtttaaggatcactgtgttctatttctgaagcacagcaatctcctttatgttaatgtgattggtctggctgatgattcagttcggtctctaaaggatggaaaattagtgccaatgactgttttccacaaaactgactctgaggacttgcagaagaaacctctcttggtacatgtatatggagcttatggaatggatttgaaaatgaatttcaggcctgagaggcgggtcctggtggatgatggatggatattagcatactgccatgttcgaggtggtggtgagttaggcctccagtggcacgctgatggccgcctaactaaaaaactcaatggccttgctgatttagaggcttgcattaagacgcttcatggccaaggcttttctcagccaagtctaacaaccctgactgctttcagtgctggaggggtgcttgcaggagcattgtgtaattctaatccagagctggtgagagcggtgactttggaggcacctttcttggatgttctcaacaccatgatggacactacacttcctctgacattagaagaattagaagaatgggggaatccttcatctgatgaaaaacacaagaactacataaaacgttactgtccctatcaaaatattaaacctcagcattatccttcaattcacataacggcatatgaaaacgatgaacgggtacctctgaaaggaattgtaagttatactgagaaactcaaggaagccatcgcggagcatgctaaggacacaggtgaaggctatcagacccctaatattattctagatattcagcctggaggcaatcatgtaattgaggattctcacaaaaagattacagcccaaattaaattcctgtacgaggaacttggacttgacagcaccagtgttttcgaggatcttaagaaatacctgaaattctgaaacactgcattcaactgggaattggaaacacactgaaatatttcatagtcttacttccaattgagttagcaaaaaaaaaattaataacttgagacttttaagttattaattttttaaaatgtgcttctccatctaaattttgcttagtctacatctcacttgcttatactattctctccattgatgcacatgcccattaacctaggaaagtaattttcaaatcatgctccttagaaggatgtggagtagagggaagggaaggattggtgatagcagagctccaggcct

SEQ ID NO: 23871 - DNA, 3030 bp, Homo sapiens
  source 1..3030: mol_type = unassigned DNA
attcttgctggtagccatcttgagtgagggcggaccagaggatgagagagctgtggcagggctactggaacgctgtccctcattgttttagccttctgtgcttcatctcgagctcagaagactagcgaagaacgaaaagtcttatatatttcgagactaaagaacccaggaacccaagaagactccttgaccacaacaaagatggcgaaatctgcctgttgctcgtgctagattgaggttacgtagattggcgtgctgcaaaccagctctaggcggctctggccccaaaaggagcataaaccagggactttgatatcatgcagcagaagaccaaattatttctccaagctttgaagtatagtattcctcaccttggaaaatgcatgcagaaacagcatttgaatcactataacttcgctgatcattgttacaatagaataaaattgaaaaaatatcacctaaccaagtgtcttcagaataaacccaagatatcagagttagcaagaaacatcccaagtcggagcttctcatgtaaggatcttcagcctgttaaacaagaaaacgaaaaaccccttccagaaaacatggatgcatttgaaaaagtgagaacaaaattagaaacacagccacaagaagaatatgaaatcatcaatgtggaagttaaacatggtggttttgtttattaccaagaaggttgttgcttggttcgttccaaagatgaagaagcagacaatgataattatgaagttttattcaatttggaggaacttaagttagaccagcccttcattgattgtatcagagttgctccagatgaaaaatatgtggctgccaagataagaactgaagattctgaagcatctacctgtgtaattataaagctcagcgatcagcccgtaatggaagcttctttcccgaatgtgtccagttttgaatgggtaaaggacgaggaagatgaagatgttttattctacaccttccagaggaaccttcgctgtcatgacgtatatcgagccacttttggtgataacaaacgtaatgaacgcttttacacagaaaaagacccaagctactttgttttcctttatcttacaaaagacagtcgtttcctcaccataaatattatgaacaagactacttctgaagtgtggttgatagatggcctgagcccttgggacccaccagtacttatccagaagcgaatacatggggtcctttactatgttgaacacagagatgatgaattatacattctcactaatgttggagaacctacagaatttaagctaatgagaacagcggctgatacccctgcaattatgaattgggatttattttttacaatgaagagaaatacaaaagtgatagacttggacatgtttaaggatcactgtgttctatttctgaagcacagcaatctcctttatgttaatgtgattggtctggctgatgattcagttcggtctctaaagctccctccttgggcctgtggattcataatggatacaaattctgacccaaagaactgcccctttcaactttgctctccaatacgtcccccaaaatattacacatacaagtttgcagaaggcaaactgtttgaggaaactgggcatgaagacccaatcacaaagactagtcgcgttttacgtctagaagccaaaagcaaggatggaaaattagtgccaatgactgttttccacaaaactgactctgaggacttgcagaagaaacctctcttggtacatgtatatggagcttatggaatggatttgaaaatgaatttcaggcctgagaggcgggtcctggtggatgatggatggatattagcatactgccatgttcgaggtggtggtgagttaggcctccagtggcacgctgatggccgcctaactaaaaaactcaatggccttgctgatttagaggcttgcattaagacgcttcatggccaaggcttttctcagccaagtctaacaaccctgactgctttcagtgctggaggggtgcttgcaggagcattgtgtaattctaatccagagctggtgagagcggtgactttggaggcacctttcttggatgttctcaacaccatgatggacactacacttcctctgacattagaagaattagaagaatgggggaatccttcatctgatgaaaaacacaagaactacataaaacgttactgtccctatcaaaatattaaacctcagcattatccttcaattcacataacggcatatgaaaacgatgaacgggtacctctgaaaggaattgtaagttatactgagaaactcaaggaagccatcgcggagcatgctaaggacacaggtgaaggctatcagacccctaatattattctagatattcagcctggaggcaatcatgtaattgaggattctcacaaaaagattacagcccaaattaaattcctgtacgaggaacttggacttgacagcaccagtgttttcgaggatcttaagaaatacctgaaattctgaaacactgcattcaactgggaattggaaacacactgaaatatttcatagtcttacttccaattgagttagcaaaaaaaaaattaataacttgagacttttaagttattaattttttaaaatgtgcttctccatctaaattttgcttagtctacatctcacttgcttatactattctctccattgatgcacatgcccattaacctaggaaagtaattttcaaatcatgctccttagaaggatgtggagtagagggaagggaaggattggtgatagcagagctccaggcctcccttccagtcagaacagttgagcagtttacaaattagtgtcctgcctctttgctagcaaatgcttttagacactgtggcagtgagtcatcctctaatttctatgactgcattttaagggaaaagataaaattcttccccttaaaattcgttaaagtttttgaataatctggggtcctaatgtgttctggtcatccctgattgatgctatctgaataaagttataagctcctataagccat

SEQ ID NO: 23872 - DNA, 5212 bp, Homo sapiens
  source 1..5212: mol_type = unassigned DNA
gcagacttcggctggacttgcctgcggtgacacctgctcccctctgagagcttcaggttctccggcctgccttcactggtttgtgtccagagccggactgattctctcaatttgctttaacccctatgtgtgccagagtcagtgctgcatagtttgagcctgataggattaactttacaaatgagacatttaagtcacatctgccaagaattatgatttgaatgaaactttaacttacacaggtttttagatttagttagcctaagttatcagctgtctgaagttattcataacctaagtggggcatggccctgaaaaggagggatgagaactgctgatcttagttactctgagaacccactactctgtaatcatacctataaaatcattcgtgtgctggcagccccaaaaggagcataaaccagggactttgatatcatgcagcagaagaccaaattatttctccaagctttgaagtatagtattcctcaccttggaaaatgcatgcagaaacagcatttgaatcactataacttcgctgatcattgttacaatagaataaaattgaaaaaatatcacctaaccaagtgtcttcagaataaacccaagatatcagagttagcaagaaacatcccaagtcggagcttctcatgtaaggatcttcagcctgttaaacaagaaaacgaaaaaccccttccagaaaacatggatgcatttgaaaaagtgagaacaaaattagaaacacagccacaagaagaatatgaaatcatcaatgtggaagttaaacatggtggttttgtttattaccaagaaggttgttgcttggttcgttccaaagatgaagaagcagacaatgataattatgaagttttattcaatttggaggaacttaagttagaccagcccttcattgattgtatcagagttgctccagatgaaaaatatgtggctgccaagataagaactgaagattctgaagcatctacctgtgtaattataaagctcagcgatcagcccgtaatggaagcttctttcccgaatgtgtccagttttgaatgggtaaaggacgaggaagatgaagatgttttattctacaccttccagaggaaccttcgctgtcatgacgtatatcgagccacttttggtgataacaaacgtaatgaacgcttttacacagaaaaagacccaagctactttgttttcctttatcttacaaaagacagtcgtttcctcaccataaatattatgaacaagactacttctgaagtgtggttgatagatggcctgagcccttgggacccaccagtacttatccagaagcgaatacatggggtcctttactatgttgaacacagagatgatgaattatacattctcactaatgttggagaacctacagaatttaagctaatgagaacagcggctgatacccctgcaattatgaattgggatttattttttacaatgaagagaaatacaaaagtgatagacttggacatgtttaaggatcactgtgttctatttctgaagcacagcaatctcctttatgttaatgtgattggtctggctgatgattcagttcggtctctaaagctccctccttgggcctgtggattcataatggatacaaattctgacccaaagaactgcccctttcaactttgctctccaatacgtcccccaaaatattacacatacaagtttgcagaaggcaaactgtttgaggaaactgggcatgaagacccaatcacaaagactagtcgcgttttacgtctagaagccaaaagcaaggatggaaaattagtgccaatgactgttttccacaaaactgactctgaggacttgcagaagaaacctctcttggtacatgtatatggagcttatggaatggatttgaaaatgaatttcaggcctgagaggcgggtcctggtggatgatggatggatattagcatactgccatgttcgaggtggtggtgagttaggcctccagtggcacgctgatggccgcctaactaaaaaactcaatggccttgctgatttagaggcttgcattaagacgcttcatggccaaggcttttctcagccaagtctaacaaccctgactgctttcagtgctggaggggtgcttgcaggagcattgtgtaattctaatccagagctggtgagagcggtgactttggaggcacctttcttggatgttctcaacaccatgatggacactacacttcctctgacattagaagaattagaagaatgggggaatccttcatctgatgaaaaacacaagaactacataaaacgttactgtccctatcaaaatattaaacctcagcattatccttcaattcacataacggcatatgaaaacgatgaacgggtacctctgaaaggaattgtaagttatactgagaaactcaaggaagccatcgcggagcatgctaaggacacaggtgaaggctatcagacccctaatattattctagatattcagcctggaggcaatcatgtaattgaggattctcacaaaaagattacagcccaaattaaattcctgtacgaggaacttggacttgacagcaccagtgttttcgaggatcttaagaaatacctgaaattctgaaacactgcattcaactgggaattggaaacacactgaaatatttcatagtcttacttccaattgagttagcaaaaaaaaaattaataacttgagacttttaagttattaattttttaaaatgtgcttctccatctaaattttgcttagtctacatctcacttgcttatactattctctccattgatgcacatgcccattaacctaggaaagtaattttcaaatcatgctccttagaaggatgtggagtagagggaagggaaggattggtgatagcagagctccaggcctcccttccagtcagaacagttgagcagtttacaaattagtgtcctgcctctttgctagcaaatgcttttagacactgtggcagtgagtcatcctctaatttctatgactgcattttaagggaaaagataaaattcttccccttaaaattcgttaaagtttttgaataatctggggtcctaatgtgttctggtcatccctgattgatgctatctgaataaagttataagctcctataagccataatttacttttaaacattttatttttttcaaaacatttgagaacctttcttaaagcagttacattcaagctacagaaatatcgaagaattaatgattgttcaccaagcagcatgctgtacatgaagctattacaaatgcttacaatcccactgaaatgccagtgtcttcatctcttcataaaggtgcctaacacgaggtatacagtatgttcagtacactggaatagcatgctcgattggaaacaaagcatctatctctgaaagctgtttggcgatgaaggagattcttcgtgttgtgttcaaagatgagtccctctcccttgtccagaaaaatgccacttgtatcaactttactgcctttgtcggcagaattggtacttaaccttattctcattttagcgggaaggcccgaaatcatattatgtagatttaacagtgttgattctccaaaattcagaaccacgataaagattctgtcgatgccatccagctctcttgtgtacacaacatagtggctgtcattcctcaaatggcaaaaccagcccctgttgaggagtagctcattggcatgaagtagacttaaatcttgatataacttcaaagccgatctgggctgagtcttttggacctatttttttaaaaaagtatttacgtaagtgtttgattctaagaattgtttgtaagtatttttaatatattgtaaggagttatttacccaaaacacttgctccaattttgccccttataattgccaaattgtaagcatcaataagtaggtaagaacaatttatataaaaactgatagaaatgacaaattcggggtttcggcttgtctgggagtcaataagtacgcacagtgctctgctacattgtagagtttctgtagagatcaaatttgactccactttaggagtcccaaagcaaatgtccatgtctaagatgaatatttaacttgcatagtcattctgtgctatattgtaactgccagatggccagaaagaaggcaacagtggactcagacttctgaggaatttgggtttgttcccctttgtagactaatgtgtaggttgctgttgtgcgaagatcgtgtaactttagcagacatgtatttcttgcacagctaatagaagacaaagttgaaaaaaaggatgcaaaataaaaagctgcctaaggtgaaagttagaaattgtagacttttttttaccataatagtatgtgttcattaaagatgatttgggtttattttacagctatataaaacataatttgatgatgtacttctaacctttcaagcattttctgttattgactatataatatagcctccataaatgtttttaatgacaatattctgttgaacggttgtaccatactcagccatgccctttcattttgacgatagtgtttctaatattttgtatttttattcccctccccccatttttgtattacttaagatagattatcagaaagacagttactttgtcaaagagtatgggcacttgatacataatgccaaattattcttcataagagctgttgccaaatcagtgataatgttcatttaattgtattcttgccagccatgtttactggggtgatagttgttattgtggttgttattgttctttaggggtaggttcccaatatgtggtctttaaataattatctaatggtgtttaaaaagatgtttattctgtttgtcaggtacaaagatatttatgatacatgtatgacttgtctaagttattaacattttctctagccttaggtaatgcatgaaagcacatgtttcagtgccactcacataagaagtgcccggtaagtgttagctattattgtctacttgagttactactttctaaaagtatgttgaagtctttttctgtaattgcagatttgttgattttgcatttgagtattttctatattttgaagctgttagatgcgtagtcatgatttttggtggaatgttttatcaatttttgaaaattgcctttgtctcatataatgcttttcatattgaactatattttgtctgctattaaatacttccaagcc

SEQ ID NO: 23873 - DNA, 3080 bp, Homo sapiens
  source 1..3080: mol_type = unassigned DNA
cattcttgctggtagccatcttgagtgagggcggaccagaggatgagagagctgtggcagggctactggaacgctgtccctcattgttttagccttctgtgcttcatctcgagctcagaagactagcgaagaacgaaaagtcttatatatttcgagactaaagaacccaggaacccaagaagactccttgaccacaacaaagatggcgaaatctgcctgttgctcgtgctagattgaggttacgtagattggcgtgctgcaaaccagctctaggcggctctgggtaagttgtcgttctgtgggctgcggaacgcagacttcggctggacttgcctgcggtgacacctgctcccctctgagagcttcaggttctccggcctgccttcactggtttgtgtccagagccggactgattctctcaatttgcccccaaaaggagcataaaccagggactttgatatcatgcagcagaagaccaaattatttctccaagctttgaagtatagtattcctcaccttggaaaatgcatgcagaaacagcatttgaatcactataacttcgctgatcattgttacaatagaataaaattgaaaaaatatcacctaaccaagtgtcttcagaataaacccaagatatcagagttagcaagaaacatcccaagtcggagcttctcatgtaaggatcttcagcctgttaaacaagaaaacgaaaaaccccttccagaaaacatggatgcatttgaaaaagtgagaacaaaattagaaacacagccacaagaagaatatgaaatcatcaatgtggaagttaaacatggtggttttgtttattaccaagaaggttgttgcttggttcgttccaaagatgaagaagcagacaatgataattatgaagttttattcaatttggaggaacttaagttagaccagcccttcattgattgtatcagagttgctccagatgaaaaatatgtggctgccaagataagaactgaagattctgaagcatctacctgtgtaattataaagctcagcgatcagcccgtaatggaagcttctttcccgaatgtgtccagttttgaatgggtaaaggacgaggaagatgaagatgttttattctacaccttccagaggaaccttcgctgtcatgacgtatatcgagccacttttggtgataacaaacgtaatgaacgcttttacacagaaaaagacccaagctactttgttttcctttatcttacaaaagacagtcgtttcctcaccataaatattatgaacaagactacttctgaagtgtggttgatagatggcctgagcccttgggacccaccagtacttatccagaagcgaatacatggggtcctttactatgttgaacacagagatgatgaattatacattctcactaatgttggagaacctacagaatttaagctaatgagaacagcggctgatacccctgcaattatgaattgggatttattttttacaatgaagagaaatacaaaagtgatagacttggacatgtttaaggatcactgtgttctatttctgaagcacagcaatctcctttatgttaatgtgattggtctggctgatgattcagttcggtctctaaagctccctccttgggcctgtggattcataatggatacaaattctgacccaaagaactgcccctttcaactttgctctccaatacgtcccccaaaatattacacatacaagtttgcagaaggcaaactgtttgaggaaactgggcatgaagacccaatcacaaagactagtcgcgttttacgtctagaagccaaaagcaaggatggaaaattagtgccaatgactgttttccacaaaactgactctgaggacttgcagaagaaacctctcttggtacatgtatatggagcttatggaatggatttgaaaatgaatttcaggcctgagaggcgggtcctggtggatgatggatggatattagcatactgccatgttcgaggtggtggtgagttaggcctccagtggcacgctgatggccgcctaactaaaaaactcaatggccttgctgatttagaggcttgcattaagacgcttcatggccaaggcttttctcagccaagtctaacaaccctgactgctttcagtgctggaggggtgcttgcaggagcattgtgtaattctaatccagagctggtgagagcggtgactttggaggcacctttcttggatgttctcaacaccatgatggacactacacttcctctgacattagaagaattagaagaatgggggaatccttcatctgatgaaaaacacaagaactacataaaacgttactgtccctatcaaaatattaaacctcagcattatccttcaattcacataacggcatatgaaaacgatgaacgggtacctctgaaaggaattgtaagttatactgagaaactcaaggaagccatcgcggagcatgctaaggacacaggtgaaggctatcagacccctaatattattctagatattcagcctggaggcaatcatgtaattgaggattctcacaaaaagattacagcccaaattaaattcctgtacgaggaacttggacttgacagcaccagtgttttcgaggatcttaagaaatacctgaaattctgaaacactgcattcaactgggaattggaaacacactgaaatatttcatagtcttacttccaattgagttagcaaaaaaaaaattaataacttgagacttttaagttattaattttttaaaatgtgcttctccatctaaattttgcttagtctacatctcacttgcttatactattctctccattgatgcacatgcccattaacctaggaaagtaattttcaaatcatgctccttagaaggatgtggagtagagggaagggaaggattggtgatagcagagctccaggcctcccttccagtcagaacagttgagcagtttacaaattagtgtcctgcctctttgctagcaaatgcttttagacactgtggcagtgagtcatcctctaatttctatgactgcattttaagggaaaagataaaattcttccccttaaaa

SEQ ID NO: 23874 - DNA, 5657 bp, Homo sapiens
  source 1..5657: mol_type = unassigned DNA
gaagaaactgaggcccggagacacagttaagtgtaggagctaagacctcaacccaggtctctctgactcttaactacttattagcaatcaaggttaataaaagctacctcctgacaaaccagagatggccttacattttatttgtgcatcttgcaggggttttttgttgtttttaattaaagcgctaaatacctttttaacattaaaaatccgaagttgagtatgtccagtatttggaaccgaaccaaattggattttttgctatacagcttactgtacaagtgacctggaacagttgcttagaacctcccacagccacagtttggcaacctgtaaaatgtgcatggtaatatctactttattaagtccatataaaatttaaattagacaaacaagataaaagcacctggcagttagttaacactcaacaataattaatcttccctcccccacctttattaaataattaggcttttccagtttatcttccacatatataccaaagatacgttcataattatgtaagaccaaagggctttttaccttttacagccctgagttcctgagataccccattaagtctgtgtacttatttgcaaatttatattttgtttcttgttttgttttttgttttagtttaacccctatgtgtgccagagtcagtgctgcatagtttgagcctgataggattaactttacaaatgagacatttaagtcacatctgccaagaattatgatttgaatgaaactttaacttacacaggtttttagatttagttagcctaagttatcagctgtctgaagttattcataacctaagtggggcatggccctgaaaaggagggatgagaactgctgatcttagttactctgagaacccactactctgtaatcatacctataaaatcattcgtgtgctggcagccccaaaaggagcataaaccagggactttgatatcatgcagcagaagaccaaattatttctccaagctttgaagtatagtattcctcaccttggaaaatgcatgcagaaacagcatttgaatcactataacttcgctgatcattgttacaatagaataaaattgaaaaaatatcacctaaccaagtgtcttcagaataaacccaagatatcagagttagcaagaaacatcccaagtcggagcttctcatgtaaggatcttcagcctgttaaacaagaaaacgaaaaaccccttccagaaaacatggatgcatttgaaaaagtgagaacaaaattagaaacacagccacaagaagaatatgaaatcatcaatgtggaagttaaacatggtggttttgtttattaccaagaaggttgttgcttggttcgttccaaagatgaagaagcagacaatgataattatgaagttttattcaatttggaggaacttaagttagaccagcccttcattgattgtatcagagttgctccagatgaaaaatatgtggctgccaagataagaactgaagattctgaagcatctacctgtgtaattataaagctcagcgatcagcccgtaatggaagcttctttcccgaatgtgtccagttttgaatgggtaaaggacgaggaagatgaagatgttttattctacaccttccagaggaaccttcgctgtcatgacgtatatcgagccacttttggtgataacaaacgtaatgaacgcttttacacagaaaaagacccaagctactttgttttcctttatcttacaaaagacagtcgtttcctcaccataaatattatgaacaagactacttctgaagtgtggttgatagatggcctgagcccttgggacccaccagtacttatccagaagcgaatacatggggtcctttactatgttgaacacagagatgatgaattatacattctcactaatgttggagaacctacagaatttaagctaatgagaacagcggctgatacccctgcaattatgaattgggatttattttttacaatgaagagaaatacaaaagtgatagacttggacatgtttaaggatcactgtgttctatttctgaagcacagcaatctcctttatgttaatgtgattggtctggctgatgattcagttcggtctctaaagctccctccttgggcctgtggattcataatggatacaaattctgacccaaagaactgcccctttcaactttgctctccaatacgtcccccaaaatattacacatacaagtttgcagaaggcaaactgtttgaggaaactgggcatgaagacccaatcacaaagactagtcgcgttttacgtctagaagccaaaagcaaggatggaaaattagtgccaatgactgttttccacaaaactgactctgaggacttgcagaagaaacctctcttggtacatgtatatggagcttatggaatggatttgaaaatgaatttcaggcctgagaggcgggtcctggtggatgatggatggatattagcatactgccatgttcgaggtggtggtgagttaggcctccagtggcacgctgatggccgcctaactaaaaaactcaatggccttgctgatttagaggcttgcattaagacgcttcatggccaaggcttttctcagccaagtctaacaaccctgactgctttcagtgctggaggggtgcttgcaggagcattgtgtaattctaatccagagctggtgagagcggtgactttggaggcacctttcttggatgttctcaacaccatgatggacactacacttcctctgacattagaagaattagaagaatgggggaatccttcatctgatgaaaaacacaagaactacataaaacgttactgtccctatcaaaatattaaacctcagcattatccttcaattcacataacggcatatgaaaacgatgaacgggtacctctgaaaggaattgtaagttatactgagaaactcaaggaagccatcgcggagcatgctaaggacacaggtgaaggctatcagacccctaatattattctagatattcagcctggaggcaatcatgtaattgaggattctcacaaaaagattacagcccaaattaaattcctgtacgaggaacttggacttgacagcaccagtgttttcgaggatcttaagaaatacctgaaattctgaaacactgcattcaactgggaattggaaacacactgaaatatttcatagtcttacttccaattgagttagcaaaaaaaaaattaataacttgagacttttaagttattaattttttaaaatgtgcttctccatctaaattttgcttagtctacatctcacttgcttatactattctctccattgatgcacatgcccattaacctaggaaagtaattttcaaatcatgctccttagaaggatgtggagtagagggaagggaaggattggtgatagcagagctccaggcctcccttccagtcagaacagttgagcagtttacaaattagtgtcctgcctctttgctagcaaatgcttttagacactgtggcagtgagtcatcctctaatttctatgactgcattttaagggaaaagataaaattcttccccttaaaattcgttaaagtttttgaataatctggggtcctaatgtgttctggtcatccctgattgatgctatctgaataaagttataagctcctataagccataatttacttttaaacattttatttttttcaaaacatttgagaacctttcttaaagcagttacattcaagctacagaaatatcgaagaattaatgattgttcaccaagcagcatgctgtacatgaagctattacaaatgcttacaatcccactgaaatgccagtgtcttcatctcttcataaaggtgcctaacacgaggtatacagtatgttcagtacactggaatagcatgctcgattggaaacaaagcatctatctctgaaagctgtttggcgatgaaggagattcttcgtgttgtgttcaaagatgagtccctctcccttgtccagaaaaatgccacttgtatcaactttactgcctttgtcggcagaattggtacttaaccttattctcattttagcgggaaggcccgaaatcatattatgtagatttaacagtgttgattctccaaaattcagaaccacgataaagattctgtcgatgccatccagctctcttgtgtacacaacatagtggctgtcattcctcaaatggcaaaaccagcccctgttgaggagtagctcattggcatgaagtagacttaaatcttgatataacttcaaagccgatctgggctgagtcttttggacctatttttttaaaaaagtatttacgtaagtgtttgattctaagaattgtttgtaagtatttttaatatattgtaaggagttatttacccaaaacacttgctccaattttgccccttataattgccaaattgtaagcatcaataagtaggtaagaacaatttatataaaaactgatagaaatgacaaattcggggtttcggcttgtctgggagtcaataagtacgcacagtgctctgctacattgtagagtttctgtagagatcaaatttgactccactttaggagtcccaaagcaaatgtccatgtctaagatgaatatttaacttgcatagtcattctgtgctatattgtaactgccagatggccagaaagaaggcaacagtggactcagacttctgaggaatttgggtttgttcccctttgtagactaatgtgtaggttgctgttgtgcgaagatcgtgtaactttagcagacatgtatttcttgcacagctaatagaagacaaagttgaaaaaaaggatgcaaaataaaaagctgcctaaggtgaaagttagaaattgtagacttttttttaccataatagtatgtgttcattaaagatgatttgggtttattttacagctatataaaacataatttgatgatgtacttctaacctttcaagcattttctgttattgactatataatatagcctccataaatgtttttaatgacaatattctgttgaacggttgtaccatactcagccatgccctttcattttgacgatagtgtttctaatattttgtatttttattcccctccccccatttttgtattacttaagatagattatcagaaagacagttactttgtcaaagagtatgggcacttgatacataatgccaaattattcttcataagagctgttgccaaatcagtgataatgttcatttaattgtattcttgccagccatgtttactggggtgatagttgttattgtggttgttattgttctttaggggtaggttcccaatatgtggtctttaaataattatctaatggtgtttaaaaagatgtttattctgtttgtcaggtacaaagatatttatgatacatgtatgacttgtctaagttattaacattttctctagccttaggtaatgcatgaaagcacatgtttcagtgccactcacataagaagtgcccgtacgttctggacaagcccctggatcaatttttcagcacactaattagcacttatgttctattttatttcattgtttgacagtcttttatacttctgagagatctaatcacttcttgaaagaatgtcaaggagctccattaaacagcaatctactgggggtattt

SEQ ID NO: 23875 - DNA, 6273 bp, Homo sapiens
  source 1..6273: mol_type = unassigned DNA
gaagaaactgaggcccggagacacagttaagtgtaggagctaagacctcaacccaggtctctctgactcttaactacttattagcaatcaaggttaataaaagctacctcctgacaaaccagagatggccttacattttatttgtgcatcttgcaggggttttttgttgtttttaattaaagcgctaaatacctttttaacattaaaaatccgaagttgagtatgtccagtatttggaaccgaaccaaattggattttttgctatacagcttactgtacaagtgacctggaacagttgcttagaacctcccacagccacagtttggcaacctgtaaaatgtgcatggtaatatctactttattaagtccatataaaatttaaattagacaaacaagataaaagcacctggcagttagttaacactcaacaataattaatcttccctcccccacctttattaaataattaggcttttccagtttatcttccacatatataccaaagatacgttcataattatgtaagaccaaagggctttttaccttttacagccctgagttcctgagataccccattaagtctgtgtacttatttgcaaatttatattttgtttcttgttttgttttttgttttagtttaacccctatgtgtgccagagtcagtgctgcatagtttgagcctgataggattaactttacaaatgagacatttaagtcacatctgccaagaattatgatttgaatgaaactttaacttacacaggtttttagatttagttagcctaagttatcagctgtctgaagttattcataacctaagtggggcatggccctgaaaaggagggatgagaactgctgatcttagttactctgagaacccactactctgtaatcatacctataaaatcattcgtgtgctggcagccccaaaaggagcataaaccagggactttgatatcatgcagcagaagaccaaattatttctccaagctttgaagtatagtattcctcaccttggaaaatgcatgcagaaacagcatttgaatcactataacttcgctgatcattgttacaatagaataaaattgaaaaaatatcacctaaccaagtgtcttcagaataaacccaagatatcagagttagcaagaaacatcccaagtcggagcttctcatgtaaggatcttcagcctgttaaacaagaaaacgaaaaaccccttccagaaaacatggatgcatttgaaaaagtgagaacaaaattagaaacacagccacaagaagaatatgaaatcatcaatgtggaagttaaacatggtggttttgtttattaccaagaaggttgttgcttggttcgttccaaagatgaagaagcagacaatgataattatgaagttttattcaatttggaggaacttaagttagaccagcccttcattgattgtatcagagttgctccagatgaaaaatatgtggctgccaagataagaactgaagattctgaagcatctacctgtgtaattataaagctcagcgatcagcccgtaatggaagcttctttcccgaatgtgtccagttttgaatgggtaaaggacgaggaagatgaagatgttttattctacaccttccagaggaaccttcgctgtcatgacgtatatcgagccacttttggtgataacaaacgtaatgaacgcttttacacagaaaaagacccaagctactttgttttcctttatcttacaaaagacagtcgtttcctcaccataaatattatgaacaagactacttctgaagtgtggttgatagatggcctgagcccttgggacccaccagtacttatccagaagcgaatacatggggtcctttactatgttgaacacagagatgatgaattatacattctcactaatgttggagaacctacagaatttaagctaatgagaacagcggctgatacccctgcaattatgaattgggatttattttttacaatgaagagaaatacaaaagtgatagacttggacatgtttaaggatcactgtgttctatttctgaagcacagcaatctcctttatgttaatgtgattggtctggctgatgattcagttcggtctctaaagctccctccttgggcctgtggattcataatggatacaaattctgacccaaagaactgcccctttcaactttgctctccaatacgtcccccaaaatattacacatacaagtttgcagaaggcaaactgtttgaggaaactgggcatgaagacccaatcacaaagactagtcgcgttttacgtctagaagccaaaagcaaggatggaaaattagtgccaatgactgttttccacaaaactgactctgaggacttgcagaagaaacctctcttggtacatgtatatggagcttatggaatggatttgaaaatgaatttcaggcctgagaggcgggtcctggtggatgatggatggatattagcatactgccatgttcgaggtggtggtgagttaggcctccagtggcacgctgatggccgcctaactaaaaaactcaatggccttgctgatttagaggcttgcattaagacgcttcatggccaaggcttttctcagccaagtctaacaaccctgactgctttcagtgctggaggggtgcttgcaggagcattgtgtaattctaatccagagctggtgagagcggtgactttggaggcacctttcttggatgttctcaacaccatgatggacactacacttcctctgacattagaagaattagaagaatgggggaatccttcatctgatgaaaaacacaagaactacataaaacgttactgtccctatcaaaatattaaacctcagcattatccttcaattcacataacggcatatgaaaacgatgaacgggtacctctgaaaggaattgtaagttatactgagaaactcaaggaagccatcgcggagcatgctaaggacacaggtgaaggctatcagacccctaatattattctagatattcagcctggaggcaatcatgtaattgaggattctcacaaaaagattacagcccaaattaaattcctgtacgaggaacttggacttgacagcaccagtgttttcgaggatcttaagaaatacctgaaattctgaaacactgcattcaactgggaattggaaacacactgaaatatttcatagtcttacttccaattgagttagcaaaaaaaaaattaataacttgagacttttaagttattaattttttaaaatgtgcttctccatctaaattttgcttagtctacatctcacttgcttatactattctctccattgatgcacatgcccattaacctaggaaagtaattttcaaatcatgctccttagaaggatgtggagtagagggaagggaaggattggtgatagcagagctccaggcctcccttccagtcagaacagttgagcagtttacaaattagtgtcctgcctctttgctagcaaatgcttttagacactgtggcagtgagtcatcctctaatttctatgactgcattttaagggaaaagataaaattcttccccttaaaattcgttaaagtttttgaataatctggggtcctaatgtgttctggtcatccctgattgatgctatctgaataaagttataagctcctataagccataatttacttttaaacattttatttttttcaaaacatttgagaacctttcttaaagcagttacattcaagctacagaaatatcgaagaattaatgattgttcaccaagcagcatgctgtacatgaagctattacaaatgcttacaatcccactgaaatgccagtgtcttcatctcttcataaaggtgcctaacacgaggtatacagtatgttcagtacactggaatagcatgctcgattggaaacaaagcatctatctctgaaagctgtttggcgatgaaggagattcttcgtgttgtgttcaaagatgagtccctctcccttgtccagaaaaatgccacttgtatcaactttactgcctttgtcggcagaattggtacttaaccttattctcattttagcgggaaggcccgaaatcatattatgtagatttaacagtgttgattctccaaaattcagaaccacgataaagattctgtcgatgccatccagctctcttgtgtacacaacatagtggctgtcattcctcaaatggcaaaaccagcccctgttgaggagtagctcattggcatgaagtagacttaaatcttgatataacttcaaagccgatctgggctgagtcttttggacctatttttttaaaaaagtatttacgtaagtgtttgattctaagaattgtttgtaagtatttttaatatattgtaaggagttatttacccaaaacacttgctccaattttgccccttataattgccaaattgtaagcatcaataagtaggtaagaacaatttatataaaaactgatagaaatgacaaattcggggtttcggcttgtctgggagtcaataagtacgcacagtgctctgctacattgtagagtttctgtagagatcaaatttgactccactttaggagtcccaaagcaaatgtccatgtctaagatgaatatttaacttgcatagtcattctgtgctatattgtaactgccagatggccagaaagaaggcaacagtggactcagacttctgaggaatttgggtttgttcccctttgtagactaatgtgtaggttgctgttgtgcgaagatcgtgtaactttagcagacatgtatttcttgcacagctaatagaagacaaagttgaaaaaaaggatgcaaaataaaaagctgcctaaggtgaaagttagaaattgtagacttttttttaccataatagtatgtgttcattaaagatgatttgggtttattttacagctatataaaacataatttgatgatgtacttctaacctttcaagcattttctgttattgactatataatatagcctccataaatgtttttaatgacaatattctgttgaacggttgtaccatactcagccatgccctttcattttgacgatagtgtttctaatattttgtatttttattcccctccccccatttttgtattacttaagatagattatcagaaagacagttactttgtcaaagagtatgggcacttgatacataatgccaaattattcttcataagagctgttgccaaatcagtgataatgttcatttaattgtattcttgccagccatgtttactggggtgatagttgttattgtggttgttattgttctttaggggtaggttcccaatatgtggtctttaaataattatctaatggtgtttaaaaagatgtttattctgtttgtcaggtacaaagatatttatgatacatgtatgacttgtctaagttattaacattttctctagccttaggtaatgcatgaaagcacatgtttcagtgccactcacataagaagtgcccggccaggcaaggtggctcaggcccgtaatcctagcactttgggaggcaaggcagacagatcaccagaggtcaggagttcaagaccagcctggccaacatggtgaaacaccatctctactaaaaaatacagaaattacccgggcataatgacgtgcacctgtaatcccagctacttgggaggctgcagcaggagaatcacttgaacccaggaagcagaggctgcagtgtgccgagatcacgccactgcactcgagcatgggtgacggagcaagactgtctcaaaaaaaaaaaaaaacagtgttgagatcctttaagtattattgtgcacatgtgcaaatatttctaagtattaggaatggaattattaggtcaaaagataacttcattttttgtgtttatagctatagctgggttgcaagctttctattatttgcttgctatatcttcattttaattctttgtgttttatgttagtgtttcttatgtctgtttttgttatctgagtggttttatcttttaataggctaatttaacccattcatatttgtaattattgtattatttagacataattcggaagccctattttatttgtagttatactattgtttagggtttttttctattaagctttttgttggattgactgtataatttttttcttctagtattctttgaaaatttgaaaattgttatattttatgtctagtgttctttgaaaataattctttgaaaattatttttatgtcctaattttaccattaaaattatgaccacttga

SEQ ID NO: 23876 - DNA, 660 bp, Homo sapiens
  source 1..660: mol_type = unassigned DNA
cagacttcggctggacttgcctgcggtgacacctgctcccctctgagagcttcaggttctccggcctgccttcactggtttgtgtccagagccggactgattctctcaatttgcatgaagaaactgaggcccggagacacagttaagtgtaggagctaagacctcaacccagccccaaaaggagcataaaccagggactttgatatcatgcagcagaagaccaaattatttctccaagctttgaagtatagtattcctcaccttggaaaatgcatgcagaaacagcatttgaatcactataacttcgctgatcattgttacaatagaataaaattgaaaaaatatcacctaaccaagtgtcttcagaataaacccaagatatcagagttagcaagaaacatcccaagtcggagcttctcatgtaaggatcttcagcctgttaaacaagaaaacgaaaaaccccttccagaaaacatggatgcatttgaaaaagtgagaacaaaattagaaacacagccacaagaagaatatgaaatcatcaatgtggaagttaaacatggtggttttgtttattaccaagaaggttgttgcttggttcgttccaaagatgaagaagcagacaatgataattatgaagttttattcaatttggaggaactt

SEQ ID NO: 23877 - DNA, 6049 bp, Homo sapiens
  source 1..6049: mol_type = unassigned DNA
atttccggtactcgcatctccttggcaaccagggccgagctgtcacgccattgcaccattcttgctggtagccatcttgagtgagggcggaccagaggatgagagagctgtggcagggctactggaacgctgtccctcattgttttagccttctgtgcttcatctcgagctcagaagactagcgaagaacgaaaagtcttatatatttcgagactaaagaacccaggaacccaagaagactccttgaccacaacaaagatggcgaaatctgcctgttgctcgtgctagattgaggttacgtagattggcgtgctgcaaaccagctctaggcggctctgggatcttcagcctgttaaacaagaaaacgaaaaaccccttccagaaaacatggatgcatttgaaaaagtgagaacaaaattagaaacacagccacaagaagaatatgaaatcatcaatgtggaagttaaacatggtggttttgtttattaccaagaaggttgttgcttggttcgttccaaagatgaagaagcagacaatgataattatgaagttttattcaatttggaggaacttaagttagaccagcccttcattgattgtatcagagttgctccagatgaaaaatatgtggctgccaagataagaactgaagattctgaagcatctacctgtgtaattataaagctcagcgatcagcccgtaatggaagcttctttcccgaatgtgtccagttttgaatgggtaaaggacgaggaagatgaagatgttttattctacaccttccagaggaaccttcgctgtcatgacgtatatcgagccacttttggtgataacaaacgtaatgaacgcttttacacagaaaaagacccaagctactttgttttcctttatcttacaaaagacagtcgtttcctcaccataaatattatgaacaagactacttctgaagtgtggttgatagatggcctgagcccttgggacccaccagtacttatccagaagcgaatacatggggtcctttactatgttgaacacagagatgatgaattatacattctcactaatgttggagaacctacagaatttaagctaatgagaacagcggctgatacccctgcaattatgaattgggatttattttttacaatgaagagaaatacaaaagtgatagacttggacatgtttaaggatcactgtgttctatttctgaagcacagcaatctcctttatgttaatgtgattggtctggctgatgattcagttcggtctctaaagctccctccttgggcctgtggattcataatggatacaaattctgacccaaagaactgcccctttcaactttgctctccaatacgtcccccaaaatattacacatacaagtttgcagaaggcaaactgtttgaggaaactgggcatgaagacccaatcacaaagactagtcgcgttttacgtctagaagccaaaagcaaggatggaaaattagtgccaatgactgttttccacaaaactgactctgaggacttgcagaagaaacctctcttggtacatgtatatggagcttatggaatggatttgaaaatgaatttcaggcctgagaggcgggtcctggtggatgatggatggatattagcatactgccatgttcgaggtggtggtgagttaggcctccagtggcacgctgatggccgcctaactaaaaaactcaatggccttgctgatttagaggcttgcattaagacgcttcatggccaaggcttttctcagccaagtctaacaaccctgactgctttcagtgctggaggggtgcttgcaggagcattgtgtaattctaatccagagctggtgagagcggtgactttggaggcacctttcttggatgttctcaacaccatgatggacactacacttcctctgacattagaagaattagaagaatgggggaatccttcatctgatgaaaaacacaagaactacataaaacgttactgtccctatcaaaatattaaacctcagcattatccttcaattcacataacggcatatgaaaacgatgaacgggtacctctgaaaggaattgtaagttatactgagaaactcaaggaagccatcgcggagcatgctaaggacacaggtgaaggctatcagacccctaatattattctagatattcagcctggaggcaatcatgtaattgaggattctcacaaaaagattacagcccaaattaaattcctgtacgaggaacttggacttgacagcaccagtgttttcgaggatcttaagaaatacctgaaattctgaaacactgcattcaactgggaattggaaacacactgaaatatttcatagtcttacttccaattgagttagcaaaaaaaaaattaataacttgagacttttaagttattaattttttaaaatgtgcttctccatctaaattttgcttagtctacatctcacttgcttatactattctctccattgatgcacatgcccattaacctaggaaagtaattttcaaatcatgctccttagaaggatgtggagtagagggaagggaaggattggtgatagcagagctccaggcctcccttccagtcagaacagttgagcagtttacaaattagtgtcctgcctctttgctagcaaatgcttttagacactgtggcagtgagtcatcctctaatttctatgactgcattttaagggaaaagataaaattcttccccttaaaattcgttaaagtttttgaataatctggggtcctaatgtgttctggtcatccctgattgatgctatctgaataaagttataagctcctataagccataatttacttttaaacattttatttttttcaaaacatttgagaacctttcttaaagcagttacattcaagctacagaaatatcgaagaattaatgattgttcaccaagcagcatgctgtacatgaagctattacaaatgcttacaatcccactgaaatgccagtgtcttcatctcttcataaaggtgcctaacacgaggtatacagtatgttcagtacactggaatagcatgctcgattggaaacaaagcatctatctctgaaagctgtttggcgatgaaggagattcttcgtgttgtgttcaaagatgagtccctctcccttgtccagaaaaatgccacttgtatcaactttactgcctttgtcggcagaattggtacttaaccttattctcattttagcgggaaggcccgaaatcatattatgtagatttaacagtgttgattctccaaaattcagaaccacgataaagattctgtcgatgccatccagctctcttgtgtacacaacatagtggctgtcattcctcaaatggcaaaaccagcccctgttgaggagtagctcattggcatgaagtagacttaaatcttgatataacttcaaagccgatctgggctgagtcttttggacctatttttttaaaaaagtatttacgtaagtgtttgattctaagaattgtttgtaagtatttttaatatattgtaaggagttatttacccaaaacacttgctccaattttgccccttataattgccaaattgtaagcatcaataagtaggtaagaacaatttatataaaaactgatagaaatgacaaattcggggtttcggcttgtctgggagtcaataagtacgcacagtgctctgctacattgtagagtttctgtagagatcaaatttgactccactttaggagtcccaaagcaaatgtccatgtctaagatgaatatttaacttgcatagtcattctgtgctatattgtaactgccagatggccagaaagaaggcaacagtggactcagacttctgaggaatttgggtttgttcccctttgtagactaatgtgtaggttgctgttgtgcgaagatcgtgtaactttagcagacatgtatttcttgcacagctaatagaagacaaagttgaaaaaaaggatgcaaaataaaaagctgcctaaggtgaaagttagaaattgtagacttttttttaccataatagtatgtgttcattaaagatgatttgggtttattttacagctatataaaacataatttgatgatgtacttctaacctttcaagcattttctgttattgactatataatatagcctccataaatgtttttaatgacaatattctgttgaacggttgtaccatactcagccatgccctttcattttgacgatagtgtttctaatattttgtatttttattcccctccccccatttttgtattacttaagatagattatcagaaagacagttactttgtcaaagagtatgggcacttgatacataatgccaaattattcttcataagagctgttgccaaatcagtgataatgttcatttaattgtattcttgccagccatgtttactggggtgatagttgttattgtggttgttattgttctttaggggtaggttcccaatatgtggtctttaaataattatctaatggtgtttaaaaagatgtttattctgtttgtcaggtacaaagatatttatgatacatgtatgacttgtctaagttattaacattttctctagccttaggtaatgcatgaaagcacatgtttcagtgccactcacataagaagtgcccggtaagtgttagctattattgtctacttgagttactactttctaaaagtatgttgaagtctttttctgtaattgcagatttgttgattttgcatttgagtattttctatattttgaagctgttagatgcgtagtcatgatttttggtggaatgttttatcaatttttgaaaattgcctttgtctcatataatgcttttcatattgaactatattttgtctgctattaaatacttccaagcctgatttttgtaattttattttttattcaattacaagaatacatactataaaaaggttttcttcaacacctttccatagcttcacagttcccctcagagacaggcactatatgttcttttgtttttaatgtatcatatgtttgcataggcacagaatgtatcatttcatatgtttatatatttttctttacacagttggtgatatgttaccattctatactttattgaatacctgtttgaaatggtctcatatcaatgtatatagaactgtcatttttaaaagctgcatactgggcccatagttgatagaactggttttctgttgataaaatatttaaatcatttcttgtgtcttctattaaaaacaaattttgcaggccaggcaaggtggctcaggcccgtaatcctagcactttgggaggcaaggcagacagatcaccagaggtcaggagttcaagaccagcctggccaacatggtgaaacaccatctctactaaaaaatacagaaattacccgggcataatgacgtgcacctgtaatcccagctacttgggaggctgcagcaggagaatcacttgaacccaggaagcagaggctgcagtgtgccgagatcacgccactgcactcgagcatgggtgacggagcaagactgtctcaaaaaaaaaaaaaaacagtgttgagatcctttaagtattattgtgcacatgtgcaaatatttctaagtattaggaatggaattattaggtcaaaagataacttcattttttgtgtttatagctatagctgggttgcaagctttctattatttgcttgctatatcttcattttaattctttgtgttttatgttagtgtttcttatgtctgtttttgttatctgagtggttttatcttttaataggctaatttaacccattcatatttgtaattattgtattatttagacataattcggaagccctattttatttgtagttatactattgtttagggtttttttctattaagctttttgttggattgactgtataatttttttcttctagtattctttgaaaatttgaaaattgttatattttatgtctagtgttctttgaaaataattctttgaaaattatttttatgtcctaattttaccattaaaattatgaccacttg

SEQ ID NO: 23878 - DNA, 3090 bp, Homo sapiens
  source 1..3090: mol_type = unassigned DNA
ctcggggatgggggcggagtggctgtggtgacctggcttgggcggcgtctctgaggagctggctggctttgggtttcccctgggaggagctgttttgcggcgggcggagctgcaggctgggcagggcttagcctgtgcgcttctgctggcctccttttcgccctcccacccgcactgcagtctccagcctgagccatgggccgccgagccctcctgctcctgcttctgtcttttctggcgccctgggccaccatagccctccggccggccttaagggccctcggcagcctacacttgccaaccaaccccacatccctcccggctgtagccaagaactattcggttctctacttccaacagaaggttgatcattttggatttaatactgtgaaaacttttaatcagcggtacctagtagctgataaatactggaagaaaaatggtggatcaatacttttctacactggtaatgaaggggacattatctggttttgtaataacacggggttcatgtgggatgtggctgaggaactgaaagctatgttggtgtttgctgaacatcgatactatggagagtctctcccctttggtgacaactcattcaaggattccagacacttgaatttcctgacatcagaacaagctctggctgattttgcagagttaatcaaacacttgaaaagaacaatcccaggagctgaaaatcaacctgtcattgccataggaggctcctatggtggcatgcttgccgcctggtttaggatgaaatatcctcatatggtagttggagctcttgcagcttctgcccctatctggcagtttgaggatttagtaccttgtggtgtatttatgaagatcgtaactacagattttaggaaaagcggtccacattgttcagagagcatccacaggtcctgggatgccattaatcgactctcaaatactggcagtggtttgcagtggcttactggagcccttcacttatgcagcccattaacttctcaggacatccaacatttgaaagactggatctctgaaacctgggtgaatctggcaatggtggactatccttatgcctctaactttttacagcctttgcctgcttggcctatcaaggtagtgtgccagtatttgaaaaatcccaatgtatctgattcactgctgctgcagaatattttccaagctctgaatgtatattacaattattcgggccaggtgaaatgcctgaatatttcagagacagcaactagcagtctgggaacactgggttggagctatcaggcctgcacagaagtagtcatgcccttttgtactaatggtgtcgatgacatgtttgaacctcactcatggaacttaaaggaactttctgatgactgttttcaacagtggggtgtgagaccaaggccctcctggatcactactatgtatggaggcaaaaacattagttcacacacaaacattgttttcagcaatggtgaactagacccctggtcaggaggtggagtaactaaggatatcacagacactctggttgcagtcaccatctcagagggggcccaccacttagatctccgcaccaagaatgccttggatcctatgtctgtgctgttagcccgctccttggaagttagacatatgaagaattggatcagagatttctatgacagtgcgggaaagcagcactgagaaacttttgattgttttcaatttcttcttttatgttcacaccaccacattcccattcactttgattttctacatgtaattaccttcttttgtttatcattagatttgatggggccaaagttgagatagaatagagggtgatgacggtaagagcaagtgtcccatgaatgtgatttcctgggttctcactgtctttgcaccacgtctaggaagaatcttcttgatagctctcccacaccatcagtggccctcataactggagtagagttcctggttgcttttcataagagggagagttactttctttgtatctctgcaagcagagatttctctttggttttgaggttgaagtgtctttggcccatttgtaagtccccatccctaccctacacaaagtaaaagcagaagatagataaaaaatgatgtaattgcagctggtaggatgtctggtgccaatccaggaagtgagagccatttcttttgtaccggatttaatgactttgaactgtgctgtaaataaataatacagctggaccttatacctgtgtgttgcttctgaagctcacttcaactccggctgatggaaatgctgtgtgcactgggcttagctgtttttggaaagtcctttaattttttctcttccacttggcagcttttcttagttctgggatgttggccactgtggtactgccagtaagaaatctggcctttttctgctccatttctctttgtttctaaggtcagttttaatttgtttgaattctgccagtttaggaaaatgactctgttttgtctttttaaatctgagcaagctttatgctgtagtcactaattatatttcagtaagaagcctttaaaaattgatgaatcagctattccaaaagtagaatatagtaatattcagcttttaaatttttaaaattttattttctgatagttgttactgctgtcattaaaaccagaagtgttagacactaacaggcaggtgcacaagaacttttctgtatgacttccaaaagacaagctgactaattcatgcaggcagcatatttgacattaataaatggccaagccattcctatttccaaggggttggcttctttcaagcagttcttacactgagacctttcttcagagagcttttctaggataacaaatagggttggatcaaaacctttcagggacacagagagacagagagagagagactaacagtttctactctgttgaaagatttcttcctccttgtttcttttcattttctctcaataatttttttttcttcaccctgccttgggaacattttctgcttttaaaaaactgtaccttgagcttgatcatttttatggcattttttttttttaagggcatatatagagttcattcttgggatggaaagctgaa

SEQ ID NO: 23879 - DNA, 2120 bp, Homo sapiens
  source 1..2120: mol_type = unassigned DNA
acccgcactgcagtctccagcctgagccatgggccgccgagccctcctgctcctgcttctgtcttttctggcgccctgggccaccatagccctccggccggccttaagggccctcggcagcctacacttgccaaccaaccccacatccctcccggctgtagccaagaactattcggttctctacttccaacagaaggcccttgctgctgggcagttgcacatatgtattatccaactaaatcattacaagactcctctggttgatcattttggatttaatactgtgaaaacttttaatcagcggtacctagtagctgataaatactggaagaaaaatggtggatcaatacttttctacactggtaatgaaggggacattatctggttttgtaataacacggggttcatgtgggatgtggctgaggaactgaaagctatgttggtgtttgctgaacatcgatactatggagagtctctcccctttggtgacaactcattcaaggattccagacacttgaatttcctgacatcagaacaagctctggctgattttgcagagttaatcaaacacttgaaaagaacaatcccaggagctgaaaatcaacctgtcattgccataggaggctcctatggtggcatgcttgccgcctggtttaggatgaaatatcctcatatggtagttggagctcttgcagcttctgcccctatctggcagtttgaggatttagtaccttgtggtgtatttatgaagatcgtaactacagattttaggaaaagcggtccacattgttcagagagcatccacaggtcctgggatgccattaatcgactctcaaatactggcagtggtttgcagtggcttactggagcccttcacttatgcagcccattaacttctcaggacatccaacatttgaaagactggatctctgaaacctgggtgaatctggcaatggtggactatccttatgcctctaactttttacagcctttgcctgcttggcctatcaaggtagtgtgccagtatttgaaaaatcccaatgtatctgattcactgctgctgcagaatattttccaagctctgaatgtatattacaattattcgggccaggtgaaatgcctgaatatttcagagacagcaactagcagtctgggaacactgggttggagctatcaggcctgcacagaagtagtcatgcccttttgtactaatggtgtcgatgacatgtttgaacctcactcatggaacttaaaggaactttctgatgactgttttcaacagtggggtgtgagaccaaggccctcctggatcactactatgtatggaggcaaaaacattagttcacacacaaacattgttttcagcaatggtgaactagacccctggtcaggaggtggagtaactaaggatatcacagacactctggttgcagtcaccatctcagagggggcccaccacttagatctccgcaccaagaatgccttggatcctatgtctgtgctgttagcccgctccttggaagttagacatatgaagaattggatcagagatttctatgacagtgcgggaaagcagcactgagaaacttttgattgttttcaatttcttcttttatgttcacaccaccacattcccattcactttgattttctacatgtaattaccttcttttgtttatcattagatttgatggggccaaagttgagatagaatagagggtgatgacggtaagagcaagtgtcccatgaatgtgatttcctgggttctcactgtctttgcaccacgtctaggaagaatcttcttgatagctctcccacaccatcagtggccctcataactggagtagagttcctggttgcttttcataagagggagagttactttctttgtatctctgcaagcagagatttctctttggttttgaggttgaagtgtctttggcccatttgtaagtccccatccctaccctacacaaagtaaaagcagaagatagataaaaaatgatgtaattgcagctggtaggatgtctggtgccaatccaggaagtgagagccatttcttttgtaccggatttaatgactttgaactgtgctgtaaataaataatacagctggacctt

SEQ ID NO: 23880 - DNA, 1397 bp, Homo sapiens
  source 1..1397: mol_type = unassigned DNA
gattactcagagccaatcagaagaaggcgccgcagagggtggagcttagcgaggaaatcctacaagcatctggaaacgaccattttcgtcaaactgcgggggttcatgtgggatgtggctgaggaactgaaagctatgttggtgtttgctgaacatcgatactatggagagtctctcccctttggtgacaactcattcaaggattccagacacttgaatttcctgacatcagaacaagctctggctgattttgcagagttaatcaaacacttgaaaagaacaatcccaggagctgaaaatcaacctgtcattgccataggaggctcctatggtggcatgcttgccgcctggtttaggatgaaatatcctcatatggtagttggagctcttgcagcttctgcccctatctggcagtttgaggatttagtaccttgtggtgtatttatgaagatcgtaactacagattttaggaaaagcggtccacattgttcagagagcatccacaggtcctgggatgccattaatcgactctcaaatactggcagtggtttgcagtggcttactggagcccttcacttatgcagcccattaacttctcaggacatccaacatttgaaagactggatctctgaaacctgggtgaatctggcaatggtggactatccttatgcctctaactttttacagcctttgcctgcttggcctatcaaggtagtgtgccagtatttgaaaaatcccaatgtatctgattcactgctgctgcagaatattttccaagctctgaatgtatattacaattattcgggccaggtgaaatgcctgaatatttcagagacagcaactagcagtctgggaacactgggttggagctatcaggcctgcacagaagtagtcatgcccttttgtactaatggtgtcgatgacatgtttgaacctcactcatggaacttaaaggaactttctgatgactgttttcaacagtggggtgtgagaccaaggccctcctggatcactactatgtatggaggcaaaaacattagttcacacacaaacattgttttcagcaatggtgaactagacccctggtcaggaggtggagtaactaaggatatcacagacactctggttgcagtcaccatctcagagggggcccaccacttagatctccgcaccaagaatgccttggatcctatgtctgtgctgttagcccgctccttggaagttagacatatgaagaattggatcagagatttctatgacagtgcgggaaagcagcactgagaaacttttgattgttttcaatttcttcttttatgttcacaccaccacattcccattcactttgattttctacatgtaattaccttcttttgtttatcattagatttgatggggcc

SEQ ID NO: 23881 - DNA, 2347 bp, Homo sapiens
  source 1..2347: mol_type = unassigned DNA
gcgcgctggcccggcacggcggtggtcttgcgggaggcgtgggctgggattgcggtgcctgtgcttcccggtgccagggtgtcatggaagggctgctgacaagatgcagagcattgcccgccctggccacctgcagccgccagctctctgggtatgttccttgcaggtttcaccactgtgccccaagaagagggcggcgcctgctgctgtctcgtgtgttccagccacagaaccttcgggaagaccgggtgctctccctgcaggacaaatctgatgacctgacctgtaagagccagcggctgatgctgcaggtgggcctgatctacccagcaagccccggctgttaccacctcctgccatataccgtccgtgccatggagaagctcgtgcgagtgatagaccaggagatgcaggccatcgggggccagaaagtcaacatgcccagcctcagcccggcagagctctggcaagccaccaaccggtgggacttgatgggcaaagagctgctaagacttagagacaggcatggcaaggaatactgcttaggaccaactcacgaggaagccattacggccttaattgcctcccagaagaaactgtcctacaagcagcttcccttcctgctgtaccaagtgacaaggaagtttcgggatgagcccaggccccgctttggtcttctccgtggccgagagttttacatgaaggatatgtacacctttgactcctccccagaggctgcccagcagacctacagcctggtgtgtgatgcctactgcagcctgttcaacaagctagggctgccatttgtcaaggtccaggccgatgtgggcaccatcgggggcacagtgtctcatgagttccagctcccagtggatattggagaggaccggcttgccatctgtccccgctgcagcttctcagccaacatggagacactagacttgtcacaaatgaactgccctgcttgccagggcccattgactaaaaccaaaggcattgaggtggggcacacattttacctgggtaccaagtactcatccattttcaatgcccagtttaccaatgtctgtggcaaaccaaccctggctgaaatggggtgctatggcttgggtgtgacacggatcttggctgctgccattgaagtcctctctacagaagactgtgtccgctggcccagcctactggccccttaccaagcctgcctcatcccccctaagaagggcagtaaggagcaggcggcctccgagctcatagggcagctgtacgaccacatcacagaggcagtgcctcagcttcacggggaggtgctcctggacgacaggacccatctgaccatcggaaacagactgaaagatgccaacaagtttggctacccctttgtgataatcgctggcaagagggccctggaggaccctgcacattttgaggtttggtgtcagaacactggtgaggtggccttcctcaccaaagatggagtcatggatttactgaccccagtgcagactgtctaaatgcccccagcccacccctgcccccatttgcagccttggtgttcgttctaacactgcattttcctacacccctttcctggactgctctctccagaaacagcacagctcatggagggtgagatcatgttagggaaatcaatttttatctagtcatttgttcagattatttgtatttaaagtcattaacttgatccctttctccagactggccatgccgccatatacctttccttttgtattccattgtggaagcttctaggaggctgagaagcaggagatccaagctccagtcctgggtgttaccctgaggggggaagtcacttcccttctctcagctgagtttttcacgtgtaagatgagaatggctgatggctgagagcccaccaaccttccccaccccgtatcagtttgaccacgggccttttgctacattctatccagagagcaggcctgccagcccctctccactgagaagttgggctgagagtatggggaaaagaatcaagagacctgactgccgccaactcactagtgacttagatacatcccctccccctgctggggcctcagtttccccatctgtaacttgagaaaatagaactagatctgtaaagtctggaactagatctgtaacgtccttataggtgtcactagggggttccatgagaggtgtgtgacaggcagtctgattcctctcattctccatagtctgtttcctggaaagtcgatgtaattaactgatggcccaaaaactacctcaagagacctggccctgttaagacggcttaaccactgagatcccgttctattgatttaataaagtcaaactattggaa

SEQ ID NO: 23882 - DNA, 766 bp, Homo sapiens
  source 1..766: mol_type = unassigned DNA
cgtttaccaagcaggctgacagagaaatttttcattttctttcttgtttgactgtatgcaaacatcaaactaagaatggcaaaaatgaatctctcttcctatatattaatactaactttttctttgttttctcaaggtattttactttcagcatccaagtccataagaaatttagatgatgacatggtatttaatacattcaggttggggaaaggctttcagaaggaagacactgcagaaaaatcagttattgctccttccctggaacaatataaaaatgatgagagcagtttcatgaacgaagaggaaaataaagtttcaaagaacacaggctccaaacataatttcttaaatcatggtctgccactgaatctggctataaaaccttatcttgcactaaaaggatctgtagctttcccagctgagaatggagttcagaatactgaatcaacacaagaaaagagagaaattggggatgaagaaaactcagctaaatttcctataggaaggagagattttgacatgctcagatgtatgctgggaagagtctaccgaccttgttggcaagtctgatacctgttggtccacatcatcttttcagaagaaaataaaagcatttaattgccaatgggaggagaagcccatactgctactataacttgtgtatgttaaatgtctgttttaaaagaaagtagtgttaagatgtatcagtaactgaaatgatatgctttctctgtgcattaaactttgtgaaaattctgcataa

SEQ ID NO: 23883 - DNA, 3977 bp, Homo sapiens
  source 1..3977: mol_type = unassigned DNA
ggatggtgccttgagtgaatgacccccttggagaacattcttccgcatccctcgcctcaagccagcctcagacagaaaactgaagattcagcagatccagtgcttcctgctcctcttctgcccaggaacacgcttgccttccccaaggcttccagaagctctgaggcaggaggcaccaagttctacctcatgtttggaggatcttgctagctatggccctcgtactcggctccctgttgctgctggggctgtgcgggaactccttttcaggagggcagccttcatccacagatgctcctaaggcttggaattatgaattgcctgcaacaaattatgagacccaagactcccataaagctggacccattggcattctctttgaactagtgcatatctttctctatgtggtacagccgcgtgatttcccagaagatactttgagaaaattcttacagaaggcatatgaatccaaaattgattatgacaagccagaaactgtaatcttaggtctaaagattgtctactatgaagcagggattattctatgctgtgtcctggggctgctgtttattattctgatgcctctggtggggtatttcttttgtatgtgtcgttgctgtaacaaatgtggtggagaaatgcaccagcgacagaaggaaaatgggcccttcctgaggaaatgctttgcaatctccctgttggtgatttgtataataataagcattggcatcttctatggttttgtggcaaatcaccaggtaagaacccggatcaaaaggagtcggaaactggcagatagcaatttcaaggacttgcgaactctcttgaatgaaactccagagcaaatcaaatatatattggcccagtacaacactaccaaggacaaggcgttcacagatctgaacagtatcaattcagtgctaggaggcggaattcttgaccgactgagacccaacatcatccctgttcttgatgagattaagtccatggcaacagcgatcaaggagaccaaagaggcgttggagaacatgaacagcaccttgaagagcttgcaccaacaaagtacacagcttagcagcagtctgaccagcgtgaaaactagcctgcggtcatctctcaatgaccctctgtgcttggtgcatccatcaagtgaaacctgcaacagcatcagattgtctctaagccagctgaatagcaaccctgaactgaggcagcttccacccgtggatgcagaacttgacaacgttaataacgttcttaggacagatttggatggcctggtccaacagggctatcaatcccttaatgatatacctgacagagtacaacgccaaaccacgactgtcgtagcaggtatcaaaagggtcttgaattccattggttcagatatcgacaatgtaactcagcgtcttcctattcaggatatactctcagcattctctgtttatgttaataacactgaaagttacatccacagaaatttacctacattggaagagtatgattcatactggtggctgggtggcctggtcatctgctctctgctgaccctcatcgtgattttttactacctgggcttactgtgtggcgtgtgcggctatgacaggcatgccaccccgaccacccgaggctgtgtctccaacaccggaggcgtcttcctcatggttggagttggattaagtttcctcttttgctggatattgatgatcattgtggttcttacctttgtctttggtgcaaatgtggaaaaactgatctgtgaaccttacacgagcaaggaattattccgggttttggatacaccctacttactaaatgaagactgggaatactatctctctgggaagctatttaataaatcaaaaatgaagctcacttttgaacaagtttacagtgactgcaaaaaaaatagaggcacttacggcactcttcacctgcagaacagcttcaatatcagtgaacatctcaacattaatgagcatactggaagcataagcagtgaattggaaagtctgaaggtaaatcttaatatctttctgttgggtgcagcaggaagaaaaaaccttcaggattttgctgcttgtggaatagacagaatgaattatgacagctacttggctcagactggtaaatcccccgcaggagtgaatcttttatcatttgcatatgatctagaagcaaaagcaaacagtttgcccccaggaaatttgaggaactccctgaaaagagatgcacaaactattaaaacaattcaccagcaacgagtccttcctatagaacaatcactgagcactctataccaaagcgtcaagatacttcaacgcacagggaatggattgttggagagagtaactaggattctagcttctctggattttgctcagaacttcatcacaaacaatacttcctctgttattattgaggaaactaagaagtatgggagaacaataataggatattttgaacattatctgcagtggatcgagttctctatcagtgagaaagtggcatcgtgcaaacctgtggccaccgctctagatactgctgttgatgtctttctgtgtagctacattatcgaccccttgaatttgttttggtttggcataggaaaagctactgtatttttacttccggctctaatttttgcggtaaaactggctaagtactatcgtcgaatggattcggaggacgtgtacgatgatgttgaaactatacccatgaaaaatatggaaaatggtaataatggttatcataaagatcatgtatatggtattcacaatcctgttatgacaagcccatcacaacattgatagctgatgttgaaactgcttgagcatcaggatactcaaagtggaaaggatcacagatttttggtagtttctgggtctacaaggactttccaaatccaggagcaacgccagtggcaacgtagtgactcaggcgggcaccaaggcaacggcaccattggtctctgggtagtgctttaagaatgaacacaatcacgttatagtccatggtccatcactattcaaggatgactccctcccttcctgtctatttttgttttttacttttttacactgagtttctatttagacactacaacatatggggtgtttgttcccattggatgcatttctatcaaaactctatcaaatgtgatggctagattctaacatattgccatgtgtggagtgtgctgaacacacaccagtttacaggaaagatgcattttgtgtacagtaaacggtgtatataccttttgttaccacagagttttttaaacaaatgagtattataggactttcttctaaatgagctaaataagtcaccattgacttcttggtgctgttgaaaataatccattttcactaaaagtgtgtgaaacctacagcatattcttcacgcagagattttcatctattatactttatcaaagattggccatgttccacttggaaatggcatgcaaaagcaatcatagagaaacctgcgtaactccatctgacaaattcaaaagagagagagagatcttgagagagaaatgctgttcgttcaaaagtggagttgttttaacagatgccaattacggtgtacagtttaacagagttttctgttgcattacgataaacattaattggagtgcagctaacatgagtatcatcagactagtatcaagtgttctaaaatgaaatatgagaagatcctgtcacaattcttagatctggtgtccagcatggatgaaacctttgagtttggtccctaaatttgcatgaaagcacaaggtaaatattcatttgcttcaggagtttcatgttggatctgtcattatcaaaagtgatcagcaatgaagaactggtcggacaaaatttaacgttgatgtaatgaaattccagatgtaggcattccccccaggtcttttcatgtgcagattgcagttctgattcatttgaataaaaaggaacttggaaaacatg

SEQ ID NO: 23884 - DNA, 4349 bp, Homo sapiens
  source 1..4349: mol_type = unassigned DNA
ctgctgcacactaaggatccaaatgattgtttttttgttttttgttttgttttgttttgttttgttttgttttaaattgcattgggattaggcaacagaagggtctaatgcggccgggatgagacaggagagtttttaggagggtagctgcattctaagtaagggactctgcggggggaaaagaggcgcaagcgttgcaagaagggagtgcagggggttgagcaggcacctctacaggaaatggatgctgtccaggtgctggtgggcgccccagggctacgtggcgaagcagctcagccggtccaatcagagtgcgtccagggctcgggtttcgcgatctttaagtgactgaggcagatccccacgcggcacctggccatgctctcagctctcccgccgcgggatggtgccttgagtgaatgacccccttggagaacattcttccgcatccctcgcctcaagccagcctcagacagaaaactgaagattcagcagatccagtgcttcctgctcctcttctgcccaggaacacgcttgccttccccaaggcttccagaagctctgaggcaggaggcaccaagttctacctcatgtttggaggatcttgctagctatggccctcgtactcggctccctgttgctgctggggctgtgcgggaactccttttcaggagggcagccttcatccacagatgctcctaaggcttggaattatgaattgcctgcaacaaattatgagacccaagactcccataaagctggacccattggcattctctttgaactagtgcatatctttctctatgtggtacagccgcgtgatttcccagaagatactttgagaaaattcttacagaaggcatatgaatccaaaattgattatgacaagattgtctactatgaagcagggattattctatgctgtgtcctggggctgctgtttattattctgatgcctctggtggggtatttcttttgtatgtgtcgttgctgtaacaaatgtggtggagaaatgcaccagcgacagaaggaaaatgggcccttcctgaggaaatgctttgcaatctccctgttggtgatttgtataataataagcattggcatcttctatggttttgtggcaaatcaccaggtaagaacccggatcaaaaggagtcggaaactggcagatagcaatttcaaggacttgcgaactctcttgaatgaaactccagagcaaatcaaatatatattggcccagtacaacactaccaaggacaaggcgttcacagatctgaacagtatcaattcagtgctaggaggcggaattcttgaccgactgagacccaacatcatccctgttcttgatgagattaagtccatggcaacagcgatcaaggagaccaaagaggcgttggagaacatgaacagcaccttgaagagcttgcaccaacaaagtacacagcttagcagcagtctgaccagcgtgaaaactagcctgcggtcatctctcaatgaccctctgtgcttggtgcatccatcaagtgaaacctgcaacagcatcagattgtctctaagccagctgaatagcaaccctgaactgaggcagcttccacccgtggatgcagaacttgacaacgttaataacgttcttaggacagatttggatggcctggtccaacagggctatcaatcccttaatgatatacctgacagagtacaacgccaaaccacgactgtcgtagcaggtatcaaaagggtcttgaattccattggttcagatatcgacaatgtaactcagcgtcttcctattcaggatatactctcagcattctctgtttatgttaataacactgaaagttacatccacagaaatttacctacattggaagagtatgattcatactggtggctgggtggcctggtcatctgctctctgctgaccctcatcgtgattttttactacctgggcttactgtgtggcgtgtgcggctatgacaggcatgccaccccgaccacccgaggctgtgtctccaacaccggaggcgtcttcctcatggttggagttggattaagtttcctcttttgctggatattgatgatcattgtggttcttacctttgtctttggtgcaaatgtggaaaaactgatctgtgaaccttacacgagcaaggaattattccgggttttggatacaccctacttactaaatgaagactgggaatactatctctctgggaagctatttaataaatcaaaaatgaagctcacttttgaacaagtttacagtgactgcaaaaaaaatagaggcacttacggcactcttcacctgcagaacagcttcaatatcagtgaacatctcaacattaatgagcatactggaagcataagcagtgaattggaaagtctgaaggtaaatcttaatatctttctgttgggtgcagcaggaagaaaaaaccttcaggattttgctgcttgtggaatagacagaatgaattatgacagctacttggctcagactggtaaatcccccgcaggagtgaatcttttatcatttgcatatgatctagaagcaaaagcaaacagtttgcccccaggaaatttgaggaactccctgaaaagagatgcacaaactattaaaacaattcaccagcaacgagtccttcctatagaacaatcactgagcactctataccaaagcgtcaagatacttcaacgcacagggaatggattgttggagagagtaactaggattctagcttctctggattttgctcagaacttcatcacaaacaatacttcctctgttattattgaggaaactaagaagtatgggagaacaataataggatattttgaacattatctgcagtggatcgagttctctatcagtgagaaagtggcatcgtgcaaacctgtggccaccgctctagatactgctgttgatgtctttctgtgtagctacattatcgaccccttgaatttgttttggtttggcataggaaaagctactgtatttttacttccggctctaatttttgcggtaaaactggctaagtactatcgtcgaatggattcggaggacgtgtacgatgatgttgaaactatacccatgaaaaatatggaaaatggtaataatggttatcataaagatcatgtatatggtattcacaatcctgttatgacaagcccatcacaacattgatagctgatgttgaaactgcttgagcatcaggatactcaaagtggaaaggatcacagatttttggtagtttctgggtctacaaggactttccaaatccaggagcaacgccagtggcaacgtagtgactcaggcgggcaccaaggcaacggcaccattggtctctgggtagtgctttaagaatgaacacaatcacgttatagtccatggtccatcactattcaaggatgactccctcccttcctgtctatttttgttttttacttttttacactgagtttctatttagacactacaacatatggggtgtttgttcccattggatgcatttctatcaaaactctatcaaatgtgatggctagattctaacatattgccatgtgtggagtgtgctgaacacacaccagtttacaggaaagatgcattttgtgtacagtaaacggtgtatataccttttgttaccacagagttttttaaacaaatgagtattataggactttcttctaaatgagctaaataagtcaccattgacttcttggtgctgttgaaaataatccattttcactaaaagtgtgtgaaacctacagcatattcttcacgcagagattttcatctattatactttatcaaagattggccatgttccacttggaaatggcatgcaaaagcaatcatagagaaacctgcgtaactccatctgacaaattcaaaagagagagagagatcttgagagagaaatgctgttcgttcaaaagtggagttgttttaacagatgccaattacggtgtacagtttaacagagttttctgttgcattacgataaacattaattggagtgcagctaacatgagtatcatcagactagtatcaagtgttctaaaatgaaatatgagaagatcctgtcacaattcttagatctggtgtccagcatggatgaaacctttgagtttggtccctaaatttgcatgaaagcacaaggtaaatattcatttgcttcaggagtttcatgttggatctgtcattatcaaaagtgatcagcaatgaagaactggtcggacaaaatttaacgttgatgtaatgaaattccagatgtaggcattccccccaggtcttttcatgtgcagattgcagttctgattcatttgaataaaaaggaacttggaaaaca

SEQ ID NO: 23885 - DNA, 4014 bp, Homo sapiens
  source 1..4014: mol_type = unassigned DNA
ggcgagctaagggaagggcggcggcagcggtgactagggcgggagcaggagcgggagccgggtgcacgggatggtgccttgagtgaatgacccccttggagaacattcttccgcatccctcgcctcaagccagcctcagacagaaaactgaagattcagcagatccagtgcttcctgctcctcttctgcccaggaacacgcttgccttccccaaggcttccagaagctctgaggcaggaggcaccaagttctacctcatgtttggaggatcttgctagctatggccctcgtactcggctccctgttgctgctggggctgtgcgggaactccttttcaggagggcagccttcatccacagatgctcctaaggcttggaattatgaattgcctgcaacaaattatgagacccaagactcccataaagctggacccattggcattctctttgaactagtgcatatctttctctatgtggtacagccgcgtgatttcccagaagatactttgagaaaattcttacagaaggcatatgaatccaaaattgattatgacaagattgtctactatgaagcagggattattctatgctgtgtcctggggctgctgtttattattctgatgcctctggtggggtatttcttttgtatgtgtcgttgctgtaacaaatgtggtggagaaatgcaccagcgacagaaggaaaatgggcccttcctgaggaaatgctttgcaatctccctgttggtgatttgtataataataagcattggcatcttctatggttttgtggcaaatcaccaggtaagaacccggatcaaaaggagtcggaaactggcagatagcaatttcaaggacttgcgaactctcttgaatgaaactccagagcaaatcaaatatatattggcccagtacaacactaccaaggacaaggcgttcacagatctgaacagtatcaattcagtgctaggaggcggaattcttgaccgactgagacccaacatcatccctgttcttgatgagattaagtccatggcaacagcgatcaaggagaccaaagaggcgttggagaacatgaacagcaccttgaagagcttgcaccaacaaagtacacagcttagcagcagtctgaccagcgtgaaaactagcctgcggtcatctctcaatgaccctctgtgcttggtgcatccatcaagtgaaacctgcaacagcatcagattgtctctaagccagctgaatagcaaccctgaactgaggcagcttccacccgtggatgcagaacttgacaacgttaataacgttcttaggacagatttggatggcctggtccaacagggctatcaatcccttaatgatatacctgacagagtacaacgccaaaccacgactgtcgtagcaggtatcaaaagggtcttgaattccattggttcagatatcgacaatgtaactcagcgtcttcctattcaggatatactctcagcattctctgtttatgttaataacactgaaagttacatccacagaaatttacctacattggaagagtatgattcatactggtggctgggtggcctggtcatctgctctctgctgaccctcatcgtgattttttactacctgggcttactgtgtggcgtgtgcggctatgacaggcatgccaccccgaccacccgaggctgtgtctccaacaccggaggcgtcttcctcatggttggagttggattaagtttcctcttttgctggatattgatgatcattgtggttcttacctttgtctttggtgcaaatgtggaaaaactgatctgtgaaccttacacgagcaaggaattattccgggttttggatacaccctacttactaaatgaagactgggaatactatctctctgggaagctatttaataaatcaaaaatgaagctcacttttgaacaagtttacagtgactgcaaaaaaaatagaggcacttacggcactcttcacctgcagaacagcttcaatatcagtgaacatctcaacattaatgagcatactggaagcataagcagtgaattggaaagtctgaaggtaaatcttaatatctttctgttgggtgcagcaggaagaaaaaaccttcaggattttgctgcttgtggaatagacagaatgaattatgacagctacttggctcagactggtaaatcccccgcaggagtgaatcttttatcatttgcatatgatctagaagcaaaagcaaacagtttgcccccaggaaatttgaggaactccctgaaaagagatgcacaaactattaaaacaattcaccagcaacgagtccttcctatagaacaatcactgagcactctataccaaagcgtcaagatacttcaacgcacagggaatggattgttggagagagtaactaggattctagcttctctggattttgctcagaacttcatcacaaacaatacttcctctgttattattgaggaaactaagaagtatgggagaacaataataggatattttgaacattatctgcagtggatcgagttctctatcagtgagaaagtggcatcgtgcaaacctgtggccaccgctctagatactgctgttgatgtctttctgtgtagctacattatcgaccccttgaatttgttttggtttggcataggaaaagctactgtatttttacttccggctctaatttttgcggtaaaactggctaagtactatcgtcgaatggattcggaggacgtgtacgatgatgttgaaactatacccatgaaaaatatggaaaatggtaataatggttatcataaagatcatgtatatggtattcacaatcctgttatgacaagcccatcacaacattgatagctgatgttgaaactgcttgagcatcaggatactcaaagtggaaaggatcacagatttttggtagtttctgggtctacaaggactttccaaatccaggagcaacgccagtggcaacgtagtgactcaggcgggcaccaaggcaacggcaccattggtctctgggtagtgctttaagaatgaacacaatcacgttatagtccatggtccatcactattcaaggatgactccctcccttcctgtctatttttgttttttacttttttacactgagtttctatttagacactacaacatatggggtgtttgttcccattggatgcatttctatcaaaactctatcaaatgtgatggctagattctaacatattgccatgtgtggagtgtgctgaacacacaccagtttacaggaaagatgcattttgtgtacagtaaacggtgtatataccttttgttaccacagagttttttaaacaaatgagtattataggactttcttctaaatgagctaaataagtcaccattgacttcttggtgctgttgaaaataatccattttcactaaaagtgtgtgaaacctacagcatattcttcacgcagagattttcatctattatactttatcaaagattggccatgttccacttggaaatggcatgcaaaagcaatcatagagaaacctgcgtaactccatctgacaaattcaaaagagagagagagatcttgagagagaaatgctgttcgttcaaaagtggagttgttttaacagatgccaattacggtgtacagtttaacagagttttctgttgcattacgataaacattaattggagtgcagctaacatgagtatcatcagactagtatcaagtgttctaaaatgaaatatgagaagatcctgtcacaattcttagatctggtgtccagcatggatgaaacctttgagtttggtccctaaatttgcatgaaagcacaaggtaaatattcatttgcttcaggagtttcatgttggatctgtcattatcaaaagtgatcagcaatgaagaactggtcggacaaaatttaacgttgatgtaatgaaattccagatgtaggcattccccccaggtcttttcatgtgcagattgcagttctgattcatttgaataaaaaggaacttggaaaa

SEQ ID NO: 23886 - DNA, 551 bp, Homo sapiens
  source 1..551: mol_type = unassigned DNA
agaggaactgcggggagagcgtggtggtgccggtgcccgtccaacccaaactttttagtctgagtggtggcccgcgacgccccgcttgggtcttctttccatccactggggatgggggcgggggtgggggtagccggcggccgtggttccggagcgggagtcggagggatggtgccttgagtgaatgacccccttggagaacattcttccgcatccctcgcctcaagccagcctcagacagaaaactgaagattcagcagatccagtgcttcctgctcctcttctgcccaggaacacgcttgccttccccaaggcttccagaagctctgaggcaggaggcaccaagttctacctcatgtttggaggatcttgctagctatggccctcgtactcggctccctgttgctgctggggctgtgcgggaactccttttcaggagggcagccttcatccacagatgctcctaaggcttggaattatgaattgcctgcaacaaattatgagacccaagactcccataaagctggacccattggcattctctttgaact

SEQ ID NO: 23887 - DNA, 567 bp, Homo sapiens
  source 1..567: mol_type = unassigned DNA
agaggaactgcggggagagcgtggtggtgccggtgcccgtccaacccaaactttttagtctgagtggtggcccgcgacgccccgcttgggtcttctttccatccactggggatgggggcgggggtgggggtagccggcggccgtggttccggagcgggagtcggaggtgagtgtgcgaactggaccggggccccagagacttcggactcgctctcggggagaacggtgaccgagggatggtgccttgagtgaatgacccccttggagaacattcttccgcatccctcgcctcaagccagcctcagacagaaaactgaagattcagcagatccagtgcttcctgctcctcttctgcccaggaacacgcttgccttccccaaggcttccagaagctctgaggcaggaggcaccaagttctacctcatgtttggaggatcttgctagctatggccctcgtactcggctccctgttgctgctggggctgtgcgggaactccttttcaggagggcagccttcatccacagatgctcctaaggcttggaattatgaattgcctgcaacaaatt

SEQ ID NO: 23888 - DNA, 4006 bp, Homo sapiens
  source 1..4006: mol_type = unassigned DNA
gactagggcgggagcaggagcgggagccgggtgcacgggatggtgccttgagtgaatgacccccttggagaacattcttccgcatccctcgcctcaagccagcctcagacagaaaactgaagattcagcagatccagtgcttcctgctcctcttctgcccaggaacacgcttgccttccccaaggcttccagaagctctgaggcaggaggcaccaagttctacctcatgtttggaggatcttgctagctatggccctcgtactcggctccctgttgctgctggggctgtgcgggaactccttttcaggagggcagccttcatccacagatgctcctaaggcttggaattatgaattgcctgcaacaaattatgagacccaagactcccataaagctggacccattggcattctctttgaactagtgcatatctttctctatgtggtacagccgcgtgatttcccagaagatactttgagaaaattcttacagaaggcatatgaatccaaaattgattatgacaagccagaaactgtaatcttaggtctaaagattgtctactatgaagcagggattattctatgctgtgtcctggggctgctgtttattattctgatgcctctggtggggtatttcttttgtatgtgtcgttgctgtaacaaatgtggtggagaaatgcaccagcgacagaaggaaaatgggcccttcctgaggaaatgctttgcaatctccctgttggtgatttgtataataataagcattggcatcttctatggttttgtggcaaatcaccaggtaagaacccggatcaaaaggagtcggaaactggcagatagcaatttcaaggacttgcgaactctcttgaatgaaactccagagcaaatcaaatatatattggcccagtacaacactaccaaggacaaggcgttcacagatctgaacagtatcaattcagtgctaggaggcggaattcttgaccgactgagacccaacatcatccctgttcttgatgagattaagtccatggcaacagcgatcaaggagaccaaagaggcgttggagaacatgaacagcaccttgaagagcttgcaccaacaaagtacacagcttagcagcagtctgaccagcgtgaaaactagcctgcggtcatctctcaatgaccctctgtgcttggtgcatccatcaagtgaaacctgcaacagcatcagattgtctctaagccagctgaatagcaaccctgaactgaggcagcttccacccgtggatgcagaacttgacaacgttaataacgttcttaggacagatttggatggcctggtccaacagggctatcaatcccttaatgatatacctgacagagtacaacgccaaaccacgactgtcgtagcaggtatcaaaagggtcttgaattccattggttcagatatcgacaatgtaactcagcgtcttcctattcaggatatactctcagcattctctgtttatgttaataacactgaaagttacatccacagaaatttacctacattggaagagtatgattcatactggtggctgggtggcctggtcatctgctctctgctgaccctcatcgtgattttttactacctgggcttactgtgtggcgtgtgcggctatgacaggcatgccaccccgaccacccgaggctgtgtctccaacaccggaggcgtcttcctcatggttggagttggattaagtttcctcttttgctggatattgatgatcattgtggttcttacctttgtctttggtgcaaatgtggaaaaactgatctgtgaaccttacacgagcaaggaattattccgggttttggatacaccctacttactaaatgaagactgggaatactatctctctgggaagctatttaataaatcaaaaatgaagctcacttttgaacaagtttacagtgactgcaaaaaaaatagaggcacttacggcactcttcacctgcagaacagcttcaatatcagtgaacatctcaacattaatgagcatactggaagcataagcagtgaattggaaagtctgaaggtaaatcttaatatctttctgttgggtgcagcaggaagaaaaaaccttcaggattttgctgcttgtggaatagacagaatgaattatgacagctacttggctcagactggtaaatcccccgcaggagtgaatcttttatcatttgcatatgatctagaagcaaaagcaaacagtttgcccccaggaaatttgaggaactccctgaaaagagatgcacaaactattaaaacaattcaccagcaacgagtccttcctatagaacaatcactgagcactctataccaaagcgtcaagatacttcaacgcacagggaatggattgttggagagagtaactaggattctagcttctctggattttgctcagaacttcatcacaaacaatacttcctctgttattattgaggaaactaagaagtatgggagaacaataataggatattttgaacattatctgcagtggatcgagttctctatcagtgagaaagtggcatcgtgcaaacctgtggccaccgctctagatactgctgttgatgtctttctgtgtagctacattatcgaccccttgaatttgttttggtttggcataggaaaagctactgtatttttacttccggctctaatttttgcggtaaaactggctaagtactatcgtcgaatggattcggaggacgtgtacgatgatgttgaaactatacccatgaaaaatatggaaaatggtaataatggttatcataaagatcatgtatatggtattcacaatcctgttatgacaagcccatcacaacattgatagctgatgttgaaactgcttgagcatcaggatactcaaagtggaaaggatcacagatttttggtagtttctgggtctacaaggactttccaaatccaggagcaacgccagtggcaacgtagtgactcaggcgggcaccaaggcaacggcaccattggtctctgggtagtgctttaagaatgaacacaatcacgttatagtccatggtccatcactattcaaggatgactccctcccttcctgtctatttttgttttttacttttttacactgagtttctatttagacactacaacatatggggtgtttgttcccattggatgcatttctatcaaaactctatcaaatgtgatggctagattctaacatattgccatgtgtggagtgtgctgaacacacaccagtttacaggaaagatgcattttgtgtacagtaaacggtgtatataccttttgttaccacagagttttttaaacaaatgagtattataggactttcttctaaatgagctaaataagtcaccattgacttcttggtgctgttgaaaataatccattttcactaaaagtgtgtgaaacctacagcatattcttcacgcagagattttcatctattatactttatcaaagattggccatgttccacttggaaatggcatgcaaaagcaatcatagagaaacctgcgtaactccatctgacaaattcaaaagagagagagagatcttgagagagaaatgctgttcgttcaaaagtggagttgttttaacagatgccaattacggtgtacagtttaacagagttttctgttgcattacgataaacattaattggagtgcagctaacatgagtatcatcagactagtatcaagtgttctaaaatgaaatatgagaagatcctgtcacaattcttagatctggtgtccagcatggatgaaacctttgagtttggtccctaaatttgcatgaaagcacaaggtaaatattcatttgcttcaggagtttcatgttggatctgtcattatcaaaagtgatcagcaatgaagaactggtcggacaaaatttaacgttgatgtaatgaaattccagatgtaggcattccccccaggtcttttcatgtgcagattgcagttctgattcatttgaataaaaaggaacttgg

SEQ ID NO: 23889 - DNA, 568 bp, Homo sapiens
  source 1..568: mol_type = unassigned DNA
attcttttgtgtcccgcagctcgcgagaggcttccgcccagaagggagctaggcctggagggggcttggcctggaggtggtttggagggagggcactgaagggacagtgtcttgatgtcatagttagatcttggactttgaaggcaaactagtgggtttgactcttggccacatggttaatcacctgtgaccttgggcaagtcaccagaatcctctctgtgtcagtttcctcatctgcaaaatggaataatgccttaaacaaggaggaccttgtttctatctatgaagcatggagaacagtgcctggaagataggatggtgccttgagtgaatgacccccttggagaacattcttccgcatccctcgcctcaagccagcctcagacagaaaactgaagattcagcagatccagtgcttcctgctcctcttctgcccaggaacacgcttgccttccccaaggcttccagaagctctgaggcaggaggcaccaagttctacctcatgtttggaggatcttgctagctatggccctcgtactcggctccctgttgctgctggggctgtgcg

SEQ ID NO: 23890 - DNA, 3884 bp, Homo sapiens
  source 1..3884: mol_type = unassigned DNA
ggatggtgccttgagtgaatgacccccttggagaacattcttccgcatccctcgcctcaagccagcctcagacagaaaactgaagattcagcagatccagtgcttcctgctcctcttctgcccaggaacacgcttgccttccccaaggcttccagaagctctgaggcaggaggcaccaagttctacctcatgtttggaggatcttgctagctatggccctcgtactcggctccctgttgctgctggggctgtgcgggaactccttttcaggagggcagccttcatccacagatgctcctaaggcttggaattatgaattgcctgcaacaaattatgagacccaagactcccataaagctggacccattggcattctctttgaactagtgcatatctttctctatgtggtacagccgcgtgatttcccagaagatactttgagaaaattcttacagaaggcatatgaatccaaaattgattatgacaagccagaaactgtaatcttaggtctaaagattgtctactatgaagcagggattattctatgctgtgtcctggggctgctgtttattattctgatgcctctggtggggtatttcttttgtatgtgtcgttgctgtaacaaatgtggtggagaaatgcaccagcgacagaaggaaaatgggcccttcctgaggaaatgctttgcaatctccctgttggtgatttgtataataataagcattggcatcttctatggttttgtggcaaatcaccaggtaagaacccggatcaaaaggagtcggaaactggcagatagcaatttcaaggacttgcgaactctcttgaatgaaactccagagcaaatcaaatatatattggcccagtacaacactaccaaggacaaggcgttcacagatctgaacagtatcaattcagtgctaggaggcggaattcttgaccgactgagacccaacatcatccctgttcttgatgagattaagtccatggcaacagcgatcaaggagaccaaagaggcgttggagaacatgaacagcaccttgaagagcttgcaccaacaaagtacacagcttagcagcagtctgaccagcgtgaaaactagcctgcggtcatctctcaatgaccctctgtgcttggtgcatccatcaagtgaaacctgcaacagcatcagattgtctctaagccagctgaatagcaaccctgaactgaggcagcttccacccgtggatgcagaacttgacaacgttaataacgttcttaggacagatttggatggcctggtccaacagggctatcaatcccttaatgatatacctgacagagtacaacgccaaaccacgactgtcgtagcaggtatcaaaagggtcttgaattccattggttcagatatcgacaatgtaactcagcgtcttcctattcaggatatactctcagcattctctgtttatgttaataacactgaaagttacatccacagaaatttacctacattggaagagtatgattcatactggtggctgggtggcctggtcatctgctctctgctgaccctcatcgtgattttttactacctgggcttactgtgtggcgtgtgcggctatgacaggcatgccaccccgaccacccgaggctgtgtctccaacaccggaggcgtcttcctcatggttggagttggattaagtttcctcttttgctggatattgatgatcattgtggttcttacctttgtctttggtgcaaatgtggaaaaactgatctgtgaaccttacacgagcaaggaattattccgggttttggatacaccctacttactaaatgaagactgggaatactatctctctgggaagctatttaataaatcaaaaatgaagctcacttttgaacaagtttacagtgactgcaaaaaaaatagaggcacttacggcactcttcacctgcagaacagcttcaatatcagtgaacatctcaacattaatgagcatactggaagcataagcagtgaattggaaagtctgaaggtaaatcttaatatctttctgttgggtgcagcaggaagaaaaaaccttcaggattttgctgcttgtggaatagacagaatgaattatgacagctacttggctcagactggtaaatcccccgcaggagtgaatcttttatcatttgcatatgatctagaagcaaaagcaaacagtttgcccccaggaaatttgaggaactccctgaaaagagatgcacaaactattaaaacaattcaccagcaacgagtccttcctatagaacaatcactgagcactctataccaaagcgtcaagatacttcaacgcacagggaatggattgttggagagagtaactaggattctagcttctctggattttgctcagaacttcatcacaaacaatacttcctctgttattattgaggaaactaagaagtatgggagaacaataataggatattttgaacattatctgcagtggatcgagttctctatcagtgagaaagtggcatcgtgcaaacctgtggccaccgctctagatactgctgttgatgtctttctgtgtagctacattatcgaccccttgaatttgttttggtttggcataggaaaagctactgtatttttacttccggctctaatttttgcggtaaaactggctaagtactatcgtcgaatggattcggaggacgtgtacgatgacccatcacaacattgatagctgatgttgaaactgcttgagcatcaggatactcaaagtggaaaggatcacagatttttggtagtttctgggtctacaaggactttccaaatccaggagcaacgccagtggcaacgtagtgactcaggcgggcaccaaggcaacggcaccattggtctctgggtagtgctttaagaatgaacacaatcacgttatagtccatggtccatcactattcaaggatgactccctcccttcctgtctatttttgttttttacttttttacactgagtttctatttagacactacaacatatggggtgtttgttcccattggatgcatttctatcaaaactctatcaaatgtgatggctagattctaacatattgccatgtgtggagtgtgctgaacacacaccagtttacaggaaagatgcattttgtgtacagtaaacggtgtatataccttttgttaccacagagttttttaaacaaatgagtattataggactttcttctaaatgagctaaataagtcaccattgacttcttggtgctgttgaaaataatccattttcactaaaagtgtgtgaaacctacagcatattcttcacgcagagattttcatctattatactttatcaaagattggccatgttccacttggaaatggcatgcaaaagcaatcatagagaaacctgcgtaactccatctgacaaattcaaaagagagagagagatcttgagagagaaatgctgttcgttcaaaagtggagttgttttaacagatgccaattacggtgtacagtttaacagagttttctgttgcattacgataaacattaattggagtgcagctaacatgagtatcatcagactagtatcaagtgttctaaaatgaaatatgagaagatcctgtcacaattcttagatctggtgtccagcatggatgaaacctttgagtttggtccctaaatttgcatgaaagcacaaggtaaatattcatttgcttcaggagtttcatgttggatctgtcattatcaaaagtgatcagcaatgaagaactggtcggacaaaatttaacgttgatgtaatgaaattccagatgtaggcattccccccaggtcttttcatgtgcagattgcagttctgattcatttgaataaaaaggaacttggaaaacatg

SEQ ID NO: 23891 - DNA, 3908 bp, Homo sapiens
  source 1..3908: mol_type = unassigned DNA
ggatggtgccttgagtgaatgacccccttggagaacattcttccgcatccctcgcctcaagccagcctcagacagaaaactgaagattcagcagatccagtgcttcctgctcctcttctgcccaggaacacgcttgccttccccaaggcttccagaagctctgaggcaggaggcaccaagttctacctcatgtttggaggatcttgctagctatggccctcgtactcggctccctgttgctgctggggctgtgcgggaactccttttcaggagggcagccttcatccacagatgctcctaaggcttggaattatgaattgcctgcaacaaattatgagacccaagactcccataaagctggacccattggcattctctttgaactagtgcatatctttctctatgtggtacagccgcgtgatttcccagaagatactttgagaaaattcttacagaaggcatatgaatccaaaattgattatgacaagccagaaactgtaatcttaggtctaaagattgtctactatgaagcagggattattctatgctgtgtcctggggctgctgtttattattctgatgcctctggtggggtatttcttttgtatgtgtcgttgctgtaacaaatgtggtggagaaatgcaccagcgacagaaggaaaatgggcccttcctgaggaaatgctttgcaatctccctgttggtgatttgtataataataagcattggcatcttctatggttttgtggcaaatcaccaggtaagaacccggatcaaaaggagtcggaaactggcagatagcaatttcaaggacttgcgaactctcttgaatgaaactccagagcaaatcaaatatatattggcccagtacaacactaccaaggacaaggcgttcacagatctgaacagtatcaattcagtgctaggaggcggaattcttgaccgactgagacccaacatcatccctgttcttgatgagattaagtccatggcaacagcgatcaaggagaccaaagaggcgttggagaacatgaacagcaccttgaagagcttgcaccaacaaagtacacagcttagcagcagtctgaccagcgtgaaaactagcctgcggtcatctctcaatgaccctctgtgcttggtgcatccatcaagtgaaacctgcaacagcatcagattgtctctaagccagctgaatagcaaccctgaactgaggcagcttccacccgtggatgcagaacttgacaacgttaataacgttcttaggacagatttggatggcctggtccaacagggctatcaatcccttaatgatatacctgacagagtacaacgccaaaccacgactgtcgtagcaggtatcaaaagggtcttgaattccattggttcagatatcgacaatgtaactcagcgtcttcctattcaggatatactctcagcattctctgtttatgttaataacactgaaagttacatccacagaaatttacctacattggaagagtatgattcatactggtggctgggtggcctggtcatctgctctctgctgaccctcatcgtgattttttactacctgggcttactgtgtggcgtgtgcggctatgacaggcatgccaccccgaccacccgaggctgtgtctccaacaccggaggcgtcttcctcatggttggagttggattaagtttcctcttttgctggatattgatgatcattgtggttcttacctttgtctttggtgcaaatgtggaaaaactgatctgtgaaccttacacgagcaaggaattattccgggttttggatacaccctacttactaaatgaagactgggaatactatctctctgggaagctatttaataaatcaaaaatgaagctcacttttgaacaagtttacagtgactgcaaaaaaaatagaggcacttacggcactcttcacctgcagaacagcttcaatatcagtgaacatctcaacattaatgagcatactggaagcataagcagtgaattggaaagtctgaaggtaaatcttaatatctttctgttgggtgcagcaggaagaaaaaaccttcaggattttgctgcttgtggaatagacagaatgaattatgacagctacttggctcagactggtaaatcccccgcaggagtgaatcttttatcatttgcatatgatctagaagcaaaagcaaacagtttgcccccaggaaatttgaggaactccctgaaaagagatgcacaaactattaaaacaattcaccagcaacgagtccttcctatagaacaatcactgagcactctataccaaagcgtcaagatacttcaacgcacagggaatggattgttggagagagtaactaggattctagcttctctggattttgctcagaacttcatcacaaacaatacttcctctgttattattgaggaaactaagaagtatgggagaacaataataggatattttgaacattatctgcagtggatcgagttctctatcagtgagaaagtggcatcgtgcaaacctgtggccaccgctctagatactgctgttgatgtctttctgtgtagctacattatcgaccccttgaatttgttttggtttggcataggaaaagctactgtatttttacttccggctctaatttttgcggtaaaactggctaagtactatcgtcgaatggattcggaggacgtgtacgatgatgttgaaactatacccatgaaaaacccatcacaacattgatagctgatgttgaaactgcttgagcatcaggatactcaaagtggaaaggatcacagatttttggtagtttctgggtctacaaggactttccaaatccaggagcaacgccagtggcaacgtagtgactcaggcgggcaccaaggcaacggcaccattggtctctgggtagtgctttaagaatgaacacaatcacgttatagtccatggtccatcactattcaaggatgactccctcccttcctgtctatttttgttttttacttttttacactgagtttctatttagacactacaacatatggggtgtttgttcccattggatgcatttctatcaaaactctatcaaatgtgatggctagattctaacatattgccatgtgtggagtgtgctgaacacacaccagtttacaggaaagatgcattttgtgtacagtaaacggtgtatataccttttgttaccacagagttttttaaacaaatgagtattataggactttcttctaaatgagctaaataagtcaccattgacttcttggtgctgttgaaaataatccattttcactaaaagtgtgtgaaacctacagcatattcttcacgcagagattttcatctattatactttatcaaagattggccatgttccacttggaaatggcatgcaaaagcaatcatagagaaacctgcgtaactccatctgacaaattcaaaagagagagagagatcttgagagagaaatgctgttcgttcaaaagtggagttgttttaacagatgccaattacggtgtacagtttaacagagttttctgttgcattacgataaacattaattggagtgcagctaacatgagtatcatcagactagtatcaagtgttctaaaatgaaatatgagaagatcctgtcacaattcttagatctggtgtccagcatggatgaaacctttgagtttggtccctaaatttgcatgaaagcacaaggtaaatattcatttgcttcaggagtttcatgttggatctgtcattatcaaaagtgatcagcaatgaagaactggtcggacaaaatttaacgttgatgtaatgaaattccagatgtaggcattccccccaggtcttttcatgtgcagattgcagttctgattcatttgaataaaaaggaacttggaaaacatg

SEQ ID NO: 23892 - DNA, 2773 bp, Homo sapiens
  source 1..2773: mol_type = unassigned DNA
gcgatctttaagtgactgaggcagatccccacgcggcacctggccatgctctcagctctcccgccgcgggatggtgccttgagtgaatgacccccttggagaacattcttccgcatccctcgcctcaagccagcctcagacagaaaactgaagattcagcagatccagtgcttcctgctcctcttctgcccaggaacacgcttgccttccccaaggcttccagaagctctgaggcaggaggcaccaagttctacctcatgtttggaggatcttgctagctatggccctcgtactcggctccctgttgctgctggggctgtgcgggaactccttttcaggagggcagccttcatccacagatgctcctaaggcttggaattatgaattgcctgcaacaaattatgagacccaagactcccataaagctggacccattggcattctctttgaactagtgcatatctttctctatgtggtacagccgcgtgatttcccagaagatactttgagaaaattcttacagaaggcatatgaatccaaaattgattatgacaagattgtctactatgaagcagggattattctatgctgtgtcctggggctgctgtttattattctgatgcctctggtggggtatttcttttgtatgtgtcgttgctgtaacaaatgtggtggagaaatgcaccagcgacagaaggaaaatgggcccttcctgaggaaatgctttgcaatctccctgttggtgatttgtataataataagcattggcatcttctatggttttgtggcaaatcaccaggtaagaacccggatcaaaaggagtcggaaactggcagatagcaatttcaaggacttgcgaactctcttgaatgaaactccagagcaaatcaaatatatattggcccagtacaacactaccaaggacaaggcgttcacagatctgaacagtatcaattcagtgctaggaggcggaattcttgaccgactgagacccaacatcatccctgttcttgatgagattaagtccatggcaacagcgatcaaggagaccaaagaggcgttggagaacatgaacagcaccttgaagagcttgcaccaacaaagtacacagcttagcagcagtctgaccagcgtgaaaactagcctgcggtcatctctcaatgaccctctgtgcttggtgcatccatcaagtgaaacctgcaacagcatcagattgtctctaagccagctgaatagcaaccctgaactgaggcagcttccacccgtggatgcagaacttgacaacgttaataacgttcttaggacagatttggatggcctggtccaacagggctatcaatcccttaatgatatacctgacagagtacaacgccaaaccacgactgtcgtagcaggtatcaaaagggtcttgaattccattggttcagatatcgacaatgtaactcagcgtcttcctattcaggatatactctcagcattctctgtttatgttaataacactgaaagttacatccacagaaatttacctacattggaagagtatgattcatactggtggctgggtggcctggtcatctgctctctgctgaccctcatcgtgattttttactacctgggcttactgtgtggcgtgtgcggctatgacaggcatgccaccccgaccacccgaggctgtgtctccaacaccggaggcgtcttcctcatggttggagttggattaagtttcctcttttgctggatattgatgatcattgtggttcttacctttgtctttggtgcaaatgtggaaaaactgatctgtgaaccttacacgagcaaggaattattccgggttttggatacaccctacttactaaatgaagactgggaatactatctctctgggaagctatttaataaatcaaaaatgaagctcacttttgaacaagtttacagtgactgcaaaaaaaatagaggcacttacggcactcttcacctgcagaacagcttcaatatcagtgaacatctcaacattaatgagcatactggaagcataagcagtgaattggaaagtctgaaggtaaatcttaatatctttctgttgggtgcagcaggaagaaaaaaccttcaggattttgctgcttgtggaatagacagaatgaattatgacagctacttggctcagactggtaaatcccccgcaggagtgaatcttttatcatttgcatatgatctagaagcaaaagcaaacagtttgcccccaggaaatttgaggaactccctgaaaagagatgcacaaactattaaaacaattcaccagcaacgagtccttcctatagaacaatcactgagcactctataccaaagcgtcaagatacttcaacgcacagggaatggattgttggagagagtaactaggattctagcttctctggattttgctcagaacttcatcacaaacaatacttcctctgttattattgaggaaactaagaagtatgggagaacaataataggatattttgaacattatctgcagtggatcgagttctctatcagtgagaaagtggcatcgtgcaaacctgtggccaccgctctagatactgctgttgatgtctttctgtgtagctacattatcgaccccttgaatttgttttggtttggcataggaaaagctactgtatttttacttccggctctaatttttgcggtaaaactggctaagtactatcgtcgaatggattcggaggacgtgtacgatgatagtagttgggtcacttctgttcagtgttga

SEQ ID NO: 23893 - DNA, 1464 bp, Homo sapiens
  source 1..1464: mol_type = unassigned DNA
gcatcccggtggggagaagggccaggcagagaaaagtagtcagaaacagagcaacaggtgaggctgaggcaggagattgagctgacactcaagccaaggaagggggaattaggaaacaattagaaaaaaagtaaagacagtgaaaaagtcagagacagctgcctgcacctacacacacattcagagacagagtcccagagggtggcatacacagagggagaaggggagggaacaggtgtggagaggagctgcggaagcagagaaatctcaagtcagagattcagggacacttggtccccgtggcgagccatggaagcagaaaggaggcgccaggctgagaagccaaagaaggggcgagtcggcagcaacctgttgcctgagagacacccggccactgggaccccgaccaccacggtggactcgagtgctccaccctgcagaaggctccctggtgcaggaggggggagatcaaggttctccccgcaaggaggacagaggggccgcccgcactcccggcgccgccaccgcaccaccttcagcccagtgcagttggaacagctggagtcagcctttgggaggaaccagtaccccgacatctgggcccgagagagtcttgcccgggacactggcctcagtgaggcccgaatccaggtctggttccagaaccgcagagctaagcaacggaagcaagagcgctcactgcttcagcctctggcccatctgtctcctgccgccttttccagcttcttgccagagtccactgcttgcccctattcttacgcagcaccaccaccaccagtgacctgcttccctcacccctacagccatgccctcccttcccagccctccacaggaggcgcctttgctttgtcacaccagtctgaggactggtaccctaccttgcacccagcccctgccggccatctgccctgccccccaccccctcccatgctccccctcagccttgagccatccaagtcctggaactgaggtcaaacaagtaccaccaaggtgatccccagcctgcggccctcgtgaaaagacaagaaaatggggtggcttcctttccatctatgggtgaagcagatgcatggtgagggtcagctcagcgattagaaatttaaaaatgggagatcatggtgaattctcactggggtgattagtggaggaagtctggggaggtgagctactggaagagacagggcaagatgcctcggtggagctgcctgctgaagggtgatattgatgaagacagttgctggtgagtggagatgattgaagggctaggaggtgagggccttcattaattgagatcacgattgaagaagatcccagctctttctggctgatttcagtaaggcttctgacttaagagtctacctatacatcccttccccattgcccaccccgccatctcaatcagtcactgacttttgtttattctgtcctagaaatacctttttt

SEQ ID NO: 23894 - DNA, 1226 bp, Homo sapiens
  source 1..1226: mol_type = unassigned DNA
aacatcagtttatgtcctgaaatatgttttcagaaaatagaaagccaagtatatttcgtccgagtggacagtggcatccaaccaggaagtgatattagcatttattatgatcctatgatttcaaaactaatcacatatggctctgatagaactgaggcactgaagagaatggcagatgcactggataactatgttattcgaggtgttacacataatattgcattacttcgagaggtgataatcaactcacgctttgtaaaaggagacatcagcactaaatttctctccgatgtgtatcctgatggcttcaaaggacacatgctaaccaagagtgagaagaaccagttattggcaatagcatcatcattgtttgtggcattccagttaagagcacaacattttcaagaaaattcaagaatgcctgttattaaaccagacatagccaactgggagctctcagtaaaattgcatgataaagttcataccgtagtagcatcaaacaatgggtcagtgttctcggtggaagttgatgggtcgaaactaaatgtgaccagcacgtggaacctggcttcgcccttattgtctgtcagcgttgatggcactcagaggactgtccagtgtctttctcgagaagcaggtggaaacatgagcattcagtttcttggtacagtgtacaaggtgaatatcttaaccagacttgccgcagaattgaacaaatttatgctggaaaaagtgactgaggacacaagcagtgttctgcgttccccgatgcccggagtggtggtggccgtctctgtcaagcctggagacgcggtagcagaaggtcaagaaatttgtgtgattgaagccatgaaaatgcagaatagtatgacagctgggaaaactggcacggtgaaatctgtgcactgtcaagctggagacacagttggagaaggggatctgctcgtggagctggaatgaaggatttataacctttcagtcatcacccaatttaattagccatttgcatgatgctttcacacacaattgattcaagcattatacaggaacacccctgtgcagctacgtttacgtcgtcatttattccacagagtcaagaccaatattctgccaaaaaatcaccaatggaaattttcattgatataaatacttgtacatatgatttgtacttctgctgtgagattccctagtgtcaaaattaaatcaataaaactgagcatttgtct

SEQ ID NO: 23895 - DNA, 2507 bp, Homo sapiens
  source 1..2507: mol_type = unassigned DNA
acaacaatggcggggttctgggtcgggacagcaccgctggtcgctgccggacggcgtgggcggtggccgccgcagcagctgatgctgagcgcggcgctgcggaccctgaagcatgttctgtactattcaagacagtgcttaatggtgtcccgtaatcttggttcagtgggatatgatcctaatgaaaaaacttttgataaaattcttgttgctaatagaggagaaattgcatgtcgggttattagaacttgcaagaagatgggcattaagacagttgccatccacagtgatgttgatgctagttctgttcatgtgaaaatggcggatgaggctgtctgtgttggcccagctcccaccagtaaaagctacctcaacatggatgccatcatggaagccattaagaaaaccagggcccaagctgtacatccaggttatggattcctttcagaaaacaaagaatttgccagatgtttggcagcagaagatgtcgttttcattggacctgacacacatgctattcaagccatgggcgacaagattgaaagcaaattattagctaagaaagcagaggttaatacaatccctggctttgatggagtagtcaaggatgcagaagaagctgtcagaattgcaagggaaattggctaccctgtcatgatcaaggcctcagcaggtggtggtgggaaaggcatgcgcattgcttgggatgatgaagagaccagggatggttttagattgtcatctcaagaagctgcttctagttttggcgatgatagactactaatagaaaaatttattgataatcctcgtcatatagaaatccaggttctaggtgataaacatgggaatgctttatggcttaatgaaagagagtgctcaattcagagaagaaatcagaaggtggtggaggaagcaccaagcatttttttggatgcggagactcgaagagcgatgggagaacaagctgtagctcttgccagagcagtaaaatattcctctgctgggaccgtggagttccttgtggactctaagaagaatttttatttcttggaaatgaatacaagactccaggttgagcatcctgtcacagaatgcattactggcctggacctagtccaggaaatgatccgtgttgctaagggctaccctctcaggcacaaacaagctgatattcgcatcaacggctgggcagttgaatgtcgggtttatgctgaggacccctacaagtcttttggtttaccatctattgggagattgtctcagtaccaagaaccgttacatctacctggtgtccgagtggacagtggcatccaaccaggaagtgatattagcatttattatgatcctatgatttcaaaactaatcacatatggctctgatagaactgaggcactgaagagaatggcagatgcactggataactatgttattcgaggtgttacacataatattgcattacttcgagaggtgataatcaactcacgctttgtaaaaggagacatcagcactaaatttctctccgatgtgtatcctgatggcttcaaaggacacatgctaaccaagagtgagaagaaccagttattggcaatagcatcatcattgtttgtggcattccagttaagagcacaacattttcaagaaaattcaagaatgcctgttattaaaccagacatagccaactgggagctctcagtaaaattgcatgataaagttcataccgtagtagcatcaaacaatgggtcagtgttctcggtggaagttgatgggtcgaaactaaatgtgaccagcacgtggaacctggcttcgcccttattgtctgtcagcgttgatggcactcagaggactgtccagtgtctttctcgagaagcaggtggaaacatgagcattcagtttcttggtacagtgtacaaggtgaatatcttaaccagacttgccgcagaattgaacaaatttatgctggaaaaagtgactgaggacacaagcagtgttctgcgttccccgatgcccggagtggtggtggccgtctctgtcaagcctggagacgcggcaacctcgagtctgtctgtagagatctgcctattctggacatttcaggtagcagaaggtcaagaaatttgtgtgattgaagccatgaaaatgcagaatagtatgacagctgggaaaactggcacggtgaaatctgtgcactgtcaagctggagacacagttggagaaggggatctgctcgtggagctggaatgaaggatttataacctttcagtcatcacccaatttaattagccatttgcatgatgctttcacacacaattgattcaagcattatacaggaacacccctgtgcagctacgtttacgtcgtcatttattccacagagtcaagaccaatattctgccaaaaaatcaccaatggaaattttcattgatataaatacttgtacatatgatttgtacttctgctgtgagattccctagtgtcaaaattaaatcaataaaactgagcatttgtct

SEQ ID NO: 23896 - DNA, 2418 bp, Homo sapiens
  source 1..2418: mol_type = unassigned DNA
ggcatcgggtttctggctcgtgatttgccggagctcctgcgctccccttctccaccccctccggctgtgtgagaggtcagcagaggggcggtctgcggggacaacaatggcggggttctgggtcgggacagcaccgctggtcgctgccggacggcgtgggcggtggccgccgcagcagctgatgctgagcgcggcgctgcggaccctgaagcatgttctgtactattcaagacagtgcttaatggtgtcccgtaatcttggttcagtgggatatgatcctaatgaaaaaacttttgataaaattcttgttgctaatagaggagaaattgcatgtcgggttattagaacttgcaagaagatgggcattaagacagttgccatccacagtgatgttgatgctagttctgttcatgtgaaaatggcggatgaggctgtctgtgttggcccagctcccaccagtaaaagctacctcaacatggatgccatcatggaagccattaagaaaaccagggcccaagctgtacatccaggttatggattcctttcagaaaacaaagaatttgccagatgtttggcagcagaagatgtcgttttcattggacctgacacacatgctattcaagccatgggcgacaagattgaaagcaaattattagctaagaaagcagaggttaatacaatccctggctttgatggagtagtcaaggatgcagaagaagctgtcagaattgcaagggaaattggctaccctgtcatgatcaaggcctcagcaggtggtggtgggaaaggcatgcgcattgcttgggatgatgaagagaccagggatggttttagattgtcatctcaagaagctgcttctagttttggcgatgatagactactaatagaaaaatttattgataatcctcgtcatatagaaatccaggttctaggtgataaacatgggaatgctttatggcttaatgaaagagagtgctcaattcagagaagaaatcagaaggtggtggaggaagcaccaagcatttttttggatgcggagactcgaagagcgatgggagaacaagctgtagctcttgccagagcagtaaaatattcctctgctgggaccgtggagttccttgtggactctaagaagaatttttatttcttggaaatgaatacaagactccaggttgagcatcctgtcacagaatgcattactggcctggacctagtccaggaaatgatccgtgttgctaagggctaccctctcaggcacaaacaagctgatattcgcatcaacggctgggcagttgaatgtcgggtttatgctgaggacccctacaagtcttttggtttaccatctattgggagattgtctcagtaccaagaaccgttacatctacctggtgtccgagtggacagtggcatccaaccaggaagtgatattagcatttattatgatcctatgatttcaaaactaatcacatatggctctgatagaactgaggcactgaagagaatggcagatgcactggataactatgttattcgaggtgttacacataatattgcattacttcgagaggtgataatcaactcacgctttgtaaaaggagacatcagcactaaatttctctccgatgtgtatcctgatggcttcaaaggacacatgctaaccaagagtgagaagaaccagttattggcaatagcatcatcattgtttgtggcattccagttaagagcacaacattttcaagaaaattcaagaatgcctgttattaaaccagacatagccaactgggagctctcagtaaaattgcatgataaagttcataccgtagtagcatcaaacaatgggtcagtgttctcggtggaagttgatgggtcgaaactaaatgtgaccagcacgtggaacctggcttcgcccttattgtctgtcagcgttgatggcactcagaggactgtccagtgtctttctcgagaagcaggtggaaacatgagcattcagtttcttggtacagtggtagcagaaggtcaagaaatttgtgtgattgaagccatgaaaatgcagaatagtatgacagctgggaaaactggcacggtgaaatctgtgcactgtcaagctggagacacagttggagaaggggatctgctcgtggagctggaatgaaggatttataacctttcagtcatcacccaatttaattagccatttgcatgatgctttcacacacaattgattcaagcattatacaggaacacccctgtgcagctacgtttacgtcgtcatttattccacagagtcaagaccaatattctgccaaaaaatcaccaatggaaattttcattgatataaatacttgtacatatgatttgtacttctgctgtgagattccctagtgtcaaaattaaatcaataaaactgagcatttgtct

SEQ ID NO: 23897 - DNA, 2491 bp, Homo sapiens
  source 1..2491: mol_type = unassigned DNA
gtgagaggtcagcagaggggcggtctgcggggacaacaatggcggggttctgggtcgggacagcaccgctggtcgctgccggacggcgtgggcggtggccgccgcagcagctgatgctgagcgcggcgctgcggaccctgaagcatgttctgtactattcaagacagtgcttaatggtgtcccgtaatcttggttcagtgggatatgatcctaatgaaaaaacttttgataaaattcttgttgctaatagaggagaaattgcatgtcgggttattagaacttgcaagaagatgggcattaagacagttgccatccacagtgatgttgatgctagttctgttcatgtgaaaatggcggatgaggctgtctgtgttggcccagctcccaccagtaaaagctacctcaacatggatgccatcatggaagccattaagaaaaccagggcccaagctgtacatccaggttatggattcctttcagaaaacaaagaatttgccagatgtttggcagcagaagatgtcgttttcattggacctgacacacatgctattcaagccatgggcgacaagattgaaagcaaattattagctaagaaagcagaggttaatacaatccctggctttgatggagtagtcaaggatgcagaagaagctgtcagaattgcaagggaaattggctaccctgtcatgatcaaggcctcagcaggtggtggtgggaaaggcatgcgcattgcttgggatgatgaagagaccagggatggttttagattgtcatctcaagaagctgcttctagttttggcgatgatagactactaatagaaaaatttattgataatcctcgtcatatagaaatccaggttctaggtgataaacatgggaatgctttatggcttaatgaaagagagtgctcaattcagagaagaaatcagaaggtggtggaggaagcaccaagcatttttttggatgcggagactcgaagagcgatgggagaacaagctgtagctcttgccagagcagtaaaatattcctctgctgggaccgtggagttccttgtggactctaagaagaatttttatttcttggaaatgaatacaagactccaggttgagcatcctgtcacagaatgcattactggcctggacctagtccaggaaatgatccgtgttgctaagggctaccctctcaggcacaaacaagctgatattcgcatcaacggctgggcagttgaatgtcgggtttatgctgaggacccctacaagtcttttggtttaccatctattgggagattgtctcagtaccaagaaccgttacatctacctggtgtccgagtggacagtggcatccaaccaggaagtgatattagcatttattatgatcctatgatttcaaaactaatcacatatggctctgatagaactgaggcactgaagagaatggcagatgcactggataactatgttattcgaggtgttacacataatattgcattacttcgagaggtgataatcaactcacgctttgtaaaaggagacatcagcactaaatttctctccgatgtgtatcctgatggcttcaaaggacacatgctaaccaagagtgagaagaaccagttattggcaatagcatcatcattgtttgtggcattccagttaagagcacaacattttcaagaaaattcaagaatgcctgttattaaaccagacatagccaactgggagctctcagtaaaattgcatgataaagttcataccgtagtagcatcaaacaatgggtcagtgttctcggtggaagttgatgggtcgaaactaaatgtgaccagcacgtggaacctggcttcgcccttattgtctgtcagcgttgatggcactcagaggactgtccagtgtctttctcgagaagcaggtggaaacatgagcattcagtttcttggtacagtgtacaaggtgaatatcttaaccagacttgccgcagaattgaacaaatttatgctggaaaaagtgactgaggacacaagcagtgttctgcgttccccgatgcccggagtggtggtggccgtctctgtcaagcctggagacgcggtagcagaaggtcaagaaatttgtgtgattgaagccatgaaaatgcagaatagtatgacagctgggaaaactggcacggtgaaatctgtgcactgtcaagctggagacacagttggagaaggggatctgctcgtggagctggaatgaaggatttataacctttcagtcatcacccaatttaattagccatttgcatgatgctttcacacacaattgattcaagcattatacaggaacacccctgtgcagctacgtttacgtcgtcatttattccacagagtcaagaccaatattctgccaaaaaatcaccaatggaaattttcattgatataaatacttgtacatatgatttgtacttctgctgtgagattccctagtgtcaaaattaaatcaataaaactgagcatttgtct

SEQ ID NO: 23898 - DNA, 2481 bp, Homo sapiens
  source 1..2481: mol_type = unassigned DNA
ggcatcgggtttctggctcgtgatttgccggagctcctgcgctccccttctccaccccctccggctgtgtgagaggtcagcagaggggcggtctgcggggacaacaatggcggggttctgggtcgggacagcaccgctggtcgctgccggacggcgtgggcggtggccgccgcagcagctgatgctgagcgcggcgctgcggaccctgaagacttttgataaaattcttgttgctaatagaggagaaattgcatgtcgggttattagaacttgcaagaagatgggcattaagacagttgccatccacagtgatgttgatgctagttctgttcatgtgaaaatggcggatgaggctgtctgtgttggcccagctcccaccagtaaaagctacctcaacatggatgccatcatggaagccattaagaaaaccagggcccaagctgtacatccaggttatggattcctttcagaaaacaaagaatttgccagatgtttggcagcagaagatgtcgttttcattggacctgacacacatgctattcaagccatgggcgacaagattgaaagcaaattattagctaagaaagcagaggttaatacaatccctggctttgatggagtagtcaaggatgcagaagaagctgtcagaattgcaagggaaattggctaccctgtcatgatcaaggcctcagcaggtggtggtgggaaaggcatgcgcattgcttgggatgatgaagagaccagggatggttttagattgtcatctcaagaagctgcttctagttttggcgatgatagactactaatagaaaaatttattgataatcctcgtcatatagaaatccaggttctaggtgataaacatgggaatgctttatggcttaatgaaagagagtgctcaattcagagaagaaatcagaaggtggtggaggaagcaccaagcatttttttggatgcggagactcgaagagcgatgggagaacaagctgtagctcttgccagagcagtaaaatattcctctgctgggaccgtggagttccttgtggactctaagaagaatttttatttcttggaaatgaatacaagactccaggttgagcatcctgtcacagaatgcattactggcctggacctagtccaggaaatgatccgtgttgctaagggctaccctctcaggcacaaacaagctgatattcgcatcaacggctgggcagttgaatgtcgggtttatgctgaggacccctacaagtcttttggtttaccatctattgggagattgtctcagtaccaagaaccgttacatctacctggtgtccgagtggacagtggcatccaaccaggaagtgatattagcatttattatgatcctatgatttcaaaactaatcacatatggctctgatagaactgaggcactgaagagaatggcagatgcactggataactatgttattcgaggtgttacacataatattgcattacttcgagaggtgataatcaactcacgctttgtaaaaggagacatcagcactaaatttctctccgatgtgtatcctgatggcttcaaaggacacatgctaaccaagagtgagaagaaccagttattggcaatagcatcatcattgtttgtggcattccagttaagagcacaacattttcaagaaaattcaagaatgcctgttattaaaccagacatagccaactgggagctctcagtaaaattgcatgataaagttcataccgtagtagcatcaaacaatgggtcagtgttctcggtggaagttgatgggtcgaaactaaatgtgaccagcacgtggaacctggcttcgcccttattgtctgtcagcgttgatggcactcagaggactgtccagtgtctttctcgagaagcaggtggaaacatgagcattcagtttcttggtacagtgtacaaggtgaatatcttaaccagacttgccgcagaattgaacaaatttatgctggaaaaagtgactgaggacacaagcagtgttctgcgttccccgatgcccggagtggtggtggccgtctctgtcaagcctggagacgcggtagcagaaggtcaagaaatttgtgtgattgaagccatgaaaatgcagaatagtatgacagctgggaaaactggcacggtgaaatctgtgcactgtcaagctggagacacagttggagaaggggatctgctcgtggagctggaatgaaggatttataacctttcagtcatcacccaatttaattagccatttgcatgatgctttcacacacaattgattcaagcattatacaggaacacccctgtgcagctacgtttacgtcgtcatttattccacagagtcaagaccaatattctgccaaaaaatcaccaatggaaattttcattgatataaatacttgtacatatgatttgtacttctgctgtgagattccctagtgtcaaaattaaatcaataaaactgagcatttgtct

SEQ ID NO: 23899 - DNA, 397 bp, Homo sapiens
  source 1..397: mol_type = unassigned DNA
caactgggagctctcagtaaaattgcatgataaagttcataccgtagtagcatcaaacaatgggtcagtgttctcggtggaagttgatgggtcgaaactaaatgtgaccagcacgtggaacctggcttcgcccttattgtctgtcagcgttgatggcactcagaggactgtccagtgtctttctcgagaagcaggtggaaacatgagcattcagtttcttggtacagtgccctggagaaagcttctggattgactgtgagaagcttggcagaaggtgctgcggcctggtggctggctcagcaggaggcctgggattgaaagctctcggtttgtacaagctcttttggatttgtaacacttttattttaaatctccaataaatgtaaatattttggtc

SEQ ID NO: 23900 - DNA, 602 bp, Homo sapiens
  source 1..602: mol_type = unassigned DNA
tacaaggtgaatatcttaaccagacttgccgcagaattgaacaaatttatgctggaaaaagtgactgaggacacaagcagtgttctgcgttccccgatgcccggagtggtggtggccgtctctgtcaagcctggagacgcggcaacctcgagtctgtctgtagagatctgcctattctggacatttcaggtagcagaaggtcaagaaatttgtgtgattgaagccatgaaaatgcagaatagtatgacagctgggaaaactggcacggtgaaatctgtgcactgtcaagctggagacacagttggagaaggggatctgctcgtggagctggaatgaaggatttataacctttcagtcatcacccaatttaattagccatttgcatgatgctttcacacacaattgattcaagcattatacaggaacacccctgtgcagctacgtttacgtcgtcatttattccacagagtcaagaccaatattctgccaaaaaatcaccaatggaaattttcattgatataaatacttgtacatatgatttgtacttctgctgtgagattccctagtgtcaaaattaaatcaataaaactgagcatttgtct

SEQ ID NO: 23901 - DNA, 669 bp, Homo sapiens
  source 1..669: mol_type = unassigned DNA
aatgcctgttattaaaccagacatagccaactgggagctctcagtaaaattgcatgataaagttcataccgtagtagcatcaaacaatgggtcagtgttctcggtggaagttgatgggtcgaaactaaatgtgaccagcacgtggaacctggcttcgcccttattgtctgtcagcgttgatggcactcagaggactgtccagtgtctttctcgagaagcaggtggaaacatgagcattcagtttcttggtacagtggtagcagaaggtcaagaaatttgtgtgattgaagccatgaaaatgcagaatagtatgacagctgggaaaactggcacggtgaaatctgtgcactgtcaagctggagacacagttggagaaggggatctgctcgtggagctggaatgaaggatttataacctttcagtcatcacccaatttaattagccatttgcatgatgctttcacacacaattgattcaagcattatacaggaacacccctgtgcagctacgtttacgtcgtcatttattccacagagtcaagaccaatattctgccaaaaaatcaccaatggaaattttcattgatataaatacttgtacatatgatttgtacttctgctgtgagattccctagtgtcaaaattaaatcaataaaactgagcatttgtct

SEQ ID NO: 23902 - DNA, 939 bp, Homo sapiens
  source 1..939: mol_type = unassigned DNA
tccgatgtgtatcctgatggcttcaaaggacacatgctaaccaagagtgagaagaaccagttattggcaatagcatcatcattgtttgtggcattccagttaagagcacaacattttcaagaaaattcaagaatgcctgttattaaaccagacatagccaactgggagctctcagtaaaattgcatgataaagttcataccgtagtagcatcaaacaatgggtcagtgttctcggtggaagttgatgggtcgaaactaaatgtgaccagcacgtggaacctgttcgcccttattgtctgtcagcgttgatggcactcagaggactgtccagtgtctttctcgagaagcaggtggaaacatgagcattcagtttcttggtacagtgtacaaggtgaatatcttaaccagacttgccgcagaattgaacaaatttatgctggaaaaagtgactgaggacacaagcagtgttctgcgttccccgatgcccggagtggtggtggccgtctctgtcaagcctggagacgcggtagcagaaggtcaagaaatttgtgtgattgaagccatgaaaatgcagaatagtatgacagctgggaaaactggcacggtgaaatctgtgcactgtcaagctggagacacagttggagaaggggatctgctcgtggagctggaatgaaggatttataacctttcagtcatcacccaatttaattagccatttgcatgatgctttcacacacaattgattcaagcattatacaggaacacccctgtgcagctacgtttacgtcgtcatttattccacagagtcaagaccaatattctgccaaaaaatcaccaatggaaattttcattgatataaatacttgtacatatgatttgtacttctgctgtgagattccctagtgtcaaaattaaatcaataaaactgagcatttgtct

SEQ ID NO: 23903 - DNA, 1833 bp, Homo sapiens
  source 1..1833: mol_type = unassigned DNA
agcgccgtacccacgctttagcacatgcgtactcaggtgcgccggtaggggacgcgccggcacagcaaaaatggcggcggcattacgggtggcggcggtcggggcaaggctcagcgttctggcgagcggtctccgcgccgcggtccgcagcctttgcagccaggccacctctgttaacgaacgcatcgaaaacaagcgccggaccgcgctgctgggagggggccaacgccgtattgacgcgcagcacaagcgaggaaagctaacagccagggagaggatcagtctcttgctggaccctggcagctttgttgagagcgacatgtttgtggaacacagatgtgcagattttggaatggctgctgataagaataagtttcctggagacagcgtggtcactggacgaggccgaatcaatggaagattggtttatgtcttcagtcaggattttacagtttttggaggcagtctgtcaggagcacatgcccaaaagatctgcaaaatcatggaccaggccataacggtgggggctccagtgattgggctgaatgactctgggggagcacggatccaagaaggagtggagtctttggctggctatgcagacatctttctgaggaatgttacggcatccggagtcatccctcagatttctctgatcatgggcccatgtgctggtggggccgtctactccccagccctaacagacttcacgttcatggtaaaggacacctcctacctgttcatcactggccctgatgttgtgaagtctgtcaccaatgaggatgttacccaggaggagctcggtggtgccaagacccacaccaccatgtcaggtgtggcccacagagcttttgaaaatgatgttgatgccttgtgtaatctccgggatttcttcaactacctgcccctgagcagtcaggacccggctcccgtccgtgagtgccacgatcccagtgaccgtctggttcctgagcttgacacaattgtccctttggaatcaaccaaagcctacaacatggtggacatcatacactctgttgttgatgagcgtgaattttttgagatcatgcccaattatgccaagaacatcattgttggttttgcaagaatgaatgggaggactgttggaattgttggcaaccaacctaaggtggcctcaggatgcttggatattaattcatctgtgaaaggggctcgttttgtcagattctgtgatgcattcaatattccactcatcacttttgttgatgtccctggctttctacctggcacagcacaggaatacgggggcatcatccggcatggtgccaagcttctctacgcatttgctgaggcaactgtacccaaagtcacagtcatcaccaggaaggcctatggaggtgcctatgatgtcatgagctctaagcacctttgtggtgataccaactatgcctggcccaccgcagagattgcagtcatgggagcaaagggcgctgtggagatcatcttcaaagggcatgagaatgtggaagctgctcaggcagagtacatcgagaagtttgccaaccctttccctgcagcagtgcgagggtttgtggatgacatcatccaaccttcttccacacgtgcccgaatctgctgtgacctggatgtcttggccagcaagaaggtacaacgtccttggagaaaacatgcaaatattccattgtaaacaaatcaaaggaaaagaaaccaagaactgaattactgtctgcccattcacatcccattcctgccttttgcaatcatgaaacctgggaatccaaatagttggataacttagaataactaagtttattaaattctagaaagatc

SEQ ID NO: 23904 - DNA, 1841 bp, Homo sapiens
  source 1..1841: mol_type = unassigned DNA
gcgccggcacagcaaaaatggcggcggcattacgggtggcggcggtcggggcaaggctcagcgttctggcgagcggtctccgcgccgcggtccgcagcctttgcagccaggccacctctgttaacgaacgcatcgaaaacaagcgccggaccgcgctgctgggagggggccaacgccgtattgacgcgcagcacaagcgaggaaagctaacagccagggagaggatcagtctcttgctggaccctggcagctttgttgagagcgacatgtttgtggaacacagatgtgcagattttggaatggctgctgataagaataagtttcctggagacagcgtggtcactggacgaggccgaatcaatggaagattggtttatgtcttcagtcagcaaataataggctgggcacagtggctcccgcttgtcatctcagcactttgggaggccgaggattttacagtttttggaggcagtctgtcaggagcacatgcccaaaagatctgcaaaatcatggaccaggccataacggtgggggctccagtgattgggctgaatgactctgggggagcacggatccaagaaggagtggagtctttggctggctatgcagacatctttctgaggaatgttacggcatccggagtcatccctcagatttctctgatcatgggcccatgtgctggtggggccgtctactccccagccctaacagacttcacgttcatggtaaaggacacctcctacctgttcatcactggccctgatgttgtgaagtctgtcaccaatgaggatgttacccaggaggagctcggtggtgccaagacccacaccaccatgtcaggtgtggcccacagagcttttgaaaatgatgttgatgccttgtgtaatctccgggatttcttcaactacctgcccctgagcagtcaggacccggctcccgtccgtgagtgccacgatcccagtgaccgtctggttcctgagcttgacacaattgtccctttggaatcaaccaaagcctacaacatggtggacatcatacactctgttgttgatgagcgtgaattttttgagatcatgcccaattatgccaagaacatcattgttggttttgcaagaatgaatgggaggactgttggaattgttggcaaccaacctaaggtggcctcaggatgcttggatattaattcatctgtgaaaggggctcgttttgtcagattctgtgatgcattcaatattccactcatcacttttgttgatgtccctggctttctacctggcacagcacaggaatacgggggcatcatccggcatggtgccaagcttctctacgcatttgctgaggcaactgtacccaaagtcacagtcatcaccaggaaggcctatggaggtgcctatgatgtcatgagctctaagcacctttgtggtgataccaactatgcctggcccaccgcagagattgcagtcatgggagcaaagggcgctgtggagatcatcttcaaagggcatgagaatgtggaagctgctcaggcagagtacatcgagaagtttgccaaccctttccctgcagcagtgcgagggtttgtggatgacatcatccaaccttcttccacacgtgcccgaatctgctgtgacctggatgtcttggccagcaagaaggtacaacgtccttggagaaaacatgcaaatattccattgtaaacaaatcaaaggaaaagaaaccaagaactgaattactgtctgcccattcacatcccattcctgccttttgcaatcatgaaacctgggaatccaaatagttggataacttagaataactaagtttattaaattctagaaagatct

SEQ ID NO: 23905 - DNA, 6090 bp, Homo sapiens
  source 1..6090: mol_type = unassigned DNA
cgcgccggcacagcaaaaatggcggcggcattacgggtggcggcggtcggggcaaggctcagcgttctggcgagcggtctccgcgccgcggtccgcagcctttgcagccaggccacctctgttaacgaacgcatcgaaaacaagcgccggaccgcgctgctgggagggggccaacgccgtattgacgcgcagcacaagcgaggaaagctaacagccagggagaggatcagtctcttgctggaccctggcagctttgttgagagcgacatgtttgtggaacacagatgtgcagattttggaatggctgctgataagaataagtttcctggagacagcgtggtcactggacgaggccgaatcaatggaagattggtttatgtcttcagtcaggattttacagtttttggaggcagtctgtcaggagcacatgcccaaaagatctgcaaaatcatggaccaggccataacggtgggggctccagtgattgggctgaatgactctgggggagcacggatccaagaaggagtggagtctttggctggctatgcagacatctttctgaggaatgttacggcatccggagtcatccctcagatttctctgatcatgggcccatgtgctggtggggccgtctactccccagccctaacagacttcacgttcatggtaaaggacacctcctacctgttcatcactggccctgatgttgtgaagtctgtcaccaatgaggatgttacccaggaggagctcggtggtgccaagacccacaccaccatgtcaggtgtggcccacagagcttttgaaaatgatgttgatgccttgtgtaatctccgggatttcttcaactacctgcccctgagcagtcaggacccggctcccgtccgtgagtgccacgatcccagtgaccgtctggttcctgagcttgacacaattgtccctttggaatcaaccaaagcctacaacatggtggacatcatacactctgttgttgatgagcgtgaattttttgagatcatgcccaattatgccaagaacatcattgttggttttgcaagaatgaatgggaggactgttggaattgttggcaaccaacctaaggtggcctcaggatgcttggatattaattcatctgtgaaaggggctcgttttgtcagattctgtgatgcattcaatattccactcatcacttttgttgatgtccctggctttctacctggcacagcacaggaatacgggggcatcatccggcatggtgccaagcttctctacgcatttgctgaggcaactgtacccaaagtcacagtcatcaccaggaaggcctatggaggtgcctatgatgtcatgagctctaagcacctttgtggtgataccaactatgcctggcccaccgcagagattgcagtcatgggagcaaagggcgctgtggagatcatcttcaaagggcatgagaatgtggaagctgctcaggcagagtacatcgagaagtttgccaaccctttccctgcagcagtgcgagggtttgtggatgacatcatccaaccttcttccacacgtgcccgaatctgctgtgacctggatgtcttggccagcaagaaggtaagagtccaagaagtgtttcaccaggttgtgcagtctggacaccgagatggtagaggggctgtaagatggtagaggaaccagctcaggagagcagctgggctagcagctttacggaagccttggatggtggggaaactcccgtacagaaactcagctggtcaaagaaactcaaagccacaagaccttggaagctttgtcaagtggaccagcctccatggaccacggaataccttgagagtaatgacagttgagtgttctcttgtgtgggaatgccttccccagctggtgccctcaccttaaagggaaaaagaaaatacactgaattttgtaaatgggaaatacttgggtccactgagctgatagctgacaagtgtctgtctttaaactgagagcagataatatggtgagctgtggtgtaggaagcactgctagggtcttgctggtcctgccccgccttgtgttaatccagttcctcctgagctacacagctgacaagtggtgaagctgggatttgaactcagatgggtttgaccccagccaagcctgtgttctgatcatttcaaagtactaccactcagctgatgaggaaggtgagatggacttctaagggttggcctaagagtaggggtgagggaggttggtggtctgttcccctgggcttgtcttaacccagaaagctactacatttagacagctttcctatctcccgcatgattctcttgcaaagcagtaccaacagatggccagtcatctttttgagttgctagagtaatggggagcacatccacaatacacccttctaatgcttgttagaaagtgcttttgttgcaaagttcttctagcttctttttttgaccctgtcttggtctccccagcccaactttctgcctctggttgcactgatactttgtcctggtgctggtgcttaagatgtggtctgctcagccaaagaagtctgtgaaggatactcacccacatgtggagttgatgaatcagccctcttcacctattcaacagatgtgactgttttgtctttctggttccaaaggatttctggagagctatgactttacccttttagaagtattggtcctcatactctgtgcacctctgatgtcagcatgggatttctacaattccaagcaggagttgcagccacttgataggcagtgcctcagtctggggcctctgtggaatccagctggcatattccagccaatgtggcagcctcaatagttagttaagttttgaccatgtccctactgtcctgggtggtgaaaatactccctttatgtgtccttgggagcagaaagatgctcttcaaaaagtggtgcctgatggagatctccacagaacaagacactcagaagggcagggatagaatcttacctgagcttggtctagtatgaaaagcctaaggctgggtgcgatggcccatgccctgtaatcccagcactttgggaggccaaggcaggtggattgcttgagctcagttcatgaccggcctgggcaacatggtgaaagcctgtctctactaaaaatacaaaacttagctgggcgtggtggtgggtgcctgtaattccagctacttgagagcctgaggcaggagaatctcttgaaccccagaggcggaggttgctgtgagctgagatcacaccattgtactccagcctgggtgacagaccgagaccctgtcttcacttaccgccccccccccccccccgaaaaaaaaaaggcaagcctgagtggcatcaaacctttgtttcccatgaatatactagtccctgcttgatggactgttacctgggaacaggggcaaacagggagttacagtcaagccacaaatgggagatttgcaagcctgacccaagcctgaaagtgctcatctagtctcatactcttgtaaccatctagatgagctgttacagaccatccttaaatgaccttccttccttggctgtctggaaagcttgcttgctgatttgtctcccacacctttgccttttttgcataggcatattaggccatttaaggaactcaccccctattgccagacccatgaagtgtgtagggtatgacttcttaaagaaagagtgaggaggtctaatgccaagagaaactttttaagacagtctggctctgttacctagattggagtgcagtagtggtgcaatcttggctcactgcaacaacctccaccttgtgggctcaagccatcctcctaccttagcctcacgagtagctggtgtgcgccatcatacgcagctaatttttgtattttttgtagaggagttttaccatgctacccaggctggtctcgaactcttgagctcaagtgatccactcaccttggccttccaaagtgctgggattacaggcgtgagccaccatgcctggctgaaaacttcatttctgtagctgcattgactctatgtggtcttcaaaagggcactgccagggtgcaattatgcatgtaagcccagagtctcaagccgtgaggacccatgctacaggccagtggatgggtgttccctgaatgcctcatgcaaaactcagtttgcaagagactccctcttaaaccacagatgacttggcctacacacactccagagaaatctaaggaatgaaagaaagtgagctattcctaaattctgctttcttaaaaaaaattaaaaagccaaaacaacaaaaccaccaactcactaataaggttaacttgctgccatttaacagattatcagaaattgcaaactctctcaagagccacaggacagaaaatcatctctttaaagccatacctggtagaaacaataggatgactaccacaagcctgattttgaatagtttattaaaggaaaggtgaagcatcagtttcaaattgtacaaaaggaaaaaaaacctcatattgcaaatgtacaatttacagaattactagcaaaaccaatcaaggagacaccgaaaatacaaaaatttgattgacttcaaactgaactggaaacccattggagtagatatttagcctttttgtgtggcatggtagtctacaattctgtcagcatctgttttccatacaagactgtcacgcaaaggatcaatttgtgcatgtgccagggcacctcatggcttgctccctggccaaaaccacaggcaggcagggctggggtggacagtccagtcattcctgcaccttcacttccagtgaagcccacaattctgggagaaagtgaggccccagctcccctaactggagcccaagaattgctgaattagcagagaagatatttttggtgaccaggtttttttcagaactgtacaaatgttgagaaaaatgttttgtgtctttactaaaaggatgaataaaatcatccatcatcatcttgctttcccgcacaaaagatgatcactgggtgtgcagaattttaaaaaatgtttttcgtatttgataaaaagggaaagcctcatgattctgttgcagctactttaaaaaccagcccagaaacagctgtggatgaattggtttggaaattctgaggcttactttagaaatcagaaaggaagagagagactaagtggggtttttaaaacaatagcagcaagtcataaaagtctaggcagaatgtaactctaaaccattgtagactgtcctgaagattcataatttctttccccaaaagaattattcttaatatgcacatttaacactgaaatgtagctgtaattcaaggtaagcttaggaacttcaccctctaagcacagacttctatgcagcacatacttctataatcagtaaacttaattcacaaaattagcgcataagggtattaagtgcatgggaagtaaacacagttatgttacacttaaaattacttttgaatgattgataaaggatttcttcatgattgattatcttaagaaaatggaagtctgtgtaacttgaatttggcagggcatgaaataagtggtaaaaacagcaaactgataacttgagaatcattttcgttttactgagaatactttatttgctggtagaagttgctaaaaatgcacagaacaaataccaatagaaaatgcactgtatttgaatctccctagtctatataaaatgaacggtgtacagcatctgttggaaaaatggctgcatggacatttcttattttatgcccacttataaataaaaataaaccttttattcaagagtatataaaatctgggaattcatatccatatccacagagggtgtgtggtttttggcagagatgtactatgtcagaatttcatcttagcttgtcaatgttctgctccttcattatttgtgttccacaaaggtcaaccaaatccagtgaactccaaaacactcttcgcaattaggatgagctgcttactcataggtttaataaaaatggttagcttttaaaacataaaaaggcaaaatgttaaaacggtttttaaattgtacaacaggaaaataaagttaaaaatatgttttttttt

SEQ ID NO: 23906 - DNA, 715 bp, Homo sapiens
  source 1..715: mol_type = unassigned DNA
agaagccacttatctgcagacttgtaggcagcaactcaccctcactcagaggtcttctggttctggaaacaactctagctcagccttctccaccatgagcctcagacttgataccaccccttcctgtaacagtgcgagaccacttcatgccttgcaggtgctgctgcttctgtcattgctgctgactgctctggcttcctccaccaaaggacaaactaagagaaacttggcgaaaggcaaagaggaaagtctagacagtgacttgtatgctgaactccgctgcatgtgtataaagacaacctctggaattcatcccaaaaacatccaaagtttggaagtgatcgggaaaggaacccattgcaaccaagtcgaagtgatagccacactgaaggatgggaggaaaatctgcctggacccagatgctcccagaatcaagaaaattgtacagaaaaaattggcaggtgatgaatctgctgattaatttgttctgtttctgccaaacttctttaactcccaggaagggtagaattttgaaaccttgattttctagagttctcatttattcaggatacctattcttactgtattaaaatttggatatgtgtttcattctgtctcaaaaatcacattttattctgagaaggttggttaaaagatggcagaaagaagatgaaaataaataagcctggtttcaaccctctaattcttgcctaaa

SEQ ID NO: 23907 - DNA, 5086 bp, Homo sapiens
  source 1..5086: mol_type = unassigned DNA
tttccattctggctgggaagggctggggctccactcagcctggagaccgaagcgcttcactgagcgctcgccgccgcccagcctctcctctcgcgcctcctagctcttcgcagagcaaccaggagccaggagtggtctagagcccgagggtgggaagggggagtctgtctggcttttctcctatcttgcttctttttcctcttcccttcccactcttgttcaagcgagtgtgtgagctatggagcgaagagcctggagtctgcagtgcactgctttcgtcctcttttgcgcttggtgtgcactgaacagtgcaaaagcgaaaaggcaatttgtcaatgaatgggcagcggagatccccgggggcccggaagcagcctcggccatcgccgaggagctgggctatgaccttttgggtcagattggttcacttgaaaatcactacttattcaaacataaaaaccaccccagaaggtctcgaaggagtgcctttcatatcactaagagattatctgatgatgatcgtgtgatatgggctgaacaacagtatgaaaaagaaagaagtaaacgttcagctctaagggactcagcactaaatctcttcaatgatcccatgtggaatcagcaatggtacttgcaagataccaggatgacggcagccctgcccaagctggaccttcatgtgatacctgtttggcaaaaaggcattacgggcaaaggagttgttatcaccgtactggatgatggtttggagtggaatcacacggacatttatgccaactatgatccagaggctagctatgattttaatgataatgaccatgatccatttccccgatatgatcccacaaacgagaacaaacacgggaccagatgtgcaggagaaattgccatgcaagcaaataatcacaaatgcggggttggagttgcatacaattccaaagttggaggcataagaatgctggatggcattgtgacggatgctattgaggccagttcaattggattcaatcctggacacgtggatatttacagtgcaagctggggccctaatgatgatgggaaaactgtggaggggcctggccggctagcccagaaggcttttgaatatggtgtcaaacaggggagacaggggaaggggtccatcttcgtctgggcttcgggaaacggggggcgtcagggagataattgtgactgtgatggctacacagacagcatctacaccatctccatcagcagtgcctcccagcaaggcctatccccctggtacgctgagaagtgctcctccacactggccacctcttacagcagcggagattacaccgaccagagaatcacgagcgctgacctgcacaatgactgcacggagacgcacacaggcacctcggcctctgcacctctggctgctggcatcttcgctctggccctggaagcaaacccaaatctcacctggcgagatatgcagcacctggttgtctggacctctgagtatgacccgctggccaataaccctggatggaaaaagaatggagcaggcttgatggtgaatagtcgatttggatttggcttgctaaatgccaaagctctggtggatttagctgaccccaggacctggaggagcgtgcctgagaagaaagagtgtgttgtaaaggacaatgactttgagcccagagccctgaaagctaatggagaagttatcattgaaattccaacaagagcttgtgaaggacaagaaaatgctatcaagtccctggagcatgtacaatttgaagcaacaattgaatattcccgaagaggagaccttcatgtcacacttacttctgctgctggaactagcactgtgctcttggctgaaagagaacgggatacatctcctaatggctttaagaattgggacttcatgtctgttcacacatggggagagaaccctataggtacttggactttgagaattacagacatgtctggaagaattcaaaatgaaggaagaattgtgaactggaagctgattttgcacgggacctcttctcagccagagcatatgaagcagcctcgtgtgtacacgtcctacaacactgttcagaatgacagaagaggggtggagaagatggtggatccaggggaggagcagcccacacaagagaaccctaaggagaacaccctggtgtccaaaagccccagcagcagcagcgtagggggccggagggatgagttggaggagggagccccttcccaggccatgctgcgactcctgcaaagtgctttcagtaaaaactcaccgccaaagcaatcaccaaagaagtccccaagtgcaaagctcaacatcccttatgaaaacttctacgaagccctggaaaagctgaacaaaccttcccagcttaaagactctgaagacagtctgtataatgactatgttgatgttttttataacactaaaccttacaagcacagagacgaccggctgcttcaagctctggtggacattctgaatgaggaaaattaaaataagtgtgtggtcccaagttggaaatattcatgcttcttccttaccctgcgattttgcctgtgtctgaagtggttgttttgtcatgaattcttatgcttataatatcctttgtggcaccttttctttttctccctaaactgtacatgtgaaggggatgagctcaagcaggaagttcaacttccagaattgatcataggtatttcaaaacacatctttcctgtctgcacaagtgaagtgttttgttctttctggagtcacagttgacaaaaagctcttacactacattagaacactgcattagagcccatttcaattctcaaaagaaaaggcaaaacctgggatatcaattaatttgaaaacataatctgcaaagaatgagaaggagtcagaaactgtttctgtagcttgttccctgtcttgtccatgtggttcttcaaattttgatgccaagaaagtatttggtaggcctaatgaaggagttcactgtaagactcattccctagatctttctattccaaagtgccactcattcctgtagtcaaaatctggtcatgttggtcaaaagctggattatttagatctagaaacagatcttgaaatctgaatgctctggtttgagcaattttcgaacattctttgcctggtgcactgtgtctgtggtgccagaggcgtccgtggatccagaggtggttatgactcgtgctgcatgcctggtctttcctctgtttctccttctgaaagttttctatacctgtctcctttctcagccacaaaataaatgttgggagaaatgatatataccactttcccagaaaaaaaaaaacttacacttgggacttggcaaattcctagtcacaatttttttcagcagtaacaggaaaccacttatcacatggagacctaatgtaataatagaaaaatactcataatagggagaaaccaagagaagttttgtttttgtttttttccaactgtgttcattagaacagcgtgttctaagtatttgaaactgaatgtttattccttgatactaaaagttcttctccaatcctatcactgatagtgtccaaattctcaccaaattgctcctaagcttcaaatcagaagcagaaactggcaggccatggaccttaattgtccctcaggtagattttgtttggtatgcagaatgtttttaaaatatgagtggttattgaaaatatgatgtttcacataaaacctcattctcggacccatctttgctcatggcaacagttagctggagctgagtagcagctgcctgattagatgactctcagtccccatggcaccctgctccatgttacctagagcaggcacttgattccttgctgggcagtatccaataggcatttgattttgcccactcctacactaagcgaatgtgtacaaagtgtaaatgcattaggaaaaacaaactacccgcatcttctgttaggcaggatctgtacaataataattatgagtttgcttatgtaatctcacctcacctggatgatcactaatactaattcatttattactaaccttctggcttccttctctcaatatgcttacaaagtctccagtcacctacaatgctggctttctcccactgagtttgctgtttgcaatttttccatgaagtttgaacttcataaggtaattcatggcattgaactggttcatgaaaagaacactagagtctgtcatttgctttggcttgaagtatggttggtaacacaaattttcacctgctcttctaccatttgaatttgtgtagagggtgtttgcagagcaatgcccgtaatgcttagagaatgttctcctaaaagacttgcggaatcactctgtccttggaagtttcatatattgtttgatatgaagtgttagatagaatttccaatattggagcatatcaaaaagtattaaaactaaaaaggaccagagaattcttagattggcccggaaaggccaataaagagttagaatgaaaactcattacttttccattcccaatctagtgctagatgtataaatctttcttttgattcttcctaacaaaatattttctgggttaaaaccccagccaactcattgggttgtagccaaaggttcactctcaagaagctttaatatttaaataaaatcatattgaatgtttccaacctggagtataatattcagatataaaacagttttgtcagtctttcttagtgcctgtgtggatttttgtgaaaatgtcaaagagaaaacttatatactatttcccttgaaattttaaactatattttctttacaggtatttataatataccaatgcttttatcaaacagaattttaaagagcataataaattatattaaagaaccaaaagttttcctgagaataagaaagtttcacccaataaaatatttttgaaaggcatgttcctctgtcaatgaaaaaaagtacatgtatgtgttgtgatattaaaagtgacatttgtctaatagcctaatacaacatgtagctgagtttaacatgtgtggtcttggtattcttaagggaacttccacattatacatttgatgtattgaccagaat

SEQ ID NO: 23908 - DNA, 565 bp, Homo sapiens
  source 1..565: mol_type = unassigned DNA
ttttatgggaaagtaatggcacagctccagctcagcaccaaagtgaagagctctactgaggcacaatggaaagtcgagcgagtgtgtgagctatggagcgaagagcctggagtctgcagtgcactgctttcgtcctcttttgcgcttggtgtgcactgaacagtgcaaaagcgaaaaggcaatttgtcaatgaatgggcagcggagatccccgggggcccggaagcagcctcggccatcgccgaggagctgggctatgaccttttgggtcagattggttcacttgaaaatcactacttattcaaacataaaaaccaccccagaaggtctcgaaggagtgcctttcatatcactaagagattatctgatgatgatcgtgtgatatgggctgaacaacagtatgaaaaagaaagaagtaaacgttcagctctaagggactcagcactaaatctcttcaatgatcccatgtggaatcagcaatggtacttgcaagataccaggatgacggcagccctgcccaagctggaccttcatgtgatacctgtttggcaaaaaggcattacggg

SEQ ID NO: 23909 - DNA, 2234 bp, Homo sapiens
  source 1..2234: mol_type = unassigned DNA
cggccagtcccactgcagggtcgagatgccgaactgactatggggaagggatctatttctttcttgttcttcagccaaattggttcacttgaaaatcactacttattcaaacataaaaaccaccccagaaggtctcgaaggagtgcctttcatatcactaagagattatctgatgatgatcgtgtgatatgggctgaacaacagtatgaaaaagaaagaagtaaacgttcagctctaagggactcagcactaaatctcttcaatgatcccatgtggaatcagcaatggtacttgcaagataccaggatgacggcagccctgcccaagctggaccttcatgtgatacctgtttggcaaaaaggcattacgggcaaaggagttgttatcaccgtactggatgatggtttggagtggaatcacacggacatttatgccaactatgatccagaggctagctatgattttaatgataatgaccatgatccatttccccgatatgatcccacaaacgagaacaaacacgggaccagatgtgcaggagaaattgccatgcaagcaaataatcacaaatgcggggttggagttgcatacaattccaaagttggaggcataagaatgctggatggcattgtgacggatgctattgaggccagttcaattggattcaatcctggacacgtggatatttacagtgcaagctggggccctaatgatgatgggaaaactgtggaggggcctggccggctagcccagaaggcttttgaatatggtgtcaaacaggggagacaggggaaggggtccatcttcgtctgggcttcgggaaacggggggcgtcagggagataattgtgactgtgatggctacacagacagcatctacaccatctccatcagcagtgcctcccagcaaggcctatccccctggtacgctgagaagtgctcctccacactggccacctcttacagcagcggagattacaccgaccagagaatcacgagcgctgacctgcacaatgactgcacggagacgcacacaggcacctcggcctctgcacctctggctgctggcatcttcgctctggccctggaagcaaacccaaatctcacctggcgagatatgcagcacctggttgtctggacctctgagtatgacccgctggccaataaccctggatggaaaaagaatggagcaggcttgatggtgaatagtcgatttggatttggcttgctaaatgccaaagctctggtggatttagctgaccccaggacctggaggagcgtgcctgagaagaaagagtgtgttgtaaaggacaatgactttgagcccagagccctgaaagctaatggagaagttatcattgaaattccaacaagagcttgtgaaggacaagaaaatgctatcaagtccctggagcatgtacaatttgaagcaacaattgaatattcccgaagaggagaccttcatgtcacacttacttctgctgctggaactagcactgtgctcttggctgaaagagaacgggatacatctcctaatggctttaagaattgggacttcatgtctgttcacacatggggagagaaccctataggtacttggactttgagaattacagacatgtctggaagaattcaaaatgaaggaagaattgtgaactggaagctgattttgcacgggacctcttctcagccagagcatatgaagcagcctcgtgtgtacacgtcctacaacactgttcagaatgacagaagaggggtggagaagatggtggatccaggggaggagcagcccacacaagagaaccctaaggagaacaccctggtgtccaaaagccccagcagcagcagcgtagggggccggagggatgagttggaggagggagccccttcccaggccatgctgcgactcctgcaaagtgctttcagtaaaaactcaccgccaaagcaatcaccaaagaagtccccaagtgcaaagctcaacatcccttatgaaaacttctacgaagccctggaaaagctgaacaaaccttcccagcttaaagactctgaagacagtctgtataatgactatgttgatgttttttataacactaaaccttacaagcacagagacgaccggctgcttcaagctctggtggacattctgaatgaggaaaattaaaataagtgtgtggtcccaagttggaaatattcatgcttcttccttaccctgcgattttgcctgtgtctgaagtg

SEQ ID NO: 23910 - DNA, 1050 bp, Homo sapiens
  source 1..1050: mol_type = unassigned DNA
ggcgtgcgcagccgcagagcgccgcagcctcgccagctcgccccggcactgcgcacttgccagccagtccgcccgtccggagcccggctcgctggggcagcatggcggggtcgccgctgctctgggggccgcgggccgggggcgtcggccttttggtgctgctgctgctcggcctgtttcggccgccccccgcgctctgcgcgcggccggtaaaggagccccgcggcctaagcgcagcgtctccgcccttggctgagactggcgctcctcgccgcttccggcggtcagtgccccgaggtgaggcggcgggggcggtgcaggagctggcgcgggcgctggcgcatctgctggaggccgaacgtcaggagcgggcgcgggccgaggcgcaggaggctgaggatcagcaggcgcgcgtcctggcgcagctgctgcgcgtctggggcgccccccgcaactctgatccggctctgggcctggacgacgaccccgacgcgcctgcagcgcagctcgctcgcgctctgctccgcgcccgccttgaccctgccgccctcgcagcccagcttgtccccgcgcccgtccccgccgcggcgctccgaccccggcccccggtctacgacgacggccccgcgggcccggatgctgaggaggcaggcgacgagacacccgacgtggaccccgagctgttgaggtacttgctgggacggattcttgcgggaagcgcggactccgagggggtggcagccccgcgccgcctccgccgtgccgccgaccacgatgtgggctctgagctgccccctgagggcgtgctgggggcgctgctgcgtgtgaaacgcctagagaccccggcgccccaggtgcctgcacgccgcctcttgccaccctgagcactgcccggatcccgtgcaccctgggacccagaagtgcccccgccatcccgccaccaggactgctccccgccagcacgtccagagcaacttaccccggccagccagccctctcacccgaggatccctaccccctggccccacaataaacatgatctgaagcagc

SEQ ID NO: 23911 - DNA, 4740 bp, Homo sapiens
  source 1..4740: mol_type = unassigned DNA
gaggaggagctgaaaatgcagatttagcatcaagcacagacctacactcgctctttctctccggtacacacagctccccacattcgcacccctgcccgcgcgccgggccgcctgactgcacggcttcccctccagccagatgctggagaacacacactgattcgctgctttccaagaccctgttcagtctctttctctatacaaagatttttttaaaaactatatataagaattctttatttgcaccctccctccgagtcccctgctccgccagcctgcgcgcctcctagcaccacttttcactcccaaagaaggatgaagggtggttgtgtctcccagtggaaggcggccgccgggttcctcttctgtgtcatggtttttgcatctgctgagcgaccggtcttcacgaatcattttcttgtggagttgcataaagggggagaggacaaagctcgccaagttgcagcagaacacggctttggagtccgaaagcttccctttgctgaaggtctgtaccacttttatcacaatggccttgcaaaggccaagagaagacgcagcctacaccacaagcagcagctggagagagaccccagggtaaagatggctttgcagcaggaaggatttgaccgaaaaaagcgaggttacagagacatcaatgagatcgacatcaacatgaacgatcctctttttacaaagcagtggtatctgatcaatactgggcaagctgatggcactcctggccttgatttgaatgtggctgaagcctgggagctgggatacacagggaaaggtgttaccattggaattatggatgatgggattgactatctccacccggacctggcctccaactataatgccgaagcaagttacgacttcagcagcaacgacccctatccttaccctcggtacacagatgactggtttaacagccacgggacccgatgtgcaggagaagtttctgctgccgccaacaacaatatctgtggagttggagtagcatacaactccaaggttgcaggcatccggatgctggaccagccattcatgacagacatcatcgaggcctcctccatcagtcatatgccacagctgattgacatctacagcgccagctggggccccacagacaacggcaagacagtggatgggccccgggagctcacgctgcaggccatggccgatggcgtgaacaagggccgcggcggcaaaggcagcatctacgtgtgggcctccggggacggcggcagctatgacgactgcaactgcgacggctacgcctccagcatgtggaccatctccatcaactcagccatcaacgacggcaggactgccctgtacgacgagagctgctcttccaccttggcttccaccttcagcaacgggaggaaaaggaaccccgaggccggtgtggcaaccacagatttgtacggcaactgcactctgaggcattctgggacatctgcagctgcccccgaggcagctggtgtgtttgcactggctctggaggctaacctgggtctgacctggcgggacatgcagcatctgactgtgctcacctccaaacggaaccagcttcacgacgaggtccatcagtggcggcgcaatggggtcggcctggaatttaatcacctctttggctacggggtccttgatgcaggtgccatggtgaaaatggctaaagactggaaaaccgtgcctgagagattccactgtgtgggaggctccgtgcaggaccctgagaaaataccatccactggcaagttggtgctgacactcacaaccgacgcctgtgaggggaaggaaaattttgtccgctacctggagcatgtccaggctgtcatcacggtcaacgcaaccagaagaggagacctgaacatcaacatgacttcccctatgggcaccaagtccattttgctgagccggcgtccaagggatgacgactccaaggtgggctttgacaagtggcctttcatgaccactcacacgtggggggaagacgcccgaggcacctggaccctggagctgggatttgtcggcagcgccccgcagaagggggtgctgaaggagtggaccctgatgctgcatggcactcagagtgccccgtacatcgaccaggtggtgcgggattaccagtccaagttggccatgtccaagaaagaggagctggaggaagagctggacgaagccgtggagagaagcctgaaaagcatccttaacaagaactagcgctgcacatccgcctttcccaccgccctccctccccagctccgcctctgtcctcgctccacgtttcaggcaggcacctagcaattccatcacccgtacaggcaattccgtcttcttaatctgaagcttcactcactgtcaatgattattttcattacaatggaaacaatcttttttactctatgccccaaatatagcgttcccaacaacatccatgtcctatgtgtgactctaaattctttatttctgtcattcaaatgggtgatatcctgaaaaaaaaaaaaaaaaaaaaactgggacagctttcccctcatttttttttttgtttctgagaaaagaacgtattttaaaagccacatagagtgactccaagaacaattgtccatggtctcaaacaaggggctgttacataacaagaaaatcaaagctgaggacagggtgtgagcgccacatctctgaaagcacaggagacactgtgctataaatcctttggggagcgatgttttgaatttagtgagatttaccagggatgtagattaaggtgatgtgattcaaaagatgccattcatagagagccctagttactgcatggggaaagagatccaggaagcatgagtgctggatattttactaccaatgccaagataattcactctactcagccggcgtggcaaatataaaacttacagagcgtggctgtgctctcaccagctgctgctctgagttatgttaaaatccgctagagcagcccaaatttttctcagtttgtatagagttcatcccagccccaattttctggggctcctcacatagctacccaaaagagaaaaaaaattaagacaagcctggcaacacacctggtgaagagtagtttactagcttttcaaacaagaatgtcccttttcctaagtcactttgaggtgtctcaatctgatctgagtgagaggcgacaggagtatttttttttttttacagctttacacacacagatgtgggctttgatttccaagtaatataatggaagagaaatctcatactcccccacagtttgatgtcattaatgtgttgggaaaaaggcctctgtcccggaagagtcatgggaggtgaaaggggcacgtttgaagatgcgagcgctatcttcacatagttctccagttgtatggagcctcttctgccaagagagggccatgcaattcatcccagaggaacctgaggcctgaaggaggtgagagaagacctctgtgaggaaagcacacagtcaccttctcggcaactaagcagtccctgagaccatttaacatgcaacccgaaggttatggtcaatcccaaaagtcaccactccattcccaactagacattaccaaagtgacctacccagagattgcttctcatccccagtcccaatgcacatccattcccaagaaatgctttgtcttcagcctctccaggcaccatctcccttcctgtgggagcagagagcttagcctggagcacctttccttcaagccagcaacacagagcactaggttcaattccctgaaggtggccactttaagagagaaatctgaaaaccccatttgctttcttttctcccatattggcatggatttctgtcttctctaacaccttgtgaccttctctatatcatgctttaaagtgtaataatatgattttttaaaagaaatttattacttgttgcaaaggtctttttaaaccagtttagatttcaagaaaaaataaatggaaatcatcgaaaattcatttcacattaatggtctaaaaataaaccaaaggacattatgtgtgcatgtgtgtataagtgcacacagaaatatatatacatatgtagactatatacatgtgtgtatatatgtgtatatatacatacacttgtataaatgtatatacacatatacctataatgtgtgtatgtgtatttattgaagaaacagataccatactcatttctaaaagaatattcagagaatatcaagatgattctggctgaaaaaggccagtggaaattcaggtgaaaatgttcatcaattcccattgcatcacctctgtaatttttcagctctctgtataaacattaaatgtcttatatagcagcaaaaatataaaatagttgtccatattttcacaggtgtggtgtaatttataaaattagaaagcaacttatcagctacttaagagaaatggcaagttttgatatgagtatacaatatataaaaatatatatagtgctatatatataaatatttggtctctatttcattttttgcatcagtattaatactaaaatatgtctcgctagtgatgtttttatgatatccctgatcctaactgaagagacagttatttatagtcatttattttaaaaaatgaaaataagtgaataataattaggttaacattgttgctccctgtgacaaaattttataagcaaatttcaaaagacatgttgtaaattaggaggctcaacaataaaacattatgctccagaaa

SEQ ID NO: 23912 - DNA, 4674 bp, Homo sapiens
  source 1..4674: mol_type = unassigned DNA
aactagcaccctcgctgtccttgtgcagtggaacgtccccaggtctgagaatgcacctcccgccgtgtccaccccggccgcgtctctcctgaaggcagatcttggaggtgcagccaggactcctagaggagcctcctccagtcaccatcgcgggtggggcgagccgggtctcctgctgggcttcccagccgcttcgctccggacctgcctggagcctacaaaaaacaagggctcgtccttgcactctcgccccccatggatcacccctagaagtggaaggcggccgccgggttcctcttctgtgtcatggtttttgcatctgctgagcgaccggtcttcacgaatcattttcttgtggagttgcataaagggggagaggacaaagctcgccaagttgcagcagaacacggctttggagtccgaaagcttccctttgctgaaggtctgtaccacttttatcacaatggccttgcaaaggccaagagaagacgcagcctacaccacaagcagcagctggagagagaccccagggtaaagatggctttgcagcaggaaggatttgaccgaaaaaagcgaggttacagagacatcaatgagatcgacatcaacatgaacgatcctctttttacaaagcagtggtatctgatcaatactgggcaagctgatggcactcctggccttgatttgaatgtggctgaagcctgggagctgggatacacagggaaaggtgttaccattggaattatggatgatgggattgactatctccacccggacctggcctccaactataatgccgaagcaagttacgacttcagcagcaacgacccctatccttaccctcggtacacagatgactggtttaacagccacgggacccgatgtgcaggagaagtttctgctgccgccaacaacaatatctgtggagttggagtagcatacaactccaaggttgcaggcatccggatgctggaccagccattcatgacagacatcatcgaggcctcctccatcagtcatatgccacagctgattgacatctacagcgccagctggggccccacagacaacggcaagacagtggatgggccccgggagctcacgctgcaggccatggccgatggcgtgaacaagggccgcggcggcaaaggcagcatctacgtgtgggcctccggggacggcggcagctatgacgactgcaactgcgacggctacgcctccagcatgtggaccatctccatcaactcagccatcaacgacggcaggactgccctgtacgacgagagctgctcttccaccttggcttccaccttcagcaacgggaggaaaaggaaccccgaggccggtgtggcaaccacagatttgtacggcaactgcactctgaggcattctgggacatctgcagctgcccccgaggcagctggtgtgtttgcactggctctggaggctaacctgggtctgacctggcgggacatgcagcatctgactgtgctcacctccaaacggaaccagcttcacgacgaggtccatcagtggcggcgcaatggggtcggcctggaatttaatcacctctttggctacggggtccttgatgcaggtgccatggtgaaaatggctaaagactggaaaaccgtgcctgagagattccactgtgtgggaggctccgtgcaggaccctgagaaaataccatccactggcaagttggtgctgacactcacaaccgacgcctgtgaggggaaggaaaattttgtccgctacctggagcatgtccaggctgtcatcacggtcaacgcaaccagaagaggagacctgaacatcaacatgacttcccctatgggcaccaagtccattttgctgagccggcgtccaagggatgacgactccaaggtgggctttgacaagtggcctttcatgaccactcacacgtggggggaagacgcccgaggcacctggaccctggagctgggatttgtcggcagcgccccgcagaagggggtgctgaaggagtggaccctgatgctgcatggcactcagagtgccccgtacatcgaccaggtggtgcgggattaccagtccaagttggccatgtccaagaaagaggagctggaggaagagctggacgaagccgtggagagaagcctgaaaagcatccttaacaagaactagcgctgcacatccgcctttcccaccgccctccctccccagctccgcctctgtcctcgctccacgtttcaggcaggcacctagcaattccatcacccgtacaggcaattccgtcttcttaatctgaagcttcactcactgtcaatgattattttcattacaatggaaacaatcttttttactctatgccccaaatatagcgttcccaacaacatccatgtcctatgtgtgactctaaattctttatttctgtcattcaaatgggtgatatcctgaaaaaaaaaaaaaaaaaaaaactgggacagctttcccctcatttttttttttgtttctgagaaaagaacgtattttaaaagccacatagagtgactccaagaacaattgtccatggtctcaaacaaggggctgttacataacaagaaaatcaaagctgaggacagggtgtgagcgccacatctctgaaagcacaggagacactgtgctataaatcctttggggagcgatgttttgaatttagtgagatttaccagggatgtagattaaggtgatgtgattcaaaagatgccattcatagagagccctagttactgcatggggaaagagatccaggaagcatgagtgctggatattttactaccaatgccaagataattcactctactcagccggcgtggcaaatataaaacttacagagcgtggctgtgctctcaccagctgctgctctgagttatgttaaaatccgctagagcagcccaaatttttctcagtttgtatagagttcatcccagccccaattttctggggctcctcacatagctacccaaaagagaaaaaaaattaagacaagcctggcaacacacctggtgaagagtagtttactagcttttcaaacaagaatgtcccttttcctaagtcactttgaggtgtctcaatctgatctgagtgagaggcgacaggagtatttttttttttttacagctttacacacacagatgtgggctttgatttccaagtaatataatggaagagaaatctcatactcccccacagtttgatgtcattaatgtgttgggaaaaaggcctctgtcccggaagagtcatgggaggtgaaaggggcacgtttgaagatgcgagcgctatcttcacatagttctccagttgtatggagcctcttctgccaagagagggccatgcaattcatcccagaggaacctgaggcctgaaggaggtgagagaagacctctgtgaggaaagcacacagtcaccttctcggcaactaagcagtccctgagaccatttaacatgcaacccgaaggttatggtcaatcccaaaagtcaccactccattcccaactagacattaccaaagtgacctacccagagattgcttctcatccccagtcccaatgcacatccattcccaagaaatgctttgtcttcagcctctccaggcaccatctcccttcctgtgggagcagagagcttagcctggagcacctttccttcaagccagcaacacagagcactaggttcaattccctgaaggtggccactttaagagagaaatctgaaaaccccatttgctttcttttctcccatattggcatggatttctgtcttctctaacaccttgtgaccttctctatatcatgctttaaagtgtaataatatgattttttaaaagaaatttattacttgttgcaaaggtctttttaaaccagtttagatttcaagaaaaaataaatggaaatcatcgaaaattcatttcacattaatggtctaaaaataaaccaaaggacattatgtgtgcatgtgtgtataagtgcacacagaaatatatatacatatgtagactatatacatgtgtgtatatatgtgtatatatacatacacttgtataaatgtatatacacatatacctataatgtgtgtatgtgtatttattgaagaaacagataccatactcatttctaaaagaatattcagagaatatcaagatgattctggctgaaaaaggccagtggaaattcaggtgaaaatgttcatcaattcccattgcatcacctctgtaatttttcagctctctgtataaacattaaatgtcttatatagcagcaaaaatataaaatagttgtccatattttcacaggtgtggtgtaatttataaaattagaaagcaacttatcagctacttaagagaaatggcaagttttgatatgagtatacaatatataaaaatatatatagtgctatatatataaatatttggtctctatttcattttttgcatcagtattaatactaaaatatgtctcgctagtgatgtttttatgatatccctgatcctaactgaagagacagttatttatagtcatttattttaaaaaatgaaaataagtgaataataattaggttaacattgttgctccctgtgacaaaattttataagcaaatttcaaaagacatgttgtaaattaggaggctcaacaataaaacattatgctccagaaa

SEQ ID NO: 23913 - DNA, 2275 bp, Homo sapiens
  source 1..2275: mol_type = unassigned DNA
acacacagctccccacattcgcacccctgcccgcgcgccgggccgcctgactgcacggcttcccctccagccagatgctggagaacacacactgattcgctgctttccaagaccctgttcagtctctttctctatacaaagatttttttaaaaactatatataagaattctttatttgcaccctccctccgagtcccctgctccgccagcctgcgcgcctcctagcaccacttttcactcccaaagaaggatgaagggtggttgtgtctcccagtggaaggcggccgccgggttcctcttctgtgtcatggtttttgcatctgctgagcgaccggtcttcacgaatcattttcttgtggagttgcataaagggggagaggacaaagctcgccaagttgcagcagaacacggctttggagtccgaaaggtaaagatggctttgcagcaggaaggatttgaccgaaaaaagcgaggttacagagacatcaatgagatcgacatcaacatgaacgatcctctttttacaaagcagtggtatctgatcaatactgggcaagctgatggcactcctggccttgatttgaatgtggctgaagcctgggagctgggatacacagggaaaggtgttaccattggaattatggatgatgggattgactatctccacccggacctggcctccaactataatgccgaagcaagttacgacttcagcagcaacgacccctatccttaccctcggtacacagatgactggtttaacagccacgggacccgatgtgcaggagaagtttctgctgccgccaacaacaatatctgtggagttggagtagcatacaactccaaggttgcaggcatccggatgctggaccagccattcatgacagacatcatcgaggcctcctccatcagtcatatgccacagctgattgacatctacagcgccagctggggccccacagacaacggcaagacagtggatgggccccgggagctcacgctgcaggccatggccgatggcgtgaacaagggccgcggcggcaaaggcagcatctacgtgtgggcctccggggacggcggcagctatgacgactgcaactgcgacggctacgcctccagcatgtggaccatctccatcaactcagccatcaacgacggcaggactgccctgtacgacgagagctgctcttccaccttggcttccaccttcagcaacgggaggaaaaggaaccccgaggccggtgtggcaaccacagatttgtacggcaactgcactctgaggcattctgggacatctgcagctgcccccgaggcagctggtgtgtttgcactggctctggaggctaacctgggtctgacctggcgggacatgcagcatctgactgtgctcacctccaaacggaaccagcttcacgacgaggtccatcagtggcggcgcaatggggtcggcctggaatttaatcacctctttggctacggggtccttgatgcaggtgccatggtgaaaatggctaaagactggaaaaccgtgcctgagagattccactgtgtgggaggctccgtgcaggaccctgagaaaataccatccactggcaagttggtgctgacactcacaaccgacgcctgtgaggggaaggaaaattttgtccgctacctggagcatgtccaggctgtcatcacggtcaacgcaaccagaagaggagacctgaacatcaacatgacttcccctatgggcaccaagtccattttgctgagccggcgtccaagggatgacgactccaaggtgggctttgacaagtggcctttcatgaccactcacacgtggggggaagacgcccgaggcacctggaccctggagctgggatttgtcggcagcgccccgcagaagggggtgctgaaggagtggaccctgatgctgcatggcactcagagtgccccgtacatcgaccaggtggtgcgggattaccagtccaagttggccatgtccaagaaagaggagctggaggaagagctggacgaagccgtggagagaagcctgaaaagcatccttaacaagaactagcgctgcacatccgcctttcccaccgccctccctccccagctccgcctctgtcctcgctccacgtttcaggcaggcacctagcaattccatcacccgtacaggcaattccgtcttcttaatctgaagcttcactcactgtcaatgattattttcattacaatggaaacaatcttttttactctatgccccaaatatagcgttcccaacaacatc

SEQ ID NO: 23914 - DNA, 2661 bp, Homo sapiens
  source 1..2661: mol_type = unassigned DNA
cccactcggcggtttggcgggagggaggggatttgcgcaggccccgctcccgccccgcctccatgcggcccgccccgattgcgctgtggctgcgcctggtcttggccctggcccttgtccgcccccgggctgtggggtgggccccggtccgagcccccatctatgtcagcagctgggccgtccaggtgtcccagggtaaccgggaggtcgagcgcctggcacgcaaattcggcttcgtcaacctggggccgatcttccctgacgggcagtactttcacctgcggcaccggggcgtggtccagcagtccctgaccccgcactggggccaccgcctgcacctgaagaaaaaccccaaggtgcagtggttccagcagcagacgctgcagcggcgggtgaaacgctctgtcgtggtgcccacggacccctggttctccaagcagtggtacatgaacagcgaggcccaaccagacctgagcatcctgcaggcctggagtcaggggctgtcaggccagggcatcgtggtctctgtgctggacgatggcatcgagaaggaccacccggacctctgggccaactacgaccccctggccagctatgacttcaatgactacgacccggacccccagccccgctacacccccagcaaagagaaccggcacgggacccgctgtgctggggaggtggccgcgatggccaacaatggcttctgtggtgtgggggtcgctttcaacgcccgaatcggaggcgtacggatgctggacggtaccatcaccgatgtcatcgaggcccagtcgctgagcctgcagccgcagcacatccacatttacagcgccagctggggtcccgaggacgacggccgcacggtggacggccccggcatcctcacccgcgaggccttccggcgtggtgtgaccaagggccgcggcgggctgggcacgctcttcatctgggcctcgggcaacggcggcctgcactacgacaactgcaactgcgacggctacaccaacagcatccacacgctttccgtgggcagcaccacccagcagggccgcgtgccctggtacagcgaagcctgcgcctccaccctcaccaccacctacagcagcggcgtggccaccgacccccagatcgtcaccacggacctgcatcacgggtgcacagaccagcacacgggcacctcggcctcagccccactggcggccggcatgatcgccctagcgctggaggccaacccgttcctgacgtggagagacatgcagcacctggtggtccgcgcgtccaagccggcgcacctgcaggccgaggactggaggaccaacggcgtggggcgccaagtgagccatcactacggatacgggctgctggacgccgggctgctggtggacaccgcccgcacctggctgcccacccagccgcagaggaagtgcgccgtccgggtccagagccgccccacccccatcctgccgctgatctacatcagggaaaacgtatcggcctgcgccggcctccacaactccatccgctcgctggagcacgtgcaggcgcagctgacgctgtcctacagccggcgcggagacctggagatctcgctcaccagccccatgggcacgcgctccacactcgtggccatacgacccttggacgtcagcactgaaggctacaacaactgggtcttcatgtccacccacttctgggatgagaacccacagggcgtgtggaccctgggcctagagaacaagggctactatttcaacacggggacgttgtaccgctacacgctgctgctctatgggacggccgaggacatgacagcgcggcctacaggcccccaggtgaccagcagcgcgtgtgtgcagcgggacacagaggggctgtgccaggcgtgtgacggccccgcctacatcctgggacagctctgcctggcctactgccccccgcggttcttcaaccacacaaggctggtgaccgctgggcctgggcacacggcggcgcccgcgctgagggtctgctccagctgccatgcctcctgctacacctgccgcggcggctccccgagggactgcacctcctgtcccccatcctccacgctggaccagcagcagggctcctgcatgggacccaccacccccgacagccgcccccggcttagagctgccgcctgtccccaccaccgctgcccagcctcggccatggtgctgagcctcctggccgtgaccctcggaggccccgtcctctgcggcatgtccatggacctcccactatacgcctggctctcccgtgccagggccacccccaccaaaccccaggtctggctgccagctggaacctgaagttgtcagctcagaaagcgaccttgcccccgcctgggtccctgacaggcactgctgccatgctgcctccccaggctggccccagaggagcgagcaccagcacccgacgcctggcctgccagggatgggccccgtggaaccccgaagcctggcgggagagagagagagagaagtctcctctgcattttgggtttgggcgggagtgggctggggggagaggctggagcaccccaaaagccaggggaaagtggagggagagaaacgtgacactgtccgcctcgggcaccgcgtccaacctcagagtttgcaaataaaggttgcttagaaggtg

SEQ ID NO: 23915 - DNA, 2641 bp, Homo sapiens
  source 1..2641: mol_type = unassigned DNA
ggcccgccccgattgcgctgtggctgcgcctggtcttggccctggcccttgtccgcccccgggctgtggggtgggccccggtccgagcccccatctatgtcagcagctgggccgtccaggtgtcccagggtaaccgggaggtcgagcgcctggcacgcaaattcggcttcgtcaacctggggccggtgggtgggaccgggatagacgggaagtgggggcttggaggggactgaacaaccctagaccccgacaagggggagggagcccacaaggtcttctaaatatcaagagtcccagcccacccctgcctcagccaagctcagcttctgggactcccagagagcacctgctggggaaggacaaagaagggggctgttaccggccctcgggggcttcagcaggggagccgggtcccatcggtgcggccgcttccccacatccccagatcttccctgacgggcagtactttcacctgcggcaccggggcgtggtccagcagtccctgaccccgcactggggccaccgcctgcacctgaagaaaaaccccaaggtgcagtggttccagcagcagacgctgcagcggcgggtgaaacgctctgtcgtggtgcccacggacccctggttctccaagcagtggtacatgaacagcgaggcccaaccagacctgagcatcctgcaggcctggagtcaggggctgtcaggccagggcatcgtggtctctgtgctggacgatggcatcgagaaggaccacccggacctctgggccaactacgaccccctggccagctatgacttcaatgactacgacccggacccccagccccgctacacccccagcaaagagaaccggcgtacggatgctggacggtaccatcaccgatgtcatcgaggcccagtcgctgagcctgcagccgcagcacatccacatttacagcgccagctggggtcccgaggacgacggccgcacggtggacggccccggcatcctcacccgcgaggccttccggcgtggtgtgaccaagggccgcggcgggctgggcacgctcttcatctgggcctcgggcaacggcggcctgcactacgacaactgcaactgcgacggctacaccaacagcatccacacgctttccgtgggcagcaccacccagcagggccgcgtgccctggtacagcgaagcctgcgcctccaccctcaccaccacctacagcagcggcgtggccaccgacccccagatcgtcaccacggacctgcatcacgggtgcacagaccagcacacgggcacctcggcctcagccccactggcggccggcatgatcgccctagcgctggaggccaacccgttcctgacgtggagagacatgcagcacctggtggtccgcgcgtccaagccggcgcacctgcaggccgaggactggaggaccaacggcgtggggcgccaagtgagccatcactacggatacgggctgctggacgccgggctgctggtggacaccgcccgcacctggctgcccacccagccgcagaggaagtgcgccgtccgggtccagagccgccccacccccatcctgccgctgatctacatcagggaaaacgtatcggcctgcgccggcctccacaactccatccgctcgctggagcacgtgcaggcgcagctgacgctgtcctacagccggcgcggagacctggagatctcgctcaccagccccatgggcacgcgctccacactcgtggccatacgggacgttgtaccgctacacgctgctgctctatgggacggccgaggacatgacagcgcggcctacaggcccccaggtgaccagcagcgcgtgtgtgcagcgggacacagaggggctgtgccaggcgtgtgacggccccgcctacatcctgggacagctctgcctggcctactgccccccgcggttcttcaaccacacaaggctggtgaccgctgggcctgggcacacggcggcgcccgcgctgagggtctgctccagctgccatgcctcctgctacacctgccgcggcggctccccgagggactgcacctcctgtcccccatcctccacgctggaccagcagcagggctcctgcatgggacccaccacccccgacagccgcccccggcttagagctgccgcctgtccccaccaccgctgcccagcctcggccatggtgctgagcctcctggccgtgaccctcggaggccccgtcctctgcggcatgtccatggacctcccactatacgcctggctctcccgtgccagggccacccccaccaaaccccaggtctggctgccagctggaacctgaagttgtcagctcagaaagcgaccttgcccccgcctgggtccctgacaggcactgctgccatgctgcctccccaggctggccccagaggagcgagcaccagcacccgacgcctggcctgccagggatgggccccgtggaaccccgaagcctggcgggagagagagagagagaagtctcctctgcattttgggtttgggcgggagtgggctggggggagaggctggagcaccccaaaagccaggggaaagtggagggagagaaacgtgacactgtccgcctcgggcaccgcgtccaacctcagagtttgcaaataaaggttgcttagaaggtg

SEQ ID NO: 23916 - DNA, 5756 bp, Homo sapiens
  source 1..5756: mol_type = unassigned DNA
cggagggagcgctgggagcgagcaagcgagcgtttggagcccgggccagcagagggggcgcccggtcgctgcctgtaccgctcccgctggtcatctccgccgcgctcgggggccccgggaggagcgagaccgagtcggagagtccgggagccaagccgggcgaaacccaactgcggaggacgcccgccccactcagcctcctcctgcgtccgagccggggagcatcgccgagcgccccacgggccggagagctgggagcacaggtcccggcagccccagggatggtctaggagccggcgtaaggctcgctgctctgctccctgccggggctagccgcctcctgccgatcgcccggggctgcgagctgcggcggcccggggctgctcgccgggcggcgcaggccggagaagttagttgtgcgcgcccttagtgcgcggaaccagccagcgagcgagggagcagcgaggcgccgggaccatgggctgggggagccgctgctgctgcccgggacgtttggacctgctgtgcgtgctggcgctgctcgggggctgcctgctccccgtgtgtcggacgcgcgtctacaccaaccactgggcagtcaaaatcgccgggggcttcccggaggccaaccgtatcgccagcaagtacggattcatcaacataggacagataggggccctgaaggactactaccacttctaccatagcaggacgattaaaaggtcagttatctcgagcagagggacccacagtttcatttcaatggaaccaaaggtggaatggatccaacagcaagtggtaaaaaagcggacaaagagggattatgacttcagtcgtgcccagtctacctatttcaatgatcccaagtggcccagcatgtggtatatgcactgcagtgacaatacacatccctgccagtctgacatgaatatcgaaggagcctggaagagaggctacacgggaaagaacattgtggtcactatcctggatgacggaattgagagaacccatccagatctgatgcaaaactacgatgctctggcaagttgcgacgtgaatgggaatgacttggacccaatgcctcgttatgatgcaagcaacgagaacaagcatgggactcgctgtgctggagaagtggcagccgctgcaaacaattcgcactgcacagtcggaattgctttcaacgccaagatcggaggagtgcgaatgctggacggagatgtcacggacatggttgaagcaaaatcagttagcttcaacccccagcacgtgcacatttacagcgccagctggggcccggatgatgatggcaagactgtggacggaccagcccccctcacccggcaagcctttgaaaacggcgttagaatggggcggagaggcctcggctctgtgtttgtttgggcatctggaaatggtggaaggagcaaagaccactgctcctgtgatggctacaccaacagcatctacaccatctccatcagcagcactgcagaaagcggaaagaaaccttggtacctggaagagtgttcatccacgctggccacaacctacagcagcggggagtcctacgataagaaaatcatcactacagatctgaggcagcgttgcacggacaaccacactgggacgtcagcctcagcccccatggctgcaggcatcattgcgctggccctggaagccaatccgtttctgacctggagagacgtacagcatgttattgtcaggacttcccgtgcgggacatttgaacgctaatgactggaaaaccaatgctgctggttttaaggtgagccatctttatggatttggactgatggacgcagaagccatggtgatggaggcagagaagtggaccaccgttccccggcagcacgtgtgtgtggagagcacagaccgacaaatcaagacaatccgccctaacagtgcagtgcgctccatctacaaagcttcaggctgctcggataaccccaaccgccatgtcaactacctggagcacgtcgttgtgcgcatcaccatcacccaccccaggagaggagacctggccatctacctgacctcgccctctggaactaggtctcagcttttggccaacaggctatttgatcactccatggaaggattcaaaaactgggagttcatgaccattcattgctggggagaaagagctgctggtgactgggtccttgaagtttatgatactccctctcagctaaggaactttaagactccaggtaaattgaaagaatggtctttggtcctctacggcacctccgtgcagccatattcaccaaccaatgaatttccgaaagtggaacggttccgctatagccgagttgaagaccccacagacgactatggcacagaggattatgcaggtccctgcgaccctgagtgcagtgaggttggctgtgacgggccaggaccagaccactgcaatgactgtttgcactactactacaagctgaaaaacaataccaggatctgtgtctccagctgcccccctggccactaccacgccgacaagaagcgctgcaggaagtgtgcccccaactgtgagtcctgctttgggagccatggtgaccaatgcatgtcctgcaaatatggatactttctgaatgaagaaaccaacagctgtgttactcactgccctgatgggtcatatcaggataccaagaaaaatctttgccggaaatgcagtgaaaactgcaagacatgtactgaattccataactgtacagaatgtagggatgggttaagcctgcagggatcccggtgctctgtctcctgtgaagatggacggtatttcaacggccaggactgccagccctgccaccgcttctgcgccacttgtgctggggcaggagctgatgggtgcattaactgcacagagggctacttcatggaggatgggagatgcgtgcagagctgtagtatcagctattactttgaccactcttcagagaatggatacaaatcctgcaaaaaatgtgatatcagttgtttgacgtgcaatggcccaggattcaagaactgtacaagctgccctagtgggtatctcttagacttaggaatgtgtcaaatgggagccatttgcaaggatgcaacggaagagtcctgggcggaaggaggcttctgtatgcttgtgaaaaagaacaatctgtgccaacggaaggttcttcaacaactttgctgcaaaacatgtacatttcaaggctgagcagccatcttagatttctttgttcctgtagacttatagattattccatattattaaaaagaaaaaagccaaaaagaaaaaaaaaaaaagcaagccacctctctctttcttttcttgctctctttttctttctctctctctcaagtttgtgcagggagatggtgaactgttttgtcagaacttaaatggaaaaaaaaataaaactacaacaagcctaccttttataactgggtgtttagtgctaaacagccagaaccacagagacagtattgtatgaccaaagcatttgatgccaaaatttgacgttaaagtaatgatttgatttcctgccctggttttgaaggtccatttttttcccttttgcattgacttgcttgtttcccctttgaaacacctaaaaatacctttccaaaacatcgcgagagcatacatagacaaaaatgaaatagaaagctcttgcatgcttgagtccaccattgggggaaatgacagaaaactggacctgagggcattaggaacatcctacagagttgtgtttagtgtcgtttgccatggtatttcacagtgaaacatggatactctccacacatcatttacttcatgctgtgtacttatgtactggtttttgcattttactcacttgataagtctgctccactggtttcatcagatagacttgctgctactggcttttccattgtagattgggttattttacacgcagttcgccaaatgggattgctctgtatagtcaaattggtgatggacagatggacagaatgcagaggtacatagatgagctgaggctgatccagctcccctgaaattcagagtgttaactttgtagaccctgcacaatctcttggtgctatctagccattacccccattttttttttaaaggccatctgaaattccatttgtcatggtgggaagcattttggatatgatgcaggaaatctcttcctggagtcaaaagttcccaagaggtcctgtatttttaagaaatggaatttatttaaataatatttaagcttgtgcccatgttggccgggcaacttttttcaatggtgcttattagaagaagttttttcatcttgtcattttaagaaaataaaactggaaattgaatatgggtggcatgattgtacccttttagttctcttatttttctactcctctgtccctctataactatgccatactattatatgctggtccactgaatgctgagatgatctgttttttggggttttttttttttaagaaatattttcactggttttctgtgactctctaaacacttcatcgaaactagaagactgaattatgaggaaactatttggattagtggccagaaacgatgaaatcttatagatcttttgacagtttctctgtttaggggagcctagactgatatcaagtttcttcatatcaaagcttcattggtgacctcatttgctttacaagtgaccagccatcttgcaggcttcatgcttctgagagccttacttagaagatgctgctggagtcacagctgaggagaggaatactatcaacatggactatcctgggaaagagctaggaagtagatgctgaggtccccatccaaacagcaagctaggaaaaagcctgccttgaaaatatttctagacatcaaagataacttacaacccaaagtgaataataagtaaatagtctgatgaccctcttaatagcattgcaattgtattgaatcacataatgattcataagtaactagggaaccaactgattttgctaagcagtcttccccttataacaccacaggcccttctgacacacaaaaaaatgaaagttaatcctgggtacagcatacagttttacatttaaacgcacagtcttacgtggacaaatgcaagcacaagcctaaagcaaggtcaagcagatggcaaaaccgaatttgcctgcaaagaaatctatttaactgaatcagcccataatatttgaggcacgaggttactgtgattgataggaaagataaaaatgatgtctgtttttgtagacgaataaccatcaacatgacaacaaaattcattggggtctaccagcgtgcattccatttcccactgaccatgcaggtgcacgtcgcggaaatactggtttaactactagtgtgttactgcctcatttatctacataacattattaactagaacataatgctttcaaagtttaagttaatgttatatattatgtataaatatatatattcataatgagatatatgtaatggatagtacaaagtttggagactcaacaaatgctctaaccttctagagacaaaagtcctatttctgttttcttttgtctttttattttcaattagtgacccattgttaaatccaaatccacttttactgaaaaatactgtacatgtgtaaaatgttcagttgtttttttgtaaaatatagtagaacggttgtaactgatactggccaaaatcaatgttattccatattttattttttctattaaattaacctaagttcctgttta

SEQ ID NO: 23917 - DNA, 6202 bp, Homo sapiens
  source 1..6202: mol_type = unassigned DNA
atttatgcagagcaggagctgctgccattgccactcagaatcctcgcgcgctgctcggagccggagggagcgctgggagcgagcaagcgagcgtttggagcccgggccagcagagggggcgcccggtcgctgcctgtaccgctcccgctggtcatctccgccgcgctcgggggccccgggaggagcgagaccgagtcggagagtccgggagccaagccgggcgaaacccaactgcggaggacgcccgccccactcagcctcctcctgcgtccgagccggggagcatcgccgagcgccccacgggccggagagctgggagcacaggtcccggcagccccagggatggtctaggagccggcgtaaggctcgctgctctgctccctgccggggctagccgcctcctgccgatcgcccggggctgcgagctgcggcggcccggggctgctcgccgggcggcgcaggccggagaagttagttgtgcgcgcccttagtgcgcggaaccagccagcgagcgagggagcagcgaggcgccgggaccatgggctgggggagccgctgctgctgcccgggacgtttggacctgctgtgcgtgctggcgctgctcgggggctgcctgctccccgtgtgtcggacgcgcgtctacaccaaccactgggcagtcaaaatcgccgggggcttcccggaggccaaccgtatcgccagcaagtacggattcatcaacataggacagataggggccctgaaggactactaccacttctaccatagcaggacgattaaaaggtcagttatctcgagcagagggacccacagtttcatttcaatggaaccaaaggtggaatggatccaacagcaagtggtaaaaaagcggacaaagagggattatgacttcagtcgtgcccagtctacctatttcaatgatcccaagtggcccagcatgtggtatatgcactgcagtgacaatacacatccctgccagtctgacatgaatatcgaaggagcctggaagagaggctacacgggaaagaacattgtggtcactatcctggatgacggaattgagagaacccatccagatctgatgcaaaactacgatgctctggcaagttgcgacgtgaatgggaatgacttggacccaatgcctcgttatgatgcaagcaacgagaacaagcatgggactcgctgtgctggagaagtggcagccgctgcaaacaattcgcactgcacagtcggaattgctttcaacgccaagatcggaggagtgcgaatgctggacggagatgtcacggacatggttgaagcaaaatcagttagcttcaacccccagcacgtgcacatttacagcgccagctggggcccggatgatgatggcaagactgtggacggaccagcccccctcacccggcaagcctttgaaaacggcgttagaatggggcggagaggcctcggctctgtgtttgtttgggcatctggaaatggtggaaggagcaaagaccactgctcctgtgatggctacaccaacagcatctacaccatctccatcagcagcactgcagaaagcggaaagaaaccttggtacctggaagagtgttcatccacgctggccacaacctacagcagcggggagtcctacgataagaaaatcatcactacagatctgaggcagcgttgcacggacaaccacactgggacgtcagcctcagcccccatggctgcaggcatcattgcgctggccctggaagccaatccgtttctgacctggagagacgtacagcatgttattgtcaggacttcccgtgcgggacatttgaacgctaatgactggaaaaccaatgctgctggttttaaggtgagccatctttatggatttggactgatggacgcagaagccatggtgatggaggcagagaagtggaccaccgttccccggcagcacgtgtgtgtggagagcacagaccgacaaatcaagacaatccgccctaacagtgcagtgcgctccatctacaaagcttcaggctgctcggataaccccaaccgccatgtcaactacctggagcacgtcgttgtgcgcatcaccatcacccaccccaggagaggagacctggccatctacctgacctcgccctctggaactaggtctcagcttttggccaacaggctatttgatcactccatggaaggattcaaaaactgggagttcatgaccattcattgctggggagaaagagctgctggtgactgggtccttgaagtttatgatactccctctcagctaaggaactttaagactccaggtaaattgaaagaatggtctttggtcctctacggcacctccgtgcagccatattcaccaaccaatgaatttccgaaagtggaacggttccgctatagccgagttgaagaccccacagacgactatggcacagaggattatgcaggtccctgcgaccctgagtgcagtgaggttggctgtgacgggccaggaccagaccactgcaatgactgtttgcactactactacaagctgaaaaacaataccaggatctgtgtctccagctgcccccctggccactaccacgccgacaagaagcgctgcaggaagtgtgcccccaactgtgagtcctgctttgggagccatggtgaccaatgcatgtcctgcaaatatggatactttctgaatgaagaaaccaacagctgtgttactcactgccctgatgggtcatatcaggataccaagaaaaatctttgccggaaatgcagtgaaaactgcaagacatgtactgaattccataactgtacagaatgtagggatgggttaagcctgcagggatcccggtgctctgtctcctgtgaagatggacggtatttcaacggccaggactgccagccctgccaccgcttctgcgccacttgtgctggggcaggagctgatgggtgcattaactgcacagagggctacttcatggaggatgggagatgcgtgcagagctgtagtatcagctattactttgaccactcttcagagaatggatacaaatcctgcaaaaaatgtgatatcagttgtttgacgtgcaatggcccaggattcaagaactgtacaagctgccctagtgggtatctcttagacttaggaatgtgtcaaatgggagccatttgcaaggatggagaatatgttgatgagcatggccactgccagacctgtgaggcctcatgtgccaagtgccagggaccaacccaggaagactgcactacctgccccatgacaaggatttttgatgatggccgctgtgtttcgaactgcccctcatggaaatttgaatttgagaaccaatgccatccatgccaccacacctgccagagatgccaaggaagtggccctacccactgcacctcctgtggagcagacaactatggccgagagcacttcctgtaccagggagagtgtggagatagctgcccagagggccactatgccactgaggggaacacctgcctgccctgcccagacaactgtgagctttgccacagcgtgcatgtctgcacaagatgcatgaagggctacttcatagcgcccaccaaccacacatgccagaagttagagtgtggacaaggtgaagtccaagacccagactatgaagaatgtgtcccttgtgaagaaggatgtctgggatgcagcttggatgatccaggaacatgtacatcttgcgctatggggtattacaggtttgatcaccattgttataaaacctgtcctgagaagacctacagtgaggaagtggaatgcaaggcgtgtgatagtaactgtggcagctgtgaccagaatgggtgttactggtgtgaagagggcttctttctcttaggtggcagttgtgtgaggaaatgtggtcctggattctatggtgaccaagaaatgggagaatgtgagtcctgccaccgagcatgcgaaacctgcacaggccctggtcatgacgagtgcagcagctgccaggaaggactgcagctgctgcgtgggatgtgcgtgcatgccaccaagacccaggaggagggcaaattctggaatgaagctgtgtccactgcaaacctatctgtggtgaagagcctgctgcaggagcgacgaaggtggaaagttcaaatcaaaagagatattttgagaaaactccagccttgtcattcttcttgtaaaacctgcaatggatctgcaactctgtgcacttcatgtcccaaaggtgcatatcttctggctcaggcctgtgtttcctcctgtccccaaggcacatggccttccgtaaggagtgggagctgcgagaactgtacggaggcctgtgccatctgctctggagccgatctttgcaaaaaatgccagatgcagccgggccaccctctcttcctccatgaaggcaggtgctactccaagtgcccggagggctcttatgcagaagacggcatatgtgaacgctgtagctctccttgcagaacatgtgaaggaaacgccaccaactgccattcttgtgaaggaggccacgtcctgcaccacggagtgtgccaggaaaactgccccgagaggcacgtggctgtgaagggggtatgcaagcattgcccagagatgtgtcaggactgcatccatgagaaaacatgcaaagagtgcacgcctgagttcttcctgcacgatgatatgtgccaccagtcctgtccccgtggcttctatgcagactcgcgccactgtgtcccctgccataaagactgtctggagtgcagtggccccaaagccgacgactgcgagctctgtcttgagagttcctgggtcctctatgatggactgtgcttggaggagtgtccagcaggaacctattatgaaaaggagactaaggagtgcagagattgccacaagtcctgcttgacctgctcatcatctgggacctgcaccacctgtcagaaaggcctgatcatgaaccctcgtgggagctgcatggccaacgagaagtgctcaccctccgagtactgggatgaggatgctcccgggtgcaagccctgccatgttaagtgcttccactgcatggggccggcggaggaccagtgtcaaacatgccccatgaacagccttcttctcaacacaacctgtgtgaaggactgcccagagggctattatgccgatgaggacagcaaccggtgtgcccactgccacagctcttgcaggacatgtgaagggagacacagcaggcagtgccactcctgccgaccgggctggttccagctaggaaaagagtgcctgctccagtgcagggaaggatattacgcagacaactccactggccggtgtgagaggtgcaacaggagctgcaaggggtgccagggcccacggcccacagactgcctgtcttgcgatagatttttctttctgctccgctccaaaggagagtgtcatcgctcctgcccagaccattactatgtagagcaaagcacacagacctgtgagagatgccatccgacttgtgatcaatgcaaaggaaaaggagcgttgaattgtttatcctgtgtgtggagttaccacctcatgggagggatctgcacctcggactgtcttgtgggggaatacagagtgggagagggagagaagtttaactgtgaaaaatgccacgagagctgcatggaatgcaagggaccaggggccaagaactgcaccttgtgccctgccaacctggtgctgcacatggacgacagccactgcctccactgctgcaacacctctgatccccccagtgcccaggagtgctgtgactgccaggacaccacggacgaatgcatccttcgaacaagcaaggttaggcctgcaactgagcatttcaagacagctctgttcatcacctcctccatgatgctggtgcttctgctcggggcagctgtggtagtgtggaagaaatctcgtggccgagtccagccagcagcaaaggccggctatgaaaaactggccgaccccaacaagtcttactcctcctataagagcagctatagagagagcaccagctttgaagaggatcaggtgattgagtacagggatcgggactatgatgaggatgatgatgatgacatcgtctacatgggccaggatggcacagtctaccggaaatttaaatatgggctgctggatgacgatgacatagatgagctggaatatgatgacgagagttactcctactaccagtaa

SEQ ID NO: 23918 - DNA, 2845 bp, Homo sapiens
  source 1..2845: mol_type = unassigned DNA
attgccactcagaatcctcgcgcgctgctcggagccggagggagcgctgggagcgagcaagcgagcgtttggagcccgggccagcagagggggcgcccggtcgctgcctgtaccgctcccgctggtcatctccgccgcgctcgggggccccgggaggagcgagaccgagtcggagagtccgggagccaagccgggcgaaacccaactgcggaggacgcccgccccactcagcctcctcctgcgtccgagccggggagcatcgccgagcgccccacgggccggagagctgggagcacaggtcccggcagccccagggatggtctaggagccggcgtaaggctcgctgctctgctccctgccggggctagccgcctcctgccgatcgcccggggctgcgagctgcggcggcccggggctgctcgccgggcggcgcaggccggagaagttagttgtgcgcgcccttagtgcgcggaaccagccagcgagcgagggagcagcgaggcgccgggaccatgggctgggggagccgctgctgctgcccgggacgtttggacctgctgtgcgtgctggcgctgctcgggggctgcctgctccccgtgtgtcggacgcgcgtctacaccaaccactgggcagtcaaaatcgccgggggcttcccggaggccaaccgtatcgccagcaagtacggattcatcaacataggacagataggggccctgaaggactactaccacttctaccatagcaggacgattaaaaggtcagttatctcgagcagagggacccacagtttcatttcaatggaaccaaaggtggaatggatccaacagcaagtggtaaaaaagcggacaaagagggattatgacttcagtcgtgcccagtctacctatttcaatgatcccaagtggcccagcatgtggtatatgcactgcagtgacaatacacatccctgccagtctgacatgaatatcgaaggagcctggaagagaggctacacgggaaagaacattgtggtcactatcctggatgacggaattgagagaacccatccagatctgatgcaaaactacgatgctctggcaagttgcgacgtgaatgggaatgacttggacccaatgcctcgttatgatgcaagcaacgagaacaagcatgggactcgctgtgctggagaagtggcagccgctgcaaacaattcgcactgcacagtcggaattgctttcaacgccaagatcggaggagtgcgaatgctggacggagatgtcacggacatggttgaagcaaaatcagttagcttcaacccccagcacgtgcacatttacagcgccagctggggcccggatgatgatggcaagactgtggacggaccagcccccctcacccggcaagcctttgaaaacggcgttagaatggggcggagaggcctcggctctgtgtttgtttgggcatctggaaatggtggaaggagcaaagaccactgctcctgtgatggctacaccaacagcatctacaccatctccatcagcagcactgcagaaagcggaaagaaaccttggtacctggaagagtgttcatccacgctggccacaacctacagcagcggggagtcctacgataagaaaatcatcactacagatctgaggcagcgttgcacggacaaccacactgggacgtcagcctcagcccccatggctgcaggcatcattgcgctggccctggaagccaatccgtttctgacctggagagacgtacagcatgttattgtcaggacttcccgtgcgggacatttgaacgctaatgactggaaaaccaatgctgctggttttaaggtgagccatctttatggatttggactgatggacgcagaagccatggtgatggaggcagagaagtggaccaccgttccccggcagcacgtgtgtgtggagagcacagaccgacaaatcaagacaatccgccctaacagtgcagtgcgctccatctacaaagcttcaggctgctcggataaccccaaccgccatgtcaactacctggagcacgtcgttgtgcgcatcaccatcacccaccccaggagaggagacctggccatctacctgacctcgccctctggaactaggtctcagcttttggccaacaggctatttgatcactccatggaaggattcaaaaactgggagttcatgaccattcattgctggggagaaagagctgctggtgactgggtccttgaagtttatgatactccctctcagctaaggaactttaagactccaggtaaattgaaagaatggtctttggtcctctacggcacctccgtgcagccatattcaccaaccaatgaatttccgaaagtggaacggttccgctatagccgagttgaagaccccacagacgactatggcacagaggattatgcaggtgagctggcttccagtgggacacaggctaaaaagaggcagctcatgcatcatcccaccacatgggagaacagaatggaatggaatggaatgaaatggaatggaatgaaatggaatggaatggaatggaatggaatggaatggaatcgaatcgaatcgaatcgaatagaatagaatagaatagaacagaacagaatagaatagaacagaacaatctactacccatattctgacatattttcttccccttaaatatttgtgtgtgtatatcagtgcactcatatattcaaatatccatatgtgttatctgcaaagctaatagtccatattgcgattgtaccataatatagttaatctgtaatctgggacatattgttcgcttacagaattttacactattttaaacacggtttggataaacatcattatttatc

SEQ ID NO: 23919 - DNA, 2840 bp, Homo sapiens
  source 1..2840: mol_type = unassigned DNA
attgccactcagaatcctcgcgcgctgctcggagccggagggagcgctgggagcgagcaagcgagcgtttggagcccgggccagcagagggggcgcccggtcgctgcctgtaccgctcccgctggtcatctccgccgcgctcgggggccccgggaggagcgagaccgagtcggagagtccgggagccaagccgggcgaaacccaactgcggaggacgcccgccccactcagcctcctcctgcgtccgagccggggagcatcgccgagcgccccacgggccggagagctgggagcacaggtcccggcagccccagggatggtctaggagccggcgtaaggctcgctgctctgctccctgccggggctagccgcctcctgccgatcgcccggggctgcgagctgcggcggcccggggctgctcgccgggcggcgcaggccggagaagttagttgtgcgcgcccttagtgcgcggaaccagccagcgagcgagggagcagcgaggcgccgggaccatgggctgggggagccgctgctgctgcccgggacgtttggacctgctgtgcgtgctggcgctgctcgggggctgcctgctccccgtgtgtcggacgcgcgtctacaccaaccactgggcagtcaaaatcgccgggggcttcccggaggccaaccgtatcgccagcaagtacggattcatcaacataggacagataggggccctgaaggactactaccacttctaccatagcaggacgattaaaaggtcagttatctcgagcagagggacccacagtttcatttcaatggaaccaaaggtggaatggatccaacagcaagtggtaaaaaagcggacaaagagggattatgacttcagtcgtgcccagtctacctatttcaatgatcccaagtggcccagcatgtggtatatgcactgcagtgacaatacacatccctgccagtctgacatgaatatcgaaggagcctggaagagaggctacacgggaaagaacattgtggtcactatcctggatgacggaattgagagaacccatccagatctgatgcaaaactacgatgctctggcaagttgcgacgtgaatgggaatgacttggacccaatgcctcgttatgatgcaagcaacgagaacaagcatgggactcgctgtgctggagaagtggcagccgctgcaaacaattcgcactgcacagtcggaattgctttcaacgccaagatcggaggagtgcgaatgctggacggagatgtcacggacatggttgaagcaaaatcagttagcttcaacccccagcacgtgcacatttacagcgccagctggggcccggatgatgatggcaagactgtggacggaccagcccccctcacccggcaagcctttgaaaacggcgttagaatggggcggagaggcctcggctctgtgtttgtttgggcatctggaaatggtggaaggagcaaagaccactgctcctgtgatggctacaccaacagcatctacaccatctccatcagcagcactgcagaaagcggaaagaaaccttggtacctggaagagtgttcatccacgctggccacaacctacagcagcggggagtcctacgataagaaaatcatcactacagatctgaggcagcgttgcacggacaaccacactgggacgtcagcctcagcccccatggctgcaggcatcattgcgctggccctggaagccaatccgtttctgacctggagagacgtacagcatgttattgtcaggacttcccgtgcgggacatttgaacgctaatgactggaaaaccaatgctgctggttttaaggtgagccatctttatggatttggactgatggacgcagaagccatggtgatggaggcagagaagtggaccaccgttccccggcagcacgtgtgtgtggagagcacagaccgacaaatcaagacaatccgccctaacagtgcagtgcgctccatctacaaagcttcaggctgctcggataaccccaaccgccatgtcaactacctggagcacgtcgttgtgcgcatcaccatcacccaccccaggagaggagacctggccatctacctgacctcgccctctggaactaggtctcagcttttggccaacaggctatttgatcactccatggaaggattcaaaaactgggagttcatgaccattcattgctggggagaaagagctgctggtgactgggtccttgaagtttatgatactccctctcagctaaggaactttaagactccaggtaaattgaaagaatggtctttggtcctctacggcacctccgtgcagccatattcaccaaccaatgaatttccgaaagtggaacggttccgctatagccgagttgaagaccccacagacgactatggcacagaggattatgcaggtgagctggcttccagtgggacacaggctaaaaagaggcagctcatgcatcatcccaccacatgggagaacagaatggaatggaatggaatgaaatggaatggaatggaatggaatggaatggaatggaatggaatggaatcgaatcgaatcgaatcgaatagaatagaatagaatagaacagaacagaatagaatagaacagaacaatctactacccatattctgacatattttcttccccttaaatatttgtgtgtgtatatcagtgcactcatatattcaaatatccatatgtgttatctgcaaagctaatagtccatattgcgattgtaccataatatagttaatctgtaatctgggacatattgttcgcttacagaattttacactattttaaacacggtttggataaacatcattatttatc

SEQ ID NO: 23920 - DNA, 5137 bp, Homo sapiens
  source 1..5137: mol_type = unassigned DNA
aacagcatctacaccatctccatcagcagcactgcagaaagcggaaagaaaccttggtacctggaagagtgttcatccacgctggccacaacctacagcagcggggagtcctacgataagaaaatcatcactacagatctgaggcagcgttgcacggacaaccacactgggacgtcagcctcagcccccatggctgcaggcatcattgcgctggccctggaagccaatccgtttctgacctggagagacgtacagcatgttattgtcaggacttcccgtgcgggacatttgaacgctaatgactggaaaaccaatgctgctggttttaaggtgagccatctttatggatttggactgatggacgcagaagccatggtgatggaggcagagaagtggaccaccgttccccggcagcacgtgtgtgtggagagcacagaccgacaaatcaagacaatccgccctaacagtgcagtgcgctccatctacaaagcttcaggctgctcggataaccccaaccgccatgtcaactacctggagcacgtcgttgtgcgcatcaccatcacccaccccaggagaggagacctggccatctacctgacctcgccctctggaactaggtctcagcttttggccaacaggctatttgatcactccatggaaggattcaaaaactgggagttcatgaccattcattgctggggagaaagagctgctggtgactgggtccttgaagtttatgatactccctctcagctaaggaactttaagactccaggtaaattgaaagaatggtctttggtcctctacggcacctccgtgcagccatattcaccaaccaatgaatttccgaaagtggaacggttccgctatagccgagttgaagaccccacagacgactatggcacagaggattatgcaggtccctgcgaccctgagtgcagtgaggttggctgtgacgggccaggaccagaccactgcaatgactgtttgcactactactacaagctgaaaaacaataccaggatctgtgtctccagctgcccccctggccactaccacgccgacaagaagcgctgcaggaagtgtgcccccaactgtgagtcctgctttgggagccatggtgaccaatgcatgtcctgcaaatatggatactttctgaatgaagaaaccaacagctgtgttactcactgccctgatgggtcatatcaggataccaagaaaaatctttgccggaaatgcagtgaaaactgcaagacatgtactgaattccataactgtacagaatgtagggatgggttaagcctgcagggatcccggtgctctgtctcctgtgaagatggacggtatttcaacggccaggactgccagccctgccaccgcttctgcgccacttgtgctggggcaggagctgatgggtgcattaactgcacagagggctacttcatggaggatgggagatgcgtgcagagctgtagtatcagctattactttgaccactcttcagagaatggatacaaatcctgcaaaaaatgtgatatcagttgtttgacgtgcaatggcccaggattcaagaactgtacaagctgccctagtgggtatctcttagacttaggaatgtgtcaaatgggagccatttgcaaggatggagaatatgttgatgagcatggccactgccagacctgtgaggcctcatgtgccaagtgccagggaccaacccaggaagactgcactacctgccccatgacaaggatttttgatgatggccgctgtgtttcgaactgcccctcatggaaatttgaatttgagaaccaatgccatccatgccaccacacctgccagagatgccaaggaagtggccctacccactgcacctcctgtggagcagacaactatggccgagagcacttcctgtaccagggagagtgtggagatagctgcccagagggccactatgccactgaggggaacacctgcctgccctgcccagacaactgtgagctttgccacagcgtgcatgtctgcacaagatgcatgaagggctacttcatagcgcccaccaaccacacatgccagaagttagagtgtggacaaggtgaagtccaagacccagactatgaagaatgtgtcccttgtgaagaaggatgtctgggatgcagcttggatgatccaggaacatgtacatcttgcgctatggggtattacaggtttgatcaccattgttataaaacctgtcctgagaagacctacagtgaggaagtggaatgcaaggcgtgtgatagtaactgtggcagctgtgaccagaatgggtgttactggtgtgaagagggcttctttctcttaggtggcagttgtgtgaggaaatgtggtcctggattctatggtgaccaagaaatgggagaatgtgagtcctgccaccgagcatgcgaaacctgcacaggccctggtcatgacgagtgcagcagctgccaggaaggactgcagctgctgcgtgggatgtgcgtgcatgccaccaagacccaggaggagggcaaattctggaatgaagctgtgtccactgcaaacctatctgtggtgaagagcctgctgcaggagcgacgaaggtggaaagttcaaatcaaaagagatattttgagaaaactccagccttgtcattcttcttgtaaaacctgcaatggatctgcaactctgtgcacttcatgtcccaaaggtgcatatcttctggctcaggcctgtgtttcctcctgtccccaaggcacatggccttccgtaaggagtgggagctgcgagaactgtacggaggcctgtgccatctgctctggagccgatctttgcaaaaaatgccagatgcagccgggccaccctctcttcctccatgaaggcaggtgctactccaagtgcccggagggctcttatgcagaagacggcatatgtgaacgctgtagctctccttgcagaacatgtgaaggaaacgccaccaactgccattcttgtgaaggaggccacgtcctgcaccacggagtgtgccaggaaaactgccccgagaggcacgtggctgtgaagggggtatgcaagcattgcccagagatgtgtcaggactgcatccatgagaaaacatgcaaagagtgcacgcctgagttcttcctgcacgatgatatgtgccaccagtcctgtccccgtggcttctatgcagactcgcgccactgtgtcccctgccataaagactgtctggagtgcagtggccccaaagccgacgactgcgagctctgtcttgagagttcctgggtcctctatgatggactgtgcttggaggagtgtccagcaggaacctattatgaaaaggagactaaggagtgcagagattgccacaagtcctgcttgacctgctcatcatctgggacctgcaccacctgtcagaaaggcctgatcatgaaccctcgtgggagctgcatggccaacgagaagtgctcaccctccgagtactgggatgaggatgctcccgggtgcaagccctgccatgttaagtgcttccactgcatggggccggcggaggaccagtgtcaaacatgccccatgaacagccttcttctcaacacaacctgtgtgaaggactgcccagagggctattatgccgatgaggacagcaaccggtgtgcccactgccacagctcttgcaggacatgtgaagggagacacagcaggcagtgccactcctgccgaccgggctggttccagctaggaaaagagtgcctgctccagtgcagggaaggatattacgcagacaactccactggccggtgtgagaggtgcaacaggagctgcaaggggtgccagggcccacggcccacagactgcctgtcttgcgatagatttttctttctgctccgctccaaaggagagtgtcatcgctcctgcccagaccattactatgtagagcaaagcacacagacctgtgagagatgccatccgacttgtgatcaatgcaaaggaaaaggagcgttgaattgtttatcctgtgtgtggagttaccacctcatgggagggatctgcacctcggactgtcttgtgggggaatacagagtgggagagggagagaagtttaactgtgaaaaatgccacgagagctgcatggaatgcaagggaccaggggccaagaactgcaccttgtgccctgccaacctggtgctgcacatggacgacagccactgcctccactgctgcaacacctctgatccccccagtgcccaggagtgctgtgactgccaggacaccacggacgaatgcatccttcgaacaagcaaggttaggcctgcaactgagcatttcaagacagctctgttcatcacctcctccatgatgctggtgcttctgctcggggcagctgtggtagtgtggaagaaatctcgtggccgagtccagccagcagcaaaggccggctatgaaaaactggccgaccccaacaagtcttactcctcctataagagcagctatagagagagcaccagctttgaagaggatcaggtgattgagtacagggatcgggactatgatgaggatgatgatgatgacatcgtctacatgggccaggatggcacagtctaccggaaatttaaatatgggctgctggatgacgatgacatagatgagctggaatatgatgacgagagttactcctactaccagtaaacaggcactcccccaccaacaccaccattccactctcaggcatgcctgtgagcatcactgtttttggttttatccccacaccaggctgatgtgtgagtttttctatttgtcttctttaaccatgagtccaaccagaatatgtaagaatgatgaaatactttgttcttcttttgagtggctaaactcaattaacagttcctgttcaaccgtaattgaagagcaaggataaaattcagaggcattttcctcaaaataatgtgttaagacacaaaaatgaaggaagtgaaaacaaatgagatttgtacaaactcttctatgtgattttaaaaaaaggacagcagatctatagaaattctgtttccgagctgcattgtggaggtgtctgctgcctcctggtattctaatttttctttatctaattttggggataatggaggtacaaaggagttgttgg

SEQ ID NO: 23921 - DNA, 503 bp, Homo sapiens
  source 1..503: mol_type = unassigned DNA
tgccagccctgccaccgcttctgcgccacttgtgctggggcaggagctgatgggtgcattaactgcacagagggctacttcatggaggatgggagatgcgtgcagagctgtagtatcagctattactttgaccactcttcagagaatggatacaaatcctgcaaaaaatgtgatatcagttgtttgacgtgcaatggcccaggattcaagaactgtacaagctgccctagtgggtatctcttagacttaggaatgtgtcaaatgggagccatttgcaaggatgtttctctgtttaggggagcctagactgatatcaagtttcttcatatcaaagcttcattggtgacctcatttgctttacaagtgaccagccatcttgcaggcttcatgcttctgagagccttacttagaagatgctgctggagtcacagctgaggagaggaatactatcaacatggactatcctgggaaagagctaggaagtagatgctgaggtccccatc

SEQ ID NO: 23922 - DNA, 9538 bp, Homo sapiens
  source 1..9538: mol_type = unassigned DNA
atttatgcagagcaggagctgctgccattgccactcagaatcctcgcgcgctgctcggagccggagggagcgctgggagcgagcaagcgagcgtttggagcccgggccagcagagggggcgcccggtcgctgcctgtaccgctcccgctggtcatctccgccgcgctcgggggccccgggaggagcgagaccgagtcggagagtccgggagccaagccgggcgaaacccaactgcggaggacgcccgccccactcagcctcctcctgcgtccgagccggggagcatcgccgagcgccccacgggccggagagctgggagcacaggtcccggcagccccagggatggtctaggagccggcgtaaggctcgctgctctgctccctgccggggctagccgcctcctgccgatcgcccggggctgcgagctgcggcggcccggggctgctcgccgggcggcgcaggccggagaagttagttgtgcgcgcccttagtgcgcggaaccagccagcgagcgagggagcagcgaggcgccgggaccatgggctgggggagccgctgctgctgcccgggacgtttggacctgctgtgcgtgctggcgctgctcgggggctgcctgctccccgtgtgtcggacgcgcgtctacaccaaccactgggcagtcaaaatcgccgggggcttcccggaggccaaccgtatcgccagcaagtacggattcatcaacataggacagataggggccctgaaggactactaccacttctaccatagcaggacgattaaaaggtcagttatctcgagcagagggacccacagtttcatttcaatggaaccaaaggtggaatggatccaacagcaagtggtaaaaaagcggacaaagagggattatgacttcagtcgtgcccagtctacctatttcaatgatcccaagtggcccagcatgtggtatatgcactgcagtgacaatacacatccctgccagtctgacatgaatatcgaaggagcctggaagagaggctacacgggaaagaacattgtggtcactatcctggatgacggaattgagagaacccatccagatctgatgcaaaactacgatgctctggcaagttgcgacgtgaatgggaatgacttggacccaatgcctcgttatgatgcaagcaacgagaacaagcatgggactcgctgtgctggagaagtggcagccgctgcaaacaattcgcactgcacagtcggaattgctttcaacgccaagatcggaggagtgcgaatgctggacggagatgtcacggacatggttgaagcaaaatcagttagcttcaacccccagcacgtgcacatttacagcgccagctggggcccggatgatgatggcaagactgtggacggaccagcccccctcacccggcaagcctttgaaaacggcgttagaatggggcggagaggcctcggctctgtgtttgtttgggcatctggaaatggtggaaggagcaaagaccactgctcctgtgatggctacaccaacagcatctacaccatctccatcagcagcactgcagaaagcggaaagaaaccttggtacctggaagagtgttcatccacgctggccacaacctacagcagcggggagtcctacgataagaaaatcatcactacagatctgaggcagcgttgcacggacaaccacactgggacgtcagcctcagcccccatggctgcaggcatcattgcgctggccctggaagccaatccgtttctgacctggagagacgtacagcatgttattgtcaggacttcccgtgcgggacatttgaacgctaatgactggaaaaccaatgctgctggttttaaggtgagccatctttatggatttggactgatggacgcagaagccatggtgatggaggcagagaagtggaccaccgttccccggcagcacgtgtgtgtggagagcacagaccgacaaatcaagacaatccgccctaacagtgcagtgcgctccatctacaaagcttcaggctgctcggataaccccaaccgccatgtcaactacctggagcacgtcgttgtgcgcatcaccatcacccaccccaggagaggagacctggccatctacctgacctcgccctctggaactaggtctcagcttttggccaacaggctatttgatcactccatggaaggattcaaaaactgggagttcatgaccattcattgctggggagaaagagctgctggtgactgggtccttgaagtttatgatactccctctcagctaaggaactttaagactccaggtaaattgaaagaatggtctttggtcctctacggcacctccgtgcagccatattcaccaaccaatgaatttccgaaagtggaacggttccgctatagccgagttgaagaccccacagacgactatggcacagaggattatgcaggtccctgcgaccctgagtgcagtgaggttggctgtgacgggccaggaccagaccactgcaatgactgtttgcactactactacaagctgaaaaacaataccaggatctgtgtctccagctgcccccctggccactaccacgccgacaagaagcgctgcaggaagtgtgcccccaactgtgagtcctgctttgggagccatggtgaccaatgcatgtcctgcaaatatggatactttctgaatgaagaaaccaacagctgtgttactcactgccctgatgggtcatatcaggataccaagaaaaatctttgccggaaatgcagtgaaaactgcaagacatgtactgaattccataactgtacagaatgtagggatgggttaagcctgcagggatcccggtgctctgtctcctgtgaagatggacggtatttcaacggccaggactgccagccctgccaccgcttctgcgccacttgtgctggggcaggagctgatgggtgcattaactgcacagagggctacttcatggaggatgggagatgcgtgcagagctgtagtatcagctattactttgaccactcttcagagaatggatacaaatcctgcaaaaaatgtgatatcagttgtttgacgtgcaatggcccaggattcaagaactgtacaagctgccctagtgggtatctcttagacttaggaatgtgtcaaatgggagccatttgcaaggatggagaatatgttgatgagcatggccactgccagacctgtgaggcctcatgtgccaagtgccagggaccaacccaggaagactgcactacctgccccatgacaaggatttttgatgatggccgctgtgtttcgaactgcccctcatggaaatttgaatttgagaaccaatgccatccatgccaccacacctgccagagatgccaaggaagtggccctacccactgcacctcctgtggagcagacaactatggccgagagcacttcctgtaccagggagagtgtggagatagctgcccagagggccactatgccactgaggggaacacctgcctgccctgcccagacaactgtgagctttgccacagcgtgcatgtctgcacaagatgcatgaagggctacttcatagcgcccaccaaccacacatgccagaagttagagtgtggacaaggtgaagtccaagacccagactatgaagaatgtgtcccttgtgaagaaggatgtctgggatgcagcttggatgatccaggaacatgtacatcttgcgctatggggtattacaggtttgatcaccattgttataaaacctgtcctgagaagacctacagtgaggaagtggaatgcaaggcgtgtgatagtaactgtggcagctgtgaccagaatgggtgttactggtgtgaagagggcttctttctcttaggtggcagttgtgtgaggaaatgtggtcctggattctatggtgaccaagaaatgggagaatgtgagtcctgccaccgagcatgcgaaacctgcacaggccctggtcatgacgagtgcagcagctgccaggaaggactgcagctgctgcgtgggatgtgcgtgcatgccaccaagacccaggaggagggcaaattctggaatgatattttgagaaaactccagccttgtcattcttcttgtaaaacctgcaatggatctgcaactctgtgcacttcatgtcccaaaggtgcatatcttctggctcaggcctgtgtttcctcctgtccccaaggcacatggccttccgtaaggagtgggagctgcgagaactgtacggaggcctgtgccatctgctctggagccgatctttgcaaaaaatgccagatgcagccgggccaccctctcttcctccatgaaggcaggtgctactccaagtgcccggagggctcttatgcagaagacggcatatgtgaacgctgtagctctccttgcagaacatgtgaaggaaacgccaccaactgccattcttgtgaaggaggccacgtcctgcaccacggagtgtgccaggaaaactgccccgagaggcacgtggctgtgaagggggtatgcaagcattgcccagagatgtgtcaggactgcatccatgagaaaacatgcaaagagtgcacgcctgagttcttcctgcacgatgatatgtgccaccagtcctgtccccgtggcttctatgcagactcgcgccactgtgtcccctgccataaagactgtctggagtgcagtggccccaaagccgacgactgcgagctctgtcttgagagttcctgggtcctctatgatggactgtgcttggaggagtgtccagcaggaacctattatgaaaaggagactaaggagtgcagagattgccacaagtcctgcttgacctgctcatcatctgggacctgcaccacctgtcagaaaggcctgatcatgaaccctcgtgggagctgcatggccaacgagaagtgctcaccctccgagtactgggatgaggatgctcccgggtgcaagccctgccatgttaagtgcttccactgcatggggccggcggaggaccagtgtcaaacatgccccatgaacagccttcttctcaacacaacctgtgtgaaggactgcccagagggctattatgccgatgaggacagcaaccggtgtgcccactgccacagctcttgcaggacatgtgaagggagacacagcaggcagtgccactcctgccgaccgggctggttccagctaggaaaagagtgcctgctccagtgcagggaaggatattacgcagacaactccactggccggtgtgagaggtgcaacaggagctgcaaggggtgccagggcccacggcccacagactgcctgtcttgcgatagatttttctttctgctccgctccaaaggagagtgtcatcgctcctgcccagaccattactatgtagagcaaagcacacagacctgtgagagatgccatccgacttgtgatcaatgcaaaggaaaaggagcgttgaattgtttatcctgtgtgtggagttaccacctcatgggagggatctgcacctcggactgtcttgtgggggaatacagagtgggagagggagagaagtttaactgtgaaaaatgccacgagagctgcatggaatgcaagggaccaggggccaagaactgcaccttgtgccctgccaacctggtgctgcacatggacgacagccactgcctccactgctgcaacacctctgatccccccagtgcccaggagtgctgtgactgccaggacaccacggacgaatgcatccttcgaacaagcaaggttaggcctgcaactgagcatttcaagacagctctgttcatcacctcctccatgatgctggtgcttctgctcggggcagctgtggtagtgtggaagaaatctcgtggccgagtccagccagcagcaaaggccggctatgaaaaactggccgaccccaacaagtcttactcctcctataagagcagctatagagagagcaccagctttgaagaggatcaggtgattgagtacagggatcgggactatgatgaggatgatgatgatgacatcgtctacatgggccaggatggcacagtctaccggaaatttaaatatgggctgctggatgacgatgacatagatgagctggaatatgatgacgagagttactcctactaccagtaaacaggcactcccccaccaacaccaccattccactctcaggcatgcctgtgagcatcactgtttttggttttatccccacaccaggctgatgtgtgagtttttctatttgtcttctttaaccatgagtccaaccagaatatgtaagaatgatgaaatactttgttcttcttttgagtggctaaactcaattaacagttcctgttcaaccgtaattgaagagcaaggataaaattcagaggcattttcctcaaaataatgtgttaagacacaaaaatgaaggaagtgaaaacaaatgagatttgtacaaactcttctatgtgattttaaaaaaaggacagcagatctatagaaattctgtttccgagctgcattgtggaggtgtctgctgcctcctggtattctaatttttctttatctaattttggggataatggaggtacaaaggagttgttggtttggtggtgtttttcttccctttagctgtctttaggcagaaatttgttttgtaagggccaagaaaagagggctcttatcaattgactccaggccacccctggtgagcagaagagaccacctgggctgggctgctcaggacctacttgagataagggaagaaaagagaaggtgcatcatagctgaggagccatgaggtcaccccaggccctagttcctccgcaggaatccagagtcacaacaattctaaaggcagagcaagcccagcgagaaagaaataactgaatttccaggaactgcactctcatgattttctgggtacttttcgcctgggagacatcagctaagacatcgaataataaaagaaaaatggcagtgttaacctaacataaaatggaataaaatgacaaacacttcatccgctctaaaaaattcagagctttccttcatcaacaacccatcacaaaaccgtggactctcaatagaaagagttggaatagagtctaacatggaaaaaaaaaaatcccaatatgctgctcacaagctgtactctagctgctgaccagccttccagcactgctcatcactatgatttttgtttctagacttcctaggcttccttttttccattcttctgtcaagtgtattcttggattcatgcaactgaggacagtttttgtccagattgtaacacagagaagggctcttgctatgcaaaatgatgttggcagggtcttacagatttccttgtcaaaatagaccttacaggcagtactagaaatggagcaccagaaagcaaaaatgacattttcagagaatgatgataattataatctattgcacacctactaccagataacaagctaagtaattcccccccaaaaatgccccacttatccattttggtacttaccatactcccatgaggttggtattgctattattctgttcttgtaggaaacctgaggcttacaagaggttaggtaactagtccaaggtcatgcaaagctcaacaaaattcaagaaaaaagaatgatcaccctaaagcgtgtgttcttataactatgctactgaaataaggtgggaaaataagcatcctaaatataattaaagtcatgcctattgttttagtctataatatcaatgttatctttactaaattcatggattttctttttttaacataatgtatcactgacacagaaaatctttatgaagaagtcttcagtttactaaaggcttgtgcttctttagaggaaagctcttaaaacagggttgacaaacagtctctggaaagagccagctagtaagtacattaggctttcttggccagaaagtctctgtcataaccactcagctctgctattatagcatgaatgcagctggtacataacggatgggtgagctgtgcttcaataaaaccttatttatggacactgacatttgaaattcaggtaattttcacatattataaaattttattcttcttttgatttttttcaaccttttaaaatttaaaaatgcaaaagctattctcagttcacagcattacaagaacaggtggtgggtcagatttggccaacaggctgtactttgctgactttatctttaaaacagttttcagagatcatacatgtacatgtatgatatgcctccaaaaattttgatcatttaaaattatctccttggccaggcgtggtggctcatacctctaatcctagcactttgggagactgaggcaggcagatcacctgaagtcaggagtttgataccagcttagccaacatggtgaaaccccatttctactaaaaatacaataaaaatctgggcatgttggtgcacacctgtaatcccagctactcaggaggctgaggcaggcaaatcacttgagcccgggaggcagaggttgcagtgagcggagatggcaccattgcactccagcctgggtgacagagcaagactccatctcaaaaaataagtaactaactaactaactaaataaataaataaataaaattatctccttgccaggactgctggctcatgcctgtaatcccagcactctgggaggctaaggcaggaggattgctgacccaccacctgttcttgagcccaggagttcgacatcagccttggacaacatagtgagactcccgtgtctacaaaaaatttaaaaattagccaggcatggtggcaagtgtctgtagtctcagctactcaggaggctaaggtggaaggatcacttgaacccgggaggtcgaggctgcagtgagctgtgatcttgctattgcacttcagcctgaatgacagagctaagaccctgactcaaaataaataaataacattatctcttcaaaatgtatctgaagccctgatagttctactttcaattcttagaaacatataaaaatatatgcatgatagccatcatatcaatggaagactttctcacctctgtggttgcagttagcttacaaaaacgagcaattttgcttatactgtgttgttcatcttccttgttaattctaaagctctgatagactgagtttgacatttctttctgtaaactggaaattgttttctatgaaaaaaaaactctatgatacacagttaaagattggttgaggttgagatgaacttcaatactaagaaaaattgtggtgttcctctgtgtggcctgcaatgaaaagaaggctcatgcttgtgtattgaggtttgacatctttccttctttgtttttagtcatgcaacgtcattcttagatggcttttgaatactatgctaatgactatctaaatagataaatatgtgattggaaaacaaagtcaccttttagttttctacttggaaatattaagagaatccttgtagactggaaacacaccaaaaggctgggtaaagcatgggaggttccagttaatagaaagtaattttaaaattggaaataaaattaaatcaagacca

SEQ ID NO: 23923 - DNA, 1497 bp, Homo sapiens
  source 1..1497: mol_type = unassigned DNA
atctggaatgtccatcattgtggcgacaagaacagtcgctgccggtcggaaatgaatgtccaggcagcgtggaagaggggctacacaggaaaaaacgtggtggtcaccatccttgatgatggcatagagagaaatcaccctgacctggccccaaattatgattcctacgccagctacgacgtgaacggcaatgattatgacccatctccacgatatgatgccagcaatgaaaataaacacggcactcgttgtgcgggagaagttgctgcttcagcaaacaattcctactgcatcgtgggcatagcgtacaatgccaaaataggaggcatccgcatgctggacggcgatgtcacagatgtggtcgaggcaaagtcgctgggcatcagacccaactacatcgacatttacagtgccagctgggggccggacgacgacggcaagacggtggacgggcccggccgactggctaagcaggctttcgagtatggcattaaaaagggccggcagggcctgggctccattttcgtctgggcatctgggaatggcgggagagagggggactactgctcgtgcgatggctacaccaacagcatctacaccatctccgtcagcagcgccaccgagaatggctacaagccctggtacctggaagagtgtgcctccaccctggccaccacctacagcagtggggccttttatgagcgaaaaatcgtcaccacggatctgcgtcagcgctgtaccgatggccacactgggacctcagtctctgcccccatggtggcgggcatcatcgccttggctctagaagcaaacagccagttaacctggagggacgtccagcacctgctagtgaagacatcccggccggcccacctgaaagcgagcgactggaaagtgaacggcgcgggtcataaagttagccatttctatggatttggtttggtggacgcagaagctctcgttgtggaggcaaagaagtggacagcagtgccatcgcagcacatgtgtgtggccgcctcggacaagagacccaggagcatccccttagtgcaggtgctgcggactacggccctgaccagcgcctgcgcggagcactcggaccagcgggtggtctacttggagcacgtggtggttcgcacctccatctcacacccacgccgaggagacctccagatctacctggtttctccctcgggaaccaagtctcaacttctggcaaagaggttgctggatctttccaatgaagggtttacaaactgggaattcatgactgtccactgctggggagaaaaggctgaagggcagtggaccttggaaatccaagatctgccatcccaggtccgcaacccggagaagcaaggtgatcttgagactcctgttgcaaatcaactgaccacagaagagaggttcgtttccacactctcgattctgttccattggtctgtatatctatcttggagtcagtaccatattgttttgatcactgtagctttgtag

SEQ ID NO: 23924 - DNA, 2937 bp, Homo sapiens
  source 1..2937: mol_type = unassigned DNA
atgcctccgcgcgcgccgcctgcgcccgggccccggccgccgccccgggccgccgccgccaccgacaccgccgcgggcgcggggggcgcggggggcgcggggggcgccggcgggcccgggttccggccgctcgcgccgcgtccctggcgctggctgctgctgctggcgctgcctgccgcctgctcccccccgccgcgccccgtctacaccaaccactgggcggtgcaagtgctgggcggcccggccgaggcggaccgcgtggcggcggcgcacgggtacctcaacttgggccagattggaaacctggaagattactaccatttttatcacagcaaaacctttaaaagatcaaccttgagtagcagaggccctcacaccttcctcagaatggacccccaggtgaaatggctccagcaacaggaagtgaaacgaagggtgaagagacaggtgcgaagtgacccgcaggccctttacttcaacgaccccatttggtccaacatgtggtacctgcattgtggcgacaagaacagtcgctgccggtcggaaatgaatgtccaggcagcgtggaagaggggctacacaggaaaaaacgtggtggtcaccatccttgatgatggcatagagagaaatcaccctgacctggccccaaattatgattcctacgccagctacgacgtgaacggcaatgattatgacccatctccacgatatgatgccagcaatgaaaataaacacggcactcgttgtgcgggagaagttgctgcttcagcaaacaattcctactgcatcgtgggcatagcgtacaatgccaaaataggaggcatccgcatgctggacggcgatgtcacagatgtggtcgaggcaaagtcgctgggcatcagacccaactacatcgacatttacagtgccagctgggggccggacgacgacggcaagacggtggacgggcccggccgactggctaagcaggctttcgagtatggcattaaaaagggccggcagggcctgggctccattttcgtctgggcatctgggaatggcgggagagagggggactactgctcgtgcgatggctacaccaacagcatctacaccatctccgtcagcagcgccaccgagaatggctacaagccctggtacctggaagagtgtgcctccaccctggccaccacctacagcagtggggccttttatgagcgaaaaatcgtcaccacggatctgcgtcagcgctgtaccgatggccacactgggacctcagtctctgcccccatggtggcgggcatcatcgccttggctctagaagcaaacagccagttaacctggagggacgtccagcacctgctagtgaagacatcccggccggcccacctgaaagcgagcgactggaaagtgaacggcgcgggtcataaagttagccatttctatggatttggtttggtggacgcagaagctctcgttgtggaggcaaagaagtggacagcagtgccatcgcagcacatgtgtgtggccgcctcggacaagagacccaggagcatccccttagtgcaggtgctgcggactacggccctgaccagcgcctgcgcggagcactcggaccagcgggtggtctacttggagcacgtggtggttcgcacctccatctcacacccacgccgaggagacctccagatctacctggtttctccctcgggaaccaagtctcaacttctggcaaagaggttgctggatctttccaatgaagggtttacaaactgggaattcatgactgtccactgctggggagaaaaggctgaagggcagtggaccttggaaatccaagatctgccatcccaggtccgcaacccggagaagcaaggtgatcttgagactcctgttgcaaatcaactgaccacagaagagagggaacctggactaaaacacgtgttccggtggcagattgaacaagagctttggtaatctctgtgaaatactgcagagggacagatgaccaaagccaccacatttagaactttggctgcctttggaagtccagagctggatctctcagctcccgcccccagaggctcagcactttggacatggctcacaaacagttgttgattgactgcatgaatgcgtgtgcgtgcaagcatgaaccttgtttaaatcaagagcttacataattttaaccagttctgtcttcagctgtacatactcagtaaaatgtttaatgaaggggaagagattagtctcttctgtgtgaccatgttttccctttattcatcctaaaaagttccatgaattcttgatttcctttcagtggccctttcaacaatgtcttttttcccaagagcataactgttctcattttattgctagccatcttgatctgtgttttattgacatctcttttgagctaatcttcatttctaagataagagttgagattttgcaatctgtgttcgatggctcaatctatcctgtgcttgatgctagaaaggaagacagatttaaagcacatgccttctgtgccggctttcaagtttgtcactaaactctcatttctggaaagtgcaattatagagtatcactcccacttccttggaaacagagctgaagaacttggcacactctccaaacagtcaccatacacactgttgtcaaaaagttccatttttaaccccatttgcattaatattgcagtcaatctctttacctccttttctctttcacggggccgtgacagtgacgcctttccccaaaactctcctcgtttgagaaaaaaagaagtatgtatccccacttatctcggggagaaatgcaaccaactgctgctgtgcacatttatgaatcacagtattgtttagtcggttctgtatctccagtagaaagcataacaaaaagatgacctttgtctcacctcatagctaatttttgcaaataaaatactaaacattg

SEQ ID NO: 23925 - DNA, 4236 bp, Homo sapiens
  source 1..4236: mol_type = unassigned DNA
atgcctccgcgcgcgccgcctgcgcccgggccccggccgccgccccgggccgccgccgccaccgacaccgccgcgggcgcggggggcgcggggggcgcggggggcgccggcgggcccgggttccggccgctcgcgccgcgtccctggcgctggctgctgctgctggcgctgcctgccgcctgctcccccccgccgcgccccgtctacaccaaccactgggcggtgcaagtgctgggcggcccggccgaggcggaccgcgtggcggcggcgcacgggtacctcaacttgggccagattggaaacctggaagattactaccatttttatcacagcaaaacctttaaaagatcaaccttgagtagcagaggccctcacaccttcctcagaatggacccccaggtgaaatggctccagcaacaggaagtgaaacgaagggtgaagagacaggtgcgaagtgacccgcaggccctttacttcaacgaccccatttggtccaacatgtggtacctgcattgtggcgacaagaacagtcgctgccggtcggaaatgaatgtccaggcagcgtggaagaggggctacacaggaaaaaacgtggtggtcaccatccttgatgatggcatagagagaaatcaccctgacctggccccaaattatgattcctacgccagctacgacgtgaacggcaatgattatgacccatctccacgatatgatgccagcaatgaaaataaacacggcactcgttgtgcgggagaagttgctgcttcagcaaacaattcctactgcatcgtgggcatagcgtacaatgccaaaataggaggcatccgcatgctggacggcgatgtcacagatgtggtcgaggcaaagtcgctgggcatcagacccaactacatcgacatttacagtgccagctgggggccggacgacgacggcaagacggtggacgggcccggccgactggctaagcaggctttcgagtatggcattaaaaagggccggcagggcctgggctccattttcgtctgggcatctgggaatggcgggagagagggggactactgctcgtgcgatggctacaccaacagcatctacaccatctccgtcagcagcgccaccgagaatggctacaagccctggtacctggaagagtgtgcctccaccctggccaccacctacagcagtggggccttttatgagcgaaaaatcgtcaccacggatctgcgtcagcgctgtaccgatggccacactgggacctcagtctctgcccccatggtggcgggcatcatcgccttggctctagaagcaaacagccagttaacctggagggacgtccagcacctgctagtgaagacatcccggccggcccacctgaaagcgagcgactggaaagtgaacggcgcgggtcataaagttagccatttctatggatttggtttggtggacgcagaagctctcgttgtggaggcaaagaagtggacagcagtgccatcgcagcacatgtgtgtggccgcctcggacaagagacccaggagcatccccttagtgcaggtgctgcggactacggccctgaccagcgcctgcgcggagcactcggaccagcgggtggtctacttggagcacgtggtggttcgcacctccatctcacacccacgccgaggagacctccagatctacctggtttctccctcgggaaccaagtctcaacttctggcaaagaggttgctggatctttccaatgaagggtttacaaactgggaattcatgactgtccactgctggggagaaaaggctgaagggcagtggaccttggaaatccaagatctgccatcccaggtccgcaacccggagaagcaagggaagttgaaagaatggagcctcatactgtatggcacagcagagcacccgtaccacaccttcagtgcccatcagtcccgctcgcggatgctggagctctcagccccagagctggagccacccaaggctgccctgtcaccctcccaggtggaagttcctgaagatgaggaagattacacagctcaatccaccccaggctctgctaatattttacagaccagtgtgtgccatccggagtgtggtgacaaaggctgtgatggccccaatgcagaccagtgcttgaactgcgtccacttcagcctggggagtgtcaagaccagcaggaagtgcgtgagtgtgtgccccttgggctactttggggacacagcagcaagacgctgtcgccggtgccacaaggggtgtgagacctgctccagcagagctgcgacgcagtgcctgtcttgccgccgcgggttctatcaccaccaggagatgaacacctgtgtgaccctctgtcctgcaggattttatgctgatgaaagtcagaaaaattgccttaaatgccacccaagctgtaaaaagtgcgtggatgaacctgagaaatgtactgtctgtaaagaaggattcagccttgcacggggcagctgcattcctgactgtgagccaggcacctactttgactcagagctgatcagatgtggggaatgccatcacacctgcggaacctgcgtggggccaggcagagaagagtgcattcactgtgcgaaaaacttccacttccacgactggaagtgtgtgccagcctgtggtgagggcttctacccagaagagatgccgggcttgccccacaaagtgtgtcgaaggtgtgacgagaactgcttgagctgtgcaggctccagcaggaactgtagcaggtgtaagacgggcttcacacagctggggacctcctgcatcaccaaccacacgtgcagcaacgctgacgagacattctgcgagatggtgaagtccaaccggctgtgcgaacggaagctcttcattcagttctgctgccgcacgtgcctcctggccgggtaagggtgcctagctgcccacagagggcaggcactcccatccatccatccgtccaccttcctccagactgtcggccagagtctgtttcaggagcggcgccctgcacctgacagctttatctccccaggagcagcatctctgagcacccaagccaggtgggtggtggctcttaaggaggtgttcctaaaatggtgatatcctctcaaatgctgcttgttggctccagtcttccgacaaactaacaggaacaaaatgaattctgggaatccacagctctggctttggagcagcttctgggaccataagtttactgaatcttcaagaccaaagcagaaaagaaaggcgcttggcatcacacatcactcttctccccgtgcttttctgcggctgtgtagtaaatctccccggcccagctggcgaaccctgggccatcctcacatgtgacaaagggccagcagtctacctgctcgttgcctgccactgagcagtctggggacggtttggtcagactataaataagataggtttgagggcataaaatgtatgaccactggggccggagtatctatttctacatagtcagctacttctgaaactgcagcagtggcttagaaagtccaattccaaagccagaccagaagattctatcccccgcagcgctctcctttgagcaagccgagctctccttgttaccgtgttctgtctgtgtcttcaggagtctcatggcctgaacgaccacctcgacctgatgcagagccttctgaggagaggcaacaggaggcattctgtggccagccaaaaggtaccccgatggccaagcaattcctctgaacaaaatgtaaagccagccatgcattgttaatcatccatcacttcccattttatggaattgcttttaaaatacatttggcctctgcccttcagaagactcgtttttaaggtggaaactcctgtgtctgtgtatattacaagcctacatgacacagttggatttattctgccaaacctgtgtaggcattttataagctacatgttctaatttttaccgatgttaattattttgacaaatatttcatatattttcattgaaatgcacagatctgcttgatcaattcccttgaatagggaagtaacatttgccttaaattttttcgacctcgtctttctccatattgtcctgctcccctgtttgacgacagtgcatttgccttgtcacctgtgagctggagagaacccagatgttgtttattgaatctacaactctgaaagagaaatcaatgaagcaagtacaatgttaaccctaaattaataaaagagttaacatcccatggc

SEQ ID NO: 23926 - DNA, 4197 bp, Homo sapiens
  source 1..4197: mol_type = unassigned DNA
atgcctccgcgcgcgccgcctgcgcccgggccccggccgccgccccgggccgccgccgccaccgacaccgccgcgggcgcggggggcgcggggggcgcggggggcgccggcgggcccgggttccggccgctcgcgccgcgtccctggcgctggctgctgctgctggcgctgcctgccgcctgctcccccccgccgcgccccgtctacaccaaccactgggcggtgcaagtgctgggcggcccggccgaggcggaccgcgtggcggcggcgcacgggtacctcaacttgggccagattggaaacctggaagattactaccatttttatcacagcaaaacctttaaaagatcaaccttgagtagcagaggccctcacaccttcctcagaatggacccccaggtgaaatggctccagcaacaggaagtgaaacgaagggtgaagagacaggtgcgaagtgacccgcaggccctttacttcaacgaccccatttggtccaacatgtggtacctgcattgtggcgacaagaacagtcgctgccggtcggaaatgaatgtccaggcagcgtggaagaggggctacacaggaaaaaacgtggtggtcaccatccttgatgatggcatagagagaaatcaccctgacctggccccaaattatgattcctacgccagctacgacgtgaacggcaatgattatgacccatctccacgatatgatgccagcaatgaaaataaacacggcactcgttgtgcgggagaagttgctgcttcagcaaacaattcctactgcatcgtgggcatagcgtacaatgccaaaataggaggcatccgcatgctggacggcgatgtcacagatgtggtcgaggcaaagtcgctgggcatcagacccaactacatcgacatttacagtgccagctgggggccggacgacgacggcaagacggtggacgggcccggccgactggctaagcaggctttcgagtatggcattaaaaagggccggcagggcctgggctccattttcgtctgggcatctgggaatggcgggagagagggggactactgctcgtgcgatggctacaccaacagcatctacaccatctccgtcagcagcgccaccgagaatggctacaagccctggtacctggaagagtgtgcctccaccctggccaccacctacagcagtggggccttttatgagcgaaaaatcgtcaccacggatctgcgtcagcgctgtaccgatggccacactgggacctcagtctctgcccccatggtggcgggcatcatcgccttggctctagaagcaaacagccagttaacctggagggacgtccagcacctgctagtgaagacatcccggccggcccacctgaaagcgagcgactggaaagtgaacggcgcgggtcataaagttagccatttctatggatttggtttggtggacgcagaagctctcgttgtggaggcaaagaagtggacagcagtgccatcgcagcacatgtgtgtggccgcctcggacaagagacccaggagcatccccttagtgcaggtgctgcggactacggccctgaccagcgcctgcgcggagcactcggaccagcgggtggtctacttggagcacgtggtggttcgcacctccatctcacacccacgccgaggagacctccagatctacctggtttctccctcgggaaccaagtctcaacttctggcaaagaggttgctggatctttccaatgaagggtttacaaactgggaattcatgactgtccactgctggggagaaaaggctgaagggcagtggaccttggaaatccaagatctgccatcccaggtccgcaacccggagaagcaagggaagttgaaagaatggagcctcatactgtatggcacagcagagcacccgtaccacaccttcagtgcccatcagtcccgctcgcggatgctggagctctcagccccagagctggagccacccaaggctgccctgtcaccctcccaggtggaagttcctgaagatgaggaagattacacaggtgtgtgccatccggagtgtggtgacaaaggctgtgatggccccaatgcagaccagtgcttgaactgcgtccacttcagcctggggagtgtcaagaccagcaggaagtgcgtgagtgtgtgccccttgggctactttggggacacagcagcaagacgctgtcgccggtgccacaaggggtgtgagacctgctccagcagagctgcgacgcagtgcctgtcttgccgccgcgggttctatcaccaccaggagatgaacacctgtgtgaccctctgtcctgcaggattttatgctgatgaaagtcagaaaaattgccttaaatgccacccaagctgtaaaaagtgcgtggatgaacctgagaaatgtactgtctgtaaagaaggattcagccttgcacggggcagctgcattcctgactgtgagccaggcacctactttgactcagagctgatcagatgtggggaatgccatcacacctgcggaacctgcgtggggccaggcagagaagagtgcattcactgtgcgaaaaacttccacttccacgactggaagtgtgtgccagcctgtggtgagggcttctacccagaagagatgccgggcttgccccacaaagtgtgtcgaaggtgtgacgagaactgcttgagctgtgcaggctccagcaggaactgtagcaggtgtaagacgggcttcacacagctggggacctcctgcatcaccaaccacacgtgcagcaacgctgacgagacattctgcgagatggtgaagtccaaccggctgtgcgaacggaagctcttcattcagttctgctgccgcacgtgcctcctggccgggtaagggtgcctagctgcccacagagggcaggcactcccatccatccatccgtccaccttcctccagactgtcggccagagtctgtttcaggagcggcgccctgcacctgacagctttatctccccaggagcagcatctctgagcacccaagccaggtgggtggtggctcttaaggaggtgttcctaaaatggtgatatcctctcaaatgctgcttgttggctccagtcttccgacaaactaacaggaacaaaatgaattctgggaatccacagctctggctttggagcagcttctgggaccataagtttactgaatcttcaagaccaaagcagaaaagaaaggcgcttggcatcacacatcactcttctccccgtgcttttctgcggctgtgtagtaaatctccccggcccagctggcgaaccctgggccatcctcacatgtgacaaagggccagcagtctacctgctcgttgcctgccactgagcagtctggggacggtttggtcagactataaataagataggtttgagggcataaaatgtatgaccactggggccggagtatctatttctacatagtcagctacttctgaaactgcagcagtggcttagaaagtccaattccaaagccagaccagaagattctatcccccgcagcgctctcctttgagcaagccgagctctccttgttaccgtgttctgtctgtgtcttcaggagtctcatggcctgaacgaccacctcgacctgatgcagagccttctgaggagaggcaacaggaggcattctgtggccagccaaaaggtaccccgatggccaagcaattcctctgaacaaaatgtaaagccagccatgcattgttaatcatccatcacttcccattttatggaattgcttttaaaatacatttggcctctgcccttcagaagactcgtttttaaggtggaaactcctgtgtctgtgtatattacaagcctacatgacacagttggatttattctgccaaacctgtgtaggcattttataagctacatgttctaatttttaccgatgttaattattttgacaaatatttcatatattttcattgaaatgcacagatctgcttgatcaattcccttgaatagggaagtaacatttgccttaaattttttcgacctcgtctttctccatattgtcctgctcccctgtttgacgacagtgcatttgccttgtcacctgtgagctggagagaacccagatgttgtttattgaatctacaactctgaaagagaaatcaatgaagcaagtacaatgttaaccctaaattaataaaagagttaacatcccatggc

SEQ ID NO: 23927 - DNA, 3205 bp, Homo sapiens
  source 1..3205: mol_type = unassigned DNA
tcgcgggccgaggacgcctctggggcggcaccgcgtcccgagagccccagaagtcggcggggaagttcccccggtggggggcgtttcgggcctcccggacggctctcggccccggagcccggtcgcaggagcgcgggcccgggggcgggaacgcgccgcggccgcctcctcctccccggctcccgcccgcggcggtgttggcggcggcggtggcggcggcggcggcgcttccccggcgcggagcggctttaaaaggcggcactccaccccccggcgcactcgcagctcgggcgccgcgcgagcctgtcgccgctatgcctccgcgcgcgccgcctgcgcccgggccccggccgccgccccgggccgccgccgccaccgacaccgccgcgggcgcggggggcgcggggggcgcggggggcgccggcgggcccgggttccggccgctcgcgccgcgtccctggcgctggctgctgctgctggcgctgcctgccgcctgctccgcccccccgcgccccgtctacaccaaccactgggcggtgcaagtgctgggcggcccggccgaggcggaccgcgtggcggcggcgcacgggtacctcaacttgggccagattggaaacctggaagattactaccatttttatcacagcaaaacctttaaaagatcaaccttgagtagcagaggccctcacaccttcctcagaatggacccccaggtgaaatggctccagcaacaggaagtgaaacgaagggtgaagagacaggtgcgaagtgacccgcaggccctttacttcaacgaccccatttggtccaacatgtggtacctgcattgtggcgacaagaacagtcgctgccggtcggaaatgaatgtccaggcagcgtggaagaggggctacacaggaaaaaacgtggtggtcaccatccttgatgatggcatagagagaaatcaccctgacctggccccaaattatgattcctacgccagctacgacgtgaacggcaatgattatgacccatctccacgatatgatgccagcaatgaaaataaacacggcactcgttgtgcgggagaagttgctgcttcagcaaacaattcctactgcatcgtgggcatagcgtacaatgccaaaataggaggcatccgcatgctggacggcgatgtcacagatgtggtcgaggcaaagtcgctgggcatcagacccaactacatcgacatttacagtgccagctgggggccggacgacgacggcaagacggtggacgggcccggccgactggctaagcaggctttcgagtatggcattaaaaagggccggcagggcctgggctccattttcgtctgggcatctgggaatggcgggagagagggggactactgctcgtgcgatggctacaccaacagcatctacaccatctccgtcagcagcgccaccgagaatggctacaagccctggtacctggaagagtgtgcctccaccctggccaccacctacagcagtggggccttttatgagcgaaaaatcgtcaccacggatctgcgtcagcgctgtaccgatggccacactgggacctcagtctctgcccccatggtggcgggcatcatcgccttggctctagaagcaaacagccagttaacctggagggacgtccagcacctgctagtgaagacatcccggccggcccacctgaaagcgagcgactggaaagtgaacggcgcgggtcataaagttagccatttctatggatttggtttggtggacgcagaagctctcgttgtggaggcaaagaagtggacagcagtgccatcgcagcacatgtgtgtggccgcctcggacaagagacccaggagcatccccttagtgcaggtgctgcggactacggccctgaccagcgcctgcgcggagcactcggaccagcgggtggtctacttggagcacgtggtggttcgcacctccatctcacacccacgccgaggagacctccagatctacctggtttctccctcgggaaccaagtctcaacttctggcaaagaggttgctggatctttccaatgaagggtttacaaactgggaattcatgactgtccactgctggggagaaaaggctgaagggcagtggaccttggaaatccaagatctgccatcccaggtccgcaacccggagaagcaagggaacctggactaaaacacgtgttccggtggcagattgaacaagagctttggtaatctctgtgaaatactgcagagggacagatgaccaaagccaccacatttagaactttggctgcctttggaagtccagagctggatctctcagctcccgcccccagaggctcagcactttggacatggctcacaaacagttgttgattgactgcatgaatgcgtgtgcgtgcaagcatgaaccttgtttaaatcaagagcttacataattttaaccagttctgtcttcagctgtacatactcagtaaaatgtttaatgaaggggaagagattagtctcttctgtgtgaccatgttttccctttattcatcctaaaaagttccatgaattcttgatttcctttcagtggccctttcaacaatgtcttttttcccaagagcataactgttctcattttattgctagccatcttgatctgtgttttattgacatctcttttgagctaatcttcatttctaagataagagttgagattttgcaatctgtgttcgatggctcaatctatcctgtgcttgatgctagaaaggaagacagatttaaagcacatgccttctgtgccggctttcaagtttgtcactaaactctcatttctggaaagtgcaattatagagtatcactcccacttccttggaaacagagctgaagaacttggcacactctccaaacagtcaccatacacactgttgtcaaaaagttccatttttaaccccatttgcattaatattgcagtcaatctctttacctccttttctctttcacggggccgtgacagtgacgcctttccccaaaactctcctcgtttgagaaaaaaagaagtatgtatccccacttatctcggggagaaatgcaaccaactgctgctgtgcacatttatgaatcacagtattgtttagtcggttctgtatctccagtagaaagcataacaaaaagatgacctttgtctcacctcatagctaatttttgcaaataaaatactaaacattg

SEQ ID NO: 23928 - DNA, 2828 bp, Homo sapiens
  source 1..2828: mol_type = unassigned DNA
ggggttagcgcctgcgctctggacggctttggggcagggcagatttatatctgcgggggatcagctgacgctccgcattgcagactgcggagtcagacggcgctatgtacgccctcttcctcctggccagcctcctgggcgcggctctagccggcccggtccttggactgaaagaatgcaccaggggctcggcagtgtggtgccagaatgtgaagacggcgtccgactgcggggcagtgaagcactgcctgcagaccgtttggaacaagccaacagtgaaatcccttccctgcgacatatgcaaagacgttgtcaccgcagctggtgatatgctgaaggacaatgccactgaggaggagatccttgtttacttggagaagacctgtgactggcttccgaaaccgaacatgtctgcttcatgcaaggagatagtggactcctacctccctgtcatcctggacatcattaaaggagaaatgagccgtcctggggaggtgtgctctgctctcaacctctgcgagtctctccagaagcacctagcagagctgaatcaccagaagcagctggagtccaataagatcccagagctggacatgactgaggtggtggcccccttcatggccaacatccctctcctcctctaccctcaggacggcccccgcagcaagccccagccaaaggataatggggacgtttgccaggactgcattcagatggtgactgacatccagactgctgtacggaccaactccacctttgtccaggccttggtggaacatgtcaaggaggagtgtgaccgcctgggccctggcatggccgacatatgcaagaactatatcagccagtattctgaaattgctatccagatgatgatgcacatgagtgctgaacaacccaaggagatctgtgcgctggttgggttctgtgatgaggtgaaagagatgcccatgcagactctggtccccgccaaagtggcctccaagaatgtcatccctgccctggaactggtggagcccattaagaagcacgaggtcccagcaaagtctgatgtttactgtgaggtgtgtgaattcctggtgaaggaggtgaccaagctgattgacaacaacaagactgagaaagaaatactcgacgcttttgacaaaatgtgctcgaagctgccgaagtccctgtcggaagagtgccaggaggtggtggacacgtacggcagctccatcctgtccatcctgctggaggaggtcagccctgagctggtgtgcagcatgctgcacctctgctctggcacgcggctgcctgcactgaccgttcacgtgactcagccaaaggacggtggcttctgcgaagtgtgcaagaagctggtgggttatttggatcgcaacctggagaaaaacagcaccaagcaggagatcctggctgctcttgagaaaggctgcagcttcctgccagacccttaccagaagcagtgtgatcagtttgtggcagagtacgagcccgtgctgatcgagatcctggtggaggtgatggatccttccttcgtgtgcttgaaaattggagcctgcccctcggcccataagcccttgttgggaactgagaagtgtatatggggcccaagctactggtgccagaacacagagacagcagcccagtgcaatgctgtcgagcattgcaaacgccatgtgtggaactaggaggaggaatattccatcttggcagaaaccacagcattggtttttttctacttgtgtgtctgggggaatgaacgcacagatctgtttgactttgttataaaaatagggctcccccacctcccccatttctgtgtcctttattgtagcattgctgtctgcaagggagcccctagcccctggcagacatagctgcttcagtgccccttttctctctgctagatggatgttgatgcactggaggtcttttagcctgcccttgcatggcgcctgctggaggaggagagagctctgctggcatgagccacagtttcttgactggaggccatcaaccctcttggttgaggccttgttctgagccctgacatgtgcttgggcactggtgggcctgggcttctgaggtggcctcctgccctgatcagggaccctccccgctttcctgggcctctcagttgaacaaagcagcaaaacaaaggcagttttatatgaaagattagaagcctggaataatcaggctttttaaatgatgtaattcccactgtaatagcatagggattttggaagcagctgctggtggcttgggacatcagtggggccaagggttctctgtccctggttcaactgtgatttggctttcccgtgtctttcctggtgatgccttgtttggggttctgtgggtttgggtgggaagagggccatctgcctgaatgtaacctgctagctctccgaaggccctgcgggcctggcttgtgtgagcgtgtggacagtggtggccgcgctgtgcctgctcgtgttgcctacatgtccctggctgttgaggcgctgcttcagcctgcacccctcccttgtctcatagatgctccttttgaccttttcaaataaatatggatggcgagctcctaggcctctggcttcctggtagagggcggcatgccgaagggtctgctgggtgtggattggatgctggggtgtgggggttggaagctgtctgtggcccacttgggcacccacgcttctgtccacttctggttgccaggagacagcaagcaaagccagcaggacatgaagttgctattaaatggacttcgtgatttttgttttgcactaaagtttctgtgatttaacaataaaattctgttagcc

SEQ ID NO: 23929 - DNA, 1809 bp, Homo sapiens
  source 1..1809: mol_type = unassigned DNA
gggggatcagctgacgctccgcattgcagactgcggagtcagacggcgctatgtacgccctcttcctcctggccagcctcctgggcgcggctctagccggcccggtccttggactgaaagaatgcaccaggggctcggcagtgtggtgccagaatgtgaagacggcgtccgactgcggggcagtgaagcactgcctgcagaccgtttggaacaagccaacagtgaaatcccttccctgcgacatatgcaaagacgttgtcaccgcagctggtgatatgctgaaggacaatgccactgaggaggagatccttgtttacttggagaagacctgtgactggcttccgaaaccgaacatgtctgcttcatgcaaggagatagtggactcctacctccctgtcatcctggacatcattaaaggagaaatgagccgtcctggggaggtgtgctctgctctcaacctctgcgagtctctccagaagcacctagcagagctgaatcaccagaagcagctggagtccaataagatcccagagctggacatgactgaggtggtggcccccttcatggccaacatccctctcctcctctaccctcaggacggcccccgcagcaagccccagccaaaggataatggggacgtttgccaggactgcattcagatggtgactgacatccagactgctgtacggaccaactccacctttgtccaggccttggtggaacatgtcaaggaggagtgtgaccgcctgggccctggcatggccgacatatgcaagaactatatcagccagtattctgaaattgctatccagatgatgatgcacatgcaacccaaggagatctgtgcgctggttgggttctgtgatgaggtgaaagagatgcccatgcagactctggtccccgccaaagtggcctccaagaatgtcatccctgccctggaactggtggagcccattaagaagcacgaggtcccagcaaagtctgatgtttactgtgaggtgtgtgaattcctggtgaaggaggtgaccaagctgattgacaacaacaagactgagaaagaaatactcgacgcttttgacaaaatgtgctcgaagctgccgaagtccctgtcggaagagtgccaggaggtggtggacacgtacggcagctccatcctgtccatcctgctggaggaggtcagccctgagctggtgtgcagcatgctgcacctctgctctggcacgcggctgcctgcactgaccgttcacgtgactcagccaaaggacggtggcttctgcgaagtgtgcaagaagctggtgggttatttggatcgcaacctggagaaaaacagcaccaagcaggagatcctggctgctcttgagaaaggctgcagcttcctgccagacccttaccagaagcagtgtgatcagtttgtggcagagtacgagcccgtgctgatcgagatcctggtggaggtgatggatccttccttcgtgtgcttgaaaattggagcctgcccctcggcccataagcccttgttgggaactgagaagtgtatatggggcccaagctactggtgccagaacacagagacagcagcccagtgcaatgctgtcgagcattgcaaacgccatgtgtggattggatgctggggtgtgggggttggaagctgtctgtggcccacttgggcacccacgcttctgtccacttctggttgccaggagacagcaagcaaagccagcaggacatgaagttgctattaaatggacttcgtgatttttgttttgcactaaagtttctgtgatttaacaataaaattctgttagccag

SEQ ID NO: 23930 - DNA, 1915 bp, Homo sapiens
  source 1..1915: mol_type = unassigned DNA
gcgggggatcagctgacgctccgcattgcagactgcggagtcagacggcgctatgtacgccctcttcctcctggccagcctcctgggcgcggctctagccggcccggtccttggactgaaagaatgcaccaggggctcggcagtgtggtgccagaatgtgaagacggcgtccgactgcggggcagtgaagcactgcctgcagaccgtttggaacaagccaacagtgaaatcccttccctgcgacatatgcaaagacgttgtcaccgcagctggtgatatgctgaaggacaatgccactgaggaggagatccttgtttacttggaggtcagccctgagctggtgtgcagcatgctgcacctctgctctggcacgcggctgcctgcactgaccgttcacgtgactcagccaaaggacggtggcttctgcgaagtgtgcaagaagctggtgggttatttggatcgcaacctggagaaaaacagcaccaagcaggagatcctggctgctcttgagaaaggctgcagcttcctgccagacccttaccagaagcagtgtgatcagtttgtggcagagtacgagcccgtgctgatcgagatcctggtggaggtgatggatccttccttcgtgtgcttgaaaattggagcctgcccctcggcccataagcccttgttgggaactgagaagtgtatatggggcccaagctactggtgccagaacacagagacagcagcccagtgcaatgctgtcgagcattgcaaacgccatgtgtggaactaggaggaggaatattccatcttggcagaaaccacagcattggtttttttctacttgtgtgtctgggggaatgaacgcacagatctgtttgactttgttataaaaatagggctcccccacctcccccatttctgtgtcctttattgtagcattgctgtctgcaagggagcccctagcccctggcagacatagctgcttcagtgccccttttctctctgctagatggatgttgatgcactggaggtcttttagcctgcccttgcatggcgcctgctggaggaggagagagctctgctggcatgagccacagtttcttgactggaggccatcaaccctcttggttgaggccttgttctgagccctgacatgtgcttgggcactggtgggcctgggcttctgaggtggcctcctgccctgatcagggaccctccccgctttcctgggcctctcagttgaacaaagcagcaaaacaaaggcagttttatatgaaagattagaagcctggaataatcaggctttttaaatgatgtaattcccactgtaatagcatagggattttggaagcagctgctggtggcttgggacatcagtggggccaagggttctctgtccctggttcaactgtgatttggctttcccgtgtctttcctggtgatgccttgtttggggttctgtgggtttgggtgggaagagggccatctgcctgaatgtaacctgctagctctccgaaggccctgcgggcctggcttgtgtgagcgtgtggacagtggtggccgcgctgtgcctgctcgtgttgcctacatgtccctggctgttgaggcgctgcttcagcctgcacccctcccttgtctcatagatgctccttttgaccttttcaaataaatatggatggcgagctcctaggcctctggcttcctggtagagggcggcatgccgaagggtctgctgggtgtggattggatgctggggtgtgggggttggaagctgtctgtggcccacttgggcacccacgcttctgtccacttctggttgccaggagacagcaagcaaagccagcaggacatgaagttgctattaaatggacttcgtgatttttgttttgcactaaagtttctgtgatttaacaataaaattctgttagcc

SEQ ID NO: 23931 - DNA, 2825 bp, Homo sapiens
  source 1..2825: mol_type = unassigned DNA
ggggttagcgcctgcgctctggacggctttggggcagggcagatttatatctgcgggggatcagctgacgctccgcattgcagactgcggagtcagacggcgctatgtacgccctcttcctcctggccagcctcctgggcgcggctctagccggcccggtccttggactgaaagaatgcaccaggggctcggcagtgtggtgccagaatgtgaagacggcgtccgactgcggggcagtgaagcactgcctgcagaccgtttggaacaagccaacagtgaaatcccttccctgcgacatatgcaaagacgttgtcaccgcagctggtgatatgctgaaggacaatgccactgaggaggagatccttgtttacttggagaagacctgtgactggcttccgaaaccgaacatgtctgcttcatgcaaggagatagtggactcctacctccctgtcatcctggacatcattaaaggagaaatgagccgtcctggggaggtgtgctctgctctcaacctctgcgagtctctccagaagcacctagcagagctgaatcaccagaagcagctggagtccaataagatcccagagctggacatgactgaggtggtggcccccttcatggccaacatccctctcctcctctaccctcaggacggcccccgcagcaagccccagccaaaggataatggggacgtttgccaggactgcattcagatggtgactgacatccagactgctgtacggaccaactccacctttgtccaggccttggtggaacatgtcaaggaggagtgtgaccgcctgggccctggcatggccgacatatgcaagaactatatcagccagtattctgaaattgctatccagatgatgatgcacatgcttcagcaacccaaggagatctgtgcgctggttgggttctgtgatgaggtgaaagagatgcccatgcagactctggtccccgccaaagtggcctccaagaatgtcatccctgccctggaactggtggagcccattaagaagcacgaggtcccagcaaagtctgatgtttactgtgaggtgtgtgaattcctggtgaaggaggtgaccaagctgattgacaacaacaagactgagaaagaaatactcgacgcttttgacaaaatgtgctcgaagctgccgaagtccctgtcggaagagtgccaggaggtggtggacacgtacggcagctccatcctgtccatcctgctggaggaggtcagccctgagctggtgtgcagcatgctgcacctctgctctggcacgcggctgcctgcactgaccgttcacgtgactcagccaaaggacggtggcttctgcgaagtgtgcaagaagctggtgggttatttggatcgcaacctggagaaaaacagcaccaagcaggagatcctggctgctcttgagaaaggctgcagcttcctgccagacccttaccagaagcagtgtgatcagtttgtggcagagtacgagcccgtgctgatcgagatcctggtggaggtgatggatccttccttcgtgtgcttgaaaattggagcctgcccctcggcccataagcccttgttgggaactgagaagtgtatatggggcccaagctactggtgccagaacacagagacagcagcccagtgcaatgctgtcgagcattgcaaacgccatgtgtggaactaggaggaggaatattccatcttggcagaaaccacagcattggtttttttctacttgtgtgtctgggggaatgaacgcacagatctgtttgactttgttataaaaatagggctcccccacctcccccatttctgtgtcctttattgtagcattgctgtctgcaagggagcccctagcccctggcagacatagctgcttcagtgccccttttctctctgctagatggatgttgatgcactggaggtcttttagcctgcccttgcatggcgcctgctggaggaggagagagctctgctggcatgagccacagtttcttgactggaggccatcaaccctcttggttgaggccttgttctgagccctgacatgtgcttgggcactggtgggcctgggcttctgaggtggcctcctgccctgatcagggaccctccccgctttcctgggcctctcagttgaacaaagcagcaaaacaaaggcagttttatatgaaagattagaagcctggaataatcaggctttttaaatgatgtaattcccactgtaatagcatagggattttggaagcagctgctggtggcttgggacatcagtggggccaagggttctctgtccctggttcaactgtgatttggctttcccgtgtctttcctggtgatgccttgtttggggttctgtgggtttgggtgggaagagggccatctgcctgaatgtaacctgctagctctccgaaggccctgcgggcctggcttgtgtgagcgtgtggacagtggtggccgcgctgtgcctgctcgtgttgcctacatgtccctggctgttgaggcgctgcttcagcctgcacccctcccttgtctcatagatgctccttttgaccttttcaaataaatatggatggcgagctcctaggcctctggcttcctggtagagggcggcatgccgaagggtctgctgggtgtggattggatgctggggtgtgggggttggaagctgtctgtggcccacttgggcacccacgcttctgtccacttctggttgccaggagacagcaagcaaagccagcaggacatgaagttgctattaaatggacttcgtgatttttgttttgcactaaagtttctgtgatttaacaataaaattctgttagcc

SEQ ID NO: 23932 - DNA, 2866 bp, Homo sapiens
  source 1..2866: mol_type = unassigned DNA
gctgagtcagggcgctgttgagctcgggcaggcccggatggggcggggttagcgcctgcgctctggacggctttggggcagggcagatttatatctgcgggggatcagctgacgctccgcattgcagactgcggagtcagacggcgctatgtacgccctcttcctcctggccagcctcctgggcgcggctctagccggcccggtccttggactgaaagaatgcaccaggggctcggcagtgtggtgccagaatgtgaagacggcgtccgactgcggggcagtgaagcactgcctgcagaccgtttggaacaagccaacagtgaaatcccttccctgcgacatatgcaaagacgttgtcaccgcagctggtgatatgctgaaggacaatgccactgaggaggagatccttgtttacttggagaagacctgtgactggcttccgaaaccgaacatgtctgcttcatgcaaggagatagtggactcctacctccctgtcatcctggacatcattaaaggagaaatgagccgtcctggggaggtgtgctctgctctcaacctctgcgagtctctccagaagcacctagcagagctgaatcaccagaagcagctggagtccaataagatcccagagctggacatgactgaggtggtggcccccttcatggccaacatccctctcctcctctaccctcaggacggcccccgcagcaagccccagccaaaggataatggggacgtttgccaggactgcattcagatggtgactgacatccagactgctgtacggaccaactccacctttgtccaggccttggtggaacatgtcaaggaggagtgtgaccgcctgggccctggcatggccgacatatgcaagaactatatcagccagtattctgaaattgctatccagatgatgatgcacatgcaacccaaggagatctgtgcgctggttgggttctgtgatgaggtgaaagagatgcccatgcagactctggtccccgccaaagtggcctccaagaatgtcatccctgccctggaactggtggagcccattaagaagcacgaggtcccagcaaagtctgatgtttactgtgaggtgtgtgaattcctggtgaaggaggtgaccaagctgattgacaacaacaagactgagaaagaaatactcgacgcttttgacaaaatgtgctcgaagctgccgaagtccctgtcggaagagtgccaggaggtggtggacacgtacggcagctccatcctgtccatcctgctggaggaggtcagccctgagctggtgtgcagcatgctgcacctctgctctggcacgcggctgcctgcactgaccgttcacgtgactcagccaaaggacggtggcttctgcgaagtgtgcaagaagctggtgggttatttggatcgcaacctggagaaaaacagcaccaagcaggagatcctggctgctcttgagaaaggctgcagcttcctgccagacccttaccagaagcagtgtgatcagtttgtggcagagtacgagcccgtgctgatcgagatcctggtggaggtgatggatccttccttcgtgtgcttgaaaattggagcctgcccctcggcccataagcccttgttgggaactgagaagtgtatatggggcccaagctactggtgccagaacacagagacagcagcccagtgcaatgctgtcgagcattgcaaacgccatgtgtggaactaggaggaggaatattccatcttggcagaaaccacagcattggtttttttctacttgtgtgtctgggggaatgaacgcacagatctgtttgactttgttataaaaatagggctcccccacctcccccatttctgtgtcctttattgtagcattgctgtctgcaagggagcccctagcccctggcagacatagctgcttcagtgccccttttctctctgctagatggatgttgatgcactggaggtcttttagcctgcccttgcatggcgcctgctggaggaggagagagctctgctggcatgagccacagtttcttgactggaggccatcaaccctcttggttgaggccttgttctgagccctgacatgtgcttgggcactggtgggcctgggcttctgaggtggcctcctgccctgatcagggaccctccccgctttcctgggcctctcagttgaacaaagcagcaaaacaaaggcagttttatatgaaagattagaagcctggaataatcaggctttttaaatgatgtaattcccactgtaatagcatagggattttggaagcagctgctggtggcttgggacatcagtggggccaagggttctctgtccctggttcaactgtgatttggctttcccgtgtctttcctggtgatgccttgtttggggttctgtgggtttgggtgggaagagggccatctgcctgaatgtaacctgctagctctccgaaggccctgcgggcctggcttgtgtgagcgtgtggacagtggtggccgcgctgtgcctgctcgtgttgcctacatgtccctggctgttgaggcgctgcttcagcctgcacccctcccttgtctcatagatgctccttttgaccttttcaaataaatatggatggcgagctcctaggcctctggcttcctggtagagggcggcatgccgaagggtctgctgggtgtggattggatgctggggtgtgggggttggaagctgtctgtggcccacttgggcacccacgcttctgtccacttctggttgccaggagacagcaagcaaagccagcaggacatgaagttgctattaaatggacttcgtgatttttgttttgcactaaagtttctgtgatttaacaataaaattctgttagccaga

SEQ ID NO: 23933 - DNA, 1765 bp, Homo sapiens
  source 1..1765: mol_type = unassigned DNA
attgcagactgcggagtcagacggcgctatgtacgccctcttcctcctggccagcctcctgggcgcggctctagccggcccggtccttggactgaaaggcagtgaagcactgcctgcagaccgtttggaacaagccaacagtgaaatcccttccctgcgacatatgcaaagacgttgtcaccgcagctggtgatatgctgaaggacaatgccactgaggaggagatccttgtttacttggagaagacctgtgactggcttccgaaaccgaacatgtctgcttcatgcaaggagatagtggactcctacctccctgtcatcctggacatcattaaaggagaaatgagccgtcctggggaggtgtgctctgctctcaacctctgcgagtctctccagaagcacctagcagagctgaatcaccagaagcagctggagtccaataagatcccagagctggacatgactgaggtggtggcccccttcatggccaacatccctctcctcctctaccctcaggacggcccccgcagcaagccccagccaaaggataatggggacgtttgccaggactgcattcagatggtgactgacatccagactgctgtacggaccaactccacctttgtccaggccttggtggaacatgtcaaggaggagtgtgaccgcctgggccctggcatggccgacatatgcaagaactatatcagccagtattctgaaattgctatccagatgatgatgcacatgcagcaacccaaggagatctgtgcgctggttgggttctgtgatgaggtgaaagagatgcccatgcagactctggtccccgccaaagtggcctccaagaatgtcatccctgccctggaactggtggagcccattaagaagcacgaggtcccagcaaagtctgatgtttactgtgaggtgtgtgaattcctggtgaaggaggtgaccaagctgattgacaacaacaagactgagaaagaaatactcgacgcttttgacaaaatgtgctcgaagctgccgaagtccctgtcggaagagtgccaggaggtggtggacacgtacggcagctccatcctgtccatcctgctggaggaggtcagccctgagctggtgtgcagcatgctgcacctctgctctggcacgcggctgcctgcactgaccgttcacgtgactcagccaaaggacggtggcttctgcgaagtgtgcaagaagctggtgggttatttggatcgcaacctggagaaaaacagcaccaagcaggagatcctggctgctcttgagaaaggctgcagcttcctgccagacccttaccagaagcagtgtgatcagtttgtggcagagtacgagcccgtgctgatcgagatcctggtggaggtgatggatccttccttcgtgtgcttgaaaattggagcctgcccctcggcccataagcccttgttgggaactgagaagtgtatatggggcccaagctactggtgccagaacacagagacagcagcccagtgcaatgctgtcgagcattgcaaacgccatgtgtggaactaggaggaggaatattccatcttggcagaaaccacagcattggtttttttctacttgtgtgtctgggggaatgaacgcacagatctgtttgactttgttataaaaatagggctcccccacctcccccatttctgtgtcctttattgtagcattgctgtctgcaagggagcccctagcccctggcagacatagctgcttcagtgccccttttctctctgcta

SEQ ID NO: 23934 - DNA, 2319 bp, Homo sapiens
  source 1..2319: mol_type = unassigned DNA
gcattgcagactgcggagtcagacggcgctatgtacgccctcttcctcctggccagcctcctgggcgcggctctagccggcccggtccttggactgaaagaatgcaccaggggctcggcagtgtggtgccagaatgtgaagacggcgtccgactgcggggcagtgaagcactgcctgcagaccgtttggaacaagccaacagtgaaatcccttccctgcgacatatgcaaagacgttgtcaccgcagctggtgatatgctgaaggacaatgccactgaggaggagatccttgtttacttggagaagacctgtgactggcttccgaaaccgaacatgtctgcttcatgcaaggagatagtggactcctacctccctgtcatcctggacatcattaaaggagaaatgagccgtcctggggaggtgtgctctgctctcaacctctgcgagtctctccagaagcacctagcagagctgaatcaccagaagcagctggagtccaataagatcccagagctggacatgactgaggtggtggcccccttcatggccaacatccctctcctcctctaccctcaggacggcccccgcagcaagccccagccaaaggataatggggacgtttgccaggactgcattcagatggtgactgacatccagactgctgtacggaccaactccacctttgtccaggccttggtggaacatgtcaaggaggagtgtgaccgcctgggccctggcatggccgacatatgcaagaactatatcagccagtattctgaaattgctatccagatgatgatgcacatgagtgctgaacaacccaaggagatctgtgcgctggttgggttctgtgatgaggtgaaagagatgcccatgcagactctggtccccgccaaagtggcctccaagaatgtcatccctgccctggaactggtggagcccattaagaagcacgaggtcccagcaaagtctgatgtttactgtgaggtgtgtgaattcctggtgaaggaggtgaccaagctgattgacaacaacaagactgagaaagaaatactcgacgcttttgacaaaatgtgctcgaagctgccgaagtccctgtcggaagagtgccaggaggtggtggacacgtacggcagctccatcctgtccatcctgctggaggaggtcagccctgagctggtgtgcagcatgctgcacctctgctctggcacgcggctgcctgcactgaccgttcacgtgactcagccaaaggacggtggcttctgcgaagtgtgcaagaagctggtgggttatttggatcgcaacctggagaaaaacagcaccaagcaggagatcctggctgctcttgagaaaggctgcagcttcctgccagacccttaccagaagcagtgtgatcagtttgtggcagagtacgagcccgtgctgatcgagatcctggtggaggtgatggatccttccttcgtgtgcttgaaaattggagcctgcccctcggcccataagcccttgttgggaactgagaagtgtatatggggcccaagctactggtgccagaacacagagacagcagcccagtgcaatgctgtcgagcattgcaaacgccatgtgtggaactaggaggaggaatattccatcttggcagaaaccacagcattggtttttttctacttgtgtgtctgggggaatgaacgcacagatctgtttgactttgttataaaaatagggctcccccacctcccccatttctgtgtcctttattgtagcattgctgtctgcaagggagcccctagcccctggcagacatagctgcttcagtgccccttttctctctgctagatggatgttgatgcactggaggtcttttagcctgcccttgcatggcgcctgctggaggaggagagagctctgctggcatgagccacagtttcttgactggaggccatcaaccctcttggttgaggccttgttctgagccctgacatgtgcttgggcactggtgggcctgggcttctgaggtggcctcctgccctgatcagggaccctccccgctttcctgggcctctcagttgaacaaagcagcaaaacaaaggcagttttatatgaaagattagaagcctggaataatcaggctttttaaatgatgtaattcccactgtaatagcatagggattttggaagcagctgctggtggcttgggacatcagtggggccaagggttctctgtccctggttcaactgtgatttggctttcccgtgtctttcctggtgatgccttgtctcatagatgctccttttgaccttttcaaataaatatggatggcg

SEQ ID NO: 23935 - DNA, 2797 bp, Homo sapiens
  source 1..2797: mol_type = unassigned DNA
atgcctgaccatgacagcacagccctcttaagccggcaaaccaagaggagaagagttgacattggagtgaaaaggacggtagggacagcatctgcattttttgctaaggcaagagcaacgttttttagtgccatgaatccccaaggttctgagcaggatgttgagtattcagtggtgcagcatgcagatggggaaaagtcaaatgtactccgcaagctgctgaagagggcgaactcgtatgaagatgccatgatgccttttccaggagcaaccataatttcccagctgttgaaaaataacatgaacaaaaatggtggcacggagcccagtttccaagccagcggtctctctagtacaggctccgaagtacatcaggaggatatatgcagcaactcttcaagagacagccccccagagtgtctttccccttttggcaggcctactatgagccagtttgatatggatcgcttatgtgatgagcacctgagagcaaagcgcgcccgggttgagaatataattcggggtatgagccattcccccagtgtggcattaaggggcaatgaaaatgaaagagagatggccccgcagtctgtgagtccccgagaaagttacagagaaaacaaacgcaagcaaaagcttccccagcagcagcaacagagtttccagcagctggtttcagcccgaaaagaacagaagcgagaggagcgccgacagctgaaacagcagctggaggacatgcagaaacagctgcgccagctgcaggaaaagttctaccaaatctatgacagcactgattcggaaaatgatgaagatggtaacctgtctgaagacagcatgcgctcggagatcctggatgccagggcccaggactctgtcggaaggtcagataatgagatgtgcgagctagacccaggacagtttattgaccgagctcgagccctgatcagagagcaggaaatggctgaaaacaagccgaagcgagaaggcaacaacaaagaaagagaccatgggccaaactccttacaaccggaaggcaaacatttggctgagaccttgaaacaggaactgaacactgccatgtcgcaagttgtggacactgtggtcaaagtcttttcggccaagccctcccgccaggttcctcaggtcttcccacctctccagatcccccaggccagatttgcagtcaatggggaaaaccacaatttccacaccgccaaccagcgcctgcagtgctttggcgacgtcatcattccgaaccccctggacacctttggcaatgtgcagatggccagttccactgaccagacagaagcactgcccctggttgtccgcaaaaactcctctgaccagtctgcctccggccctgccgctggcggccaccaccagcccctgcaccagtcgcctctctctgccaccacgggcttcaccacgtccaccttccgccaccccttcccccttcccttgatggcctatccatttcagagcccattaggtgctccctccggctccttctctggaaaagacagagcctctcctgaatccttagacttaactagggataccacgagtctgaggaccaagatgtcatctcaccacctgagccaccacccttgttcaccagcacacccgcccagcaccgccgaagggctctccttgtcgctcataaagtccgagtgcggcgatcttcaagatatgtctgaaatatcaccttattcgggaagtgcaatgcaggaaggattgtcacccaatcacttgaaaaaagcaaagctcatgtttttttatacccgttatcccagctccaatatgctgaagacctacttctccgacgtaaagttcaacagatgcattacctctcagctcatcaagtggtttagcaatttccgtgagttttactacattcagatggagaagtacgcacgtcaagccatcaacgatggggtcaccagtactgaagagctgtctataaccagagactgtgagctgtacagggctctgaacatgcactacaataaagcaaatgactttgaggttccagagagattcctggaagttgctcagatcacattacgggagtttttcaatgccattatcgcaggcaaagatgttgatccttcctggaagaaggccatatacaaggtcatctgcaagctggatagtgaagtccctgagattttcaaatccccgaactgcctacaagagctgcttcatgagtagaaatttcaacaactctttttgaatgtatgaagagtagcagtcccctttggatgtccaagttatatgtgtctagattttgatttcatatatatgtgtatgggaggcatggatatgttatgaaatcagctggtaattcctcctcatcacgtttctctcattttcttttgttttccattgcaaggggatggttgttttctttctgcctttagtttgcttttgcccaaggcccttaacatttggacacttaaaatagggttaattttcagggaaaaagaatgttggcgtgtgtaaagtctctattagcaatgaagggaatttgttaacgatgcatccacttgattgatgacttattgcaaatggcggttggctgaggaaaacccatgacacagcacaactctacagacagtgatgtgtctcttgtttctactgctaagaaggtctgaaaatttaatgaaaccacttcatacatttaagtattttgtttggtttgaactcaatcagtagcttttccttacatgtttaaaaataattccaatgacagatgagcagctcacttttccaaagtaccccaaaaggccaaatt

SEQ ID NO: 23936 - DNA, 8498 bp, Homo sapiens
  source 1..8498: mol_type = unassigned DNA
aagtaaatcttgttgtggagcggagccctcagctgagggagcgctctgaaataatacaccattgcagccggggaaagcagagcggcgcaaaagagctctcgccgggtccgcctgctccctctccgcttcgctcctcttctcttctttacccttctcctctctcctcctctgctgctctctcctctcctcccgctcttctctctcctcctctcctgctctctcctcttcccttagctcctcttcttttcttctcctcttcttccctctcctcgcctctcccctgctcctcttctctcgtctcccctcccctcccgcctctctctcccctctccctctcccactcgccccgctcgctcgctcgctgtcgcacagactcaccgtcccttgtccaattatcatattcatcacccgcaagatatcaccgtgtgtgcactcgcgtgttttcctctctctgccgggggaaaaaaaagagagagagagagatagagagagagagagagagagagagagagaggctcggtcccactgctccctgcaccgcggtcccgggattcttgagctgtgcccagctgacgagcttttgaagatggcacaataaccgtccagtgatgcctgaccatgacagcacagccctcttaagccggcaaaccaagaggagaagagttgacattggagtgaaaaggacggtagggacagcatctgcattttttgctaaggcaagagcaacgttttttagtgccatgaatccccaaggttctgagcaggatgttgagtattcagtggtgcagcatgcagatggggaaaagtcaaatgtactccgcaagctgctgaagagggcgaactcgtatgaagatgccatgatgccttttccaggagcaaccataatttcccagctgttgaaaaataacatgaacaaaaatggtggcacggagcccagtttccaagccagcggtctctctagtacaggctccgaagtacatcaggaggatatatgcagcaactcttcaagagacagccccccagagtgtctttccccttttggcaggcctactatgagccagtttgatatggatcgcttatgtgatgagcacctgagagcaaagcgcgcccgggttgagaatataattcggggtatgagccattcccccagtgtggcattaaggggcaatgaaaatgaaagagagatggccccgcagtctgtgagtccccgagaaagttacagagaaaacaaacgcaagcaaaagcttccccagcagcagcaacagagtttccagcagctggtttcagcccgaaaagaacagaagcgagaggagcgccgacagctgaaacagcagctggaggacatgcagaaacagctgcgccagctgcaggaaaagttctaccaaatctatgacagcactgattcggaaaatgatgaagatggtaacctgtctgaagacagcatgcgctcggagatcctggatgccagggcccaggactctgtcggaaggtcagataatgagatgtgcgagctagacccaggacagtttattgaccgagctcgagccctgatcagagagcaggaaatggctgaaaacaagccgaagcgagaaggcaacaacaaagaaagagaccatgggccaaactccttacaaccggaaggcaaacatttggctgagaccttgaaacaggaactgaacactgccatgtcgcaagttgtggacactgtggtcaaagtcttttcggccaagccctcccgccaggttcctcaggtcttcccacctctccagatcccccaggccagatttgcagtcaatggggaaaaccacaatttccacaccgccaaccagcgcctgcagtgctttggcgacgtcatcattccgaaccccctggacacctttggcaatgtgcagatggccagttccactgaccagacagaagcactgcccctggttgtccgcaaaaactcctctgaccagtctgcctccggccctgccgctggcggccaccaccagcccctgcaccagtcgcctctctctgccaccacgggcttcaccacgtccaccttccgccaccccttcccccttcccttgatggcctatccatttcagagcccattaggtgctccctccggctccttctctggaaaagacagagcctctcctgaatccttagacttaactagggataccacgagtctgaggaccaagatgtcatctcaccacctgagccaccacccttgttcaccagcacacccgcccagcaccgccgaagggctctccttgtcgctcataaagtccgagtgcggcgatcttcaagatatgtctgaaatatcaccttattcgggaagtgcaatgcaggaaggattgtcacccaatcacttgaaaaaagcaaagctcatgtttttttatacccgttatcccagctccaatatgctgaagacctacttctccgacgtaaagttcaacagatgcattacctctcagctcatcaagtggtttagcaatttccgtgagttttactacattcagatggagaagtacgcacgtcaagccatcaacgatggggtcaccagtactgaagagctgtctataaccagagactgtgagctgtacagggctctgaacatgcactacaataaagcaaatgactttgaggttccagagagattcctggaagttgctcagatcacattacgggagtttttcaatgccattatcgcaggcaaagatgttgatccttcctggaagaaggccatatacaaggtcatctgcaagctggatagtgaagtccctgagattttcaaatccccgaactgcctacaagagctgcttcatgagtagaaatttcaacaactctttttgaatgtatgaagagtagcagtcccctttggatgtccaagttatatgtgtctagattttgatttcatatatatgtgtatgggaggcatggatatgttatgaaatcagctggtaattcctcctcatcacgtttctctcattttcttttgttttccattgcaaggggatggttgttttctttctgcctttagtttgcttttgcccaaggcccttaacatttggacacttaaaatagggttaattttcagggaaaaagaatgttggcgtgtgtaaagtctctattagcaatgaagggaatttgttaacgatgcatccacttgattgatgacttattgcaaatggcggttggctgaggaaaacccatgacacagcacaactctacagacagtgatgtgtctcttgtttctactgctaagaaggtctgaaaatttaatgaaaccacttcatacatttaagtattttgtttggtttgaactcaatcagtagcttttccttacatgtttaaaaataattccaatgacagatgagcagctcacttttccaaagtaccccaaaaggccaaattaaaaaagaaaaataatcactctcaagccttgtctaagaaaagaggcaaactctgaaagtcgtaccagtttcttctggaggcaaagcaattttgcacaaaaccagctctctcaagatgagactagaaattcatacctggtcttgtagccacctctctaaacttgaaaataggttcttcttcataagtgagcttacatcattcttcataaagaaaaatcctataacttgttatcatttttgcttcagatactaaaaggcactaagtttccaatttacgctgctcaactttgtttatatgcttaaaaggattctgtttacttaacaattttttcccctaaaatactattttctgaatacttccttccagtaaggaataaaggaaagcccaacttggccataaaattcttgcctacactagaagtttgttgacagccattagctgacttgatcgtcatctcctaagaggaacacatatattttcacaagcaattccacactatcctgatgggtatgcaaagtggtgacagtctaactcagtgtttcttcattttaggtataacattttaaagcaattgataatgcctcttccaattcagaagctagtattgaccaaaatgtgagaagagtgtatagcataggaaaatttggggttaacccaaaagacacaattccagcacacataagaaagctagctgctattttatgctttcttccatggttctcctcttttttcccttttatttttccctgtttttcaatgatgtacagtgttccctacttgcattgaaaaaactcgtatggcattcacactttttttcttaggtgggtttttgtgtccagatgcagtaagaattcattgttcatcctaaaactgttttccagacccttccttccccttaggtaatttgatatacacctcctaaaatgacacagtaacaaatctggtatttagaacatatagaacataaatgccattttttaattcaactttaataagaattacatttgactttggagaatacaggtcttgacccatgtgactgactagctgacccgatcgctgtaatttaacgtcatttataaattctgctgatggacaggaatgtatgaactcaattattgtcagcacaaagccttaaaacctgctgactttaaattaaatggtgcagtcctatgatgccctgcaccatccaggggactaacagggcctcgcagtgtagacagagggtgcagccacacgggcgggggcaccagccacctcactctgcacccgcggcctcacacatctcccagctcacactctactaatgcacagagtcattagatccaatttgttatttttctcacttgctttaaaaaaaagcagtttggataatcatgacattggaataaagtgggaaggaaaaattccatcagcacaaaatagggaagtaatcccaacttgtagtcacagttttctgactggctttgttttaaaagaggatggcagtccttgttcgtgtcagtgtgccactgggtttttgctgttccgtgtaattcatatcaactttgtgttgccatttgcaaggtaaaaggcaaagctgtagtgtattcacctatgtagacagattgctagatatctttttgatctggggcgagttcaatattgattccagacttatttggatttttttagtattattttcccctccctttctaatttaaatagacaaattaagcaaaagtgtgtgttcacaaccaaatgttgatgcccttatctactgataatatcctctcaatgttcactgaggcatagaaattatttcagagtagaaattgcagcatgaggataaactcacctctttgttctgaaaatagaactttatcactatgctttccggtggttttcccttttacaatcgaaatcttgtgcctcccaagtgcattggaaaatgacaaaagcctgtctctccaaattcctatttaacagtttgattttttttttttaatcaccatctttcaaatcttagctcaactctcaccaagtgaaaattggctacttgggagaaagttaactttctatggtgggatggtgaaggatgagggacagtttacataggaaaagaaaaaaaaaagtctaaagtccatgttgaaaaaccacactaccacttattttctgctaaccctaaattatttttgcgtatacgcttgaggttatagtctgtgcctagacctaaaatgcaccagcgggggggattttaaaaaatccttcaaaataccagttttttcccaacaagtacaattgttcttgtgccttctgtggctttcgatttcatctttttgactttatttccaattactacagctgcaataaacactagattttttttctggctgtttgacataacgttgatagctatgcatattttgtgtctttttaaaacaaagcgggagaatacgtttttgaagaagagaatttttagaacagtttgataccgcaaattattttttcctcaattgtttgagcagcattcgagttttgaaaattcttgtagaagccaattttttgtaactgtggtgcaaatcttgtgttttcttagcctaatgaaaagtagtatagaagcaatatttcataccatgtgctatatatgtgtgcgcagatgtgtgaacataaaatcacatacacacatatacacacatgtaaaaatatacatatatatatatgcgtgtgaagtggaaagcttaccttttcctatctagatttaagaacctattttagacatttgttatgttttgtgaaaagaatgttctatttgcaacaaaacatttaattcttactgtatctctggctgtttaatgaggacgtttcacattaaatggtaaaacacatggaagatgttagaatgtagtaattatttaagtaaacgttcacccacatattcctgaagtttgctttgtgcctccgagtattatttaattaaagaagtgttttatgtttgcagaatctttgtcactgtactagggatgtgggtgaatatcatttaaaaaaatttaaaacaacaaaaaaaaagcaaaacagaaacactaaagcaagaggggaacttttataaagcaatgtaaatatttaacctcatggctgtcattatgtaagacatgagattttaataaataactacattctcacgacatctgttgaatttactaggaacactacagtgactgtatagacagttgaaagcattcttgaaaatcctgctctctccttttaaaagttaacaatctcttttatcagatgtcaagggcaagggtaatgcagtttctgtaaatttatgaaatttctttttctatgtacatgaagacatttagtaagtaacacccccccttcccatgcgcacatgtgcgcatacacacacacacacacacacacacacacacaaacacacacactgtcataaagctaatgatttggggactttaaaaaataggatgtcctccaggaacaatcataaatttatgaaagaaagagtagtttacagactcccctgaaagaagcagtgtatatgtgaagacagtgcaaaaatctctttgccatgtatattatagcgtattcattggtgtgaatagtacaaatgtttccttctggtacaaactctgtgtttgcaaatttacaagaagcattgttttcaaaaagctccccttaaaaaatgtaactggtttatatgagtaagcagttaccgtattgcacttaaatgttatgttgaaggaaatgcagttttgttttctgtagatctgttggttgtaaaccatctataaaactaaagctaaaatgctcatattcagagctgggatcaaaactggtatttaacctttgcatcttcttataattatccttctaagaatataacagaatgtggaagtgtctggactttgagtcttttcaactgagccttctctcaaatctgacaccccctcagaatgcacaaacataagcagaaaaggcaaacaagcttaccttcttttgtgaaaacgtattcattctgtatttttttaaatattcaattcccctaaaaatggggagaaaatattttaaaattgtatattacgacttcaaatttagaactaagaaaaaaatgtatttgggattggtctcagcgctacctagaagaatcaaaggtcatggcttccctcaatattgtcccagccatttctcatatgtatatagtataaaccgtgacaaaacactgcctttatattatttagcaatatgttgtaaatagcattattaagctcttttttgtaataaagaccctttgatttgaatatagtacaataactgaactgataaagtcaatttttgatttttgtttgttttttttagctagaggcaatttcaattgtgaatttttgttgttgtctattgttctgaagactttgcataatttattggtttaatttatcctaatttatttgatgaaggtgtacaattttgtattaccaaggatgtactgtaatattaattgatatgataaacacaatgagactccctgtccatattaaaaagaaaataaaaaggtgcagtagacaattgattttaaaggaaaagttaaaaaaattagtttggcagctactaaattttaaaacaggaaaaaaaaaagttgttgtggggagggtgggaaaggggttttactttgtgtgttttaagcttttgtatactctccaaacttttaccttttgctttgtaccacttaaaggatacagtagtccaattgccttgtgtgccttccatctcctcttaaactgaatgtatgtgcagtatatatgcaagcttgtgcaaaataaaatatacattacaagctcagtgccgtttgattttcttaaagaaagagtgacttttaatttttggacctgtatccaattgtaggacagtaggctagttgtgccagtaatgtcaagtatggagattttctttcactacaattcttcattctgttagcctaacgtgcagctcctagaaacaacctcttttactttagatgcttggaataattgcttggatttctctctctgaaacatctttcaggcttaactttatttagccctgaaacttaaaaaaaa

SEQ ID NO: 23937 - DNA, 3069 bp, Homo sapiens
  source 1..3069: mol_type = unassigned DNA
ccccttttccagaatcacttgcactgtcttgttcttgaatgagaaaggaagaaaagagcctcccattactcagacccgtgtaaacattattccccccaggagaaaatggtgttattcaaatgaatcataataaaatagcctctaaacagtttctaagcgggagcctccgtggaactcagcgctccgctcctcccagttcctaagaggtcccgggattcttgagctgtgcccagctgacgagcttttgaagatggcacaataaccgtccagtgatgcctgaccatgacagcacagccctcttaagccggcaaaccaagaggagaagagttgacattggagtgaaaaggacggtagggacagcatctgcattttttgctaaggcaagagcaacgttttttagtgccatgaatccccaaggttctgagcaggatgttgagtattcagtggtgcagcatgcagatggggaaaagtcaaatgtactccgcaagctgctgaagagggcgaactcgtatgaagatgccatgatgccttttccaggagcaaccataatttcccagctgttgaaaaataacatgaacaaaaatggtggcacggagcccagtttccaagccagcggtctctctagtacaggctccgaagtacatcaggaggatatatgcagcaactcttcaagagacagccccccagagtgtctttccccttttggcaggcctactatgagccagtttgatatggatcgcttatgtgatgagcacctgagagcaaagcgcgcccgggttgagaatataattcggggtatgagccattcccccagtgtggcattaaggggcaatgaaaatgaaagagagatggccccgcagtctgtgagtccccgagaaagttacagagaaaacaaacgcaagcaaaagcttccccagcagcagcaacagagtttccagcagctggtttcagcccgaaaagaacagaagcgagaggagcgccgacagctgaaacagcagctggaggacatgcagaaacagctgcgccagctgcaggaaaagttctaccaaatctatgacagcactgattcggaaaatgatgaagatggtaacctgtctgaagacagcatgcgctcggagatcctggatgccagggcccaggactctgtcggaaggtcagataatgagatgtgcgagctagacccaggacagtttattgaccgagctcgagccctgatcagagagcaggaaatggctgaaaacaagccgaagcgagaaggcaacaacaaagaaagagaccatgggccaaactccttacaaccggaaggcaaacatttggctgagaccttgaaacaggaactgaacactgccatgtcgcaagttgtggacactgtggtcaaagtcttttcggccaagccctcccgccaggttcctcaggtcttcccacctctccagatcccccaggccagatttgcagtcaatggggaaaaccacaatttccacaccgccaaccagcgcctgcagtgctttggcgacgtcatcattccgaaccccctggacacctttggcaatgtgcagatggccagttccactgaccagacagaagcactgcccctggttgtccgcaaaaactcctctgaccagtctgcctccggccctgccgctggcggccaccaccagcccctgcaccagtcgcctctctctgccaccacgggcttcaccacgtccaccttccgccaccccttcccccttcccttgatggcctatccatttcagagcccattaggtgctccctccggctccttctctggaaaagacagagcctctcctgaatccttagacttaactagggataccacgagtctgaggaccaagatgtcatctcaccacctgagccaccacccttgttcaccagcacacccgcccagcaccgccgaagggctctccttgtcgctcataaagtccgagtgcggcgatcttcaagatatgtctgaaatatcaccttattcgggaagtgcaatgcaggaaggattgtcacccaatcacttgaaaaaagcaaagctcatgtttttttatacccgttatcccagctccaatatgctgaagacctacttctccgacgtaaagttcaacagatgcattacctctcagctcatcaagtggtttagcaatttccgtgagttttactacattcagatggagaagtacgcacgtcaagccatcaacgatggggtcaccagtactgaagagctgtctataaccagagactgtgagctgtacagggctctgaacatgcactacaataaagcaaatgactttgaggttccagagagattcctggaagttgctcagatcacattacgggagtttttcaatgccattatcgcaggcaaagatgttgatccttcctggaagaaggccatatacaaggtcatctgcaagctggatagtgaagtccctgagattttcaaatccccgaactgcctacaagagctgcttcatgagtagaaatttcaacaactctttttgaatgtatgaagagtagcagtcccctttggatgtccaagttatatgtgtctagattttgatttcatatatatgtgtatgggaggcatggatatgttatgaaatcagctggtaattcctcctcatcacgtttctctcattttcttttgttttccattgcaaggggatggttgttttctttctgcctttagtttgcttttgcccaaggcccttaacatttggacacttaaaatagggttaattttcagggaaaaagaatgttggcgtgtgtaaagtctctattagcaatgaagggaatttgttaacgatgcatccacttgattgatgacttattgcaaatggcggttggctgaggaaaacccatgacacagcacaactctacagacagtgatgtgtctcttgtttctactgctaagaaggtctgaaaatttaatgaaaccacttcatacatttaagtattttgtttggtttgaactcaatcagtagcttttccttacatgtttaaaaataattccaatgacagatgagcagctcacttttccaaagtaccccaaaaggccaaatt

SEQ ID NO: 23938 - DNA, 900 bp, Homo sapiens
  source 1..900: mol_type = unassigned DNA
ctggagaggagattcccagccttcctgcccaacccgaaacttttccaacacacgcaggcgtattcctcgcaggattcggcggtcccgagtcgcagtcagggaggaggctcgggaagcacacgtgccctggcacactggaggagggtcccgggattcttgagctgtgcccagctgacgagcttttgaagatggcacaataaccgtccagtgatgcctgaccatgacagcacagccctcttaagccggcaaaccaagaggagaagagttgacattggagtgaaaaggacggtagggacagcatctgcattttttgctaaggcaagagcaacgttttttagtgccatgaatccccaaggttctgagcaggatgttgagtattcagtggtgcagcatgcagatggggaaaagtcaaatgtactccgcaagctgctgaagagggcgaactcgtatgaagatgccatgatgccttttccaggagcaaccataatttcccagctgttgaaaaataacatgaacaaaaatggtggcacggagcccagtttccaagccagcggtctctctagtacaggctccgaagtacatcaggaggatatatgcagcaactcttcaagagacagccccccagagtgtctttccccttttggcaggcctactatgagccagtttgatatggatcgcttatgtgatgagcacctgagagcaaagcgcgcccgggttgagaatataattcggggtatgagccattcccccagtgtggcattaaggggcaatgaaaatgaaagagagatggccccgcagtctgtgagtccccgagaaagttacagagaaaacaaacgcaagcaaaagcttccccagcagcagcaacagagtttccagcagctggtttcagcccgaaaagaa

SEQ ID NO: 23939 - DNA, 3670 bp, Homo sapiens
  source 1..3670: mol_type = unassigned DNA
agctgtgtcttaaagtaaatcttgttgtggagcggagccctcagctgagggagcgctctgaaataatacaccattgcagccggggaaagcagagcggcgcaaaagagctctcgccgggtccgcctgctccctctccgcttcgctcctcttctcttctttacccttctcctctctcctcctctgctgctctctcctctcctcccgctcttctctctcctcctctcctgctctctcctcttcccttagctcctcttcttttcttctcctcttcttccctctcctcgcctctcccctgctcctcttctctcgtctcccctcccctcccgcctctctctcccctctccctctcccactcgccccgctcgctcgctcgctgtcgcacagactcaccgtcccttgtccaattatcatattcatcacccgcaagatatcaccgtgtgtgcactcgcgtgttttcctctctctgccgggggaaaaaaaagagagagagagagatagagagagagagagagagagagagagagaggctcggtcccactgctccctgcaccgcgtaagtatcttcttcttcccctcgtgagtccctccccttttccagaatcacttgcactgtcttgttcttgaatgagaaaggaagaaaagagcctcccattactcagacccgtgtaaacattattccccccaggagaaaatggtgttattcaaatgaatcataataaaatagcctctaaacagtttctaagcgggagcctccgtggaactcagcgctccgctcctcccagttcctaagaggtcccgggattcttgagctgtgcccagctgacgagcttttgaagatggcacaataaccgtccagtgatgcctgaccatgacagcacagccctcttaagccggcaaaccaagaggagaagagttgacattggagtgaaaaggacggtagggacagcatctgcattttttgctaaggcaagagcaacgttttttagtgccatgaatccccaaggttctgagcaggatgttgagtattcagtggtgcagcatgcagatggggaaaagtcaaatgtactccgcaagctgctgaagagggcgaactcgtatgaagatgccatgatgccttttccaggagcaaccataatttcccagctgttgaaaaataacatgaacaaaaatggtggcacggagcccagtttccaagccagcggtctctctagtacaggctccgaagtacatcaggaggatatatgcagcaactcttcaagagacagccccccagagtgtctttccccttttggcaggcctactatgagccagtttgatatggatcgcttatgtgatgagcacctgagagcaaagcgcgcccgggttgagaatataattcggggtatgagccattcccccagtgtggcattaaggggcaatgaaaatgaaagagagatggccccgcagtctgtgagtccccgagaaagttacagagaaaacaaacgcaagcaaaagcttccccagcagcagcaacagagtttccagcagctggtttcagcccgaaaagaacagaagcgagaggagcgccgacagctgaaacagcagctggaggacatgcagaaacagctgcgccagctgcaggaaaagttctaccaaatctatgacagcactgattcggaaaatgatgaagatggtaacctgtctgaagacagcatgcgctcggagatcctggatgccagggcccaggactctgtcggaaggtcagataatgagatgtgcgagctagacccaggacagtttattgaccgagctcgagccctgatcagagagcaggaaatggctgaaaacaagccgaagcgagaaggcaacaacaaagaaagagaccatgggccaaactccttacaaccggaaggcaaacatttggctgagaccttgaaacaggaactgaacactgccatgtcgcaagttgtggacactgtggtcaaagtcttttcggccaagccctcccgccaggttcctcaggtcttcccacctctccagatcccccaggccagatttgcagtcaatggggaaaaccacaatttccacaccgccaaccagcgcctgcagtgctttggcgacgtcatcattccgaaccccctggacacctttggcaatgtgcagatggccagttccactgaccagacagaagcactgcccctggttgtccgcaaaaactcctctgaccagtctgcctccggccctgccgctggcggccaccaccagcccctgcaccagtcgcctctctctgccaccacgggcttcaccacgtccaccttccgccaccccttcccccttcccttgatggcctatccatttcagagcccattaggtgctccctccggctccttctctggaaaagacagagcctctcctgaatccttagacttaactagggataccacgagtctgaggaccaagatgtcatctcaccacctgagccaccacccttgttcaccagcacacccgcccagcaccgccgaagggctctccttgtcgctcataaagtccgagtgcggcgatcttcaagatatgtctgaaatatcaccttattcgggaagtgcaatgcaggaaggattgtcacccaatcacttgaaaaaagcaaagctcatgtttttttatacccgttatcccagctccaatatgctgaagacctacttctccgacgtaaagttcaacagatgcattacctctcagctcatcaagtggtttagcaatttccgtgagttttactacattcagatggagaagtacgcacgtcaagccatcaacgatggggtcaccagtactgaagagctgtctataaccagagactgtgagctgtacagggctctgaacatgcactacaataaagcaaatgactttgaggttccagagagattcctggaagttgctcagatcacattacgggagtttttcaatgccattatcgcaggcaaagatgttgatccttcctggaagaaggccatatacaaggtcatctgcaagctggatagtgaagtccctgagattttcaaatccccgaactgcctacaagagctgcttcatgagtagaaatttcaacaactctttttgaatgtatgaagagtagcagtcccctttggatgtccaagttatatgtgtctagattttgatttcatatatatgtgtatgggaggcatggatatgttatgaaatcagctggtaattcctcctcatcacgtttctctcattttcttttgttttccattgcaaggggatggttgttttctttctgcctttagtttgcttttgcccaaggcccttaacatttggacacttaaaatagggttaattttcagggaaaaagaatgttggcgtgtgtaaagtctctattagcaatgaagggaatttgttaacgatgcatccacttgattgatgacttattgcaaatggcggttggctgaggaaaacccatgacacagcacaactctacagacagtgatgtgtctcttgtttctactgctaagaaggtctgaaaatttaatgaaaccacttcatacatttaagtattttgtttggtttgaactcaatcagtagcttttccttacatgtttaaaaataattccaatgacagatgagcagctcacttttccaaagtaccccaaaaggccaaattaaaaaagaaaaataa

SEQ ID NO: 23940 - DNA, 1640 bp, Homo sapiens
  source 1..1640: mol_type = unassigned DNA
gtcttaaagtaaatcttgttgtggagcggagccctcagctgagggagcgctctgaaataatacaccattgcagtgctttggcgacgtcatcattccgaaccccctggacacctttggcaatgtgcagatggccagttccactgaccagacagaagcactgcccctggttgtccgcaaaaactcctctgaccagtctgcctccggccctgccgctggcggccaccaccagcccctgcaccagtcgcctctctctgccaccacgggcttcaccacgtccaccttccgccaccccttcccccttcccttgatggcctatccatttcagagcccattaggtgctccctccggctccttctctggaaaagacagagcctctcctgaatccttagacttaactagggataccacgagtctgaggaccaagatgtcatctcaccacctgagccaccacccttgttcaccagcacacccgcccagcaccgccgaagggctctccttgtcgctcataaagtccgagtgcggcgatcttcaagatatgtctgaaatatcaccttattcgggaagtgcaatgcaggaaggattgtcacccaatcacttgaaaaaagcaaagctcatgtttttttatacccgttatcccagctccaatatgctgaagacctacttctccgacgtaaagttcaacagatgcattacctctcagctcatcaagtggtttagcaatttccgtgagttttactacattcagatggagaagtacgcacgtcaagccatcaacgatggggtcaccagtactgaagagctgtctataaccagagactgtgagctgtacagggctctgaacatgcactacaataaagcaaatgactttgaggttccagagagattcctggaagttgctcagatcacattacgggagtttttcaatgccattatcgcaggcaaagatgttgatccttcctggaagaaggccatatacaaggtcatctgcaagctggatagtgaagtccctgagattttcaaatccccgaactgcctacaagagctgcttcatgagtagaaatttcaacaactctttttgaatgtatgaagagtagcagtcccctttggatgtccaagttatatgtgtctagattttgatttcatatatatgtgtatgggaggcatggatatgttatgaaatcagctggtaattcctcctcatcacgtttctctcattttcttttgttttccattgcaaggggatggttgttttctttctgcctttagtttgcttttgcccaaggcccttaacatttggacacttaaaatagggttaattttcagggaaaaagaatgttggcgtgtgtaaagtctctattagcaatgaagggaatttgttaacgatgcatccacttgattgatgacttattgcaaatggcggttggctgaggaaaacccatgacacagcacaactctacagacagtgatgtgtctcttgtttctactgctaagaaggtctgaaaatttaatgaaaccacttcatacatttaagtattttgtttggtttgaactcaatcagtagcttttccttacatgtttaaaaataattccaatgacagatgagcagctcacttttccaaagtaccccaaaaggccaaatt

SEQ ID NO: 23941 - DNA, 2942 bp, Homo sapiens
  source 1..2942: mol_type = unassigned DNA
cgcccgagccgcgcgcggagctgccgggggctccttagcacccgggcgccggggccctcgcccttccgcagccttcactccagccctctgctcccgcacgccatgaagtcgccgttctaccgctgccagaacaccacctctgtggaaaaaggcaactcggcggtgatgggcggggtgctcttcagcaccggcctcctgggcaacctgctggccctggggctgctggcgcgctcggggctggggtggtgctcgcggcgtccactgcgcccgctgccctcggtcttctacatgctggtgtgtggcctgacggtcaccgacttgctgggcaagtgcctcctaagcccggtggtgctggctgcctacgctcagaaccggagtctgcgggtgcttgcgcccgcattggacaactcgttgtgccaagccttcgccttcttcatgtccttctttgggctctcctcgacactgcaactcctggccatggcactggagtgctggctctccctagggcaccctttcttctaccgacggcacatcaccctgcgcctgggcgcactggtggccccggtggtgagcgccttctccctggctttctgcgcgctacctttcatgggcttcgggaagttcgtgcagtactgccccggcacctggtgctttatccagatggtccacgaggagggctcgctgtcggtgctggggtactctgtgctctactccagcctcatggcgctgctggtcctcgccaccgtgctgtgcaacctcggcgccatgcgcaacctctatgcgatgcaccggcggctgcagcggcacccgcgctcctgcaccagggactgtgccgagccgcgcgcggacgggagggaagcgtcccctcagcccctggaggagctggatcacctcctgctgctggcgctgatgaccgtgctcttcactatgtgttctctgcccgtaatttatcgcgcttactatggagcatttaaggatgtcaaggagaaaaacaggacctctgaagaagcagaagacctccgagccttgcgatttctatctgtgatttcaattgtggacccttggatttttatcattttcagatctccagtatttcggatattttttcacaagattttcattagacctcttaggtacaggagccggtgcagcaattccactaacatggaatccagtctgtgacagtgtttttcactctgtggtaagctgaggaatatgtcacattttcagtcaaagaaccatgattaaaaaaaaaaagacaacttacaatttaaatccttaaaagttacctcccataacaaaagcatgtatatgtattttcaaaagtatttgatatcttaacaatgtgttaccattctatagtcatgaaccccttcagtgcattttcatttttttattaacagcaactaaaattttatatattgtaaccagtgttaaaagtcttaaaaaacaatggtattaattgtccctacatttgtgcttggtggccctattttttttttttagagaggccttgagacatacaggtcttttaaaatacagtagaaacaccactgtttacgattatacgatggacattcataaaaagcataatttcttaccctattcattttttggtgaaacctgattcattgattttatatcattgccgatgtttagttcatttctttgccaattgatctaagcatagcctgaattatgatgttcctcagagaagtgaggtgggaaatatgaccaggtcaggcagttggaggggcttccccagccaccatcggggagtacttgctgcctcaggtggagacctgaagctgtaactagatgcagagcaagatatgactatagcccacaacccaaagaagcaaaaattcgtttttatcttttgaaatccagtttcttttgtattgagtcaagggtgtcagtaggaatcaaaagttgggggtgggttgcaaaatgttctttcagtttttagaacctccattttataaaagaattatcctatcaatggattctttagtggaaggatttatgcttctttgaaaaccagtgtgtgactcactgtagagccatgtttactgtttgactgtgtggcacaggggggcatttggcacagcaaaaagcccacccaggacttagcctcagttgacgatagtaacaatggccttaacatctaccttaacagctacctattacagccgtattctgctgtccgtggagacggtaagatcttaggttccaagattttacttcaaattacaccttcaaaactggagcagcatatagccgaaaaggagcacaactgagcactttaatagtaatttaaaagttttcaagggtcagcaatatgatgactgaaagggaaaagtggaggaaacgcagctgcaactgaagcggagactctaaacccagcttgcaggtaagagctttcacctttggtaaaagaacagctggggaggttcaaggggtttcagcatctctggagttcctttgtatctgacaatctcaggactccaaggtgcaaagcctgctgcatttgcgtgatctcaagacctccagccagaagtcccttccaaatataagagtactcatgtttatttatttccaactgagcagcaacctcctttgtttcacttatgttttttccagtatctgagataatataaagctgggtaattttttatgtaattttttggtatagcaaaactgtgaaaaagccaaattaggcatacaaggagtatgatttaacagtatgacatgatgaaaaaaatacagttgtttttgaaatttaacttttgtttgtaccttcaatgtgtaagtacatgcatgttttattgtcagaggaagaacatgttttttgtattctttttttggagaggtgtgttaggataattgtccagttaatttgaaaaggccccagatgaatcaataaatataattttatagta

SEQ ID NO: 23942 - DNA, 913 bp, Homo sapiens
  source 1..913: mol_type = unassigned DNA
gctcctcctgcacacctccctcgctctcccacaccactggcaccaggccccggacacccgctctgctgcaggagaatggctactcatcacacactgtggatgggactggccctgctgggggtgctgggcgacctgcaggcagcaccggaggcccaggtctccgtgcagcccaacttccagcaggacaagttcctggggcgctggttcagcgcgggcctcgcctccaactcgagctggctccgggagaagaaggcggcgttgtccatgtgcaagtctgtggtggcccctgccacggatggtggcctcaacctgacctccaccttcctcaggaaaaaccagtgtgagacccgaaccatgctgctgcagcccgcggggtccctcggctcctacagctaccggagtccccgtgagtggggcctccaccggccccctgggcccagcctgggggcgacacttgccgggacgactctgggccagccccctgccgcggagatccatggggtgggagactggggcagcacctactccgtgtcagtggtggagaccgactacgaccagtacgcgctgctgtacagccagggcagcaagggccctggcgaggacttccgcatggccaccctctacagccgaacccagacccccagggctgagttaaaggagaaattcaccgccttctgcaaggcccagggcttcacagaggataccattgtcttcctgccccaaaccgataagtgcatgacggaacaataggactccccagggctgaagctgggatcccggccagccaggtgacccccacgctctggatgtctctgctctgttccttccccgagcccctgccccggctccccgccaaagcaaccctgcccactcaggcttcatcctgcacaataaactccggaagcaagtcagt

SEQ ID NO: 23943 - DNA, 921 bp, Homo sapiens
  source 1..921: mol_type = unassigned DNA
cacctccctcgctctcccacaccactggcaccaggccccggacacccgctctgctgcaggagaatggctactcatcacacactgtggatgggactggccctgctgggggtgctgggcgacctgcaggcagcaccggaggcccaggtctccgtgcagcccaacttccagcaggacaagttcctggggcgctggttcagcgcgggcctcgcctccaactcgagctggctccgggagaagaaggcggcgttgtccatgtgcaagtctgtggtggcccctgccacggatggtggcctcaacctgacctccaccttcctcaggaaaaaccagtgtgagacccgaaccatgctgctgcagcccgcggggtccctcggctcctacagctaccggagtccccgtgagtggggcctccaccggccccctgggcccagcctgggggcgacacttgccgggacgactctgggccagccccctgccgcggagatccatggggtgggaggtgatggctgccccaccagcgtcagaggcaaaggccaggcctgggcgtgactacccatgcacaagtgttagggacagagagacccttcctccagggggttggatcctctctggagcccaccattgtcttgtcaggccccttccctgccctctggagttttccccacataagcagccccccaaggcccctccatatgcctcctcccaattctcctccccaggacccaggggtttcctcactcccacctggggaatggctcccacggggaaacctcttcacttccggttctggcagcgacttctgcggctgcaccaggaatcctggttttctgagcctggctcccccagattctggtttggggacagggttcacaggctgtgcaggcgagagcagggcactggctggagagcagccgggtgggggag

SEQ ID NO: 23944 - DNA, 807 bp, Homo sapiens
  source 1..807: mol_type = unassigned DNA
ctcctcctgcacacctccctcgctctcccacaccactggcaccaggccccggacacccgctctgctgcaggagaatggctactcatcacacactgtggatgggactggccctgctgggggtgctgggcgacctgcaggcagcaccggaggcccaggtctccgtgcagcccaacttccagcaggacaagttcctggggcgctggttcagcgcgggcctcgcctccaactcgagctggctccgggagaagaaggcggcgttgtccatgtgcaagtctgtggtggcccctgccacggatggtggcctcaacctgacctccaccttcctcaggaaaaaccagtgtgagacccgaaccatgctgctgcagcccgcggggtccctcggctcctacagctaccggagtccccactggggcagcacctactccgtgtcagtggtggagaccgactacgaccagtacgcgctgctgtacagccagggcagcaagggccctggcgaggacttccgcatggccaccctctacagccgaacccagacccccagggctgagttaaaggagaaattcaccgccttctgcaaggcccagggcttcacagaggataccattgtcttcctgccccaaaccgataagtgcatgacggaacaataggactccccagggctgaagctgggatcccggccagccaggtgacccccacgctctggatgtctctgctctgttccttccccgagcccctgccccggctccccgccaaagcaaccctgcccactcaggcttcatcctgcacaataaactccggaagcaagtc

SEQ ID NO: 23945 - DNA, 369 bp, Homo sapiens
  source 1..369: mol_type = unassigned DNA
aggataccattgtcttcctgccccaaaccgtgcccagggagaggtgggaggtgatgggggatctgtgcagtttgggggctcagtcaagacgagctctgcgttacgggaggaacaggaagcccagtgggaaaattggcctaagtctggggttctgacgacagcccctggcttctttcttggcagataagtgcatgacggaacaataggactccccagggctgaagctgggatcccggccagccaggtgacccccacgctctggatgtctctgctctgttccttccccgagcccctgccccggctccccgccaaagcaaccctgcccactcaggcttcatcctgcacaataaactccggaagcaagtcagt

SEQ ID NO: 23946 - DNA, 754 bp, Homo sapiens
  source 1..754: mol_type = unassigned DNA
attgaggggcgggggtcagttcctggggcggggcgtgaggggcgtggctgctcgggggattgggcgtgggggcggggccgggttggagaccggaggagtagacggcagaggcgcccccgcaggtaggcgcaggtgggtccggagggtcctggccgacgcgggtgggggtcgctcgccgcagttcctggggcgctggttcagcgcgggcctcgcctccaactcgagctggctccgggagaagaaggcggcgttgtccatgtgcaagtctgtggtggcccctgccacggatggtggcctcaacctgacctccaccttcctcaggaaaaaccagtgtgagacccgaaccatgctgctgcagcccgcggggtccctcggctcctacagctaccggagtccccactggggcagcacctactccgtgtcagtggtggagaccgactacgaccagtacgcgctgctgtacagccagggcagcaagggccctggcgaggacttccgcatggccaccctctacagccgaacccagacccccagggctgagttaaaggagaaattcaccgccttctgcaaggcccagggcttcacagaggataccattgtcttcctgccccaaaccgataagtgcatgacggaacaataggactccccagggctgaagctgggatcccggccagccaggtgacccccacgctctggatgtctctgctctgttccttccccgagcccctgccccggctccccgccaaagcaaccc

SEQ ID NO: 23947 - DNA, 661 bp, Homo sapiens
  source 1..661: mol_type = unassigned DNA
ctcctcctgcacacctccctcgctctcccacaccactggcaccaggccccggacacccgctctgctgcaggagaatggctactcatcacacactgtggatgggactggccctgctgggggtgctgggcgacctgcaggcagcaccggaggcccaggtctccgtgcagcccaacttccagcaggacaagttcctggggcgctggttcagcgcgggcctcgcctccaactcgagctggctccgggagaagaaggcggcgttgtccatgtgcaagtctgtggtggcccctgccacggatggtggcctcaacctgacctccaccttcctcaggaaaaaccagtgtgagacccgaaccatgctgctgcagcccgcggggtccctcggctcctacagctaccggagtccccgtgagtggggcctccaccggccccctgggcccagcctgggggcgacacttgccgggacgactctgggccagccccctgccgcggagatccatggggtgggagactggggcagcacctactccgtgtcagtggtggagaccgactacgaccagtacgcgctgctgtacagccagggcagcaagggccctggcgaggacttccgcatggccaccctctacagccgaacccagacccccagggctgagttaaaggagaa

SEQ ID NO: 23948 - DNA, 989 bp, Homo sapiens
  source 1..989: mol_type = unassigned DNA
cctccctcgctctcccacaccactggcaccaggccccggacacccgctctgctgcaggagaatggctactcatcacacactgtggatgggactggccctgctgggggtgctgggcgacctgcaggcagcaccggaggcccaggtctccgtgcagcccaacttccagcaggacaagttcctggggcgctggttcagcgcgggcctcgcctccaactcgagctggctccgggagaagaaggcggcgttgtccatgtgcaagtctgtggtggcccctgccacggatggtggcctcaacctgacctccaccttcctcaggaaaaaccagtgtgagacccgaaccatgctgctgcagcccgcggggtccctcggctcctacagctaccggagtccccactggggcagcacctactccgtgtcagtggtggagaccgactacgaccagtacgcgctgctgtacagccagggcagcaagggccctggcgaggacttccgcatggccaccctctacagccgaacccagacccccagggctgagttaaaggagaaattcaccgccttctgcaaggcccagggcttcacagaggataccattgtcttcctgccccaaaccgataagtgcatgacggaacaatagttccagggcacctggtacatggtcggggtggtgtcagatgaccaggacttcctggactccaaggacaccatgaagatggctgtggtcttagtgacccccttggggaatggtgacctggccctcaagtttggataccccacgccccatggcgggtgccagaaaatggacacgaccttcaccgagggtgctgtaccggggcagttcagcaacccagctcgagcgcccgagctgtttcccgaaggcgcccagaagatgcagctactggcgccccaagtgggcctgagccccagccagggcgtcctgctgccgaagtcggaccagtgtgcgggcgcgctctcccgggtgagtagaccat

SEQ ID NO: 23949 - DNA, 1421 bp, Homo sapiens
  source 1..1421: mol_type = unassigned DNA
ggaagagggagggaggaagcggcttgccggagagccagggcgcagtgggcggcagggctgagcggccggtgatggggaccccacatcccaggcagtgccggcacccctggcgcctgacatgagcccttgcgggcccctcaacctgagcctggcgggcgaggcgaccacatgcgcggcgccctgggtccccaacacgtcggccgtgccgccgtcgggcgcttcgcccgcgctgcccatcttctccatgacgctgggcgccgtgtccaacctgctggcgctggcgctgctggcgcaggccgcgggccgcctgcgacgccgccgctcggccgccaccttcctgctgttcgtggccagcctgctggccaccgacctggcgggccacgtgatcccgggcgcgctggtgctgcgtctgtacactgcggggcgcgctccggccggcggggcctgccacttcctgggcggctgcatggtcttcttcggcctgtgcccgctgctgctgggctgtggcatggccgtggagcgctgcgtgggcgtcacgcggccgctgctccacgccgcgcgggtctcggtcgcccgcgcgcgcctggcgctggccgcggtggccgcggtggccttggccgtggcgctgctgccgctggcgcgcgtgggccgctatgagctgcagtacccgggcacgtggtgcttcatcggcctgggtcccccgggcggctggcgccaggcactgcttgctggcctcttcgccagcctcggcctggtcgcgctcctcgccgcgctggtgtgcaacacgctcagcggcctggccctgctacgcgcccgctggcgacgccgctcccgacggcctcccccggcctcaggccccgacagccggcgtcgctggggggcgcacggaccccgctcggcctccgcctcgtccgcctcgtccatcgcttcggcctccaccttctttggcggctctcggagcagcggctcggcacgcagagctcgcgcccacgacgtggagatggtgggccagcttgtcggtatcatggtggtgtcgtgcatctgctggagcccaatgctggtgttggtggcgctggccgtcggcggctggagctctacctccctgcagcggccactgttcctggccgtgcgccttgcctcctggaaccagatcctggacccttgggtgtacatcctactgcgccaggccgtgctgcgccaactgcttcgcctcttgcccccgagggccggagccaagggcggccccgcggggctgggcctaacaccgagcgcctgggaggccagctcgctgcgcagctcccggcacagcggcctcagccacttctaagcacaaccagaggcccaacgactaagccagcccaccctgggctgggcccaggtgcgcggcgcagagcctttgggaataaaaagccattctgcga

SEQ ID NO: 23950 - DNA, 2383 bp, Homo sapiens
  source 1..2383: mol_type = unassigned DNA
gccgccgtcggcgcgctgggtgcgggaagggggctctggatttcggtccctcccctttttcctctgagtctcggaacgctccggctctcagaccctcttcctcccaggtaaaggccgggagaggagggcgcatctcttttccaggcaccccaccatgggcaatgcctccaatgactcccagtctgaggactgcgagacgcgacagtggcttcccccaggcgaaagcccagccatcagctccgtcatgttctcggccggggtgctggggaacctcatagcactggcgctgctggcgcgccgctggcggggggacgtggggtgcagcgccggccgcaggagctccctctccttgttccacgtgctggtgaccgagctggtgttcaccgacctgctcgggacctgcctcatcagcccagtggtactggcttcgtacgcgcggaaccagaccctggtggcactggcgcccgagagccgcgcgtgcacctacttcgctttcgccatgaccttcttcagcctggccacgatgctcatgctcttcgccatggccctggagcgctacctctcgatcgggcacccctacttctaccagcgccgcgtctcgcgctccgggggcctggccgtgctgcctgtcatctatgcagtctccctgctcttctgctcgctgccgctgctggactatgggcagtacgtccagtactgccccgggacctggtgcttcatccggcacgggcggaccgcttacctgcagctgtacgccaccctgctgctgcttctcattgtctcggtgctcgcctgcaacttcagtgtcattctcaacctcatccgcatgcaccgccgaagccggagaagccgctgcggaccttccctgggcagtggccggggcggccccggggcccgcaggagaggggaaagggtgtccatggcggaggagacggaccacctcattctcctggctatcatgaccatcaccttcgccgtctgctccttgcctttcacgatttttgcatatatgaatgaaacctcttcccgaaaggaaaaatgggacctccaagctcttaggtttttatcaattaattcaataattgacccttgggtctttgccatccttaggcctcctgttctgagactaatgcgttcagtcctctgttgtcggatttcattaagaacacaagatgcaacacaaacttcctgttctacacagtcagatgccagtaaacaggctgacctttgaggtcagtagtttaaaagttcttagttatatagcatctggaagatcattttgaaattgttccttggagaaatgaaaacagtgtgtaaacaaaatgaagctgccctaataaaaaggagtatacaaacatttaagctgtggtcaaggctacagatgtgctgacaaggcacttcatgtaaagtgtcagaaggagctacaaaacctaccctcagtgagcatggtacttggcctttggaggaacaatcggctgcattgaagatccagctgcctattgatttaagctttcctgttgaatgacaaagtatgtggttttgtaatttgtttgaaaccccaaacagtgactgtactttctattttaatcttgctactaccgttatacacatatagtgtacagccagaccagattaaacttcatatgtaatctctaggaagtcaatatgtggaagcaaccaagcctgctgtcttgtgatcacttagcgaaccctttatttgaacaatgaagttgaaaatcataggcaccttttactgtgatgtttgtgtatgtgggagtactctcatcactacagtattactcttacaagagtggactcagtgggttaacatcagttttgtttactcatcctccaggaactgcaggtcaagttgtcaggttatttattttataatgtccatatgctaatagtgatcaagaagactttaggaatggttctctcaacaagaaataatagaaatgtctcaaggcagttaattctcattaatactctttatttatcctatttctgggggaggatgtacgtggccatgtatgaagccaaatattaggcttaaaaactgaaaaatctggttcattcttcagatatactggaacccttttaaagttgatattggggccatgagtaaaatagattttataagatgactgtgttgtaccaaaattcatctgtctatattttatttagggaacatggtttgactcatcttatatgggaaaccatgtagcagtgagtcatatcttaatatatttctaaatgtttggcatgtaaatgtaaactcagcatcaaaatatttcagtgaatttgcactgtttaatcatagttactgtgtaaactcatctgaaatgttacaaaaataaactataaaacaaaaatttgaaaa

SEQ ID NO: 23951 - DNA, 2333 bp, Homo sapiens
  source 1..2333: mol_type = unassigned DNA
gaaggcgtggctccctcccgggccagtgagccctggcgccgccgcggccgcggtcccagcagcggagtagggcggcggctgcgccccgcaccatggggggcagcccagccccagccgcggtaaacgccgacctccgccgccgcccgcgccgcgtctgccccctcccgctgcggctctctggacgccatcccctcctcacctcgaagccaacatgaaggagacccggggctacggaggggatgcccccttctgcacccgcctcaaccactcctacacaggcatgtgggcgcccgagcgttccgccgaggcgcggggcaacctcacgcgccctccagggtctggcgaggattgcggatcggtgtccgtggccttcccgatcaccatgctgctcactggtttcgtgggcaacgcactggccatgctgctcgtgtcgcgcagctaccggcgccgggagagcaagcgcaagaagtccttcctgctgtgcatcggctggctggcgctcaccgacctggtcgggcagcttctcaccaccccggtcgtcatcgtcgtgtacctgtccaagcagcgttgggagcacatcgacccgtcggggcggctctgcacctttttcgggctgaccatgactgttttcgggctctcctcgttgttcatcgccagcgccatggccgtcgagcgggcgctggccatcagggcgccgcactggtatgcgagccacatgaagacgcgtgccacccgcgctgtgctgctcggcgtgtggctggccgtgctcgccttcgccctgctgccggtgctgggcgtgggccagtacaccgtccagtggcccgggacgtggtgcttcatcagcaccgggcgagggggcaacgggactagctcttcgcataactggggcaaccttttcttcgcctctgcctttgccttcctggggctcttggcgctgacagtcaccttttcctgcaacctggccaccattaaggccctggtgtcccgctgccgggccaaggccacggcatctcagtccagtgcccagtggggccgcatcacgaccgagacggccattcagcttatggggatcatgtgcgtgctgtcggtctgctggtctccgctcctgataatgatgttgaaaatgatcttcaatcagacatcagttgagcactgcaagacacacacggagaagcagaaagaatgcaacttcttcttaatagctgttcgcctggcttcactgaaccagatcttggatccttgggtttacctgctgttaagaaagatccttcttcgaaagttttgccagatcaggtaccacacaaacaactatgcatccagctccacctccttaccctgccagtgttcctcaaccttgatgtggagcgaccatttggaaagataatgaaagaacggagttggacattttattgcaattcctgcttccctgaatttgcatatttcttcccacctgagaaggataattatatattttaatttggattatttcttcatttttatctttttattttaatgattgttttgtcagtaatacccatggagatcaactttattattataatccatgcctctgaatattagattggtttcttggatgggattttgaatatgcatttaagaagttgggaagaatttcacagatgatgattggaggaaaagtgatgaaaagaaagacctgtgttccaggagttttctccaacttcaaacctttacgtgaatcttaaccaaagtggacatctttacatttcatgatagcttgcttttgcaatatgagtttgaaaaatcagtataagcttatgatggtgaaaagtcaacatattgagagtgataattcaattaataggatatgaacttaacgacatataaaagcaaatgagggcaggagggaatcgtgacaaaaaatatttgtgcccaattatgattaatgttttagagatgttgtgtccctgtgggcttagcatggaactaaaagttcctaagtctcaattctagttatgtgtcatttagtaactcaggaatctgcttaattgttatttctaagcttttgatgacaaaggagtgatgcagctaagggcatccttggagtgtcataaaaaacaaatttgaggttgaatgattagctgcgcagttagagtgataaaaaaatccaggtaggccttctgattcaccatgaccaagtcaggatttcttaatatttcttttctggcagcatatacaaaggcaaaattaataaataacagttgttgaataacaaactttattacgtttttataaaataaaagaatctattttgtctgtattaaaataaaaaactttgtggacttctaaaagat

SEQ ID NO: 23952 - DNA, 2021 bp, Homo sapiens
  source 1..2021: mol_type = unassigned DNA
accagaggtttcccagagaggaaggcgtggctccctcccgggccagtgagccctggcgccgccgcggccgcggtcccagcagcggagtagggcggcggctgcgccccgcaccatggggggcagcccagccccagccgcggtaaacgccgacctccgccgccgcccgcgccgcgtctgccccctcccgctgcggctctctggacgccatcccctcctcacctcgaagccaacatgaaggagacccggggctacggaggggatgcccccttctgcacccgcctcaaccactcctacacaggcatgtgggcgcccgagcgttccgccgaggcgcggggcaacctcacgcgccctccagggtctggcgaggattgcggatcggtgtccgtggccttcccgatcaccatgctgctcactggtttcgtgggcaacgcactggccatgctgctcgtgtcgcgcagctaccggcgccgggagagcaagcgcaagaagtccttcctgctgtgcatcggctggctggcgctcaccgacctggtcgggcagcttctcaccaccccggtcgtcatcgtcgtgtacctgtccaagcagcgttgggagcacatcgacccgtcggggcggctctgcacctttttcgggctgaccatgactgttttcgggctctcctcgttgttcatcgccagcgccatggccgtcgagcgggcgctggccatcagggcgccgcactggtatgcgagccacatgaagacgcgtgccacccgcgctgtgctgctcggcgtgtggctggccgtgctcgccttcgccctgctgccggtgctgggcgtgggccagtacaccgtccagtggcccgggacgtggtgcttcatcagcaccgggcgagggggcaacgggactagctcttcgcataactggggcaaccttttcttcgcctctgcctttgccttcctggggctcttggcgctgacagtcaccttttcctgcaacctggccaccattaaggccctggtgtcccgctgccgggccaaggccacggcatctcagtccagtgcccagtggggccgcatcacgaccgagacggccattcagcttatggggatcatgtgcgtgctgtcggtctgctggtctccgctcctgataatgatgttgaaaatgatcttcaatcagacatcagttgagcactgcaagacacacacggagaagcagaaagaatgcaacttcttcttaatagctgttcgcctggcttcactgaaccagatcttggatccttgggtttacctgctgttaagaaagatccttcttcgaaagttttgccaggtagcaaatgctgtctccagctgctctaatgatggacagaaagggcagcctatctcattatctaatgaaataatacagacagaagcaatcaggtaccacacaaacaactatgcatccagctccacctccttaccctgccagtgttcctcaaccttgatgtggagcgaccatttggaaagatgagaaaaagaagactcagagagcaagaggaattttggggaaattaaaacctgcctttctgccaggatcacatcactggaagctccatgactctctttttgtaaaagaaaaaaaaatcacagaaacacccacctcccaaactattctcttttacttcttcccccaagcccacccccaaatataactgttatccagaagctgttatgtcctgtttccatacatgtttttgtacttttactatatctacatacatcaattaaacttatgtcctattgttttgtgaatttatatttgcgtatacattatcatatgtaaaatttgcatttttttattgaaaattatgtttcttgagatttatccacattgaaacatggagctctaaatcgttaattttaaccgctatagagtattccataatttgaataaagcataatttgtttgtacaatctcccgccaagggaaaattatttccacactcatcatgacaaggagcactgcaaaaataaaaataaaaattacattcatacatgttt

SEQ ID NO: 23953 - DNA, 1504 bp, Homo sapiens
  source 1..1504: mol_type = unassigned DNA
cctcctcacctcgaagccaacatgaaggagacccggggctacggaggggatgcccccttctgcacccgcctcaaccactcctacacaggcatgtgggcgcccgagcgttccgccgaggcgcggggcaacctcacgcgccctccagggtctggcgaggattgcggatcggtgtccgtggccttcccgatcaccatgctgctcactggtttcgtgggcaacgcactggccatgctgctcgtgtcgcgcagctaccggcgccgggagagcaagcgcaagaagtccttcctgctgtgcatcggctggctggcgctcaccgacctggtcgggcagcttctcaccaccccggtcgtcatcgtcgtgtacctgtccaagcagcgttgggagcacatcgacccgtcggggcggctctgcacctttttcgggctgaccatgactgttttcgggctctcctcgttgttcatcgccagcgccatggccgtcgagcgggcgctggccatcagggcgccgcactggtatgcgagccacatgaagacgcgtgccacccgcgctgtgctgctcggcgtgtggctggccgtgctcgccttcgccctgctgccggtgctgggcgtgggccagtacaccgtccagtggcccgggacgtggtgcttcatcagcaccgggcgagggggcaacgggactagctcttcgcataactggggcaaccttttcttcgcctctgcctttgccttcctggggctcttggcgctgacagtcaccttttcctgcaacctggccaccattaaggccctggtgtcccgctgccgggccaaggccacggcatctcagtccagtgcccagtggggccgcatcacgaccgagacggccattcagcttatggggatcatgtgcgtgctgtcggtctgctggtctccgctcctgataatgatgttgaaaatgatcttcaatcagacatcagttgagcactgcaagacacacacggagaagcagaaagaatgcaacttcttcttaatagctgttcgcctggcttcactgaaccagatcttggatccttgggtttacctgctgttaagaaagatccttcttcgaaagttttgccagatgagaaaaagaagactcagagagcaattctggaggccggcaagttcaggatcagggtgccagcagattcggtgtctgatggagtcttgctctctcacccagactggagtgcagtggagtgatttccgctcactgcaaccttcacctcctccactcactgcaatcttcgcctcctgggttcaagtgattctcctgcctcagcctcccaagtagctggaattgcaggcatgcgccacaagcctggctaatttttgcatttttagtagagatgaggtttcaccatgtttgccaggctggtcttgaacacctgacctcaagtaacccacccaccttggcctcccaaagagctgggattacaggcatgagccaacgtgcctggccatgttctgatcgtttaatgatagca

SEQ ID NO: 23954 - DNA, 1943 bp, Homo sapiens
  source 1..1943: mol_type = unassigned DNA
gaaggcgtggctccctcccgggccagtgagccctggcgccgccgcggccgcggtcccagcagcggagtagggcggcggctgcgccccgcaccatggggggcagcccagccccagccgcggtaaacgccgacctccgccgccgcccgcgccgcgtctgccccctcccgctgcggctctctggacgccatcccctcctcacctcgaagccaacatgaaggagacccggggctacggaggggatgcccccttctgcacccgcctcaaccactcctacacaggcatgtgggcgcccgagcgttccgccgaggcgcggggcaacctcacgcgccctccagggtctggcgaggattgcggatcggtgtccgtggccttcccgatcaccatgctgctcactggtttcgtgggcaacgcactggccatgctgctcgtgtcgcgcagctaccggcgccgggagagcaagcgcaagaagtccttcctgctgtgcatcggctggctggcgctcaccgacctggtcgggcagcttctcaccaccccggtcgtcatcgtcgtgtacctgtccaagcagcgttgggagcacatcgacccgtcggggcggctctgcacctttttcgggctgaccatgactgttttcgggctctcctcgttgttcatcgccagcgccatggccgtcgagcgggcgctggccatcagggcgccgcactggtatgcgagccacatgaagacgcgtgccacccgcgctgtgctgctcggcgtgtggctggccgtgctcgccttcgccctgctgccggtgctgggcgtgggccagtacaccgtccagtggcccgggacgtggtgcttcatcagcaccgggcgagggggcaacgggactagctcttcgcataactggggcaaccttttcttcgcctctgcctttgccttcctggggctcttggcgctgacagtcaccttttcctgcaacctggccaccattaaggccctggtgtcccgctgccgggccaaggccacggcatctcagtccagtgcccagtggggccgcatcacgaccgagacggccattcagcttatggggatcatgtgcgtgctgtcggtctgctggtctccgctcctgataatgatgttgaaaatgatcttcaatcagacatcagttgagcactgcaagacacacacggagaagcagaaagaatgcaacttcttcttaatagctgttcgcctggcttcactgaaccagatcttggatccttgggtttacctgctgttaagaaagatccttcttcgaaagttttgccagatgagaaaaagaagactcagagagcaattaatctgcagtttgcagaactctcagatacagagggcaactgcacattgtgggcaagtacaaacctatcgtgtgctgaacagagaagaaatggaggtactcgtgagcagcattaatgtgtacaccagaatctcaacagtaaagacagaataacatgaagaaaataactacaggagtgctgtgttttaaaaaagcaagctcctccagctgagtttgtgactctaatccctgcttattttgagcactttccatgtgttgattgactcggaaaggtgggagattaccagcaagccaggtcatttgggcaaacatgggcatatttttagcaaagctgaacaaactggttggtcactcgaactacccaatttagacttatagtaagaatagcacatggttcagaattgccaagactgctgctttagtcaacagaaattttttcatatgcatgctggtaatgcagtgcatctctggaagaaatgcaagagtattttaacatttggtccagaagaaatatgtaaagggtgtttgtagaatttgatgccctcttcagtgacataaggttatgggtttgtgaatggaaaatctgttatttgttcaggttattaaaacacattctaattcaacatca

SEQ ID NO: 23955 - DNA, 1922 bp, Homo sapiens
  source 1..1922: mol_type = unassigned DNA
accagaggtttcccagagaggaaggcgtggctccctcccgggccagtgagccctggcgccgccgcggccgcggtcccagcagcggagtagggcggcggctgcgccccgcaccatggggggcagcccagccccagccgcggtaaacgccgacctccgccgccgcccgcgccgcgtctgccccctcccgctgcggctctctggacgccatcccctcctcacctcgaagccaacatgaaggagacccggggctacggaggggatgcccccttctgcacccgcctcaaccactcctacacaggcatgtgggcgcccgagcgttccgccgaggcgcggggcaacctcacgcgccctccagggtctggcgaggattgcggatcggtgtccgtggccttcccgatcaccatgctgctcactggtttcgtgggcaacgcactggccatgctgctcgtgtcgcgcagctaccggcgccgggagagcaagcgcaagaagtccttcctgctgtgcatcggctggctggcgctcaccgacctggtcgggcagcttctcaccaccccggtcgtcatcgtcgtgtacctgtccaagcagcgttgggagcacatcgacccgtcggggcggctctgcacctttttcgggctgaccatgactgttttcgggctctcctcgttgttcatcgccagcgccatggccgtcgagcgggcgctggccatcagggcgccgcactggtatgcgagccacatgaagacgcgtgccacccgcgctgtgctgctcggcgtgtggctggccgtgctcgccttcgccctgctgccggtgctgggcgtgggccagtacaccgtccagtggcccgggacgtggtgcttcatcagcaccgggcgagggggcaacgggactagctcttcgcataactggggcaaccttttcttcgcctctgcctttgccttcctggggctcttggcgctgacagtcaccttttcctgcaacctggccaccattaaggccctggtgtcccgctgccgggccaaggccacggcatctcagtccagtgcccagtggggccgcatcacgaccgagacggccattcagcttatggggatcatgtgcgtgctgtcggtctgctggtctccgctcctgataatgatgttgaaaatgatcttcaatcagacatcagttgagcactgcaagacacacacggagaagcagaaagaatgcaacttcttcttaatagctgttcgcctggcttcactgaaccagatcttggatccttgggtttacctgctgttaagaaagatccttcttcgaaagttttgccagatgagaaaaagaagactcagagagcaagagatggggcctgatggaaggtgtttttgtcatgcatggaggcaggtccccaggacttggtgcagttctcatgatagagaaccctgcagtgtccagctaagctgatgacttgaagataaatctgcctaaccctgggatgaagtatctgtgaactattttgacagcagatgaggaattttggggaaattaaaacctgcctttctgccaggatcacatcactggaagctccatgactctctttttgtaaaagaaaaaaaaatcacagaaacacccacctcccaaactattctcttttacttcttcccccaagcccacccccaaatataactgttatccagaagctgttatgtcctgtttccatacatgtttttgtacttttactatatctacatacatcaattaaacttatgtcctattgttttgtgaatttatatttgcgtatacattatcatatgtaaaatttgcatttttttattgaaaattatgtttcttgagatttatccacattgaaacatggagctctaaatcgttaattttaaccgctatagagtattccataatttgaataaagcataatttgtttgtac

SEQ ID NO: 23956 - DNA, 6754 bp, Homo sapiens
  source 1..6754: mol_type = unassigned DNA
accagaggtttcccagagaggaaggcgtggctccctcccgggccagtgagccctggcgccgccgcggccgcggtcccagcagcggagtagggcggcggctgcgccccgcaccatggggggcagcccagccccagccgcggtaaacgccgacctccgccgccgcccgcgccgcgtctgccccctcccgctgcggctctctggacgccatcccctcctcacctcgaagccaacatgaaggagacccggggctacggaggggatgcccccttctgcacccgcctcaaccactcctacacaggcatgtgggcgcccgagcgttccgccgaggcgcggggcaacctcacgcgccctccagggtctggcgaggattgcggatcggtgtccgtggccttcccgatcaccatgctgctcactggtttcgtgggcaacgcactggccatgctgctcgtgtcgcgcagctaccggcgccgggagagcaagcgcaagaagtccttcctgctgtgcatcggctggctggcgctcaccgacctggtcgggcagcttctcaccaccccggtcgtcatcgtcgtgtacctgtccaagcagcgttgggagcacatcgacccgtcggggcggctctgcacctttttcgggctgaccatgactgttttcgggctctcctcgttgttcatcgccagcgccatggccgtcgagcgggcgctggccatcagggcgccgcactggtatgcgagccacatgaagacgcgtgccacccgcgctgtgctgctcggcgtgtggctggccgtgctcgccttcgccctgctgccggtgctgggcgtgggccagtacaccgtccagtggcccgggacgtggtgcttcatcagcaccgggcgagggggcaacgggactagctcttcgcataactggggcaaccttttcttcgcctctgcctttgccttcctggggctcttggcgctgacagtcaccttttcctgcaacctggccaccattaaggccctggtgtcccgctgccgggccaaggccacggcatctcagtccagtgcccagtggggccgcatcacgaccgagacggccattcagcttatggggatcatgtgcgtgctgtcggtctgctggtctccgctcctgataatgatgttgaaaatgatcttcaatcagacatcagttgagcactgcaagacacacacggagaagcagaaagaatgcaacttcttcttaatagctgttcgcctggcttcactgaaccagatcttggatccttgggtttacctgctgttaagaaagatccttcttcgaaagttttgccaggtagcaaatgctgtctccagctgctctaatgatggacagaaagggcagcctatctcattatctaatgaaataatacagacagaagcatgaaagaaaacacttaacttgcatgtgcacagcttttggtaacaaatatcgctaaaccttactgtgaatttaggcatctctggcatgccactgtttatgcattgaagtggaatttttggtataaagctaaatggtcttagaagcatagaaaatccctatgtgccaaaagtagtgaaacacaaacaaaggaaaatatattaataacagtctagtgtttttgttgagtctgccattcgtagctgaatatgtgattaattatgtgatgaaaacattttttataaatgatcttggtctattggggagcggggatagttaatattccagtacactgaatacatgaggaatttaaccacatacatcattgaagacaagggatagcagtttgtttttattcaaagacattgctgtgttctctttcattgcctctctcgctttctgtcacttttttcctccttacattaaagaaaagtttaattacagttaaaaatgtataatgtatttataatattcatcgataccattattcaaatattgctcaatacagcaaattagctcctaacctaacaaagtttaagtttacttggattgataattaggtttactctttatctgaataagaaccaattccatttgtttgaaatatggagtttgtgactacccaaattgctaattattctttcttttgaatatattttacatttctatgagcctaaggaagattcatgaaactgacctatgagagtcgtgaagtggtttttcagaatgctatgtaaggaccgatttgagcactaactataggtactctgaatatatatttcccttgattattcaccaaaagtgttccccagtctttgactctttaaattccaatactgattccaaaacaaataaatattttgaagactcaatgaatactttccatattttggcctatttatataagaaagttaataacattgacccttcacagctcttctgcctgctcctcaaagtggctctatctaaatatttattactaaaatgtttttcctacagtctacatgaatacaaacctcaatagctaagcttgacgtatttgtgcacaagtagatcactacattaagttttgggaattgcacttcttaaaaatgtctccccaccaaacatagtaatcctgtagttatgcctacacaaagcttgccatattctttggtgcattcattttgtaaacccattaactttttattgtgaagattttcatttgcagtttcttgcactgcttttctagttttttaaaagcttgagatttatttatacttcttgtagtaactgcatatttctgtgtgtgtttagtggtaaagaattaattttgataggtacaatatgtctatcagattgatatatacaccagcctatgtcaattggggctaattattttaaatgaccatgtcaaattgaatttggagacaaaatctgttgagagtgcttatgtaattaatgatggttctactaatctaaattttggaaaaggtgataaatagactatactaaaatctctctatgccatagaattggattatcctgtaggtcatctcattgggtataagacaaaactacctactttttttcaaaagtgcactgaaatcacataataaagaggctttacctcttggttggtcctgtgaccctaagttctagtcagatagacacagaggcaatgtgaatttgagtggcatgagcatgattaggttattccttccagcatctagtatagcacctggaatatagaaactgtctaatacatatttattcagtgaatcaatgagcagaagtttgccaggacagtacacattggcaaggcacataccatatgattgaagtgcttcatgccattacagtccatcaggctgataaagtgaattatttctgattatttaattacagaaatatgaatttatcttcaagggtgtagtgtcatactgctgtacaacacagtgctttatttatactaataatttaggagactgatacttccaaatgatagtggacattactatcacaagaatatcacttttcatcaaactgcaaaaatacagaaaggcaaaaaacctgacacttattcttaactgcaaattaaattcctgcccaggggatatattttaggaggggatgaatggcagcttttgtgttttttttaacaagcttgaaagggaggtggaaaacaaagaaattatgtaaatggcatatgagttttattatctaggcattcgttagtatggggaaacctgataagaaatgaaaatcccaaatgatttcagccttttcatgatggttgaggttagatttcagagatgtacagagactagagcggtggttagaaagaggatatatgtagtcacagcagaaagacgtgtctaagtttaattttattggctttcaagttcactcatgtatacttagtttgtccatacatatgtctaatcaggaaaaatgcatgtatagattatgacaattcctgaattttgaagtattggttaaaagacaattaaaggccaagaaaaccatggtggaagaagtaagcgaatgaaatgtagaaatatatgtaaaattagcaagtgtcaattttaccaagtagtgttgattttccaaacaatgaatttatatactatgctgagtcacagagaagaatgatcacatgttacttaatgagagcagtttacttttcaaataaaataggtatgatgaatgtcttaaaaatatcttgaagttgaagaaacaaaaatgagttatctcaatatttaccaagttaacctagtgctgtatatatcccaagatattttaggtaaatgtaagtgtttaatcatgccagatttaaactagtctgaaatatagggtatacatatatttctacttacatttctttattttatgaaatatccgaccatgttgcagaaaataatgcaaaacctcatgtaagttaactatgaaagatcctgtgagcacattggcattgagtgacagacaaactaaaaactggcaaacagtattttaataagggggtcactctgtggcagtattctaatattggattttcaagtagattaggctttttatttattcaacgctttttataattttgttctttttgactccaaattattggtcagctttcaaccttctccacatcagcaatcactaatagttcttttggttgagatcaactcagaaaaagaaaatagaaaacttttgttctttgaaattttagacatgcataatatctatttattttcataatttaaccccaaaagcttctcctgcaatacacaggattctaggagctgaatgacacagggagactacagagtatttattattacaaacacataaaaagcctaacttgaagaattaaaatttctattttttatctgtataacaagtacaaaccatcaacaatgacaaattttcacagctgcttgtttattgcttgttttatatgtttacatatctcaaaatctgttaaaactgaggtctaaaaaatgtgcagaattgtgcaactgtggcctagtccataagacttttctgagttgcaacaaagtgctgacaaagtgacagatgtctgtgatgtttcatgacataggttatgatcgagccaatttacaaaatttaataaccaacctaaactcacatacatatttgttaagaagctgacatcagttcagtattgtaaggaaactaactaggtggtgatgatgataaaagaattagggaaaatattttatttgatatattcccttttataattcctaaaatgaagattctatttaagggttataatttatataagtttagtcatataccattacattatgataccataagcagagtgcattatgattctctagaaatataattcaatcagatatgtattatatttatttatgtcacacattttctttactgagaataaaaattatcttattttcagaagctttgtatcaatcagtttcatgtaataagcaacccagatatctactagattatgtatttcttcatttgaaactacactgttttctcctagtccccttgactctactgtgcttatccattctttcacagaaagaaagtaacagacataattcctgttgatgaggctgggattgtttttaagaggagagataataacttcatatttttaaagtgccagtagcctaatatgtgaaacagatcagaatctgttgtgtagtaagtctgctttgttgaagaatttattatgggagtaaagataagaaggaaagagatcaccatcagaaacaagtcagccttttcatgcttttttgagcatttttggagatgattccacttctcaagttattatcatttgtgcatctcttcaatgctattgttaaatgctttagaattagaatattttgatcctttaattaaagtaagccaaacgtctaggcaaaaacagccaatcattaaactttaatagtaattcaaatatagatttctcatacagttttccatgtctgtagaaatcaaagttgtaatgttaagcagagggaaatgcgtgtgatttactaatacacttcaacgttctacttttgaaaggatactcatgtgggtggggcagagaacatagaaaaagatatgatggaaaacctgtccattttctacctgttaaccttcatcattttgtgccaggccctggaagcaaagagaggaagggaccgactgcatttatctttgaacacttgagcatcagtagtactactgagtggccaggggtcttgtctgtcaaagcaaatgataagttcactcaggccattattgactgctgaactctcttccttcccaactcttccttgaaagagaaaaaaatactttgccttcttgctctccttatcaaatgtttttgtacaaatagtgtaagcctgtttaagcaaaccaattaaaataggcactgattattttgatctgtttgtaacaaatgaatgtaagtactatttacatggtgtgcctaggaggagctgaaatcattggcactttaatccatattgtaaagatcagtatcaaaagcatagtgttcttcacctctcctcctcagcatccatctctatatacttgattaaatggaaaagtctcttttatcacctctatgtaaagttttatgggtagttatcgtcagtgtatttaaatatatcttctagtatgttttaaaggctggtcttcaatactgtggagacaaaaaataaaagagcgtatgaaaagtacgttagacttttgctggcattcaagtcatggctagtctgtgtatttaataaatgtgtgttatttatgtcgtgtttgtcaatggaaaataaagttgaatattctgaaa

SEQ ID NO: 23957 - DNA, 1914 bp, Homo sapiens
  source 1..1914: mol_type = unassigned DNA
gaaggcgtggctccctcccgggccagtgagccctggcgccgccgcggccgcggtcccagcagcggagtagggcggcggctgcgccccgcaccatggggggcagcccagccccagccgcggtaaacgccgacctccgccgccgcccgcgccgcgtctgccccctcccgctgcggctctctggacgccatcccctcctcacctcgaagccaacatgaaggagacccggggctacggaggggatgcccccttctgcacccgcctcaaccactcctacacaggcatgtgggcgcccgagcgttccgccgaggcgcggggcaacctcacgcgccctccagggtctggcgaggattgcggatcggtgtccgtggccttcccgatcaccatgctgctcactggtttcgtgggcaacgcactggccatgctgctcgtgtcgcgcagctaccggcgccgggagagcaagcgcaagaagtccttcctgctgtgcatcggctggctggcgctcaccgacctggtcgggcagcttctcaccaccccggtcgtcatcgtcgtgtacctgtccaagcagcgttgggagcacatcgacccgtcggggcggctctgcacctttttcgggctgaccatgactgttttcgggctctcctcgttgttcatcgccagcgccatggccgtcgagcgggcgctggccatcagggcgccgcactggtatgcgagccacatgaagacgcgtgccacccgcgctgtgctgctcggcgtgtggctggccgtgctcgccttcgccctgctgccggtgctgggcgtgggccagtacaccgtccagtggcccgggacgtggtgcttcatcagcaccgggcgagggggcaacgggactagctcttcgcataactggggcaaccttttcttcgcctctgcctttgccttcctggggctcttggcgctgacagtcaccttttcctgcaacctggccaccattaaggccctggtgtcccgctgccgggccaaggccacggcatctcagtccagtgcccagtggggccgcatcacgaccgagacggccattcagcttatggggatcatgtgcgtgctgtcggtctgctggtctccgctcctgataatgatgttgaaaatgatcttcaatcagacatcagttgagcactgcaagacacacacggagaagcagaaagaatgcaacttcttcttaatagctgttcgcctggcttcactgaaccagatcttggatccttgggtttacctgctgttaagaaagatccttcttcgaaagttttgccagatcaggtaccacacaaacaactatgcatccagctccacctccttaccctgccagtgttcctcaaccttgatgtggagcgaccatttggaaagatgagaaaaagaagactcagagagcaagaggaattttggggaaattaaaacctgcctttctgccaggatcacatcactggaagctccatgactctctttttgtaaaagaaaaaaaaatcacagaaacacccacctcccaaactattctcttttacttcttcccccaagcccacccccaaatataactgttatccagaagctgttatgtcctgtttccatacatgtttttgtacttttactatatctacatacatcaattaaacttatgtcctattgttttgtgaatttatatttgcgtatacattatcatatgtaaaatttgcatttttttattgaaaattatgtttcttgagatttatccacattgaaacatggagctctaaatcgttaattttaaccgctatagagtattccataatttgaataaagcataatttgtttgtacaatctcccgccaagggaaaattatttccacactcatcatgacaaggagcactgcaaaaataaaaataaaaattacattcatacatgttt

SEQ ID NO: 23958 - DNA, 1815 bp, Homo sapiens
  source 1..1815: mol_type = unassigned DNA
accagaggtttcccagagaggaaggcgtggctccctcccgggccagtgagccctggcgccgccgcggccgcggtcccagcagcggagtagggcggcggctgcgccccgcaccatggggggcagcccagccccagccgcggtaaacgccgacctccgccgccgcccgcgccgcgtctgccccctcccgctgcggctctctggacgccatcccctcctcacctcgaagccaacatgaaggagacccggggctacggaggggatgcccccttctgcacccgcctcaaccactcctacacaggcatgtgggcgcccgagcgttccgccgaggcgcggggcaacctcacgcgccctccagggtctggcgaggattgcggatcggtgtccgtggccttcccgatcaccatgctgctcactggtttcgtgggcaacgcactggccatgctgctcgtgtcgcgcagctaccggcgccgggagagcaagcgcaagaagtccttcctgctgtgcatcggctggctggcgctcaccgacctggtcgggcagcttctcaccaccccggtcgtcatcgtcgtgtacctgtccaagcagcgttgggagcacatcgacccgtcggggcggctctgcacctttttcgggctgaccatgactgttttcgggctctcctcgttgttcatcgccagcgccatggccgtcgagcgggcgctggccatcagggcgccgcactggtatgcgagccacatgaagacgcgtgccacccgcgctgtgctgctcggcgtgtggctggccgtgctcgccttcgccctgctgccggtgctgggcgtgggccagtacaccgtccagtggcccgggacgtggtgcttcatcagcaccgggcgagggggcaacgggactagctcttcgcataactggggcaaccttttcttcgcctctgcctttgccttcctggggctcttggcgctgacagtcaccttttcctgcaacctggccaccattaaggccctggtgtcccgctgccgggccaaggccacggcatctcagtccagtgcccagtggggccgcatcacgaccgagacggccattcagcttatggggatcatgtgcgtgctgtcggtctgctggtctccgctcctgataatgatgttgaaaatgatcttcaatcagacatcagttgagcactgcaagacacacacggagaagcagaaagaatgcaacttcttcttaatagctgttcgcctggcttcactgaaccagatcttggatccttgggtttacctgctgttaagaaagatccttcttcgaaagttttgccaggaggaattttggggaaattaaaacctgcctttctgccaggatcacatcactggaagctccatgactctctttttgtaaaagaaaaaaaaatcacagaaacacccacctcccaaactattctcttttacttcttcccccaagcccacccccaaatataactgttatccagaagctgttatgtcctgtttccatacatgtttttgtacttttactatatctacatacatcaattaaacttatgtcctattgttttgtgaatttatatttgcgtatacattatcatatgtaaaatttgcatttttttattgaaaattatgtttcttgagatttatccacattgaaacatggagctctaaatcgttaattttaaccgctatagagtattccataatttgaataaagcataatttgtttgtacaatctcccgccaagggaaaattatttccacactcatcatgacaaggagcactgcaaaaataaaaataaaaattacattcatacatgttt

SEQ ID NO: 23959 - DNA, 1596 bp, Homo sapiens
  source 1..1596: mol_type = unassigned DNA
accagaggtttcccagagaggaaggcgtggctccctcccgggccagtgagccctggcgccgccgcggccgcggtcccagcagcggagtagggcggcggctgcgccccgcaccatggggggcagcccagccccagccgcggtaaacgccgacctccgccgccgcccgcgccgcgtctgccccctcccgctgcggctctctggacgccatcccctcctcacctcgaagccaacatgaaggagacccggggctacggaggggatgcccccttctgcacccgcctcaaccactcctacacaggcatgtgggcgcccgagcgttccgccgaggcgcggggcaacctcacgcgccctccagggtctggcgaggattgcggatcggtgtccgtggccttcccgatcaccatgctgctcactggtttcgtgggcaacgcactggccatgctgctcgtgtcgcgcagctaccggcgccgggagagcaagcgcaagaagtccttcctgctgtgcatcggctggctggcgctcaccgacctggtcgggcagcttctcaccaccccggtcgtcatcgtcgtgtacctgtccaagcagcgttgggagcacatcgacccgtcggggcggctctgcacctttttcgggctgaccatgactgttttcgggctctcctcgttgttcatcgccagcgccatggccgtcgagcgggcgctggccatcagggcgccgcactggtatgcgagccacatgaagacgcgtgccacccgcgctgtgctgctcggcgtgtggctggccgtgctcgccttcgccctgctgccggtgctgggcgtgggccagtacaccgtccagtggcccgggacgtggtgcttcatcagcaccgggcgagggggcaacgggactagctcttcgcataactggggcaaccttttcttcgcctctgcctttgccttcctggggctcttggcgctgacagtcaccttttcctgcaacctggccaccattaaggccctggtgtcccgctgccgggccaaggccacggcatctcagtccagtgcccagtggggccgcatcacgaccgagacggccattcagcttatggggatcatgtgcgtgctgtcggtctgctggtctccgctcctgataatgatgttgaaaatgatcttcaatcagacatcagttgagcactgcaagacacacacggagaagcagaaagaatgcaacttcttcttaatagctgttcgcctggcttcactgaaccagatcttggatccttgggtttacctgctgttaagaaagatccttcttcgaaagttttgccaggtagcaaatgctgtctccagctgctctaatgatggacagaaagggcagcctatctcattatctaatgaaataatacagacagaagcaatgagaaaaagaagactcagagagcaagctcctcttcttcccacctctactgtgattgatccttcaaggttctgtgctcagcccttccgttggttcttggatttgtcctttcccgccatgtcttcatcacatccacaacttccactaacacttgcgagcttcaaacttcttagagaaccctgcagtgtccagctaagctga

SEQ ID NO: 23960 - DNA, 2055 bp, Homo sapiens
  source 1..2055: mol_type = unassigned DNA
accagaggtttcccagagaggaaggcgtggctccctcccgggccagtgagccctggcgccgccgcggccgcggtcccagcagcggagtagggcggcggctgcgccccgcaccatggggggcagcccagccccagccgcggtaaacgccgacctccgccgccgcccgcgccgcgtctgccccctcccgctgcggctctctggacgccatcccctcctcacctcgaagccaacatgaaggagacccggggctacggaggggatgcccccttctgcacccgcctcaaccactcctacacaggcatgtgggcgcccgagcgttccgccgaggcgcggggcaacctcacgcgccctccagggtctggcgaggattgcggatcggtgtccgtggccttcccgatcaccatgctgctcactggtttcgtgggcaacgcactggccatgctgctcgtgtcgcgcagctaccggcgccgggagagcaagcgcaagaagtccttcctgctgtgcatcggctggctggcgctcaccgacctggtcgggcagcttctcaccaccccggtcgtcatcgtcgtgtacctgtccaagcagcgttgggagcacatcgacccgtcggggcggctctgcacctttttcgggctgaccatgactgttttcgggctctcctcgttgttcatcgccagcgccatggccgtcgagcgggcgctggccatcagggcgccgcactggtatgcgagccacatgaagacgcgtgccacccgcgctgtgctgctcggcgtgtggctggccgtgctcgccttcgccctgctgccggtgctgggcgtgggccagtacaccgtccagtggcccgggacgtggtgcttcatcagcaccgggcgagggggcaacgggactagctcttcgcataactggggcaaccttttcttcgcctctgcctttgccttcctggggctcttggcgctgacagtcaccttttcctgcaacctggccaccattaaggccctggtgtcccgctgccgggccaaggccacggcatctcagtccagtgcccagtggggccgcatcacgaccgagacggccattcagcttatggggatcatgtgcgtgctgtcggtctgctggtctccgctcctgataatgatgttgaaaatgatcttcaatcagacatcagttgagcactgcaagacacacacggagaagcagaaagaatgcaacttcttcttaatagctgttcgcctggcttcactgaaccagatcttggatccttgggtttacctgctgttaagaaagatccttcttcgaaagttttgccagatcaggtaccacacaaacaactatgcatccagctccacctccttaccctgccagtgttcctcaaccttgatgtggagcgaccatttggaaagatgagaaaaagaagactcagagagcaattaatctgcagtttgcagaactctcagatacagagggcaactgcacattgtgggcaagtacaaacctatcgtgtgctgaacagagaagaaatggaggtactcgtgagcagcattaatgtgtacaccagaatctcaacagtaaagacagaataacatgaagaaaataactacaggagtgctgtgttttaaaaaagcaagctcctccagctgagtttgtgactctaatccctgcttattttgagcactttccatgtgttgattgactcggaaaggtgggagattaccagcaagccaggtcatttgggcaaacatgggcatatttttagcaaagctgaacaaactggttggtcactcgaactacccaatttagacttatagtaagaatagcacatggttcagaattgccaagactgctgctttagtcaacagaaattttttcatatgcatgctggtaatgcagtgcatctctggaagaaatgcaagagtattttaacatttggtccagaagaaatatgtaaagggtgtttgtagaatttgatgccctcttcagtgacataaggttatgggtttgtgaatggaaaatctgttatttgttcaggttattaaaacacattctaattcaacatca

SEQ ID NO: 23961 - DNA, 1447 bp, Homo sapiens
  source 1..1447: mol_type = unassigned DNA
tgccccctcccgctgcggctctctggacgccatcccctcctcacctcgaagccaacatgaaggagacccggggctacggaggggatgcccccttctgcacccgcctcaaccactcctacacaggcatgtgggcgcccgagcgttccgccgaggcgcggggcaacctcacgcgccctccagggtctggcgaggattgcggatcggtgtccgtggccttcccgatcaccatgctgctcactggtttcgtgggcaacgcactggccatgctgctcgtgtcgcgcagctaccggcgccgggagagcaagcgcaagaagtccttcctgctgtgcatcggctggctggcgctcaccgacctggtcgggcagcttctcaccaccccggtcgtcatcgtcgtgtacctgtccaagcagcgttgggagcacatcgacccgtcggggcggctctgcacctttttcgggctgaccatgactgttttcgggctctcctcgttgttcatcgccagcgccatggccgtcgagcgggcgctggccatcagggcgccgcactggtatgcgagccacatgaagacgcgtgccacccgcgctgtgctgctcggcgtgtggctggccgtgctcgccttcgccctgctgccggtgctgggcgtgggccagtacaccgtccagtggcccgggacgtggtgcttcatcagcaccgggcgagggggcaacgggactagctcttcgcataactggggcaaccttttcttcgcctctgcctttgccttcctggggctcttggcgctgacagtcaccttttcctgcaacctggccaccattaaggccctggtgtcccgctgccgggccaaggccacggcatctcagtccagtgcccagtggggccgcatcacgaccgagacggccattcagcttatggggatcatgtgcgtgctgtcggtctgctggtctccgctcctgataatgatgttgaaaatgatcttcaatcagacatcagttgagcactgcaagacacacacggagaagcagaaagaatgcaacttcttcttaatagctgttcgcctggcttcactgaaccagatcttggatccttgggtttacctgctgttaagaaagatccttcttcgaaagttttgccagatgagaaaaagaagactcagagagcaagaggaattttggggaaattaaaacctgcctttctgccaggatcacatcactggaagctccatgactctctttttgtaaaagaaaaaaaaatcacagaaacacccacctcccaaactattctcttttacttcttcccccaagcccacccccaaatataactgttatccagaagctgttatgtcctgtttccatacatgtttttgtacttttactatatctacatacatcaattaaacttatgtcctattgttttgtgaatttatatttgcgtatacattatcatatgt

SEQ ID NO: 23962 - DNA, 3848 bp, Homo sapiens
  source 1..3848: mol_type = unassigned DNA
aaaacaactgccctctcttccacgatctagatgttgcggcccgcggacaggaggttcaagaaatagtacactccgagcggcaggcagcgaggcggaaacggtcgccggtttcagtggtggccccactggaagccgagttcaggagcggctaagcggtcgccggggaaagcaccggggcttcccagggtcccctccgagttcccactccgcacctccgagggcgtgaaaaccacgggagccgccccaccccgcgcgcccagccccgccccagcccagacaccgccccccgccagtcttccctgcggcgcccagggaggacgcgctccgcccccttccaatccggccaatgggcgcccgggcagcgcgcggtttgcctccgcctccgccagggaaacttggaggaggagaaaagtttgtacagagggtggaaaggcgagagcggagctccaagcccggcagcccgagaggaagatgaacagccccaggccagagcctctggcagagtggaccccgagccgcccccaggtagccaggagcggcctcagcggcagccgcaaactccagtagccgcccgtgctgcccgtggctggggcggagggcagccagagctggggaccaaggctccgcgccacctgcgcgcacagcctcacacctgaacgctgtcctcccgcagacgagaccggcgggcactgcaaagctgggactcgtctttgaaggaaaaaaaatagcgagtaagaaatccagcaccattcttcactgacccatcccgctgcacctcttgtttcccaagtttttgaaagctggcaactctgacctcggtgtccaaaaatcgacagccactgagaccggctttgagaagccgaagatttggcagtttccagactgagcaggacaaggtgaaagcaggttggaggcgggtccaggacatctgagggctgaccctgggggctcgtgaggctgccaccgctgctgccgctacagacccagccttgcactccaaggctgcgcaccgccagccactatcatgtccactcccggggtcaattcgtccgcctccttgagccccgaccggctgaacagcccagtgaccatcccggcggtgatgttcatcttcggggtggtgggcaacctggtggccatcgtggtgctgtgcaagtcgcgcaaggagcagaaggagacgaccttctacacgctggtatgtgggctggctgtcaccgacctgttgggcactttgttggtgagcccggtgaccatcgccacgtacatgaagggccaatggcccgggggccagccgctgtgcgagtacagcaccttcattctgctcttcttcagcctgtccggcctcagcatcatctgcgccatgagtgtcgagcgctacctggccatcaaccatgcctatttctacagccactacgtggacaagcgattggcgggcctcacgctctttgcagtctatgcgtccaacgtgctcttttgcgcgctgcccaacatgggtctcggtagctcgcggctgcagtacccagacacctggtgcttcatcgactggaccaccaacgtgacggcgcacgccgcctactcctacatgtacgcgggcttcagctccttcctcattctcgccaccgtcctctgcaacgtgcttgtgtgcggcgcgctgctccgcatgcaccgccagttcatgcgccgcacctcgctgggcaccgagcagcaccacgcggccgcggccgcctcggttgcctcccggggccaccccgctgcctccccagccttgccgcgcctcagcgactttcggcgccgccggagcttccgccgcatcgcgggcgccgagatccagatggtcatcttactcattgccacctccctggtggtgctcatctgctccatcccgctcgtggtgcgagtattcgtcaaccagttatatcagccaagtttggagcgagaagtcagtaaaaatccagatttgcaggccatccgaattgcttctgtgaaccccatcctagacccctggatatatatcctcctgagaaagacagtgctcagtaaagcaatagagaagatcaaatgcctcttctgccgcattggcgggtcccgcagggagcgctccggacagcactgctcagacagtcaaaggacatcttctgccatgtcaggccactctcgctccttcatctcccgggagctgaaggagatcagcagtacatctcagaccctcctgccagacctctcactgccagacctcagtgaaaatggccttggaggcaggaatttgcttccaggtgtgcctggcatgggcctggcccaggaagacaccacctcactgaggactttgcgaatatcagagacctcagactcttcacagggtcaggactcagagagtgtcttactggtggatgaggctggtgggagcggcagggctgggcctgcccctaaggggagctccctgcaagtcacatttcccagtgaaacactgaacttatcagaaaaatgtatataataggcaaggaaagaaatacagtactgtttctggacccttataaaatcctgtgcaatagacacatacatgtcacatttagctgtgctcagaagggctatcatcatcctacaactcacattagagaacatcctggcttttgagcacttttcaaacaatcaagttgactcacgtgggtcctgaggcctgcagcacgtcggatgctaccccactatgacagaggattgtggtcacaacttgatggctgcgaagacctaccctccgtttttctactagataggaggatggtagaagtttggctgctgtcataacatccagagctttgtcgtatttggcacacagcagaggcccagatattagaaaggctctattccaataaactatgaggactgccttatggatgatttaagtgtctcactaaagcatgaaatgtgaatttttattgttgtacatacgatttaaggtatttaaagtattttcttctctgtgagaaggtttattgttaatacaaggtataataaaattatcgcaacccctctccttccagtataaccagctgaagttgcagatgttagatatttttcataaacaagttcgagtcaaagttgaaaattcatagtaagattgatatctataaaatagatataaatttttaagagaaagaatttagtattatcaaagggataaagaaaaaaatactatttaagatgtgaaaattacagtccaaaatactgttctttccaggctatgtataaaatacatagtgaaaattgtttagtgatattacatttatttatccagaaaactgtgatttcaggagaacctaacatgctggtgaatattttcaactttttccctcactaattggtacttttaaaaacataacataaattttttgaagtctttaataaataacccataattgaagtgtataatataaaaaattttaaaaatctaagcagcttattgtttctctgaaagtgtgtgtagttttactttcctaaggaattaccaagaatatcctttaaaatttaaaaggatggcaagttgcatcagaaagctttattttgagatgtaaaaagattcccaaacgtggttacattagccattcatgtatgtcagaagtgcagaattggggcacttaatggtcaccttgtaacagttttgtgtaactcccagtgatgctgtacacatatttgaagggtctttctcaaagaaatattaagcatgttttgttgctcagtgtttttgtgaattgcttggttgtaattaaattctgagcctgatattgatatggttttaagaagcagttgtaccaagtgaaattattttggagattataataaatatatacattcaa

SEQ ID NO: 23963 - DNA, 1774 bp, Homo sapiens
  source 1..1774: mol_type = unassigned DNA
tgatcacacccacagttgagctgcgctggccagagatgcctgcccacagcctggtgatgagcagcccggccctcccggccttcctgctctgcagcacgctgctggtcatcaagatgtacgtggtggccatcatcacgggccaagtgaggctgcggaagaaggcctttgccaaccccgaggatgccctgagacacggaggcccccagtattgcaggagcgaccccgacgtggaacgctgcctcagggcccaccggaacgacatggagaccatctaccccttccttttcctgggcttcgtctactcctttctgggtcctaacccttttgtcgcctggatgcacttcctggtcttcctcgtgggccgtgtggcacacaccgtggcctacctggggaagctgcgggcacccatccgctccgtgacctacaccctggcccagctcccctgcgcctccatggctctgcagatcctctgggaagcggcccgccacctgtgaccagcagctgatgcctccttggccaccagaccatgggccaagagccgccgtggctatacctggggacttgatgttccttccagattgtggtgggccctgagtcctggtttcctggcagcctgctgcgcgtgtgggtctctgggcacagtgggcctgtgtgtgtgcccgtgtgtgtgtatgtgtgtgtgtatgtttcttagccccttggattcctgcacgaagtggctgatgggaaccatttcaagacagattgtgaagattgatagaaaatccttcagctaaagtaacagagcatcaaaaacatcactccctctccctccctaacagtgaaaagagagaagggagactctatttaagattcccaaacctaatgatcatctgaatcccgggctaagaatgcagacttttcagactgaccccagaaattctggcccagccaatctagaggcaagcctggccatctgtatttttttttttccaagacagagtcttgctctgttgcccaagctggagtgaagtggtacaatctggctcactgcagcctccgcctcccgggttcaagcgattctcccgcctcagcctcctgagtagctgggattacaggcgcgtatcaccatacccagctaatttttgtatttttagtagagacgggttcaccatgttgcccaggagggtctcgaactcctggcctcaagtgatccaccggcctcggcctcccaaagtgctgggatgacaggcatgaatcactgtgctcagccaccatctggagttttaaaaggctcccatgtgagtccctgtgatggccaggccaggggacccctgccagttctctgtggaagcaaggctggggtcttgggttcctgtatggtggaagctgggtgagccaaggacagggctggctcctctgcccccgctgacgcttcccttgccgttggctttggatgtctttgctgcagtcttctctctggctcaggtgtgggtgggaggggcccacaggaagctcagccttctcctcccaaggtttgagtccctccaaagggcagtgggtggaggaccgggagctttgggtgaccagccactcaaaggaactttctggtcccttcagtatcttcaaggtttggaaactgcaaatgtccccttgatggggaatccgtgtgtgtgtgtgtgtgtgtgtgtgtgtgtgtgtgtgtgtgtgtgtgttttctcctagacccgtgacctgagatgtgtgatttttagtcattaaatggaagtgtctgccagctgggcccagcacctcg

SEQ ID NO: 23964 - DNA, 1415 bp, Homo sapiens
  source 1..1415: mol_type = unassigned DNA
gcttcagctagggcgggggagcccagcagaaggaccgagcagcctggcaccccactttgccatcctctccctggaaatctcggggtcggcgggccggccgcttcgcgtgggcgaaatcagagacacgtggtttccaaggccccttcggctctccctgtccagccgcctgcagctgaccctgtaccagtacaagacgtgtcccttctgcagcaaggtccgagccttcctcgacttccatgccctgccctaccaggtggtggaggtgaaccctgtgcgcagggctgagatcaagttctcctcctacagaaaggtgcccatcctggtggcccaggaaggagaaagctcgggacggcagatatgaaatgcctggcacagtgcttggggtctagtatgtagcttccagaacccaccctgcccctctacctgggaggccaaatggcaacaactaaatgactcctctgtcatcatcagcgccctcaagacctacctggtgtcggggcagcccctggaagagatcatcacctactacccagccatgaaggctgtgaacgagcagggcaaggaggtgaccgagttcggcaataagtactggctcatgctcaacgagaaggaggcccagcaagtgtatggtgggaaggaggccaggacggaggagatgaagtggcggcagtgggcggacgactggctggtgcacctgatctcccccaatgtgtaccgcacgcccaccgaggctctggcgtcctttgactacattgtccgcgagggcaagttcggagccgtggagggtgccgtggccaagtacatgggtgcagcggccatgtacctcatcagcaagcgactcaagagcaggcaccgcctccaggacaacgtgcgcgaggacctctatgaggctgctgacaagtgggtggctgctgtgggcaaggaccggcccttcatggggggccagaagccgaatctcgctgatttggcggtgtatggcgtgctgcgtgtgatggaggggctggatgcgttcgatgacctgatgcagcacacgcacatccagccctggtacctgcgggtggagagggccatcaccgaggcctccccagcgcactgaatgtccccgcgcagagcagagggaaggcagcggaagacgccagctgccagggcctggggccactgggccagcgcctggcgatactggttgggggcaggatcattctgccccttgtccacgcacccccaccagccctctcgcttctaacacagggcacctgctggggctcagggatgttagggacgagttccagccctgccactgccctggggcgacccctccctgtccctgcctccctgctctgccgcccctcttcctggaccctcagtggctgtcccatggctacatcctgtgggtgggggccctcgacaggacagca

SEQ ID NO: 23965 - DNA, 2331 bp, Homo sapiens
  source 1..2331: mol_type = unassigned DNA
ctctcgggcgccgggcggggccatcccggggctgtccgcggagacgcctatgcggtggaggctccgggcttcagctagggcgggggagcccagcagaaggaccgagcagcctggcaccccactttgccatcctctccctggaaatctcggggtcggcgggccggccgcttcgcgtgggcgaaatcagagacacgtggtttccaaggccccttcgggttcgggaaaattttatggttcgggtcacagtaggaagcggacaatgaggcgggagggcagagagaaccgcaacacctggtgccgggtcgggtcgtttccggggctttcagtggccggaagtcgcggcgcctgtactgactctaggaagggctggagttgttttgaatgggcgcccgtaagagaggtgggcaagtacgtgttacagacggccacgccgccctttaggcggtcaaggtggggcgaggagacgttcgcccccctgcagtcggccgggtcactacccaagagcctttggaggcggaagcatggaacggtctgcaaacgttcccgagcgggcctctgcggctctggcgggcgtttcgaacttgggcgccgggcacacgcccagtcccgagagcgctgagggttcccttagcgtcgccctcaccccggccaacccgcggggcgccagagtcctggccctttaaacgccgcgcgtgcctcggcgtcttcgtttcgcgcgcccgcccgcggcgccggcggagcgaacatggacccggctgcgcgggtggtgcgggcgctgtggcctggtgggtgcgccttggcctggaggctgggaggccgcccccagccgctgctacccacgcagagccgggctggcttcgcgggggcggcgggcggcccgagccccgtggctgcagctcgtaaggggagcccgcggctgctgggagctgcggcgctggccctggggggagccctggggctgtaccacacggcgcggtggcacctgcgcgcccaggacctccacgcagagcgctcagccgcgcagctctccctgtccagccgcctgcagctgaccctgtaccagtacaagacgtgtcccttctgcagcaaggtccgagccttcctcgacttccatgccctgccctaccaggtggtggaggtgaaccctgtgcgcagggctgagatcaagttctcctcctacagaaaggtgcccatcctggtggcccaggaaggagaaagctcgcaacaactaaatgactcctctgtcatcatcagcgccctcaagacctacctggtgtcggggcagcccctggaagagatcatcacctactacccagccatgaaggctgtgaacgagcagggcaaggaggtgaccgagttcggcaataagtactggctcatgctcaacgagaaggaggcccagcaagtgtatggtgggaaggaggccaggacggaggagatgaagtggcggcagtgggcggacgactggctggtgcacctgatctcccccaatgtgtaccgcacgcccaccgaggctctggcgtcctttgactacattgtccgcgagggcaagttcggagccgtggagggtgccgtggccaagtacatgggtgcagcggccatgtacctcatcagcaagcgactcaagagcaggcaccgcctccaggacaacgtgcgcgaggacctctatgaggctgctgacaagtgggtggctgctgtgggcaaggaccggcccttcatggggggccagaagccgaatctcgctgatttggcggtgtatggcgtgctgcgtgtgatggaggggctggatgcgttcgatgacctgatgcagcacacgcacatccagccctggtacctgcgggtggagagggccatcaccgaggcctccccagcgcactgaatgtccccgcgcagagcagagggaaggcagcggaagacgccagctgccagggcctggggccactgggccagcgcctggcgatactggttgggggcaggatcattctgccccttgtccacgcacccccaccagccctctcgcttctaacacagggcacctgctggggctcagggatgttagggacgagttccagccctgccactgccctggggcgacccctccctgtccctgcctccctgctctgccgcccctcttcctggaccctcagtggctgtcccatggctacatcctgtgggtgggggccctcgacaggacagcaggacggtttgttttcagtggaatcccatccctgggttcccctggttcccactcttcccaagcctcccgggactgggacatgtttgcaataaaggaaaggtttgtggcgcctgtcatggcaggcatctcatgga

SEQ ID NO: 23966 - DNA, 4450 bp, Homo sapiens
  source 1..4450: mol_type = unassigned DNA
gtgcgcggaggggacgagcggctggaccacagccggcgcccgatcaggatctccgcgctgggatcggtggaacttgaggcagcggcggcgcggggcgccatggcacaccgagcggctccgtcttctgctcctcagagagcccggctggcggcctgggatgacaagatgtctggactgcaatcctgcacagttttgagagggagatgacttgagtggttggcttttatctccacaacaatgtccatgaacaattccaaacagctagtgtctcctgcagctgcgcttctttcaaacacaacctgccagacggaaaaccggctttccgtatttttttcagtaatcttcatgacagtgggaatcttgtcaaacagccttgccatcgccattctcatgaaggcatatcagagatttagacagaagtccaaggcatcgtttctgcttttggccagtggcctggtaatcactgatttctttggccatctcatcaatggagccatagcagtatttgtatatgcttctgataaagaatggatccgctttgaccaatcaaatgtcctttgcagtatttttggtatctgcatggtgttttctggtctgtgcccacttcttctaggcagtgtgatggccattgagcggtgtattggagtcacaaaaccaatatttcattctacgaaaattacatccaaacatgtgaaaatgatgttaagtggtgtgtgcttgtttgctgttttcatagctttgctgcccatccttggacatcgagactataaaattcaggcgtcgaggacctggtgtttctacaacacagaagacatcaaagactgggaagatagattttatcttctacttttttcttttctggggctcttagcccttggtgtttcattgttgtgcaatgcaatcacaggaattacacttttaagagttaaatttaaaagtcagcagcacagacaaggcagatctcatcatttggaaatggtaatccagctcctggcgataatgtgtgtctcctgtatttgttggagcccatttctgggatacagaataattttgaatgggaaagagaaatataaagtatatgaagagcaaagtgatttcttacataggttacaatggccaacattggaataaatggaaatcattctctggaaacctgtgaaacaacactttttgctctccgaatggcaacatggaatcaaatcttagatccttgggtatatattcttctacgaaaggctgtccttaagaatctctataagcttgccagtcaatgctgtggagtgcatgtcatcagcttacatatttgggagcttagttccattaaaaattccttaaaggttgctgctatttctgagtcaccagttgcagagaaatcagcaagcacctagcttaataggacagtaaatctgtgtggggctagaacaaaattaagacatgtttggcaatatttcagttagttaaatacctgtagcctaactggaaaattcaggcttcatcatgtagtttgaagatactattgtcagattcaggttttgaaatttgtcaaataaacaggataactgtacatttttcacttgtttttgccaatgggaggtagacacaataaaataatgccatgggagtcacactgaaagcaattttgagcttatctgtcttatttatgctttgagtgaatcatctgttgaggtctaatgcctttacttggcctatttgccagagaacatcttaatgcagcctgcatagtgaaatggttattttgagatcaccgctctgtagctaacccttataaactaggctcagtaaaataaagcactcttattttttgatctggcctattttgcccctcattgtgtagcctcaattaacacatgcatggtcatgacacccagaattcatgatggtttgttataacaacctctgcatattccaggtctggcagacaggttgcctgaccctgcaatcctatctagaatgggcccattcttgtcatatttgacaaataggactgcctacatttattattatgaaggtcgattgttgttggaagtgttttttcatgtcatagattagcaattttcaaataattattttttctctgaaaattttgtgtgtgattgcacaataaataatttttagagaaacaaaggctctttctcagcacattgatgggcaactagaattacagcagtttcaaaactctaccatggataatgcaaacaaaccgaagctacatgccaatgataggtgcaaagaatattggcaaaaggtgctttaccttgagccattatttgtgtcagagaacaaaagaaacagaatcaatatataaaattcaaagactatctgcagctagtgtgtttcttctttacacacatatacacacagacatcagaaaattctgttgagagcaggttcattaaatttgtaagatggcatattctaaagcctgtgctaccagtactaagaggggaagactggcaatttgccaagcacttggggattattataacaattaactaggagatcaagagataataatctctccccaaattttccaataataattgagactttttctttgcttgtttgtgtaattcaaccaaaagaatttcaatacccattcaaattgtcctaggtctatcagaaattagggaaggtagtcctgctttataataggaaaatgtatttctgtataagagttctttgctttcattaacttggattcatttaaaaattaatcttccctgttaggctgatttcagattctctaggaaatctgtgtaagtaaccagaagacctttcagatggtttatttgctttcagcagagaatttatttcatacagttacttaagagtgttgatgtcttgtgaacagagatataaggaaccattctccatccttccttatcatgctgggtacaatgcttctatgaatatttccatgtattttgactggggagaggcatggagaagaaactctcattcaggggctccaggatccttctccttgaggcttctaaataaatggcagaattcttgctgtattgccatgatgtcaccctggccatgtgtactgacttgaggagatcttgcaacatggccatgtgcaaggctttaaggagtgagagagatgtgtacatatcttaggagggttatctatgttatctgagtatatgtttgggtaaccaaattggtcttaaaaatgatgttaacccaagaagtagacatcaaaaattaaaaaaaaaaaaaggaatgtgttttcattgttttaagtttttcttctgagtaaaacaaaattatagaaaacaaatgcaacaatgtgcacatctgacttaagagtttcatttctgttattatatgtgttgcatgtagcttggcgatttactgtgtaatgaataatagactggaacatctaccaataactttcacataaatgttcaaaatagaagtgtattttttcaggtttctggaaataaatagtaaaataaatggcacaaatagtttcaataaatttaccaatttgagtgttttcagctctatttcaaaactcataactaatcttcagaattactgaatttccttttgaactgggtaaggcattatccaagcaacttcacatactatttaaacatgatttctcggtaattatatattctgggcaaataacataaacatgtcaggatttttacaggtgttagtgaatttttctaaaaagatgagacaaaagcaaaaatatcacacataggtttttatgactatgaatacaaagataatgctgattcacaattagctatgggtaagtccaaaacatcagaccttttactgatgggttaactaggtgaaagaaatgggcccttatttttttttttccctagaggcagaaagttacttctaatgatctatatagctaaaacgaaaaatacctgaaagttaatacatacatatgtagatatattttgttatgtgataaatgtttcttgtttgcacacttttggacttgagaaatctgcttttgttttgtgcctactctgagtttagaacccaaataagaggacttgttaaatatagagtgtactttttgttaaaactattgctagcttcacctgtataccatcattgttccaaattaaataactgttttgggtcagaatataaatgctgggaatatacattttattacttcttaatctgggtgtcaaagattttaccacctggtaaataatgttggacttcaacttgttactggcacattttaatagtagatgaaacatgtttttcttggttatgtgaataaatgtatgttgtgctcttcatacttgttggattgtatagagattaaatagtgatatgtatattttgttgtttgctttggtatgcaactcatgtaattttagtgctttgactagcttaaaacttcaaacaagtaattttataataaagttggactaatgtt

SEQ ID NO: 23967 - DNA, 4379 bp, Homo sapiens
  source 1..4379: mol_type = unassigned DNA
gtgcgcggaggggacgagcggctggaccacagccggcgcccgatcaggatctccgcgctgggatcggtggaacttgaggcagcggcggcgcggggcgccatggcacaccgagcggctccgtcttctgctcctcagagagcccggctggcggcctgggatgacaagatgtctggactgcaatcctgcacagttttgagagggagatgacttgagtggttggcttttatctccacaacaatgtccatgaacaattccaaacagctagtgtctcctgcagctgcgcttctttcaaacacaacctgccagacggaaaaccggctttccgtatttttttcagtaatcttcatgacagtgggaatcttgtcaaacagccttgccatcgccattctcatgaaggcatatcagagatttagacagaagtccaaggcatcgtttctgcttttggccagtggcctggtaatcactgatttctttggccatctcatcaatggagccatagcagtatttgtatatgcttctgataaagaatggatccgctttgaccaatcaaatgtcctttgcagtatttttggtatctgcatggtgttttctggtctgtgcccacttcttctaggcagtgtgatggccattgagcggtgtattggagtcacaaaaccaatatttcattctacgaaaattacatccaaacatgtgaaaatgatgttaagtggtgtgtgcttgtttgctgttttcatagctttgctgcccatccttggacatcgagactataaaattcaggcgtcgaggacctggtgtttctacaacacagaagacatcaaagactgggaagatagattttatcttctacttttttcttttctggggctcttagcccttggtgtttcattgttgtgcaatgcaatcacaggaattacacttttaagagttaaatttaaaagtcagcagcacagacaaggcagatctcatcatttggaaatggtaatccagctcctggcgataatgtgtgtctcctgtatttgttggagcccatttctggttacaatggccaacattggaataaatggaaatcattctctggaaacctgtgaaacaacactttttgctctccgaatggcaacatggaatcaaatcttagatccttgggtatatattcttctacgaaaggctgtccttaagaatctctataagcttgccagtcaatgctgtggagtgcatgtcatcagcttacatatttgggagcttagttccattaaaaattccttaaaggttgctgctatttctgagtcaccagttgcagagaaatcagcaagcacctagcttaataggacagtaaatctgtgtggggctagaacaaaattaagacatgtttggcaatatttcagttagttaaatacctgtagcctaactggaaaattcaggcttcatcatgtagtttgaagatactattgtcagattcaggttttgaaatttgtcaaataaacaggataactgtacatttttcacttgtttttgccaatgggaggtagacacaataaaataatgccatgggagtcacactgaaagcaattttgagcttatctgtcttatttatgctttgagtgaatcatctgttgaggtctaatgcctttacttggcctatttgccagagaacatcttaatgcagcctgcatagtgaaatggttattttgagatcaccgctctgtagctaacccttataaactaggctcagtaaaataaagcactcttattttttgatctggcctattttgcccctcattgtgtagcctcaattaacacatgcatggtcatgacacccagaattcatgatggtttgttataacaacctctgcatattccaggtctggcagacaggttgcctgaccctgcaatcctatctagaatgggcccattcttgtcatatttgacaaataggactgcctacatttattattatgaaggtcgattgttgttggaagtgttttttcatgtcatagattagcaattttcaaataattattttttctctgaaaattttgtgtgtgattgcacaataaataatttttagagaaacaaaggctctttctcagcacattgatgggcaactagaattacagcagtttcaaaactctaccatggataatgcaaacaaaccgaagctacatgccaatgataggtgcaaagaatattggcaaaaggtgctttaccttgagccattatttgtgtcagagaacaaaagaaacagaatcaatatataaaattcaaagactatctgcagctagtgtgtttcttctttacacacatatacacacagacatcagaaaattctgttgagagcaggttcattaaatttgtaagatggcatattctaaagcctgtgctaccagtactaagaggggaagactggcaatttgccaagcacttggggattattataacaattaactaggagatcaagagataataatctctccccaaattttccaataataattgagactttttctttgcttgtttgtgtaattcaaccaaaagaatttcaatacccattcaaattgtcctaggtctatcagaaattagggaaggtagtcctgctttataataggaaaatgtatttctgtataagagttctttgctttcattaacttggattcatttaaaaattaatcttccctgttaggctgatttcagattctctaggaaatctgtgtaagtaaccagaagacctttcagatggtttatttgctttcagcagagaatttatttcatacagttacttaagagtgttgatgtcttgtgaacagagatataaggaaccattctccatccttccttatcatgctgggtacaatgcttctatgaatatttccatgtattttgactggggagaggcatggagaagaaactctcattcaggggctccaggatccttctccttgaggcttctaaataaatggcagaattcttgctgtattgccatgatgtcaccctggccatgtgtactgacttgaggagatcttgcaacatggccatgtgcaaggctttaaggagtgagagagatgtgtacatatcttaggagggttatctatgttatctgagtatatgtttgggtaaccaaattggtcttaaaaatgatgttaacccaagaagtagacatcaaaaattaaaaaaaaaaaaaggaatgtgttttcattgttttaagtttttcttctgagtaaaacaaaattatagaaaacaaatgcaacaatgtgcacatctgacttaagagtttcatttctgttattatatgtgttgcatgtagcttggcgatttactgtgtaatgaataatagactggaacatctaccaataactttcacataaatgttcaaaatagaagtgtattttttcaggtttctggaaataaatagtaaaataaatggcacaaatagtttcaataaatttaccaatttgagtgttttcagctctatttcaaaactcataactaatcttcagaattactgaatttccttttgaactgggtaaggcattatccaagcaacttcacatactatttaaacatgatttctcggtaattatatattctgggcaaataacataaacatgtcaggatttttacaggtgttagtgaatttttctaaaaagatgagacaaaagcaaaaatatcacacataggtttttatgactatgaatacaaagataatgctgattcacaattagctatgggtaagtccaaaacatcagaccttttactgatgggttaactaggtgaaagaaatgggcccttatttttttttttccctagaggcagaaagttacttctaatgatctatatagctaaaacgaaaaatacctgaaagttaatacatacatatgtagatatattttgttatgtgataaatgtttcttgtttgcacacttttggacttgagaaatctgcttttgttttgtgcctactctgagtttagaacccaaataagaggacttgttaaatatagagtgtactttttgttaaaactattgctagcttcacctgtataccatcattgttccaaattaaataactgttttgggtcagaatataaatgctgggaatatacattttattacttcttaatctgggtgtcaaagattttaccacctggtaaataatgttggacttcaacttgttactggcacattttaatagtagatgaaacatgtttttcttggttatgtgaataaatgtatgttgtgctcttcatacttgttggattgtatagagattaaatagtgatatgtatattttgttgtttgctttggtatgcaactcatgtaattttagtgctttgactagcttaaaacttcaaacaagtaattttataataaagttggactaatgtt

SEQ ID NO: 23968 - DNA, 4337 bp, Homo sapiens
  source 1..4337: mol_type = unassigned DNA
catgaggaaatgtagctgtatgcctggagggatctacagccagaccagccaactcagcctggttaagaacacctgttgaagaactagtgcaggcgtttggaggacataggacactctggccatatgtctggactgcaatcctgcacagttttgagagggagatgacttgagtggttggcttttatctccacaacaatgtccatgaacaattccaaacagctagtgtctcctgcagctgcgcttctttcaaacacaacctgccagacggaaaaccggctttccgtatttttttcagtaatcttcatgacagtgggaatcttgtcaaacagccttgccatcgccattctcatgaaggcatatcagagatttagacagaagtccaaggcatcgtttctgcttttggccagtggcctggtaatcactgatttctttggccatctcatcaatggagccatagcagtatttgtatatgcttctgataaagaatggatccgctttgaccaatcaaatgtcctttgcagtatttttggtatctgcatggtgttttctggtctgtgcccacttcttctaggcagtgtgatggccattgagcggtgtattggagtcacaaaaccaatatttcattctacgaaaattacatccaaacatgtgaaaatgatgttaagtggtgtgtgcttgtttgctgttttcatagctttgctgcccatccttggacatcgagactataaaattcaggcgtcgaggacctggtgtttctacaacacagaagacatcaaagactgggaagatagattttatcttctacttttttcttttctggggctcttagcccttggtgtttcattgttgtgcaatgcaatcacaggaattacacttttaagagttaaatttaaaagtcagcagcacagacaaggcagatctcatcatttggaaatggtaatccagctcctggcgataatgtgtgtctcctgtatttgttggagcccatttctggttacaatggccaacattggaataaatggaaatcattctctggaaacctgtgaaacaacactttttgctctccgaatggcaacatggaatcaaatcttagatccttgggtatatattcttctacgaaaggctgtccttaagaatctctataagcttgccagtcaatgctgtggagtgcatgtcatcagcttacatatttgggagcttagttccattaaaaattccttaaaggttgctgctatttctgagtcaccagttgcagagaaatcagcaagcacctagcttaataggacagtaaatctgtgtggggctagaacaaaattaagacatgtttggcaatatttcagttagttaaatacctgtagcctaactggaaaattcaggcttcatcatgtagtttgaagatactattgtcagattcaggttttgaaatttgtcaaataaacaggataactgtacatttttcacttgtttttgccaatgggaggtagacacaataaaataatgccatgggagtcacactgaaagcaattttgagcttatctgtcttatttatgctttgagtgaatcatctgttgaggtctaatgcctttacttggcctatttgccagagaacatcttaatgcagcctgcatagtgaaatggttattttgagatcaccgctctgtagctaacccttataaactaggctcagtaaaataaagcactcttattttttgatctggcctattttgcccctcattgtgtagcctcaattaacacatgcatggtcatgacacccagaattcatgatggtttgttataacaacctctgcatattccaggtctggcagacaggttgcctgaccctgcaatcctatctagaatgggcccattcttgtcatatttgacaaataggactgcctacatttattattatgaaggtcgattgttgttggaagtgttttttcatgtcatagattagcaattttcaaataattattttttctctgaaaattttgtgtgtgattgcacaataaataatttttagagaaacaaaggctctttctcagcacattgatgggcaactagaattacagcagtttcaaaactctaccatggataatgcaaacaaaccgaagctacatgccaatgataggtgcaaagaatattggcaaaaggtgctttaccttgagccattatttgtgtcagagaacaaaagaaacagaatcaatatataaaattcaaagactatctgcagctagtgtgtttcttctttacacacatatacacacagacatcagaaaattctgttgagagcaggttcattaaatttgtaagatggcatattctaaagcctgtgctaccagtactaagaggggaagactggcaatttgccaagcacttggggattattataacaattaactaggagatcaagagataataatctctccccaaattttccaataataattgagactttttctttgcttgtttgtgtaattcaaccaaaagaatttcaatacccattcaaattgtcctaggtctatcagaaattagggaaggtagtcctgctttataataggaaaatgtatttctgtataagagttctttgctttcattaacttggattcatttaaaaattaatcttccctgttaggctgatttcagattctctaggaaatctgtgtaagtaaccagaagacctttcagatggtttatttgctttcagcagagaatttatttcatacagttacttaagagtgttgatgtcttgtgaacagagatataaggaaccattctccatccttccttatcatgctgggtacaatgcttctatgaatatttccatgtattttgactggggagaggcatggagaagaaactctcattcaggggctccaggatccttctccttgaggcttctaaataaatggcagaattcttgctgtattgccatgatgtcaccctggccatgtgtactgacttgaggagatcttgcaacatggccatgtgcaaggctttaaggagtgagagagatgtgtacatatcttaggagggttatctatgttatctgagtatatgtttgggtaaccaaattggtcttaaaaatgatgttaacccaagaagtagacatcaaaaattaaaaaaaaaaaaaggaatgtgttttcattgttttaagtttttcttctgagtaaaacaaaattatagaaaacaaatgcaacaatgtgcacatctgacttaagagtttcatttctgttattatatgtgttgcatgtagcttggcgatttactgtgtaatgaataatagactggaacatctaccaataactttcacataaatgttcaaaatagaagtgtattttttcaggtttctggaaataaatagtaaaataaatggcacaaatagtttcaataaatttaccaatttgagtgttttcagctctatttcaaaactcataactaatcttcagaattactgaatttccttttgaactgggtaaggcattatccaagcaacttcacatactatttaaacatgatttctcggtaattatatattctgggcaaataacataaacatgtcaggatttttacaggtgttagtgaatttttctaaaaagatgagacaaaagcaaaaatatcacacataggtttttatgactatgaatacaaagataatgctgattcacaattagctatgggtaagtccaaaacatcagaccttttactgatgggttaactaggtgaaagaaatgggcccttatttttttttttccctagaggcagaaagttacttctaatgatctatatagctaaaacgaaaaatacctgaaagttaatacatacatatgtagatatattttgttatgtgataaatgtttcttgtttgcacacttttggacttgagaaatctgcttttgttttgtgcctactctgagtttagaacccaaataagaggacttgttaaatatagagtgtactttttgttaaaactattgctagcttcacctgtataccatcattgttccaaattaaataactgttttgggtcagaatataaatgctgggaatatacattttattacttcttaatctgggtgtcaaagattttaccacctggtaaataatgttggacttcaacttgttactggcacattttaatagtagatgaaacatgtttttcttggttatgtgaataaatgtatgttgtgctcttcatacttgttggattgtatagagattaaatagtgatatgtatattttgttgtttgctttggtatgcaactcatgtaattttagtgctttgactagcttaaaacttcaaacaagtaattttataataaagttggactaatgtt

SEQ ID NO: 23969 - DNA, 6178 bp, Homo sapiens
  source 1..6178: mol_type = unassigned DNA
gatttatcggctcgcgaggagagcggagcaggcgcgcggcccaggcggaggagcgccgactctggagcagccggagctggaagaggaggaggaggagaggcggcggggaaggaggaggagggggagagtcgctcccgccgggcgagcatggggcgcctggcctcgaggccgctgctgctggcgctcctgtcgttggctctttgccgagggcgtgtggtgagagtccccacagcgaccctggttcgagtggtgggcactgagctggtcatcccctgcaacgtcagtgactatgatggccccagcgagcaaaactttgactggagcttctcatctttggggagcagctttgtggagcttgcaagcacctgggaggtggggttcccagcccagctgtaccaggagcggctgcagaggggcgagatcctgttaaggcggactgccaacgacgccgtggagctccacataaagaacgtccagccttcagaccaaggccactacaaatgttcaacccccagcacagatgccactgtccagggaaactatgaggacacagtgcaggttaaagtgctggccgactccctgcacgtgggccccagcgcgcggcccccgccgagcctgagcctgcgggagggggagcccttcgagctgcgctgcaccgccgcctccgcctcgccgctgcacacgcacctggcgctgctgtgggaggtgcaccgcggcccggccaggcggagcgtcctcgccctgacccacgagggcaggttccacccgggcctggggtacgagcagcgctaccacagtggggacgtgcgcctcgacaccgtgggcagcgacgcctaccgcctctcagtgtcccgggctctgtctgccgaccagggctcctacaggtgtatcgtcagcgagtggatcgccgagcagggcaactggcaggaaatccaagaaaaggccgtggaagttgccaccgtggtgatccagccatcagttctgcgagcagctgtgcccaagaatgtgtctgtggctgaaggaaaggaactggacctgacctgtaacatcacaacagaccgagccgatgacgtccggcccgaggtgacgtggtccttcagcaggatgcctgacagcaccctacctggctcccgcgtgttggcgcggcttgaccgtgattccctggtgcacagctcgcctcatgttgctttgagtcatgtggatgcacgctcctaccatttactggttcgggatgttagcaaagaaaactctggctactattactgccacgtgtccctgtgggcacccggacacaacaggagctggcacaaagtggcagaggccgtgtcttccccagctggtgtgggtgtgacctggctagaaccagactaccaggtgtacctgaatgcttccaaggtccccgggtttgcggatgaccccacagagctggcatgccgggtggtggacacgaagagtggggaggcgaatgtccgattcacggtttcgtggtactacaggatgaaccggcgcagcgacaatgtggtgaccagcgagctgcttgcagtcatggacggggactggacgctaaaatatggagagaggagcaagcagcgggcccaggatggagactttattttttctaaggaacatacagacacgttcaatttccggatccaaaggactacagaggaagacagaggcaattattactgtgttgtgtctgcctggaccaaacagcggaacaacagctgggtgaaaagcaaggatgtcttctccaagcctgttaacatattttgggcattagaagattccgtgcttgtggtgaaggcgaggcagccaaagcctttctttgctgccggaaatacatttgagatgacttgcaaagtatcttccaagaatattaagtcgccacgctactctgttctcatcatggctgagaagcctgtcggcgacctctccagtcccaatgaaacgaagtacatcatctctctggaccaggattctgtggtgaagctggagaattggacagatgcatcacgggtggatggcgttgttttagaaaaagtgcaggaggatgagttccgctatcgaatgtaccagactcaggtctcagacgcagggctgtaccgctgcatggtgacagcctggtctcctgtcaggggcagcctttggcgagaagcagcaaccagtctctccaatcctattgagatagacttccaaacctcaggtcctatatttaatgcttctgtgcattcagacacaccatcagtaattcggggagatctgatcaaattgttctgtatcatcactgtcgagggagcagcactggatccagatgacatggcctttgatgtgtcctggtttgcggtgcactcttttggcctggacaaggctcctgtgctcctgtcttccctggatcggaagggcatcgtgaccacctcccggagggactggaagagcgacctcagcctggagcgcgtgagtgtgctggaattcttgctgcaagtgcatggctccgaggaccaggactttggcaactactactgttccgtgactccatgggtgaagtcaccaacaggttcctggcagaaggaggcagagatccactccaagcccgtttttataactgtgaagatggatgtgctgaacgccttcaagtatcccttgctgatcggcgtcggtctgtccacggtcatcgggctcctgtcctgtctcatcgggtactgcagctcccactggtgttgtaagaaggaggttcaggagacacggcgcgagcgccgcaggctcatgtcgatggagatggactaggctggcccgggaggggagtgacagagggacgttctaggagcaattggggcaagaagaggacagtgatattttaaaacaaagtgtgttacactaaaaaccagtcctctctaatctcaggtgggacttggcgctctctcttttctgcatgtcaagttctgagcgcggacatgtttaccagcacacggctcttcttcccacggcactttctgatgtaacaatcgagtgtgtgttttcccaactgcagctttttaatggttaaccttcatctaattttttttctcccactggtttatagatcctctgacttgtgtgtgtttatagcttttgtttcgcggggttgtggtgaggaaggggtgatggcatgcggagttctttatcttcagtgagaatgtgcctgcccgcctgagagccagcttccgcgttggaggcacgtgttcagagagctgctgagcgccaccctctacccggctgacagacaacacagacctgtgccgaaggctaatttgtggcttttacgaccctaccccaccccctgttttcaggggtttagactacatttgaaatccaaacttggagtatataacttcttattgagcccaactgctttttttttttttttttttgcttctctgccccttttccatttcttttgtatttgttttctgtgagagcactgaaatggcagccctggaatctacaatttggctctccactgagcaccttatcttgccaccttagccttaagaatgaatatgaagaaaaatacacagccacctctgtccagggcagtaagaagggctgcaaggaaggggaggatggggacaaggaaaggatcagatacctgctccagtagttgtgaggccactgtgtctcaggggactccaggaggagcagaagagggatcccacgaagttattcttacgcagctggggccaggagggtcagagtggtgccaggtgcaagttaggctaaagaagccaccactattcctctctcttgcccattgtggggggcaaaggcattggtcaccaagagtcttgcagggggacccacagatatgccatgtccttcacacgtgcttgggctccttaacctgaaggcaaattgctacttgcaagactgactgacttcaaggaatcagaaattacctagaagcaccatgttttttctatgaccttttcagtccttcaggtcattttaaggtccactgcagggggttagtgagaaagggtatactttgtggtatgttttgctttcctaatagggacatgaaggaaacccagcaatttgctgttatgtgaatggcctgtagagcagagtcaagagcggtgtgctttgcccgactgctcccatcaggaataggagagtagacagagatcttccacatcccaggcttctgctgctgctttaaaagctctgtccttggagcctcccgctccctgaagtgtctcgccccctgcacagcactggcctttcggaagcatcccagtagggttttctgaggctcgctggtgactcatgccctaattgcaatcctctgcttttatcttgactttgaaggatctaacactgctctctcttccaaaggggaaaaaaagattcatttgttttgagcaataaactaatacaaaatgatggccattcatgtgcagctctttgtcaccatgggccggatgagttgtgctcctcctggctcaccatttccccctgctcccccacagccggttctgcacttatcaccgagtcgcccctggaagcagattcccattgagttttccccaccaaggggaccatgcacatggtagaaacattagattctgcattgacagtagcctttccttggcccgggcctgtggtgggaagacgggcaacaagtataccccaccagggcctgagtgactagaggaagaggacgaggccttgttggcactagatttgggtattttctgcatgtcataacatatcctaactgctatttcagaagaggcagcttgtaggtgattgtacaagtgagaattaaagagagaacagatatttaaacaggtgctgtattagtaacagccagtgccctttcagcccttgcatctattaaaaggagattcaggattttattggcacaggcccttcttagtaggaagaaagggtgcttagctttggacctgaccgggtgtgtgtaaaaccatggactgagtcacagcagacactcgatggtggtaaatgtgatgggtgcttacacactgtaccttttcctttcatactgatgctgcagttcagggctggagttgttaaggcattgacctccacccacctgccccatgtccactgggctgcccaagctgcatgtcacctgagggctggcaggaaggggcgagaaatcccagggcattgtaccaaggacctagttccttctagggatataaatttccaggaatgtgtatttttaatgtggtgagatgcactcttttgttgtaccaaatagggctccccaccccacccctgcgacaagtgctcttctagaacaggttcctaccagcagcactggtgtgaatgaaagagagacccagccgcgtctcacacaggtggaattgcacttcttaacaaaaaggaactttataaaagtttgggattttttttcctaatcataaaaatagccccagaaagagcctaagctatgttcagatagaagcctcgaaattcctgtaaattgtttactttatgatgtttacatacacgtttcactttgaaaaaaaatgcaaatcgactttttaacaactgttgagatgtttcatgggacagtagaactctgactcaccaactgggctaaattttaatttaaaaatgtatttatttgagtgtctttccccccctcaccctcaccatctgaggggctccctgagatcttggtagaggaggcccctcctgcccagaccttcgtttgtttccccggtggcccttgcttcttgctttgcagactgcctgcagccatgattttgtcactgacatctgtgagccaaagactgagcctttttggcaggaataataagcaatactacacaacttgctactttcagaaaacttttttttagcttcaccgatgacaacagaggaagaagggaactgggatttgggtaagttctcctccactgtttgaccaaattctcagtgataaatatgtgtgcagatccctagaagagaaaacgctgactttctttttaagtgtggcacataaggatctgcagaattttccgtagacaaagaaaggatcttgtgtatttttgtccatatccaatgttatatgaactaattgtattgttttatactgtgaccacaaatattatgcaatgcaccatttgttttttatttcattaaaggaagtttaatttaaattgaa

SEQ ID NO: 23970 - DNA, 5600 bp, Homo sapiens
  source 1..5600: mol_type = unassigned DNA
tctggagcagccggagctggaagaggaggaggaggagaggcggcggggaaggaggaggagggggagcccttcgagctgcgctgcaccgccgcctccgcctcgccgctgcacacgcacctggcgctgctgtgggaggtgcaccgcggcccggccaggcggagcgtcctcgccctgacccacgagggcaggttccacccgggcctggggtacgagcagcgctaccacagtggggacgtgcgcctcgacaccgtgggcagcgacgcctaccgcctctcagtgtcccgggctctgtctgccgaccagggctcctacaggtgtatcgtcagcgagtggatcgccgagcagggcaactggcaggaaatccaagaaaaggccgtggaagttgccaccgtggtgatccagccatcagttctgcgagcagctgtgcccaagaatgtgtctgtggctgaaggaaaggaactggacctgacctgtaacatcacaacagaccgagccgatgacgtccggcccgaggtgacgtggtccttcagcaggatgcctgacagcaccctacctggctcccgcgtgttggcgcggcttgaccgtgattccctggtgcacagctcgcctcatgttgctttgagtcatgtggatgcacgctcctaccatttactggttcgggatgttagcaaagaaaactctggctactattactgccacgtgtccctgtgggcacccggacacaacaggagctggcacaaagtggcagaggccgtgtcttccccagctggtgtgggtgtgacctggctagaaccagactaccaggtgtacctgaatgcttccaaggtccccgggtttgcggatgaccccacagagctggcatgccgggtggtggacacgaagagtggggaggcgaatgtccgattcacggtttcgtggtactacaggatgaaccggcgcagcgacaatgtggtgaccagcgagctgcttgcagtcatggacggggactggacgctaaaatatggagagaggagcaagcagcgggcccaggatggagactttattttttctaaggaacatacagacacgttcaatttccggatccaaaggactacagaggaagacagaggcaattattactgtgttgtgtctgcctggaccaaacagcggaacaacagctgggtgaaaagcaaggatgtcttctccaagcctgttaacatattttgggcattagaagattccgtgcttgtggtgaaggcgaggcagccaaagcctttctttgctgccggaaatacatttgagatgacttgcaaagtatcttccaagaatattaagtcgccacgctactctgttctcatcatggctgagaagcctgtcggcgacctctccagtcccaatgaaacgaagtacatcatctctctggaccaggattctgtggtgaagctggagaattggacagatgcatcacgggtggatggcgttgttttagaaaaagtgcaggaggatgagttccgctatcgaatgtaccagactcaggtctcagacgcagggctgtaccgctgcatggtgacagcctggtctcctgtcaggggcagcctttggcgagaagcagcaaccagtctctccaatcctattgagatagacttccaaacctcaggtcctatatttaatgcttctgtgcattcagacacaccatcagtaattcggggagatctgatcaaattgttctgtatcatcactgtcgagggagcagcactggatccagatgacatggcctttgatgtgtcctggtttgcggtgcactcttttggcctggacaaggctcctgtgctcctgtcttccctggatcggaagggcatcgtgaccacctcccggagggactggaagagcgacctcagcctggagcgcgtgagtgtgctggaattcttgctgcaagtgcatggctccgaggaccaggactttggcaactactactgttccgtgactccatgggtgaagtcaccaacaggttcctggcagaaggaggcagagatccactccaagcccgtttttataactgtgaagatggatgtgctgaacgccttcaagtatcccttgctgatcggcgtcggtctgtccacggtcatcgggctcctgtcctgtctcatcgggtactgcagctcccactggtgttgtaagaaggaggttcaggagacacggcgcgagcgccgcaggctcatgtcgatggagatggactaggctggcccgggaggggagtgacagagggacgttctaggagcaattggggcaagaagaggacagtgatattttaaaacaaagtgtgttacactaaaaaccagtcctctctaatctcaggtgggacttggcgctctctcttttctgcatgtcaagttctgagcgcggacatgtttaccagcacacggctcttcttcccacggcactttctgatgtaacaatcgagtgtgtgttttcccaactgcagctttttaatggttaaccttcatctaattttttttctcccactggtttatagatcctctgacttgtgtgtgtttatagcttttgtttcgcggggttgtggtgaggaaggggtgatggcatgcggagttctttatcttcagtgagaatgtgcctgcccgcctgagagccagcttccgcgttggaggcacgtgttcagagagctgctgagcgccaccctctacccggctgacagacaacacagacctgtgccgaaggctaatttgtggcttttacgaccctaccccaccccctgttttcaggggtttagactacatttgaaatccaaacttggagtatataacttcttattgagcccaactgctttttttttttttttttttgcttctctgccccttttccatttcttttgtatttgttttctgtgagagcactgaaatggcagccctggaatctacaatttggctctccactgagcaccttatcttgccaccttagccttaagaatgaatatgaagaaaaatacacagccacctctgtccagggcagtaagaagggctgcaaggaaggggaggatggggacaaggaaaggatcagatacctgctccagtagttgtgaggccactgtgtctcaggggactccaggaggagcagaagagggatcccacgaagttattcttacgcagctggggccaggagggtcagagtggtgccaggtgcaagttaggctaaagaagccaccactattcctctctcttgcccattgtggggggcaaaggcattggtcaccaagagtcttgcagggggacccacagatatgccatgtccttcacacgtgcttgggctccttaacctgaaggcaaattgctacttgcaagactgactgacttcaaggaatcagaaattacctagaagcaccatgttttttctatgaccttttcagtccttcaggtcattttaaggtccactgcagggggttagtgagaaagggtatactttgtggtatgttttgctttcctaatagggacatgaaggaaacccagcaatttgctgttatgtgaatggcctgtagagcagagtcaagagcggtgtgctttgcccgactgctcccatcaggaataggagagtagacagagatcttccacatcccaggcttctgctgctgctttaaaagctctgtccttggagcctcccgctccctgaagtgtctcgccccctgcacagcactggcctttcggaagcatcccagtagggttttctgaggctcgctggtgactcatgccctaattgcaatcctctgcttttatcttgactttgaaggatctaacactgctctctcttccaaaggggaaaaaaagattcatttgttttgagcaataaactaatacaaaatgatggccattcatgtgcagctctttgtcaccatgggccggatgagttgtgctcctcctggctcaccatttccccctgctcccccacagccggttctgcacttatcaccgagtcgcccctggaagcagattcccattgagttttccccaccaaggggaccatgcacatggtagaaacattagattctgcattgacagtagcctttccttggcccgggcctgtggtgggaagacgggcaacaagtataccccaccagggcctgagtgactagaggaagaggacgaggccttgttggcactagatttgggtattttctgcatgtcataacatatcctaactgctatttcagaagaggcagcttgtaggtgattgtacaagtgagaattaaagagagaacagatatttaaacaggtgctgtattagtaacagccagtgccctttcagcccttgcatctattaaaaggagattcaggattttattggcacaggcccttcttagtaggaagaaagggtgcttagctttggacctgaccgggtgtgtgtaaaaccatggactgagtcacagcagacactcgatggtggtaaatgtgatgggtgcttacacactgtaccttttcctttcatactgatgctgcagttcagggctggagttgttaaggcattgacctccacccacctgccccatgtccactgggctgcccaagctgcatgtcacctgagggctggcaggaaggggcgagaaatcccagggcattgtaccaaggacctagttccttctagggatataaatttccaggaatgtgtatttttaatgtggtgagatgcactcttttgttgtaccaaatagggctccccaccccacccctgcgacaagtgctcttctagaacaggttcctaccagcagcactggtgtgaatgaaagagagacccagccgcgtctcacacaggtggaattgcacttcttaacaaaaaggaactttataaaagtttgggattttttttcctaatcataaaaatagccccagaaagagcctaagctatgttcagatagaagcctcgaaattcctgtaaattgtttactttatgatgtttacatacacgtttcactttgaaaaaaaatgcaaatcgactttttaacaactgttgagatgtttcatgggacagtagaactctgactcaccaactgggctaaattttaatttaaaaatgtatttatttgagtgtctttccccccctcaccctcaccatctgaggggctccctgagatcttggtagaggaggcccctcctgcccagaccttcgtttgtttccccggtggcccttgcttcttgctttgcagactgcctgcagccatgattttgtcactgacatctgtgagccaaagactgagcctttttggcaggaataataagcaatactacacaacttgctactttcagaaaacttttttttagcttcaccgatgacaacagaggaagaagggaactgggatttgggtaagttctcctccactgtttgaccaaattctcagtgataaatatgtgtgcagatccctagaagagaaaacgctgactttctttttaagtgtggcacataaggatctgcagaattttccgtagacaaagaaaggatcttgtgtatttttgtccatatccaatgttatatgaactaattgtattgttttatactgtgaccacaaatattatgcaatgcaccatttgttttttatttcattaaaggaagtttaattt

SEQ ID NO: 23971 - DNA, 2085 bp, Homo sapiens
  source 1..2085: mol_type = unassigned DNA
aagctgacacacagaccgacacaggcagcgagagacacgaggagcaaagcaagtgaaggcacagacgcacgggacaggagagcctgggcaagactggagagcccagacctgggatggcggattcgtgcaggaacctcacctacgtgcggggctcggtggggccggccaccagcaccctgatgttcgtggccggtgtggtgggcaacgggctggccctgggcatcctgagcgcacggcgaccggcgcgcccctcggccttcgcggtgctggtgaccggactggcggccaccgacctgctgggcaccagcttcctgagcccggccgtgttcgtggcctatgcgcgcaacagctccctgctgggcctggcccgaggcggccccgccctgtgcgatgccttcgccttcgccatgaccttcttcggcctggcgtccatgctcatcctctttgccatggccgtggagcgctgcctggcgctgagccacccctacctctacgcgcagctggacgggccccgctgcgcccgcctggcgctgccagccatctacgccttctgcgtcctcttctgcgcgctgcccctgctgggcctgggccaacaccagcagtactgccccggcagctggtgcttcctccgcatgcgctgggcccagccgggcggcgccgccttctcgctggcctacgccggcctggtggccctgctggtggctgccatcttcctctgcaacggctcggtcaccctcagcctctgccgcatgtaccgccagcagaagcgccaccagggctctctgggtccacggccgcgcaccggagaggacgaggtggaccacctgatcctgctggccctcatgacagtggtcatggccgtgtgctccctgcctctcacgatccgctgcttcacccaggctgtcgcccctgacagcagcagtgagatgggggacctccttgccttccgcttctacgccttcaaccccatcctggacccctgggtcttcatccttttccgcaaggctgtcttccagcgactcaagctctgggtctgctgcctgtgcctcgggcctgcccacggagactcgcagacacccctttcccagctcgcctcagggaggagggacccaagggccccctctgctcctgtgggaaaggaggggagctgcgtgcctttgtcggcttggggcgaggggcaggtggagcccttgcctcccacacagcagtccagcggcagcgccgtgggaacgtcgtccaaagcagaagccagcgtcgcctgctccctctgctgacatttcaagctgaccctgtgatctctgccctgtcttcgggcgacaggagccagaaaatcagggacatggctgatggctgcggatgctggaaccttggcccccaaactctggggccgatcagctgctgtttctcctgcggcagggcagtcgctgctggctctgggaagagagtgagggacagaggaaacgtttatcctggagtgcagaaagaatggttctctcaaaataaccagtggcctggccgacctgctctggccctggattccccatccatctcattgtctaaatatttagaaggcggagaagttcccagaggcttctgtacagtcaggtctgctctggtctgggtgctggctccaatctgcgtccacttaggaggcccaactgcccaccccaagtccccaggggatggccctccccctctaccaagccactccaagagccagcccctttctgctccacaaaaaccacagttattggaaaagctccctgccttcccttgccgctggtcccccaccaggcttgggagccctggcatcccaaaggggcaacgggaggaaggggaggctgctgcattgtgggtgatgacgtaggacatgtgcttggtacaaaaagggcctgagacattccacctagcttgactggctgcaagatgagaactgggggggtgcaggtggtggggagacagatggagaagctggcagatgaagggtgggggctgcggatcccagggactgccccagaacacaaacctaagtcctgtgcctgtccccagggtcctgaataaataaaagcctccttgcagagcctg

SEQ ID NO: 23972 - DNA, 1998 bp, Homo sapiens
  source 1..1998: mol_type = unassigned DNA
gccagccccgccagccccgccagccccgcgatggcttgggccgcgctcctcggcctcctggccgcactgttgctgctgctgctactgagccgccgccgcacgcggcgacctggtgagcctcccctggacctgggcagcatcccctggttggggtatgccttggactttggaaaagatgctgccagcttcctcacgaggatgaaggagaagcacggtgacatctttactatactggttgggggcaggtatgtcaccgttctcctggacccacactcctacgacgcggtggtgtgggagcctcgcaccaggctcgacttccatgcctatgccatcttcctcatggagaggatttttgatgtgcagcttccacattacagccccagtgatgaaaaggccaggatgaaactgactcttctccacagagagctccaggcactcacagaagccatgtataccaacctccatgcagtgctgttgggcgatgctacagaagcaggcagtggctggcacgagatgggtctcctcgacttctcctacagcttcctgctcagagccggctacctgactctttacggaattgaggcgctgccacgcacccatgaaagccaggcccaggaccgcgtccactcagctgatgtcttccacacctttcgccagctcgaccggctgctccccaaactggcccgtggctccctgtcagtgggggacaaggaccacatgtgcagtgtcaaaagtcgcctgtggaagctgctatccccagccaggctggccaggcgggcccaccggagcaaatggctggagagttacctgctgcacctggaggagatgggtgtgtcagaggagatgcaggcacgggccctggtgctgcagctgtgggccacacaggggaatatgggtcccgctgccttctggctcctgctcttccttctcaagaatcctgaagccctggctgctgtccgcggagagctcgagagtatcctttggcaagcggagcagcctgtctcgcagacgaccactctcccacagaaggttctagacagcacacctgtgcttgatagcgtgctgagtgagagcctcaggcttacagctgcccccttcatcacccgcgaggttgtggtggacctggccatgcccatggcagacgggcgagaattcaacctgcgacgtggtgaccgcctcctcctcttccccttcctgagcccccagagagacccagaaatctacacagacccagaggtatttaaatacaaccgattcctgaaccctgacggatcagagaagaaagacttttacaaggatgggaaacggctgaagaattacaacatgccctggggggcggggcacaatcactgcctggggaggagttatgcggtcaacagcatcaaacaatttgtgttccttgtgctggtgcacttggacttggagctgatcaacgcagatgtggagatccctgagtttgacctcagcaggtacggcttcggtctgatgcagccggaacacgacgtgcccgtccgctaccgcatccgcccatgacacagggagcagatggatccacgtgctcgcctctgcccagcctgccccagcctgccccagcctcccagctttctgtgtgcacagttggcccgggtgcaggtgctagcattaccacttccctgcttttctcccagaaggctgggtccaggggagggaaaagctaagagggtgaacaaagaaaagacattgaaagctctatggattatccactgcaaagttttctttccaaaatcaggctttgtctgctcccaattcacctcgttactctcacctcgtgatatccacaaatgctattcagataaggcagaactaggagtcttcactgctctgcccccaactcccggaggtgtcaccttcctagttcttatgagctagcatggcccgggccttatccagtcaaagcggatgctggccacagaaaggccactcaggatgtcctttgtgtccattgatgtcattcagcag

SEQ ID NO: 23973 - DNA, 2506 bp, Homo sapiens
  source 1..2506: mol_type = unassigned DNA
gaccttaaatatatcgaggtggctaattgatgtataataatttacaaaattattcttctatgctacagagctacaattcaatttacagtagtaaatatgagggccttcttaaggaaccagaaatatgaggatatgcacaatattattcacattttacagatcagaaaattgaggcacagattaagtaacttcccaaggctaccaggcattctagctccagaaactgtgctcttaccattctgctacaaggtatttcgaaaaaaagaaaaagtaaaaagaagtcaaaaggcaacagagttcattgattattccatagaacagtcacaccatgcaattctcacacccttgcagacacacttgaccatgaaaggttcctcaatgaaatgttcctcattatcttcagaagccatattattcacattgactttgcagttaactcagaccctaggtctggaatgctgtcttctctacttatccaaaactatacatccacagatcatataaactctcagccctgctgcaaagcctttccagaaaaataaaaatggttgaaaaggcaattctgctaccaatgactgtttaagcccagccaagtaactgaaccattccaacttcaatttacttatgaaaagaatttgatgatgtaggaggttatttcaattctaaaatacaaacccatgttgatctttctcaatcttgaactcatagattattatctattatctcaatttagtttgttatttatcctagtgggccattaaaaactaccacatgtgtttctgtctctccattagtcaataactaaactaacgagcaattagtaagccatgtgccagatgctccgctaggcaccagagggataaaaacaatacttatagtataccactaattttcgcttagtaactagtgaaatgttcaagtcatgcctgagtcaagagttgaggagacattacaatgtgtaatggaaaccaaggaaagtgaaactttggataagtggggactagtgtatttatatatttaattgatttctgactctatcattggcctccaaacacagattgtgtttttctttggttttgttttcttcactatgggatcttctgtgcccagcacagtgcctgacacatagaaaacaatcaaatatttgctgaataaatgattaaaaaatcagagaactttcccattctgtttggatctatagaacatccagagtaagtgatgagggcctctgcatttatatgcgcttaaattaagattatgtgagaaaagtttaaagacacttagtagagtgattttgaaatatagtaaacacttggaaatggtggtgctttaaaaagatattaatagataatatgaaaatctccatctcaaaaataatgcataaactatttaaaggaaaatcacatctccaggctttcaatgtttgttcattactttttcatatatttttaccatctgctgaaggcagtcatatcaaagggtaaagaaagatgggaggaaaactcagtaagaattatattagtctgtttgcaaagtagaaaaagattctcatcactcaaccttatgagcaggaagagggaaggctgtttgagaaccatttacttagcagaaccacatattttagacacttccctgcattaactgcacaaacaatatgtttgcaaacttgttagatcaacctccaacaacgacacattcaggagttaaatatttttcatcaaacattggatttttccttaacgctagagattgctacaaatcttctgaagggtctcaatggcttcaggctaagaagagatttctccctgttataagcagcaagacaaattagccatttcactctcaaacttcactaatgatcacattctttccaaaaggaactctagaagaccaaatgccccgagttaagaacatcaaaactaaccatctgaagaaacttcccaagtgtaagactctgccattaaaacattaccgagaggggactcaaacagtctttcttcctttgtcgtgtttcttgctcccagaccaaggcactgacgacagtactgatacataatttaaaagcacactcccttccactttgtaataccagaactctaattggacaccctgaagcttaggactaccagccatacaaatagtaaactctgtccacgattcactcatctgtgtattttctatagatgtttactaggcgtttgttatataaaaataccccggccaggcacggtggctcacgcctgtaatcccagcactttgggaggtgggtggatcacctgaggtcgggagttcgagaccagcctgaccagcatggtggaacccccatctctactaaaaacacaaaaaattagccgggcgtggtggcacatgcctgtaatcccagctactcaggaggctgaggcggagaattgcttgaacccggaaggtggaggttgcggtgagctgagattgcactattgcactccagcctgggcaacaggagtaaaactcccccccacccaaaaaa

SEQ ID NO: 23974 - DNA, 1020 bp, Homo sapiens
  source 1..1020: mol_type = unassigned DNA
atttgaggccatataaagtcacctgaggccctctccaccacagcccaccagtgaccacgaaggctgtgctgcttgccctgttgatggcaggcttggccctgcagccaggcactgccctgctgtgctactcctgcaaagcccaggtgagcaacgaggactgcctgcaggtggagaactgcacccagctgggggagcagtgctggaccgcgcgcatccgcgcagttggcctcctgaccgtcatcagcaaaggctgcagcttgaactgcgtggatgactcacaggactactacgtgggcaagaagaacatcacgtgctgtgacaccgacttgtgcaacgccagcggggcccatgccctgcagccggctgctgccatccttgcgctgctccctgcactcggcctgctgctctggggacccggccagctctaggctctggggggccccgctgcagcccacactgggtgtggtgccccaggcctctgtgccactcctcacacacccggcccagtgggagcctgtcctggttcctgaggcacatcctaacgcaagtctgaccatgtatgtctgcgcccctgtcccccaccctgaccctcccatggccctctccaggactcccacccggcagatcggctctattgacacagatccgcctgcagatggcccctccaaccctctctgctgctgtttccatggcccagcattctccacccttaaccctgtgctcaggcacctcttcccccaggaagccttccctgcccaccccatctatgacttgagccaggtctggtccgtggtgtcccccgcacccagcaggggacaggcactcaggagggcccggtaaaggctgagatgaagtggactgagtagaactggaggacaggagtcgacgtgagttcctgggagtctccagagatggggcctggaggcctggaggaaggggccaggcctcacattcgtggggctccctgaatggcagcctcagcacagcgtaggcccttaataaacacctgttggataagcc

SEQ ID NO: 23975 - DNA, 4572 bp, Homo sapiens
  source 1..4572: mol_type = unassigned DNA
ccagcctgagccacatccctgggcttgacttctccagaacaagcctcctggtctttctgggagagctctggcagcatcactgtgcctgtgcagggagagcgggaacccacttcctgcaccggctttctctgagttcttcaggatgaattcgctctggtctagcggagctggagtttgttcagatcatcatcatcgtggtggtgatgatggtgatggtggtggtgatcacgtgcctgctgagccactacaagctgtctgcacggtccttcatcagccggcacagccaggggcggaggagagaagatgccctgtcctcagaaggatgcctgtggccctcggagagcacagtgtcaggcaacggaatcccagagccgcaggtctacgccccgcctcggcccaccgaccgcctggccgtgccgcccttcgcccagcgggagcgcttccaccgcttccagcccacctatccgtacctgcagcacgagatcgacctgccacccaccatctcgctgtcagacggggaggagcccccaccctaccagggcccctgcaccctccagcttcgggaccccgagcagcagctggaactgaaccgggagtcggtgcgcgcacccccaaacagaaccatcttcgacagtgacctgatggatagtgccaggctgggcggcccctgcccccccagcagtaactcgggcatcagcgccacgtgctacggcagcggcgggcgcatggaggggccgccgcccacctacagcgaggtcatcggccactacccggggtcctccttccagcaccagcagagcagtgggccgccctccttgctggaggggacccggctccaccacacacacatcgcgcccctagagagcgcagccatctggagcaaagagaaggataaacagaaaggacaccctctctagggtccccaggggggccgggctggggctgcgtaggtgaaaaggcagaacactccgcgcttcttagaagaggagtgagaggaaggcggggggcgcagcaacgcatcgtgtggccctcccctcccacctccctgtgtataaatatttacatgtgatgtctggtctgaatgcacaagctaagagagcttgcaaaaaaaaaaagaaaaaagaaaaaaaaaaaccacgtttctttgttgagctgtgtcttgaaggcaaaagaaaaaaaatttctacagtagtctttcttgtttctagttgagctgcgtgcgtgaatgcttattttcttttgtttatgataatttcacttaactttaaagacatatttgcacaaaacctttgtttaaagatctgcaatattatatatataaatatatataagataagagaaactgtatgtgcgagggcaggagtatttttgtattagaagaggcctattaaaaaaaaaagttgttttctgaactagaagaggaaaaaaatggcaatttttgagtgccaagtcagaaagtgtgtattaccttgtaaagaaaaaaattacaaagcaggggtttagagttatttatataaatgttgagattttgcactattttttaatataaatatgtcagtgcttgcttgatggaaacttctcttgtgtctgttgagactttaagggagaaatgtcggaatttcagagtcgcctgacggcagagggtgagcccccgtggagtctgcagagaggccttggccaggagcggcgggctttcccgaggggccactgtccctgcagagtggatgcttctgcctagtgacaggttatcaccacgttatatattccctaccgaaggagacaccttttcccccctgacccagaacagcctttaaatcacaagcaaaataggaaagttaaccacggaggcaccgagttccaggtagtggttttgcctttcccaaaaatgaaaataaactgttaccgaaggaattagtttttcctcttcttttttccaactgtgaaggtccccgtggggtggagcatggtgcccctcacaagccgcagcggctggtgcccgggctaccagggacatgccagagggctcgatgacttgtctctgcagggcgctttggtggttgttcagctggctaaaggttcaccggtgaaggcaggtgcggtaactgccgcactggaccctaggaagccccaggtattcgcaatctgacctcctcctgtctgtttcccttcacggatcaattctcacttaagaggccaataaacaacccaacatgaaaaggtgacaagcctgggtttctcccaggataggtgaaagggttaaaatgagtaaagcagttgagcaaacaccaacccgagcttcgggcgcagaattcttcaccttctcttcccctttccatctcctttccccgcggaaacaacgcttcccttctggtgtgtctgttgatctgtgttttcatttacatctctcttagactccgctcttgttctccaggttttcaccagatagatttggggttggcgggacctgctggtgacgtgcaggtgaaggacaggaaggggcatgtgagcgtaaatagaggtgaccagaggagagcatgaggggtggggctttgggacccaccggggccagtggctggagcttgacgtctttcctccccatgggggtgggagggcccccagctggaagagcagactcccagctgctaccccctcccttcccatgggagtggctttccattttgggcagaatgctgactagtagactaacataaaagatataaaaggcaataactattgtttgtgagcaacttttttataacttccaaaacaaaaacctgagcacagttttgaagttctagccactcgagctcatgcatgtgaaacgtgtgctttacgaaggtggcagctgacagacgtgggctctgcatgccgccagcctagtagaaagttctcgttcattggcaacagcagaacctgcctctccgtgaagtcgtcagcctaaaatttgtttctctcttgaagaggattctttgaaaaggtcctgcagagaaatcagtacaggttatcccgaaaggtacaaggacgcacttgtaaagatgattaaaacgtatctttcctttatgtgacgcgtctctagtgccttactgaagaagcagtgacactcccgtcgctcggtgaggacgttcccggacagtgcctcactcacctgggactggtatcccctcccagggtccaccaagggctcctgcttttcagacaccccatcatcctcgcgcgtcctcaccctgtctctaccagggaggtgcctagcttggtgaggttactcctgctcctccaacctttttttgccaaggtttgtacacgactcccatctaggctgaaaacctagaagtggaccttgtgtgtgtgcatggtgtcagcccaaagccaggctgagacagtcctcatatcctcttgagccaaactgtttgggtctcgttgcttcatggtatggtctggatttgtgggaatggctttgcgtgagaaaggggaggagagtggttgctgccctcagccggcttgaggacagagcctgtccctctcatgacaactcagtgttgaagcccagtgtcctcagcttcatgtccagtggatggcagaagttcatggggtagtggcctctcaaaggctgggcgcatcccaagacagccagcaggttgtctctggaaacgaccagagttaagctctcggcttctctgctgagggtgcaccctttcctctagatggtagttgtcacgttatctttgaaaactcttggactgctcctgaggaggccctcttttccagtaggaagttagatgggggttctcagaagtggctgattggaaggggacaagcttcgtttcaggggtctgccgttccatcctggttcagagaaggccgagcgtggctttctctagccttgtcactgtctccctgcctgtcaatcaccacctttcctccagaggaggaaaattatctcccctgcaaagcccggttctacacagatttcacaaattgtgctaagaaccgtccgtgttctcagaaagcccagtgtttttgcaaagaatgaaaagggaccccatatgtagcaaaaatcagggctgggggagagccgggttcattccctgtcctcattggtcgtccctatgaattgtacgtttcagagaaattttttttcctatgtgcaacacgaagcttccagaaccataaaatatcccgtcgataaggaaagaaaatgtcgttgttgttgtttttctggaaactgcttgaaatcttgctgtactatagagctcagaaggacacagcccgtcctcccctgcctgcctgattccatggctgttgtgctgattccaatgctttcacgttggttcctggcgtgggaactgctctcctttgcagccccatttcccaagctctgttcaagttaaacttatgtaagctttccgtggcatgcggggcgcgcacccacgtccccgctgcgtaagactctgtatttggatgccaatccacaggcctgaagaaactgcttgttgtgtatcagtaatcattagtggcaatgatgacattctgaaaagctgcaatacttatacaataaattttacaattctttgg

SEQ ID NO: 23976 - DNA, 4845 bp, Homo sapiens
  source 1..4845: mol_type = unassigned DNA
ggaaagctagcggcagaggctcagccccggcggcagcgcgcgccccgctgccagcccattttccggacgccacccgcgggcactgccgacgcccccggggctgccgaggggaggccgggggggcgcagcggagcgcggtcccgcgcactgagccccgcggcgccccgggaacttggcggcgacccgagcccggcgagccggggcgcgcctcccccgccgcgcgcctcctgcatgcggggccccagctccgggcgccggccggagccccccccggccgcccccgagccccccgcgccccgcgccgcgccgccgcgccgtccatgcaccgcttgatgggggtcaacagcaccgccgccgccgccgccgggcagcccaatgtctcctgcacgtgcaactgcaaacgctctttgttccagagcatggagatcacggagctggagtttgttcagatcatcatcatcgtggtggtgatgatggtgatggtggtggtgatcacgtgcctgctgagccactacaagctgtctgcacggtccttcatcagccggcacagccaggggcggaggagagaagatgccctgtcctcagaaggatgcctgtggccctcggagagcacagtgtcaggcaacggaatcccagagccgcaggtctacgccccgcctcggcccaccgaccgcctggccgtgccgcccttcgcccagcgggagcgcttccaccgcttccagcccacctatccgtacctgcagcacgagatcgacctgccacccaccatctcgctgtcagacggggaggagcccccaccctaccagggcccctgcaccctccagcttcgggaccccgagcagcagctggaactgaaccgggagtcggtgcgcgcacccccaaacagaaccatcttcgacagtgacctgatggatagtgccaggctgggcggcccctgcccccccagcagtaactcgggcatcagcgccacgtgctacggcagcggcgggcgcatggaggggccgccgcccacctacagcgaggtcatcggccactacccggggtcctccttccagcaccagcagagcagtgggccgccctccttgctggaggggacccggctccaccacacacacatcgcgcccctagagagcgcagccatctggagcaaagagaaggataaacagaaaggacaccctctctagggtccccaggggggccgggctggggctgcgtaggtgaaaaggcagaacactccgcgcttcttagaagaggagtgagaggaaggcggggggcgcagcaacgcatcgtgtggccctcccctcccacctccctgtgtataaatatttacatgtgatgtctggtctgaatgcacaagctaagagagcttgcaaaaaaaaaaagaaaaaagaaaaaaaaaaaccacgtttctttgttgagctgtgtcttgaaggcaaaagaaaaaaaatttctacagtagtctttcttgtttctagttgagctgcgtgcgtgaatgcttattttcttttgtttatgataatttcacttaactttaaagacatatttgcacaaaacctttgtttaaagatctgcaatattatatatataaatatatataagataagagaaactgtatgtgcgagggcaggagtatttttgtattagaagaggcctattaaaaaaaaaagttgttttctgaactagaagaggaaaaaaatggcaatttttgagtgccaagtcagaaagtgtgtattaccttgtaaagaaaaaaattacaaagcaggggtttagagttatttatataaatgttgagattttgcactattttttaatataaatatgtcagtgcttgcttgatggaaacttctcttgtgtctgttgagactttaagggagaaatgtcggaatttcagagtcgcctgacggcagagggtgagcccccgtggagtctgcagagaggccttggccaggagcggcgggctttcccgaggggccactgtccctgcagagtggatgcttctgcctagtgacaggttatcaccacgttatatattccctaccgaaggagacaccttttcccccctgacccagaacagcctttaaatcacaagcaaaataggaaagttaaccacggaggcaccgagttccaggtagtggttttgcctttcccaaaaatgaaaataaactgttaccgaaggaattagtttttcctcttcttttttccaactgtgaaggtccccgtggggtggagcatggtgcccctcacaagccgcagcggctggtgcccgggctaccagggacatgccagagggctcgatgacttgtctctgcagggcgctttggtggttgttcagctggctaaaggttcaccggtgaaggcaggtgcggtaactgccgcactggaccctaggaagccccaggtattcgcaatctgacctcctcctgtctgtttcccttcacggatcaattctcacttaagaggccaataaacaacccaacatgaaaaggtgacaagcctgggtttctcccaggataggtgaaagggttaaaatgagtaaagcagttgagcaaacaccaacccgagcttcgggcgcagaattcttcaccttctcttcccctttccatctcctttccccgcggaaacaacgcttcccttctggtgtgtctgttgatctgtgttttcatttacatctctcttagactccgctcttgttctccaggttttcaccagatagatttggggttggcgggacctgctggtgacgtgcaggtgaaggacaggaaggggcatgtgagcgtaaatagaggtgaccagaggagagcatgaggggtggggctttgggacccaccggggccagtggctggagcttgacgtctttcctccccatgggggtgggagggcccccagctggaagagcagactcccagctgctaccccctcccttcccatgggagtggctttccattttgggcagaatgctgactagtagactaacataaaagatataaaaggcaataactattgtttgtgagcaacttttttataacttccaaaacaaaaacctgagcacagttttgaagttctagccactcgagctcatgcatgtgaaacgtgtgctttacgaaggtggcagctgacagacgtgggctctgcatgccgccagcctagtagaaagttctcgttcattggcaacagcagaacctgcctctccgtgaagtcgtcagcctaaaatttgtttctctcttgaagaggattctttgaaaaggtcctgcagagaaatcagtacaggttatcccgaaaggtacaaggacgcacttgtaaagatgattaaaacgtatctttcctttatgtgacgcgtctctagtgccttactgaagaagcagtgacactcccgtcgctcggtgaggacgttcccggacagtgcctcactcacctgggactggtatcccctcccagggtccaccaagggctcctgcttttcagacaccccatcatcctcgcgcgtcctcaccctgtctctaccagggaggtgcctagcttggtgaggttactcctgctcctccaacctttttttgccaaggtttgtacacgactcccatctaggctgaaaacctagaagtggaccttgtgtgtgtgcatggtgtcagcccaaagccaggctgagacagtcctcatatcctcttgagccaaactgtttgggtctcgttgcttcatggtatggtctggatttgtgggaatggctttgcgtgagaaaggggaggagagtggttgctgccctcagccggcttgaggacagagcctgtccctctcatgacaactcagtgttgaagcccagtgtcctcagcttcatgtccagtggatggcagaagttcatggggtagtggcctctcaaaggctgggcgcatcccaagacagccagcaggttgtctctggaaacgaccagagttaagctctcggcttctctgctgagggtgcaccctttcctctagatggtagttgtcacgttatctttgaaaactcttggactgctcctgaggaggccctcttttccagtaggaagttagatgggggttctcagaagtggctgattggaaggggacaagcttcgtttcaggggtctgccgttccatcctggttcagagaaggccgagcgtggctttctctagccttgtcactgtctccctgcctgtcaatcaccacctttcctccagaggaggaaaattatctcccctgcaaagcccggttctacacagatttcacaaattgtgctaagaaccgtccgtgttctcagaaagcccagtgtttttgcaaagaatgaaaagggaccccatatgtagcaaaaatcagggctgggggagagccgggttcattccctgtcctcattggtcgtccctatgaattgtacgtttcagagaaattttttttcctatgtgcaacacgaagcttccagaaccataaaatatcccgtcgataaggaaagaaaatgtcgttgttgttgtttttctggaaactgcttgaaatcttgctgtactatagagctcagaaggacacagcccgtcctcccctgcctgcctgattccatggctgttgtgctgattccaatgctttcacgttggttcctggcgtgggaactgctctcctttgcagccccatttcccaagctctgttcaagttaaacttatgtaagctttccgtggcatgcggggcgcgcacccacgtccccgctgcgtaagactctgtatttggatgccaatccacaggcctgaagaaactgcttgttgtgtatcagtaatcattagtggcaatgatgacattctgaaaagctgcaatacttatacaataaattttacaattctttggaatgag

SEQ ID NO: 23977 - DNA, 4546 bp, Homo sapiens
  source 1..4546: mol_type = unassigned DNA
acgcgagttcccgtctttcctggtcgtcctccttgggttcgggtgaaagcgcttgggggttcagtgggccatgatccccgagctgctggagaactgaaggcggacagtctcctgcgaaaccaggcaatggcggagctggagtttgttcagatcatcatcatcgtggtggtgatgatggtgatggtggtggtgatcacgtgcctgctgagccactacaagctgtctgcacggtccttcatcagccggcacagccaggggcggaggagagaagatgccctgtcctcagaaggatgcctgtggccctcggagagcacagtgtcaggcaacggaatcccagagccgcaggtctacgccccgcctcggcccaccgaccgcctggccgtgccgcccttcgcccagcgggagcgcttccaccgcttccagcccacctatccgtacctgcagcacgagatcgacctgccacccaccatctcgctgtcagacggggaggagcccccaccctaccagggcccctgcaccctccagcttcgggaccccgagcagcagctggaactgaaccgggagtcggtgcgcgcacccccaaacagaaccatcttcgacagtgacctgatggatagtgccaggctgggcggcccctgcccccccagcagtaactcgggcatcagcgccacgtgctacggcagcggcgggcgcatggaggggccgccgcccacctacagcgaggtcatcggccactacccggggtcctccttccagcaccagcagagcagtgggccgccctccttgctggaggggacccggctccaccacacacacatcgcgcccctagagagcgcagccatctggagcaaagagaaggataaacagaaaggacaccctctctagggtccccaggggggccgggctggggctgcgtaggtgaaaaggcagaacactccgcgcttcttagaagaggagtgagaggaaggcggggggcgcagcaacgcatcgtgtggccctcccctcccacctccctgtgtataaatatttacatgtgatgtctggtctgaatgcacaagctaagagagcttgcaaaaaaaaaaagaaaaaagaaaaaaaaaaaccacgtttctttgttgagctgtgtcttgaaggcaaaagaaaaaaaatttctacagtagtctttcttgtttctagttgagctgcgtgcgtgaatgcttattttcttttgtttatgataatttcacttaactttaaagacatatttgcacaaaacctttgtttaaagatctgcaatattatatatataaatatatataagataagagaaactgtatgtgcgagggcaggagtatttttgtattagaagaggcctattaaaaaaaaaagttgttttctgaactagaagaggaaaaaaatggcaatttttgagtgccaagtcagaaagtgtgtattaccttgtaaagaaaaaaattacaaagcaggggtttagagttatttatataaatgttgagattttgcactattttttaatataaatatgtcagtgcttgcttgatggaaacttctcttgtgtctgttgagactttaagggagaaatgtcggaatttcagagtcgcctgacggcagagggtgagcccccgtggagtctgcagagaggccttggccaggagcggcgggctttcccgaggggccactgtccctgcagagtggatgcttctgcctagtgacaggttatcaccacgttatatattccctaccgaaggagacaccttttcccccctgacccagaacagcctttaaatcacaagcaaaataggaaagttaaccacggaggcaccgagttccaggtagtggttttgcctttcccaaaaatgaaaataaactgttaccgaaggaattagtttttcctcttcttttttccaactgtgaaggtccccgtggggtggagcatggtgcccctcacaagccgcagcggctggtgcccgggctaccagggacatgccagagggctcgatgacttgtctctgcagggcgctttggtggttgttcagctggctaaaggttcaccggtgaaggcaggtgcggtaactgccgcactggaccctaggaagccccaggtattcgcaatctgacctcctcctgtctgtttcccttcacggatcaattctcacttaagaggccaataaacaacccaacatgaaaaggtgacaagcctgggtttctcccaggataggtgaaagggttaaaatgagtaaagcagttgagcaaacaccaacccgagcttcgggcgcagaattcttcaccttctcttcccctttccatctcctttccccgcggaaacaacgcttcccttctggtgtgtctgttgatctgtgttttcatttacatctctcttagactccgctcttgttctccaggttttcaccagatagatttggggttggcgggacctgctggtgacgtgcaggtgaaggacaggaaggggcatgtgagcgtaaatagaggtgaccagaggagagcatgaggggtggggctttgggacccaccggggccagtggctggagcttgacgtctttcctccccatgggggtgggagggcccccagctggaagagcagactcccagctgctaccccctcccttcccatgggagtggctttccattttgggcagaatgctgactagtagactaacataaaagatataaaaggcaataactattgtttgtgagcaacttttttataacttccaaaacaaaaacctgagcacagttttgaagttctagccactcgagctcatgcatgtgaaacgtgtgctttacgaaggtggcagctgacagacgtgggctctgcatgccgccagcctagtagaaagttctcgttcattggcaacagcagaacctgcctctccgtgaagtcgtcagcctaaaatttgtttctctcttgaagaggattctttgaaaaggtcctgcagagaaatcagtacaggttatcccgaaaggtacaaggacgcacttgtaaagatgattaaaacgtatctttcctttatgtgacgcgtctctagtgccttactgaagaagcagtgacactcccgtcgctcggtgaggacgttcccggacagtgcctcactcacctgggactggtatcccctcccagggtccaccaagggctcctgcttttcagacaccccatcatcctcgcgcgtcctcaccctgtctctaccagggaggtgcctagcttggtgaggttactcctgctcctccaacctttttttgccaaggtttgtacacgactcccatctaggctgaaaacctagaagtggaccttgtgtgtgtgcatggtgtcagcccaaagccaggctgagacagtcctcatatcctcttgagccaaactgtttgggtctcgttgcttcatggtatggtctggatttgtgggaatggctttgcgtgagaaaggggaggagagtggttgctgccctcagccggcttgaggacagagcctgtccctctcatgacaactcagtgttgaagcccagtgtcctcagcttcatgtccagtggatggcagaagttcatggggtagtggcctctcaaaggctgggcgcatcccaagacagccagcaggttgtctctggaaacgaccagagttaagctctcggcttctctgctgagggtgcaccctttcctctagatggtagttgtcacgttatctttgaaaactcttggactgctcctgaggaggccctcttttccagtaggaagttagatgggggttctcagaagtggctgattggaaggggacaagcttcgtttcaggggtctgccgttccatcctggttcagagaaggccgagcgtggctttctctagccttgtcactgtctccctgcctgtcaatcaccacctttcctccagaggaggaaaattatctcccctgcaaagcccggttctacacagatttcacaaattgtgctaagaaccgtccgtgttctcagaaagcccagtgtttttgcaaagaatgaaaagggaccccatatgtagcaaaaatcagggctgggggagagccgggttcattccctgtcctcattggtcgtccctatgaattgtacgtttcagagaaattttttttcctatgtgcaacacgaagcttccagaaccataaaatatcccgtcgataaggaaagaaaatgtcgttgttgttgtttttctggaaactgcttgaaatcttgctgtactatagagctcagaaggacacagcccgtcctcccctgcctgcctgattccatggctgttgtgctgattccaatgctttcacgttggttcctggcgtgggaactgctctcctttgcagccccatttcccaagctctgttcaagttaaacttatgtaagctttccgtggcatgcggggcgcgcacccacgtccccgctgcgtaagactctgtatttggatgccaatccacaggcctgaagaaactgcttgttgtgtatcagtaatcattagtggcaatgatgacattctgaaaagctgcaatacttatacaataaattttacaattctttggaatgag

SEQ ID NO: 23978 - DNA, 800 bp, Homo sapiens
  source 1..800: mol_type = unassigned DNA
ttggaacgagggctgcgggcaccagtgagcggagctggagtttgttcagatcatcatcatcgtggtggtgatgatggtgatggtggtggtgatcacgtgcctgctgagccactacaagctgtctgcacggtccttcatcagccggcacagccaggggcggaggagagaagatgccctgtcctcagaaggatgcctgtggccctcggagagcacagtgtcaggcaacggaatcccagagccgcaggtctacgccccgcctcggcccaccgaccgcctggccgtgccgcccttcgcccagcgggagcgcttccaccgcttccagcccacctatccgtacctgcagcacgagatcgacctgccacccaccatctcgctgtcagacggggaggagcccccaccctaccagggcccctgcaccctccagcttcgggaccccgagcagcagctggaactgaaccgggagtcggtgcgcgcacccccaaacagaaccatcttcgacagtgacctgatggatagtgccaggctgggcggcccctgcccccccagcagtaactcgggcatcagcgccacgtgctacggcagcggcgggcgcatggaggggccgccgcccacctacagcgaggtcatcggccactacccggggtcctccttccagcaccagcagagcagtgggccgccctccttgctggaggggacccggctccaccacacacacatcgcgcccctagagagcgcagccatctggagcaaagagaaggataaacagaaaggacaccctctctagggtccccaggggggcc

SEQ ID NO: 23979 - DNA, 4519 bp, Homo sapiens
  source 1..4519: mol_type = unassigned DNA
tggtcgtcctccttgggttcgggtgaaagcgcttgggggttcagtgggccatgatccccgagctgctggagaactgaaggcggacagtctcctgcgaaaccagcggagctggagtttgttcagatcatcatcatcgtggtggtgatgatggtgatggtggtggtgatcacgtgcctgctgagccactacaagctgtctgcacggtccttcatcagccggcacagccaggggcggaggagagaagatgccctgtcctcagaaggatgcctgtggccctcggagagcacagtgtcaggcaacggaatcccagagccgcaggtctacgccccgcctcggcccaccgaccgcctggccgtgccgcccttcgcccagcgggagcgcttccaccgcttccagcccacctatccgtacctgcagcacgagatcgacctgccacccaccatctcgctgtcagacggggaggagcccccaccctaccagggcccctgcaccctccagcttcgggaccccgagcagcagctggaactgaaccgggagtcggtgcgcgcacccccaaacagaaccatcttcgacagtgacctgatggatagtgccaggctgggcggcccctgcccccccagcagtaactcgggcatcagcgccacgtgctacggcagcggcgggcgcatggaggggccgccgcccacctacagcgaggtcatcggccactacccggggtcctccttccagcaccagcagagcagtgggccgccctccttgctggaggggacccggctccaccacacacacatcgcgcccctagagagcgcagccatctggagcaaagagaaggataaacagaaaggacaccctctctagggtccccaggggggccgggctggggctgcgtaggtgaaaaggcagaacactccgcgcttcttagaagaggagtgagaggaaggcggggggcgcagcaacgcatcgtgtggccctcccctcccacctccctgtgtataaatatttacatgtgatgtctggtctgaatgcacaagctaagagagcttgcaaaaaaaaaaagaaaaaagaaaaaaaaaaaccacgtttctttgttgagctgtgtcttgaaggcaaaagaaaaaaaatttctacagtagtctttcttgtttctagttgagctgcgtgcgtgaatgcttattttcttttgtttatgataatttcacttaactttaaagacatatttgcacaaaacctttgtttaaagatctgcaatattatatatataaatatatataagataagagaaactgtatgtgcgagggcaggagtatttttgtattagaagaggcctattaaaaaaaaaagttgttttctgaactagaagaggaaaaaaatggcaatttttgagtgccaagtcagaaagtgtgtattaccttgtaaagaaaaaaattacaaagcaggggtttagagttatttatataaatgttgagattttgcactattttttaatataaatatgtcagtgcttgcttgatggaaacttctcttgtgtctgttgagactttaagggagaaatgtcggaatttcagagtcgcctgacggcagagggtgagcccccgtggagtctgcagagaggccttggccaggagcggcgggctttcccgaggggccactgtccctgcagagtggatgcttctgcctagtgacaggttatcaccacgttatatattccctaccgaaggagacaccttttcccccctgacccagaacagcctttaaatcacaagcaaaataggaaagttaaccacggaggcaccgagttccaggtagtggttttgcctttcccaaaaatgaaaataaactgttaccgaaggaattagtttttcctcttcttttttccaactgtgaaggtccccgtggggtggagcatggtgcccctcacaagccgcagcggctggtgcccgggctaccagggacatgccagagggctcgatgacttgtctctgcagggcgctttggtggttgttcagctggctaaaggttcaccggtgaaggcaggtgcggtaactgccgcactggaccctaggaagccccaggtattcgcaatctgacctcctcctgtctgtttcccttcacggatcaattctcacttaagaggccaataaacaacccaacatgaaaaggtgacaagcctgggtttctcccaggataggtgaaagggttaaaatgagtaaagcagttgagcaaacaccaacccgagcttcgggcgcagaattcttcaccttctcttcccctttccatctcctttccccgcggaaacaacgcttcccttctggtgtgtctgttgatctgtgttttcatttacatctctcttagactccgctcttgttctccaggttttcaccagatagatttggggttggcgggacctgctggtgacgtgcaggtgaaggacaggaaggggcatgtgagcgtaaatagaggtgaccagaggagagcatgaggggtggggctttgggacccaccggggccagtggctggagcttgacgtctttcctccccatgggggtgggagggcccccagctggaagagcagactcccagctgctaccccctcccttcccatgggagtggctttccattttgggcagaatgctgactagtagactaacataaaagatataaaaggcaataactattgtttgtgagcaacttttttataacttccaaaacaaaaacctgagcacagttttgaagttctagccactcgagctcatgcatgtgaaacgtgtgctttacgaaggtggcagctgacagacgtgggctctgcatgccgccagcctagtagaaagttctcgttcattggcaacagcagaacctgcctctccgtgaagtcgtcagcctaaaatttgtttctctcttgaagaggattctttgaaaaggtcctgcagagaaatcagtacaggttatcccgaaaggtacaaggacgcacttgtaaagatgattaaaacgtatctttcctttatgtgacgcgtctctagtgccttactgaagaagcagtgacactcccgtcgctcggtgaggacgttcccggacagtgcctcactcacctgggactggtatcccctcccagggtccaccaagggctcctgcttttcagacaccccatcatcctcgcgcgtcctcaccctgtctctaccagggaggtgcctagcttggtgaggttactcctgctcctccaacctttttttgccaaggtttgtacacgactcccatctaggctgaaaacctagaagtggaccttgtgtgtgtgcatggtgtcagcccaaagccaggctgagacagtcctcatatcctcttgagccaaactgtttgggtctcgttgcttcatggtatggtctggatttgtgggaatggctttgcgtgagaaaggggaggagagtggttgctgccctcagccggcttgaggacagagcctgtccctctcatgacaactcagtgttgaagcccagtgtcctcagcttcatgtccagtggatggcagaagttcatggggtagtggcctctcaaaggctgggcgcatcccaagacagccagcaggttgtctctggaaacgaccagagttaagctctcggcttctctgctgagggtgcaccctttcctctagatggtagttgtcacgttatctttgaaaactcttggactgctcctgaggaggccctcttttccagtaggaagttagatgggggttctcagaagtggctgattggaaggggacaagcttcgtttcaggggtctgccgttccatcctggttcagagaaggccgagcgtggctttctctagccttgtcactgtctccctgcctgtcaatcaccacctttcctccagaggaggaaaattatctcccctgcaaagcccggttctacacagatttcacaaattgtgctaagaaccgtccgtgttctcagaaagcccagtgtttttgcaaagaatgaaaagggaccccatatgtagcaaaaatcagggctgggggagagccgggttcattccctgtcctcattggtcgtccctatgaattgtacgtttcagagaaattttttttcctatgtgcaacacgaagcttccagaaccataaaatatcccgtcgataaggaaagaaaatgtcgttgttgttgtttttctggaaactgcttgaaatcttgctgtactatagagctcagaaggacacagcccgtcctcccctgcctgcctgattccatggctgttgtgctgattccaatgctttcacgttggttcctggcgtgggaactgctctcctttgcagccccatttcccaagctctgttcaagttaaacttatgtaagctttccgtggcatgcggggcgcgcacccacgtccccgctgcgtaagactctgtatttggatgccaatccacaggcctgaagaaactgcttgttgtgtatcagtaatcattagtggcaatgatgacattctgaaaagctgcaatacttatacaataaattttacaattctttggaatgag

SEQ ID NO: 23980 - DNA, 859 bp, Homo sapiens
  source 1..859: mol_type = unassigned DNA
gcgcactgagccccgcggcgccccgggaacttggcggcgacccgagcccggcgagccggggcgcgcctcccccgccgcgcgcctcctgcatgcggggccccagctccgggcgccggccggagccccccccggccgcccccgagccccccgcgccccgcgccgcgccgccgcgccgtccatgcaccgcttgatgggggtcaacagcaccgccgccgccgccgccgggcagcccaatgtctcctgcacgtgcaactgcaaacgctctttgttccagagcatggagatcagttgtcatggattcccagtatgcaagtcgcatcagcatcaggagtggaagagtctctgctggtccttaaggtctccaggaggggccagttccatcactggctttgggagcatgaaagtgacaaatccagccatgaatttgcctgagtgtcagtggttaagaatacaaaaagcggagctggagtttgttcagatcatcatcatcgtggtggtgatgatggtgatggtggtggtgatcacgtgcctgctgagccactacaagctgtctgcacggtccttcatcagccggcacagccaggggcggaggagagaagatgccctgtcctcagaaggatgcctgtggccctcggagagcacagtgtcaggcaacggaatcccagagccgcaggtctacgccccgcctcggcccaccgaccgcctggccgtgccgcccttcgcccagcgggagcgcttccaccgcttccagcccacctatccgtacctgcagcacgagatcgacctgccacccaccatctcgctgtcagacggggaggagcccccaccctaccagggcccctgcaccctccagcttcgg

SEQ ID NO: 23981 - DNA, 831 bp, Homo sapiens
  source 1..831: mol_type = unassigned DNA
ctctccaggcccctgccacctgtttgcacatgaccctctacacccgccatagcaatggagaccccgcctcctgctacagttaattaatccttcttttttgcttcacaataaaaatagcatggctcttctgattgtaaaaagtgatatacactccttatttaacgaaaaattcaaagaatttgataaatgacaggcgaaaagtcaaaatgcctgcaattccagcacatggagcggagctggagtttgttcagatcatcatcatcgtggtggtgatgatggtgatggtggtggtgatcacgtgcctgctgagccactacaagctgtctgcacggtccttcatcagccggcacagccaggggcggaggagagaagatgccctgtcctcagaaggatgcctgtggccctcggagagcacagtgtcaggcaacggaatcccagagccgcaggtctacgccccgcctcggcccaccgaccgcctggccgtgccgcccttcgcccagcgggagcgcttccaccgcttccagcccacctatccgtacctgcagcacgagatcgacctgccacccaccatctcgctgtcagacggggaggagcccccaccctaccagggcccctgcaccctccagcttcgggaccccgagcagcagctggaactgaaccgggagtcggtgcgcgcacccccaaacagaaccatcttcgacagtgacctgatggatagtgccaggctgggcggcccctgcccccccagcagtaactcgggcatcagcgccacgtgctacggcagcggcgggcgcatggaggggccgccgcccacctacagcgaggtcatcg

SEQ ID NO: 23982 - DNA, 424 bp, Homo sapiens
  source 1..424: mol_type = unassigned DNA
gcagagctggcccctgactcacagcccacagagttccacctgctcacaggttggctggctcagccaaggtggtgccctgctctgagcattcaggccaagcccatcctgcaccatggccaggtacagatgctgtcgcagccagagccggagcagatattaccgccagagacaaagaagtcgcagacgaaggaggcggagctgccagacacggaggagagccatgaggtgctgccgccccaggtacagaccgcgatgtagaagacactaattgcacaaaatagcacatccaccaaactcctgcctgagaatgttaccagacttcaagatcctcttgccacatcttgaaaatgccaccatccaataaaaatcaggagcctgctaaggaacaatgccgcctgtcaataaatgttgaaaagtcatccca

SEQ ID NO: 23983 - DNA, 680 bp, Homo sapiens
  source 1..680: mol_type = unassigned DNA
agaccagaccaacagtaacaccaagggcaggtgggcaggcctccgccctcctcccctactccagggcccactgcagcctcagcccaggagccaccagatctcccaacaccatggtccgataccgcgtgaggagcctgagcgaacgctcgcacgaggtgtacaggcagcagttgcatgggcaagagcaaggacaccacggccaagaggagcaagggctgagcccggagcacgtcgaggtctacgagaggacccatggccagtctcactataggcgcagacactgctctcgaaggaggctgcaccggatccacaggcggcagcatcgctcctgcagaaggcgcaaaagacgctcctgcaggcaccggaggaggcatcgcagaggctgcagaaccaggaagagaacatgcagaaggcactaagcttcctgggcccctcacccccagctggaaattaagaaaaagtcgcccgaaacaccaagtgaggccatagcaattcccctacatcaaatgctcaagcccccagctggaagttaagagaaagtcacctgcccaagaaacaccgagtgaggccatagcaactcccctacatcaaatgctcaagccctgagttgccgccgagaagcccacaagatctgagtgaaacgagcaaaagtcacctgcccaataaagcttgacaagaca

SEQ ID NO: 23984 - DNA, 723 bp, Homo sapiens
  source 1..723: mol_type = unassigned DNA
agaccagaccaacagtaacaccaagggcaggtgggcaggcctccgccctcctcccctactccagggcccactgcagcctcagcccaggagccaccagatctcccaacaccatggtccgataccgcgtgaggagcctgagcgaacgctcgcacgaggtgtacaggcagcagttgcatgggcaagagcaaggacaccacggccaagaggagcaagggctgagcccggagcacgtcgaggtctacgagaggacccatggccagtctcactataggcgcagacactgctctcgaaggaggctgcaccggatccacaggcggcagcatcgctcctgcagaaggcgcaaaagacgctcctgcaggcaccggaggaggcatcgcagagagtccctaggtgaccccctcaaccagaactttctttcccaaaaggctgcagaaccaggaagagaacatgcagaaggcactaagcttcctgggcccctcacccccagctggaaattaagaaaaagtcgcccgaaacaccaagtgaggccatagcaattcccctacatcaaatgctcaagcccccagctggaagttaagagaaagtcacctgcccaagaaacaccgagtgaggccatagcaactcccctacatcaaatgctcaagccctgagttgccgccgagaagcccacaagatctgagtgaaacgagcaaaagtcacctgcccaataaagcttgacaagac

SEQ ID NO: 23985 - DNA, 873 bp, Homo sapiens
  source 1..873: mol_type = unassigned DNA
tgctggcgctgctgctggctcgggctggactcaggaagccggagtcgcaggaggcggcgccgttatcaggaccatgcggccgacgggtcatcacgtcgcgcatcgtgggtggagaggacgccgaactcgggcgttggccgtggcaggggagcctgcgcctgtgggattcccacgtatgcggagtgagcctgctcagccaccgctgggcactcacggcggcgcactgctttgaaactgaccttagtgatccctccgggtggatggtccagtttggccagctgacttccatgccatccttctggagcctgcaggcctactacacccgttacttcgtatcgaatatctatctgagccctcgctacctggggaattcaccctatgacattgccttggtgaagctgtctgcacctgtcacctacactaaacacatccagcccatctgtctccaggcctccacatttgagtttgagaaccggacagactgctgggtgactggctgggggtacatcaaagaggatgagggaagttcaggtcgccatcataaacaactctatgtgcaaccacctcttcctcaagtacagtttccgcaaggacatctttggagacatggtttgtgctggcaatgcccaaggcgggaaggatgcctgcttcggtgactcaggtggacccttggcctgtaacaagaatggactgtggtatcagattggagtcgtgagctggggagtgggctgtggtcggcccaatcggcccggtgtctacaccaatatcagccaccactttgagtggatccagaagctgatggcccagagtggcatgtcccagccagacccctcctggccgctactctttttccctcttctctgggctctccca

SEQ ID NO: 23986 - DNA, 800 bp, Homo sapiens
  source 1..800: mol_type = unassigned DNA
accaccatgaatccactcctgatccttacctttgtggcagctgctcttgctgccccctttgatgatgatgacaagatcgttgggggctacaactgtgaggagaattctgtcccctaccaggtgtccctgaattctggctaccacttctgtggtggctccctcatcaacgaacagtgggtggtatcagcaggccactgctacaagtcccgcatccaggtgagactgggagagcacaacatcgaagtcctggaggggaatgagcagttcatcaatgcagccaagatcatccgccacccccaatacgacaggaagactctgaacaatgacatcatgttaatcaagctctcctcacgtgcagtaatcaacgcccgcgtgtccaccatctctctgcccaccgcccctccagccactggcacgaagtgcctcatctctggctggggcaacactgcgagctctggcgccgactacccagacgagctgcagtgcctggatgctcctgtgctgagccaggctaagtgtgaagcctcctaccctggaaagattaccagcaacatgttctgtgtgggcttccttgagggaggcaaggattcatgtcagggtgattctggtggccctgtggtctgcaatggacagctccaaggagttgtctcctggggtgatggctgtgcccagaagaacaagcctggagtctacaccaaggtctacaactatgtgaaatggattaagaacaccatagctgccaatagctaaagcccccagtatctcttcagtctctataccaataaagtgaccctgttctc

SEQ ID NO: 23987 - DNA, 714 bp, Homo sapiens
  source 1..714: mol_type = unassigned DNA
atgaatccactcctgatccttacctttgtggcagctgctcttgctgccccctttgatgatgatgacaagatcgttgggggctacaactgtgaggagaattctgtcccctaccaggtgtccctgaattctggctaccacttctgtggtggctccctcatcaacgaacagtgggtggtatcagcaggccactgctacaagtcccgcatccaggtgagactgggagagcacaacatcaatgcagccaagatcatccgccacccccaatacgacaggaagactctgaacaatgacatcatgttaatcaagctctcctcacgtgcagtaatcaacgcccgcgtgtccaccatctctctgcccaccgcccctccagccactggcacgaagtgcctcatctctggctggggcaacactgcgagctctggcgccgactacccagacgagctgcagtgcctggatgctcctgtgctgagccaggctaagtgtgaagcctcctaccctggaaagattaccagcaacatgttctgtgtgggcttccttgagggaggcaaggattcatgtcagggtgattctggtggccctgtggtctgcaatggacagctccaaggagttgtctcctggggtgatggctgtgcccagaagaacaagcctggagtctacaccaaggtctacaactatgtgaaatggattaagaacaccatagctgccaatagctaa

SEQ ID NO: 23988 - DNA, 4809 bp, Homo sapiens
  source 1..4809: mol_type = unassigned DNA
gctgcgtccgcgccttctcttttccggtcctctccgccggccggggctcggctgagctccagatttccccacccgcggccgccgccaggggacaggagccgaggcgcggcagggcaccagcggcgggaggcaaggttggggaggcgagggcggtccgcgtgcgggggcgggagggggctgggggattcgagggacgcggcagccccgcccccgccccctcctcttctccgctccaagcccgagaagctggggagcatggaccagaccccgcagcgctggcaccatgacgctcgcccgcttcgtgctagccctgatgttaggggcgctccccgaagtggtcggctttgattctgtcctcaatgattccctccaccacagccaccgccattcgccccctgcgggtccgcactacccctattaccttcccacccagcagcggcccccgaggacgcgtccgccgccgcctctcccgcgcttcccgcgccccccgcgggcgctccctgcccagcgcccgcacgccctccaggccgggcacacgccccggccgcacccctggggctgccccgccggcgagccatgggtcagcgtgacggacttcggcgccccgtgtctgcggtgggcggaggtgccacccttcctggagcggtcgcccccagcgagctgggctcagctgcgaggacagcgccacaacttttgtcggagccccgacggcgcgggcagaccctggtgtttctacggagacgcccgtggcaaggtggactggggctactgcgactgcagacacggatcagtacgacttcgtggcggcaaaaatgagtttgaaggcacagtggaagtatatgcaagtggagtttggggcactgtctgtagcagccactgggatgattctgatgcatcagtcatttgtcaccagctgcagctgggaggaaaaggaatagcaaaacaaaccccgttttctggactgggccttattcccatttattggagcaatgtccgttgccgaggagatgaagaaaatatactgctttgtgaaaaagacatctggcagggtggggtgtgtcctcagaagatggcagctgctgtcacgtgtagcttttcccatggcccaacgttccccatcattcgccttgctggaggcagcagtgtgcatgaaggccgggtggagctctaccatgctggccagtggggaaccgtttgtgatgaccaatgggatgatgccgatgcagaagtgatctgcaggcagctgggcctcagtggcattgccaaagcatggcatcaggcatattttggggaagggtctggcccagttatgttggatgaagtacgctgcactgggaatgagctttcaattgagcagtgtccaaagagctcctggggagagcataactgtggccataaagaagatgctggagtgtcctgtacccctctaacagatggggtcatcagacttgcaggtgggaaaggcagccatgagggtcgcttggaggtatattacagaggccagtggggaactgtctgtgatgatggctggactgagctgaatacatacgtggtttgtcgacaattgggatttaaatatggtaaacaagcatctgccaaccattttgaagaaagcacagggcccatatggttggatgacgtcagctgctcaggaaaggaaaccagatttcttcagtgttccaggcgacagtggggaaggcatgactgcagccaccgcgaagatgttagcattgcctgctaccctggcggcgagggacacaggctctctctgggttttcctgtcagactgatggatggagaaaataagaaagaaggacgagtggaggtttttatcaatggccagtggggaacaatctgtgatgatggatggactgataaggatgcagctgtgatctgtcgtcagcttggctacaagggtcctgccagagcaagaaccatggcttactttggagaaggaaaaggacccatccatgtggataatgtgaagtgcacaggaaatgagaggtccttggctgactgtatcaagcaagatattggaagacacaactgccgccacagtgaagatgcaggagttatttgtgattattttggcaagaaggcctcaggtaacagtaataaagagtccctctcatctgtttgtggcttgagattactgcaccgtcggcagaagcggatcattggtgggaaaaattctttaaggggtggttggccttggcaggtttccctccggctgaagtcatcccatggagatggcaggctcctctgcggggctacgctcctgagtagctgctgggtcctcacagcagcacactgtttcaagaggtatggcaacagcactaggagctatgctgttagggttggagattatcatactctggtaccagaggagtttgaggaagaaattggagttcaacagattgtgattcatcgggagtatcgacccgaccgcagtgattatgacatagccctggttagattacaaggaccagaagagcaatgtgccagattcagcagccatgttttgccagcctgtttaccactctggagagagaggccacagaaaacagcatccaactgttacataacaggatggggtgacacaggacgagcctattcaagaacactacaacaagcagccattcccttacttcctaaaaggttttgtgaagaacgttataagggtcggtttacagggagaatgctttgtgctggaaacctccatgaacacaaacgcgtggacagctgccagggagacagcggaggaccactcatgtgtgaacggcccggagagagctgggtggtgtatggggtgacctcctgggggtatggctgtggagtcaaggattctcctggtgtttataccaaagtctcagcctttgtaccttggataaaaagtgtcaccaaactgtaattcttcatggaaacttcaaagcagcatttaaacaaatggaaaactttgaacccccactattagcactcagcagagatgacaacaaatggcaagatctgtttttgctttgtgttgtggtaaaaaattgtgtaccccctgctgcttttgagaaatttgtgaacattttcagaggcctcagtgtagtggaagtgataatccttaaatgaacattttctaccctaatttcactggagtgacttattctaagcctcatctatcccctacctatttctcaaaatcattctatgctgattttacaaaagatcatttttacatttgaactgagaaccccttttaattgaatcagtggtgtctgaaatcatattaaatacccacatttgacataaatgcggtaccctttactacactcatgagtggcatatttatgcttaggtcttttcaaaagacttgacaagaaatcttcatattctctgtagcctttgtcaagtgaggaaatcagtggttaaagaattccactataaacttttaggcctgaataggagtagtaaagcctcaaggacatctgcctgtcacaatatattctcaaagtgatctgatatttggaaacaagtatccttgttgagtaccaagtgctacagaaaccataagataaaaatactttctacctacagcgtataaactagcaaaatttgaaaggatttctggtaactaaatgccagctggacatacaacctattttatccaacacattaacatatctactatatttgcttttaacaagcacctcatcatagtccacgttccccgaccatgatgtaagagtgccacccactgacacttccctgtaactgacttatacctgcaggttttcccaagcccaacctgatacaatccaatcttaaaatatactagtcaaaatgctttcctggcctacacattgaaaagttctaatacatacagcagttataacatatgccaggcactgcattaggcagctttgcacatcactgacaatttgcaaaaggccagtaaatcttatggtagtagcccttgttttcaaatgggggaaaacaggcttgcctcaaagtgagaccagttggtgaaactgattccaaactccagaaaaaatgctgatttttttccccatggttctcctacctaaatgattggtttccctatggctatttctccaagagttaagggatagctgcttaactatgcacctttacagaacattcttagcagtaatgctcaaatttaaaaggcacactcaagatacttccatgtcatggatccttccccaggtcccagtagtataaatatagggaagaggttagcatgaacttacaaattgttttaagtaatcctcttgaatgccagtcattaaaggactttgcccttctacatcaaattacatccttttcacaaatccccatttctgtaataactggtgcaaacctaaaggtgctttatagttttactactttgcagatttgcaatgctgcatataatgcagaagagcattaaaaacttttgtaaaaactcatgattttgataaacttttaaagtagcgtttatatgtaaatagaactacacatggcacacacacttgcacaagggcttcagaaaaacgtgcaatataggtgagaaaaatgtctattgaaactttctcacaggctgcccttataattaaactagtgttggggcaagcaacatctgtttcaagtagatcagggactagcaaacctaaaaggcagcaagcagcctgcagtttgctcaatccttaagaatacatggttcatacaacatgcttttactatgtcttaagtgtgacttttgaaagatacaagtgttctgtgcatatttgtgtaaataaatacataattttccaccttgta

SEQ ID NO: 23989 - DNA, 2716 bp, Homo sapiens
  source 1..2716: mol_type = unassigned DNA
agagtcccgaacaccatggccgtctggcttgcccagtggctgggccctctgctcttggtttccctctggggactcttggctccagcctcccttcttaggcgcctgggtgagcacattcagcagtttcaggagagctctgcccagggcctgggcctgagcctggggccaggtgctgcagccctcccaaaagtggggtggctggagcaactgctggaccccttcaacgtgtccgacagacgatccttcctacagcgttactgggtgaatgaccaacattgggttggccaggatggacccatattcctgcatctagggggtgagggcagccttgggcctggctcagtgatgagaggccatcccgcagccttggccccagcctggggcgccctggtgataagcctggaacacagattttatggcctgagtatacctgctggaggcctggaaatggcccagctccgcttcttgtccagccgccttgcgctggctgatgtggtctctgcccgcctggcactttcccgcctctttaacatctcctcctccagcccctggatctgcttcggaggctcctatgccggctccttggccgcctgggcccggctgaagttcccccatctcattttcgcgtcggtcgcctcctccgccccggtgcgggccgtgctggatttctccgagtataatgacgtggtatcccgaagcctaatgagcaccgcgatcggcgggtccctggagtgccgggcggcggtgtccgtcgccttcgctgaagtggagcggcggctgcgctcgggtggggcggctcaagcagcattgcggacggagctgagcgcttgcgggcccctgggccgcgctgaaaaccaggcggagctgttgggggcgctgcaggcactggtgggaggtgtagtgcagtatgatgggcagacgggagcgccgctaagcgtgcgacagctctgcggacttctcctcgggggcgggggcaaccgcagccactccacgccctactgcgggcttcgtcgggcggtgcagattgtcttgcacagcctgggccagaagtgtttaagcttttcccgagcagagacagtggcacagctgaggagcacagaacctcaactgtctggtgtgggtgaccggcagtggttgtatcagacatgtaccgagttcggcttctatgtcacctgtgagaatcccagatgtcctttctcccagctcccagcactgccctcccagctagacctatgtgagcaggtgtttgggctctcagccttgtcagtagcccaggctgtggctcagacgaactcctactacggtggccagacccctggggctaacaaagtgctgtttgttaatggggacacagacccctggcatgtgctaagtgtaacacaggctttaggatcctcagaatcaactcttcttatccgcactggctcccactgcttggacatggcacctgagaggccctcagactcccccagcctccgcctagggcgccagaacatcttccagcagctacagacctggctcaagctggcaaaggagagccagattaagggtgaagtctgaatctcataccctttccactccctgcatggtcacctcagtcctggacatacttgttcactgaacaaaagaaagcagcttgttttgaaagaagaaactcccaggaattggaattcagcacctgttccgcacgtaattggcatgtgtctgcaaacatccttattcccaacttaaagtgctttattgcagagagttatggaaatataagtggatgattattctcattgtaaatattggtattttgaatgttaaatgtcaaacaaatgtgacttatgctggtgccctcgccctgctgatcagattctggttcaaattctgccactccagctcctgggttaggggctttgctgtaagtttctttttctggactttagatcctgaacctgtccttgcttctcagtttctctcactgtacccctttccctcagtctcttcctctctctttcccctgtcactatttgtctttctaatctccttctgtttctctgaatatcttcatttctatctctgtgtttctgtctatttctctgtttatctttctgtccttcaatctgtgtttttgtttctggctctccgtcagtgtctttttctctcctctctctcttgctctgccatggctatttccactgctctatttctgactctcatttttggtctctgtgtgtctcctagtcactttctttctcactctgtctctgtctctatttctgtctctcctctgctgtgtcctcaatctctctgtctccctgaggctctatttctgtctctcctctgctgtgtcctcaatctctctgtctccctgaggctctatttctgtctctgatgctcttcttctgtgtctctatttctcttcctgtcacttaatcttttccttctctatctctcttatttagtcttccttccacacccttcactcaccatcttttcccacaatcaaatatcactccctggtacttccagcttccaactctagggattcatgattctggtggagattccttcttccagggcctgggaggatagggctaatcccaagggtgcctgcttaggctatgttagctgtgacaggaacctgccatagatttgcactgttctttcctaaagatcaattattttcagcaataaatacttctcagctttttgtatgtctttgtatgca

SEQ ID NO: 23990 - DNA, 834 bp, Homo sapiens
  source 1..834: mol_type = unassigned DNA
agagtcccgaacaccatggccgtctggcttgcccagtggctgggccctctgctcttggtttccctctggggactcttggctccagcctcccttcttaggcgcctgggtgagcacattcagcagtttcaggagagctctgcccagggcctgggcctgagcctggggccaggtgctgcagccctcccaaaagtggggtggctggagcaactgctggaccccttcaacgtgtccgacagacgatccttcctacagcgttactgggtgaatgaccaacattgggttggccaggatggacccatattcctgcatctagggggtgagggcagccttgggcctggctcagtgatgagaggccatcccgcagccttggccccagcctggggcgccctggtgataagcctggaacacagattttatggcctgagtatacctgctggaggcctggaaatggcccagctccgcttcttgtccagccgccttgcgctggctgatgtggtctctgcccgcctggcactttcccgcctctttaacatctcctcctccagcccctggatctgcttcggaggctcctatgccggctccttggccgcctgggcccggctgaagttcccccatctcattttcgcgtcggtcgcctcctccgccccggtgcgggccgtgctggatttctccgagtataatgacattgtcttgcacagcctgggccagaagtgtttaagcttttcccgagcagagacagtggcacagctgaggagcacagaacctcaactgtctggtgtgggtgaccggcagtggttgtatcagacatgtaccgagttcggcttctatataacc

SEQ ID NO: 23991 - DNA, 1019 bp, Homo sapiens
  source 1..1019: mol_type = unassigned DNA
agagtcccgaacaccatggccgtctggcttgcccagtggctgggccctctgctcttggtttccctctggggactcttggctccagcctcccttcttaggcgcctgggtgagcacattcagcagtttcaggagagctctgcccagggcctgggcctgagcctggggccaggtgctgcagccctcccaaaagtggggtggctggagcaactgctggaccccttcaacgtgtccgacagacgatccttcctacagcgttactgggtgaatgaccaacattgggttggccaggatggacccatattcctgcatctagggggtgagggcagccttgggcctggctcagtgatgagaggccatcccgcagccttggccccagcctggggcgccctggtgataagcctggaacacagattttatggcctgagtatacctgctggaggcctggaaatggcccagctccgcttcttgtccagccgccttgcattgtcttgcacagcctgggccagaagtgtttaagcttttcccgagcagagacagtggcacagctgaggagcacagaacctcaactgtctggtgtgggtgaccggcagtggttgtatcagacatgtaccgagttcggcttctatgtcacctgtgagaatcccagatgtcctttctcccagctcccagcactgccctcccagctagacctatgtgagcaggtgtttgggctctcagccttgtcagtagcccaggctgtggctcagacgaactcctactacggtggccagacccctggggctaacaaagtgctgtttgttaatggggacacagacccctggcatgtgctaagtgtaacacaggctttaggatcctcagaatcaactcttcttatccgcactggctcccactgcttggacatggcacctgagaggccctcagactcccccagcctccgcctagggcgccagaacatcttccagcagctacagacctggctcaagctggcaaaggagagccagattaagggtgaagtctga

SEQ ID NO: 23992 - DNA, 492 bp, Homo sapiens
  source 1..492: mol_type = unassigned DNA
agtgatgagaggccatcccgcagccttggccccagcctggggcgccctggtgataagcctggaacacagattttatggcctgagtatacctgctggaggcctggaaatggcccagctccgcttcttgtccagccgccttgcgctggctgatgtggtctctgcccgcctggcactttcccgcctctttaacatctcctcctccagcccctggatctgcttcggaggctcctatgccggctccttggccgcctgggcccggctgaagttcccccatctcattttcgcgtcggtcgcctcctccgccccggtgcgggccgtgctggatttctccgagtataatgacattgtcttgcacagcctgggccagaagtgtttaagcttttcccgagcagagacagtggcacagctgaggagcacagaacctcaactgtctggtgtgggtgaccggcagtggttgtatcagacatgtaccgagttcggcttctatgtcac

SEQ ID NO: 23993 - DNA, 1101 bp, Homo sapiens
  source 1..1101: mol_type = unassigned DNA
gagaggaggcagagggggcgtcaggccgcgggagaggaggccatgggcgcgcgcggggcgctgctgctggcgctgctgctggctcgggctggactcaggaagccggagtcgcaggaggcggcgccgttatcaggaccatgcggccgacgggtcatcacgtcgcgcatcgtgggtggagaggacgccgaactcgggcgttggccgtggcaggggagcctgcgcctgtgggattcccacgtatgcggagtgagcctgctcagccaccgctgggcactcacggcggcgcactgctttgaaacctatagtgaccttagtgatccctccgggtggatggtccagtttggccagctgacttccatgccatccttctggagcctgcaggcctactacacccgttacttcgtatcgaatatctatctgagccctcgctacctggggaattcaccctatgacattgccttggtgaagctgtctgcacctgtcacctacactaaacacatccagcccatctgtctccaggcctccacatttgagtttgagaaccggacagactgctgggtgactggctgggggtacatcaaagaggatgaggcactgccatctccccacaccctccaggaagttcaggtcgccatcataaacaactctatgtgcaaccacctcttcctcaagtacagtttccgcaaggacatctttggagacatggtttgtgctggcaatgcccaaggcgggaaggatgcctgcttcggtgactcaggtggacccttggcctgtaacaagaatggactgtggtatcagattggagtcgtgagctggggagtgggctgtggtcggcccaatcggcccggtgtctacaccaatatcagccaccactttgagtggatccagaagctgatggcccagagtggcatgtcccagccagacccctcctggccgctactctttttccctcttctctgggctctcccactcctggggccggtctgagcctacctgagcccatgcagcctggggccactgccaagtcaggccctggttctcttctgtcttgtttggtaataaacacattccagttgatgccttgcagggcattcttcaaaa

SEQ ID NO: 23994 - DNA, 1119 bp, Homo sapiens
  source 1..1119: mol_type = unassigned DNA
gctgggagtagagggcagagctcccaccccgccccgcccccagggggcgccccgggcccggcgcgagaggaggcagagggggcgtcaggccgcgggagaggaggccatgggcgcgcgcggggcgctgctgctggcgctgctgctggctcgggctggactcaggaagccggagtcgcaggaggcggcgccgttatcaggaccatgcggccgacgggtcatcacgtcgcgcatcgtgggtggagaggacgccgaactcgggcgttggccgtggcaggggagcctgcgcctgtgggattcccacgtatgcggagtgagcctgctcagccaccgctgggcactcacggcggcgcactgctttgaaacctatagtgaccttagtgatccctccgggtggatggtccagtttggccagctgacttccatgccatccttctggagcctgcaggcctactacacccgttacttcgtatcgaatatctatctgagccctcgctacctggggaattcaccctatgacattgccttggtgaagctgtctgcacctgtcacctacactaaacacatccagcccatctgtctccaggcctccacatttgagtttgagaaccggacagactgctgggtgactggctgggggtacatcaaagaggatgaggcactgccatctccccacaccctccaggaagttcaggtcgccatcataaacaactctatgtgcaaccacctcttcctcaagtacagtttccgcaaggacatctttggagacatgggtgactcaggtggacccttggcctgtaacaagaatggactgtggtatcagattggagtcgtgagctggggagtgggctgtggtcggcccaatcggcccggtgtctacaccaatatcagccaccactttgagtggatccagaagctgatggcccagagtggcatgtcccagccagacccctcctggccgctactctttttccctcttctctgggctctcccactcctggggccggtctgagcctacctgagcccatgcagcctggggccactgccaagtcaggccctggttctcttctgtcttgtttggtaataaacacattccagttgatgccttgcagggcattcttc

SEQ ID NO: 23995 - DNA, 1159 bp, Homo sapiens
  source 1..1159: mol_type = unassigned DNA
gctgggagtagagggcagagctcccaccccgccccgcccccagggggcgccccgggcccggcgcgagaggaggcagagggggcgtcaggccgcgggagaggaggccatgggcgcgcgcggggcgctgctgctggcgctgctgctggctcgggctggactcaggaagccggagtcgcaggaggcggcgccgttatcaggaccatgcggccgacgggtcatcacgtcgcgcatcgtgggtggagaggacgccgaactcgggcgttggccgtggcaggggagcctgcgcctgtgggattcccacgtatgcggagtgagcctgctcagccaccgctgggcactcacggcggcgcactgctttgaaactgaccttagtgatccctccgggtggatggtccagtttggccagctgacttccatgccatccttctggagcctgcaggcctactacacccgttacttcgtatcgaatatctatctgagccctcgctacctggggaattcaccctatgacattgccttggtgaagctgtctgcacctgtcacctacactaaacacatccagcccatctgtctccaggcctccacatttgagtttgagaaccggacagactgctgggtgactggctgggggtacatcaaagaggatgaggcactgccatctccccacaccctccaggaagttcaggtcgccatcataaacaactctatgtgcaaccacctcttcctcaagtacagtttccgcaaggacatctttggagacatggtttgtgctggcaatgcccaaggcgggaaggatgcctgcttcggtgactcaggtggacccttggcctgtaacaagaatggactgtggtatcagattggagtcgtgagctggggagtgggctgtggtcggcccaatcggcccggtgtctacaccaatatcagccaccactttgagtggatccagaagctgatggcccagagtggcatgtcccagccagacccctcctggccgctactctttttccctcttctctgggctctcccactcctggggccggtctgagcctacctgagcccatgcagcctggggccactgccaagtcaggccctggttctcttctgtcttgtttggtaataaacacattccagttgatgccttgcagggcattcttcaaaa

SEQ ID NO: 23996 - DNA, 1386 bp, Homo sapiens
  source 1..1386: mol_type = unassigned DNA
acacaccctgacccgcatcgccctgggtctctcgagcctgctgcctgctcccccgccccaccagccatggtggtttctggagcgcccccagccctgggtgggggctgtctcggcaccttcacctccctgctgctgctggcgtcgacagccatcctcaatgcggccaggatacctgttcccccagcctgtgggaagccccagcagctgaaccgggttgtgggcggcgaggacagcactgacagcgagtggccctggatcgtgagcatccagaagaatgggacccaccactgcgcaggttctctgctcaccagccgctgggtgatcactgctgcccactgtttcaaggacaacctgaacaaaccatacctgttctctgtgctgctgggggcctggcagctggggaaccctggctctcggtcccagaaggtgggtgttgcctgggtggagccccaccctgtgtattcctggaaggaaggtgcctgtgcagacattgccctggtgcgtctcgagcgctccatacagttctcagagcgggtcctgcccatctgcctacctgatgcctctatccacctccctccaaacacccactgctggatctcaggctgggggagcatccaagatggagttcccttgccccaccctcagaccctgcagaagctgaaggttcctatcatcgactcggaagtctgcagccatctgtactggcggggagcaggacagggacccatcactgaggacatgctgtgtgccggctacttggagggggagcgggatgcttgtctgggcgactccgggggccccctcatgtgccaggtggacggcgcctggctgctggccggcatcatcagctggggcgagggctgtgccgagcgcaacaggcccggggtctacatcagcctctctgcgcaccgctcctgggtggagaagatcgtgcaaggggtgcagctccgcgggcgcgctcaggggggtggggccctcagggcaccgagccagggctctggggccgccgcgcgctcctagggcgcagcgggacgcggggctcggatctgaaaggcggccagatccacatctggatctggatctgcggcggcctcgggcggtttcccccgccgtaaataggctcatctacctctacctctgggggcccggacggctgctgcggaaaggaaaccccctccccgacccgcccgacggcctcaggccccgcctccaaggcatcaggccccgcccaacggcctcatgtccccgcccccacgacttccggccccgccccgggccccagcgcttttgtgtatataaatgttaatgatttttataggtatttgtaaccctgcccacatatcttatttattcctccaatttcaataaattatttattctccagtg

SEQ ID NO: 23997 - DNA, 922 bp, Homo sapiens
  source 1..922: mol_type = unassigned DNA
ggcgcgggatgcagacggctgcgaggcgctgggcacaggttgccaggacaaccgtgaggctgcataaaaagaacctatgacaggatgcacatgagagagacaagtggcttcacattgaagaaggggaggagtgcgccattggttttccatcctccagatgcactgattgctgtcccctttgacgatgatgacaagattgttgggggctacacctgtgaggagaattctctcccctaccaggtgtccctgaattctggctcccacttctgcggtggctccctcatcagcgaacagtgggtggtatcagcagctcactgctacaagacccgcatccaggtgagactgggagagcacaacatcaaagtcctggaggggaatgagcagttcatcaatgcggccaagatcatccgccaccctaaatacaacagggacactctggacaatgacatcatgctgatcaaactctcctcacctgccgtcatcaatgcccgcgtgtccaccatctctctgcccaccacccctccagctgctggcactgagtgcctcatctccggctggggcaacactctgagctttggtgctgactacccagacgagctgaagtgcctggatgctccggtgctgacccaggctgagtgtaaagcctcctaccctggaaagattaccaacagcatgttctgtgtgggcttccttgagggaggcaaggattcctgccagcgtgactctggtggccctgtggtctgcaacggacagctccaaggagttgtctcctggggccatggctgtgcctggaagaacaggcctggagtctacaccaaggtctacaactatgtggactggattaaggacaccatcgctgccaacagctaaagcccccggtccctctgcagtctctataccaataaagtggccctgctctcac

SEQ ID NO: 23998 - DNA, 966 bp, Homo sapiens
  source 1..966: mol_type = unassigned DNA
atgtgcggacctgacgacagatgccccgcacgctggccgggaccgggaagggcggtcaagtgtggaaagggtctggcggctgccaggcctggcagagtggagcggggcggggcgcagcggggcggggcgggcctggagctgcacccgcttctgggtggacgcacttggcgagcggcgcgggatgcagacggctgcgaggcgctgggcacagttgctgtcccctttgacgatgatgacaagattgttgggggctacacctgtgaggagaattctctcccctaccaggtgtccctgaattctggctcccacttctgcggtggctccctcatcagcgaacagtgggtggtatcagcagctcactgctacaagacccgcatccaggtgagactgggagagcacaacatcaaagtcctggaggggaatgagcagttcatcaatgcggccaagatcatccgccaccctaaatacaacagggacactctggacaatgacatcatgctgatcaaactctcctcacctgccgtcatcaatgcccgcgtgtccaccatctctctgcccaccacccctccagctgctggcactgagtgcctcatctccggctggggcaacactctgagctttggtgctgactacccagacgagctgaagtgcctggatgctccggtgctgacccaggctgagtgtaaagcctcctaccctggaaagattaccaacagcatgttctgtgtgggcttccttgagggaggcaaggattcctgccagcgtgactctggtggccctgtggtctgcaacggacagctccaaggagttgtctcctggggccatggctgtgcctggaagaacaggcctggagtctacaccaaggtctacaactatgtggactggattaaggacaccatcgctgccaacagctaaagcccccggtccctctgcagtctctataccaataaagtggccctgctctca

SEQ ID NO: 23999 - DNA, 834 bp, Homo sapiens
  source 1..834: mol_type = unassigned DNA
gacaggccttccaccaccagtcaggcacactctaccaccatgaatccattcctgatccttgcctttgtgggagctgctgttgctgtcccctttgacgatgatgacaagattgttgggggctacacctgtgaggagaattctctcccctaccaggtgtccctgaattctggctcccacttctgcggtggctccctcatcagcgaacagtgggtggtatcagcagctcactgctacaagacccgcatccaggtgagactgggagagcacaacatcaaagtcctggaggggaatgagcagttcatcaatgcggccaagatcatccgccaccctaaatacaacagggacactctggacaatgacatcatgctgatcaaactctcctcacctgccgtcatcaatgcccgcgtgtccaccatctctctgcccaccacccctccagctgctggcactgagtgcctcatctccggctggggcaacactctgagctttggtgctgactacccagacgagctgaagtgcctggatgctccggtgctgacccaggctgagtgtaaagcctcctaccctggaaagattaccaacagcatgttctgtgtgggcttccttgagggaggcaaggattcctgccagcgtgactctggtggccctgtggtctgcaacggacagctccaaggagttgtctcctggggccatggctgtgcctggaagaacaggcctggagtctacaccaaggtctacaactatgtggactggattaaggacaccatcgctgccaacagctaaagcccccggtccctctgcagtctctataccaataaagtggccctgctctca

SEQ ID NO: 24000 - DNA, 786 bp, Homo sapiens
  source 1..786: mol_type = unassigned DNA
ggttccgactcgcatgggacctgcgggggaggttgctgtcccctttgacgatgatgacaagattgttgggggctacacctgtgaggagaattctctcccctaccaggtgtccctgaattctggctcccacttctgcggtggctccctcatcagcgaacagtgggtggtatcagcagctcactgctacaagacccgcatccaggtgagactgggagagcacaacatcaaagtcctggaggggaatgagcagttcatcaatgcggccaagatcatccgccaccctaaatacaacagggacactctggacaatgacatcatgctgatcaaactctcctcacctgccgtcatcaatgcccgcgtgtccaccatctctctgcccaccacccctccagctgctggcactgagtgcctcatctccggctggggcaacactctgagctttggtgctgactacccagacgagctgaagtgcctggatgctccggtgctgacccaggctgagtgtaaagcctcctaccctggaaagattaccaacagcatgttctgtgtgggcttccttgagggaggcaaggattcctgccagcgtgactctggtggccctgtggtctgcaacggacagctccaaggagttgtctcctggggccatggctgtgcctggaagaacaggcctggagtctacaccaaggtctacaactatgtggactggattaaggacaccatcgctgccaacagctaaagcccccggtccctctgcagtctctataccaataaagtggccctgctctc

SEQ ID NO: 24001 - DNA, 623 bp, Homo sapiens
  source 1..623: mol_type = unassigned DNA
ggcgcgggatgcagacggctgcgaggcgctgggcacaggttgccaggacaaccgtgaggctgcataaaaagaacctatgacaggatgcacatgagagagacaagtggcttcacattgaagaaggggaggagtgcgccattggttttccatcctccagatgcactgattgctgtcccctttgacgatgatgacaagattgttgggggctacacctgtgaggagaattctctcccctaccaggtgtccctgaattctggctcccacttctgcggtggctccctcatcagcgaacagtgggtggtatcagcagctcactgctacaagacccgcatccaggtgagactgggagagcacaacatcaaagtcctggaggggaatgagcagttcatcaatgcggccaagatcatccgccaccctaaatacaacagggacactctggacaatgacatcatgctgatcaaactctcctcacctgccgtcatcaatgcccgcgtgtccaccatctctctgcccaccacccctccagctgctggcactgagtgcctcatctccggctggggcaacactctgagctttggtgctgactacccagacgagctgaagtgcctggatgctccggtgct

SEQ ID NO: 24002 - DNA, 1694 bp, Homo sapiens
  source 1..1694: mol_type = unassigned DNA
ggagctgaggacagacagaaggaccacggagggggtgacgggctggtgtgaggattggtgcccctgggccaggactctcctctcttctccctgctggctccagaccagagtccaagccctaggcagtgccacccttacccagcccagccttgaagacagaatgagaggggtttcctgtctccaggtcctgctccttctggtgctgggagctgctgggactcagggaaggaagtctgcagcctgcgggcagccccgcatgtccagtcggatcgttgggggccgggatggccgggacggagagtggccgtggcaggcgagcatccagcatcgtggggcacacgtgtgcggggggtcgctcatcgccccccagtgggtgctgacagcggcgcactgcttccccaggagggcactgccagctgagtaccgcgtgcgcctgggggcgctgcgtctgggctccacctcgccccgcacgctctcggtgcccgtgcgacgggtgctgctgcccccggactactccgaggacggggcccgcggcgacctggcactgctgcagctgcgtcgcccggtgcccctgagcgctcgcgtccaacccgtctgcctgcccgtgcccggcgcccgcccgccgcccggcacaccatgccgggtcaccggctggggcagcctccgcccaggagtgcccctcccagagtggcgaccgctacaaggagtaagggtgccgctgctggactcgcgcacctgcgacggcctctaccacgtgggcgcggacgtgccccaggctgagcgcattgtgctgcctgggagtctgtgtgccggctacccccagggccacaaggacgcctgccagggtgattctgggggacctctgacctgcctgcagtctgggagctgggtcctggtgggcgtggtgagctggggcaagggttgtgccctgcccaaccgtccaggggtctacaccagtgtggccacatatagcccctggattcaggctcgcgtcagcttctaatgctagccggtgaggctgacctggagccagctgctggggtccctcagcctcctggttcatccaggcacctgcctataccccacatcccttctgcctcgaggccaagatgcctaaaaaagctaaaggccaccccaccccccacccaccacctcctgcctcctctcctctttggggatcaccagctctgactccaccaaccctcatccaggaatctgccatgagtcccagggagtcacactccccactcccttcctggcttgtatttacttttcttggccctggccagggctgggcgcaaggcacgcagtgatgggcaaaccaattgctgcccatctggcctgtgtgcccatctttttctggagaaagtcagattcacagcatgacagagatttgacaccagggagatcctccatagctggctttgaggacacggggaccacagccatgagcggcctctaagagctgagagacagccggcagggaatcggaaccctcagacccacagccgcaaggcactggattctggcagcaccctgaaggagctgggaagtaagttcttccccagcctccagataagagccccgccggccaatcccttcatttcaacctaaagagaccctaagcagagaacctagctgagccactcctgacctacaaagttgtgacttaataaatgtgtgctttaagctgc

SEQ ID NO: 24003 - DNA, 1940 bp, Homo sapiens
  source 1..1940: mol_type = unassigned DNA
gactttggtggcaagaggagctggcggagcccagccagtgggcggggccaggggaggggcgggcaggtaggtgcagccactcctgggaggaccctgcgtggccagacggtgctggtgactcgtccacactgctcgcttcggatactccaggcgtctcccgttgcggccgctccctgccttagaggccagccttggacacttgctgcccctttccagcccggattctgggatccttccctctgagccaacatctgggtcctgccttcgacaccaccccaaggcttcctaccttgcgtgcctggagtctgccccaggggcccttgtcctgggccatggcccagaagggggtcctggggcctgggcagctgggggctgtggccattctgctctatcttggattactccggtcggggacaggagcggaaggggcagaagctccctgcggtgtggccccccaagcacgcatcacaggtggcagcagtgcagtcgccggtcagtggccctggcaggtcagcatcacctatgaaggcgtccatgtgtgtggtggctctctcgtgtctgagcagtgggtgctgtcagctgctcactgcttccccagcgagcaccacaaggaagcctatgaggtcaagctgggggcccaccagctagactcctactccgaggacgccaaggtcagcaccctgaaggacatcatcccccaccccagctacctccaggagggctcccagggcgacattgcactcctccaactcagcagacccatcaccttctcccgctacatccggcccatctgcctccctgcagccaacgcctccttccccaacggcctccactgcactgtcactggctggggtcatgtggccccctcagtgagcctcctgacgcccaagccactgcagcaactcgaggtgcctctgatcagtcgtgagacgtgtaactgcctgtacaacatcgacgccaagcctgaggagccgcactttgtccaagaggacatggtgtgtgctggctatgtggaggggggcaaggacgcctgccagggtgactctgggggcccactctcctgccctgtggagggtctctggtacctgacgggcattgtgagctggggagatgcctgtggggcccgcaacaggcctggtgtgtacactctggcctccagctatgcctcctggatccaaagcaaggtgacagaactccagcctcgtgtggtgccccaaacccaggagtcccagcccgacagcaacctctgtggcagccacctggccttcagctctgccccagcccagggcttgctgaggcccatccttttcctgcctctgggcctggctctgggcctcctctccccatggctcagcgagcactgagctggccctacttccaggatggatgcatcacactcaaggacaggagcctggtccttccctgatggcctttggacccagggcctgacttgagccactccttccttcaggactctgcgggaggctggggccccatcttgatctttgagcccattcttctgggtgtgctttttgggaccatcactgagagtcaggagttttactgcctgtagcaatggccagagcctctggcccctcacccaccatggaccagcccattggccgagctcctggggagctcctgggacccttggctatgaaaatgagccctggctcccacctgtttctggaagactgctcccggcccgcctgcccagactgatgagcacatctctctgccctctccctgtgttctgggctggggccacctttgtgcagcttcgaggacaggaaaggccccaatcttgcccactggccgctgagcgcccccgagccctgactcctggactccggaggactgagcccccaccggaactgggctggcgcttggatctggggtgggagtaacagggcagaaatgattaaaatgtttgagcacaa

SEQ ID NO: 24004 - DNA, 504 bp, Homo sapiens
  source 1..504: mol_type = unassigned DNA
atggcccagaagggggtcctggggcctgggcagctgggggctgtggccattctgctctatcttggattactccggtcggggacaggtaaggaaggggccgcagctccctgcggtgtggccccccaagcacgcatcacaggtggcagcagtgcagtcgccggtcagtggccctggcaggtcagcatcaccttctcccgctacatccggcccatctgcctccctgcagccaacgcctccttccccaacggcctccactgcactgtcactggctggggtcatgtggccccctcagtgagcctcctgacgcccaagccactgcagcaactcgaggtgcctctgatcagtcgtgagacgtgtaactgcctgtacaacatcgacgccaagcctgaggagccgcactttgtccaagaggacatggtgtgtgctggctatgtggagggggctctcctcagggtgactctgggggcccactctcctgccctgtggagggtctctggtacctga

SEQ ID NO: 24005 - DNA, 1552 bp, Homo sapiens
  source 1..1552: mol_type = unassigned DNA
ggatgccggcggtctctgctgaagagagaagatggcgcttgacggaccagagcagcgccgccctcggtgagtcagggcaaggctgggagaggaagacgcggtagaagcggagtgagtgagggaagcgatgggcgcgggaatggccggcccacgggtcgcaggagacgggacgccagtcctttggctccgttccgctggctccttcgtcagtactgacacctcgggcttgtagagcacttcacgcagtgcaaagcgccccccgtctatatcatatcgcctctcggtcctcctaaaagtcgtatgagatggagctggaggaggggaaggcaggcagcggactccgccaatattatctgtccaagattgaagaactccagctgattgtgaatgataagagccaaaacctccggaggctgcaggcacagaggaacgaactaaatgctaaagttcgcctattgcgggaggagctacagctgctgcaggagcagggctcctatgtgggggaagtagtccgggccatggataagaagaaagtgttggtcaaggtacatcctgaaggtaaatttgttgtagacgtggacaaaaacattgacatcaatgatgtgacacccaattgccgggtggctctaaggaatgacagctacactctgcacaagatcctgcccaacaaggtagacccattagtgtcactgatgatggtggagaaagtaccagattcaacttatgagatgattggtggactggacaaacagatcaaggagatcaaagaagtgatcgagctgcctgttaagcatcctgagctcttcgaagcactgggcattgctcagcccaagggagtgctgctgtatggacctccaggcactgggaagacactgttggcccgggctgtggctcatcatacggactgtacctttattcgtgtctctggctctgaactggtacagaaattcataggggaaggggcaagaatggtgagggagctgtttgtcatggcacgggaacatgctccatctatcatcttcatggacgaaatcgactccatcggctcctcgcggctggaggggggttctggaggggacagtgaagtgcagcgcacgatgctggagttgctcaaccagctcgacggctttgaggccaccaagaacatcaaggttatcatggctactaataggattgatatcctggactcggcactgcttcgcccagggcgcattgacagaaaaattgaattcccaccccccaatgaggaggcccggctggacattttgaagattcattctcggaagatgaacctgacccgggggatcaacctgagaaaaattgctgagctcatgccaggagcatcaggggctgaagtgaagggcgtgtgcacagaagctggcatgtatgccctgcgagaacggcgagtccatgtcactcaggaggactttgagatggcagtagccaaggtcatgcagaaggacagtgagaaaaacatgtccatcaagaaattatggaagtgagtggacagcctttgtgtgtatctctccaataaagctctgtgggccaagtc

SEQ ID NO: 24006 - DNA, 998 bp, Homo sapiens
  source 1..998: mol_type = unassigned DNA
agtttccggcgtgagcggcgaaagccgggagggcgagcgagagagcaagcaggcagcaggctgccggcgggcgggcggacggcacagagggagggagcgagcgagcagtgagtaagccagcaagggcggtcgggtcccgaggtcagccgagatttctcaggtccctccggccccctccctggagtccacagcgcctccggtgtccagaggatcggacacggcccggcccggccatggcctcgttgctgaaggtggatcaggaagtgaagctcaaggttgattctttcagggagcggatcacaagtgaggcagaagacttggtggcaaattttttcccaaagaagttattagaacttgatagttttctgaaggaaccaatcttaaacatccatgacctaactcagatccactctgacatgaatctcccagtccctgaccccattcttctcaccaatagccatgatggactggatggtcccacttataagaagcgaaggttggatgagtgtgaagaagccttccaaggaaccaaggtgtttgtgatgcccaatgggatgctgaaaagcaaccagcagctggtggacattattgagaaagtgaaacctgagatccggctgttgattgagaaatgtaacacggtcaaaatgtgggtacagctcctgattcccaggatagaagatggaaacaactttggggtgtccattcaggaggaaacagttgcagagctaagaactgttgagagtgaagctgcatcttatctggaccagatttctagatattatattacaagagccaaattggtttctaaaatagctaaatatccccatgtggaggactatcgccgcaccgtgacagagattgatgagaaagaatatatcagccttcggctcatcatatcagagctgaggaatcaatatgtcactctacatgacatgatcctgaaaaatatcgagaagatcaaacggccccggagcagcaatgcagagactctgtactga

SEQ ID NO: 24007 - DNA, 1641 bp, Homo sapiens
  source 1..1641: mol_type = unassigned DNA
tggttcctatcagcttccgtagcgtccctaacgacttccgcctctggcgggccgcagtggtggaggaacttccggcagcggcagctcaagtggccaaggcaagatgggtcaaagtcagagtggtggtcatggtcctggaggtggcaagaaggatgacaaggacaagaaaaagaaatatgaacctcctgtaccaactagagtggggaaaaagaagaagaaaacaaagggaccagatgctgccagcaaactgccactggtgacacctcacactcagtgccggttaaaattactgaagttagagagaattaaagactatcttctcatggaggaagaattcattagaaatcaggaacaaatgaaaccattagaagaaaagcaagaggaggaaagatcaaaagtggatgatctgagggggaccccgatgtcagtaggaaccttggaagagatcattgatgacaatcatgccatcgtgtctacatctgtgggctcagaacactacgtcagcattctttcatttgtagacaaggatctgctggaacctggctgctcggtcctgctcaaccacaaggtgcatgccgtgataggggtgctgatggatgacacggatcccctggtcacagtgatgaaggtagaaaaggccccccaggagacctatgcagatattggggggttggacaaccaaattcaggaaattaaggaatctgtggagcttcctctcacccatcctgaatattatgaagagatgggtataaagcctcctaagggggtcattctctatggtccacctggcacaggtaaaaccttgttagccaaagcagtagcaaaccaaacctcagccactttcttgagagtggttggctctgaacttattcagaagtacctaggtgatgggcccaaactcgtacgggaattgttccgagttgctgaagaacatgcaccgtccatcgtgtttattgatgaaattgacgccattgggacaaaaagatatgactccaattctggtggtgagagagaaattcagcgaacaatgttggaactgctgaaccagttggatggatttgattctaggggagatgtgaaagttatcatggccacaaaccgaatagaaactttggatccagcacttatcagaccaggccgcattgacaggaagattgagttccccctgcctgatgaaaagacgaagaagcgcatctttcagattcacacaagcaggatgacgctggctgatgatgtaaccctggacgacctgatcatggctaaagatgacctctctggtgctgacatcaaggcaatctgtacagaagctggtctgatggccttaagagaacgtagaatgaaagtaacaaatgaagacttcaaaaaatctaaagaaaatgttctttataagaaacaggaaggcacccctgaggggctgtatctctaatgaaccatggctgtcatcaggaaaatggttgggagatttctcaatccctgaaagggatgaggttgggggagttgcccagaggaatccctgttcccactgatttttattagcaaaacatcctgtgtcttttggagtacgatgtgtaagtgcccattgggtggcctgttggtcactgtgcagcagtctgcttcccaataaagcgtgctctttcacaa

SEQ ID NO: 24008 - DNA, 1389 bp, Homo sapiens
  source 1..1389: mol_type = unassigned DNA
gctcaagtggccaaggcaagatgggtcaaagtcagagtggtggtcatggtcctggaggtggcaagaaggatgacaagtgacacctcacactcagtgccggttaaaattactgaagttagagagaattaaagactatcttctcatggaggaagaattcattagaaatcaggaacaaatgaaaccattagaagaaaagcaagaggaggaaagatcaaaagtggatgatctgagggggaccccgatgtcagtaggaaccttggaagagatcattgatgacaatcatgccatcgtgtctacatctgtgggctcagaacactacgtcagcattctttcatttgtagacaaggatctgctggaacctggctgctcggtcctgctcaaccacaaggtgcatgccgtgataggggtgctgatggatgacacggatcccctggtcacagtgatgaaggtagaaaaggccccccaggagacctatgcagatattggggggttggacaaccaaattcaggaaattaaggaatctgtggagcttcctctcacccatcctgaatattatgaagagatgggtataaagcctcctaagggggtcattctctatggtccacctggcacaggtaaaaccttgttagccaaagcagtagcaaaccaaacctcagccactttcttgagagtggttggctctgaacttattcagaagtacctaggtgatgggcccaaactcgtacgggaattgttccgagttgctgaagaacatgcaccgtccatcgtgtttattgatgaaattgacgccattgggacaaaaagatatgactccaattctggtggtgagagagaaattcagcgaacaatgttggaactgctgaaccagttggatggatttgattctaggggagatgtgaaagttatcatggccacaaaccgaatagaaactttggatccagcacttatcagaccaggccgcattgacaggaagattgagttccccctgcctgatgaaaagacgaagaagcgcatctttcagattcacacaagcaggatgacgctggctgatgatgtaaccctggacgacctgatcatggctaaagatgacctctctggtgctgacatcaaggcaatctgtacagaagctggtctgatggccttaagagaacgtagaatgaaagtaacaaatgaagacttcaaaaaatctaaagaaaatgttctttataagaaacaggaaggcacccctgaggggctgtatctctaatgaaccatggctgtcatcaggaaaatggttgggagatttctcaatccctgaaagggatgaggttgggggagttgcccagaggaatccctgttcccactgatttttattagcaaaacatcctgtgtcttttggagtacgatgtg

SEQ ID NO: 24009 - DNA, 1526 bp, Homo sapiens
  source 1..1526: mol_type = unassigned DNA
gaagacaccaccggaagcaaggaaggtgctgtgtaatcattaaggagcggaggcttttggagctgctaaaatgccggattacctcggtgccgatcagcggaagaccaaagaggatgagaaggacgacaagcccatccgagctctggatgagggggatattgccttgttgaaaacttatggtcagagcacttactctaggcagatcaagcaagttgaagatgacattcagcaacttctcaagaaaattaatgagctcactggtattaaagaatctgacactggcctggccccaccagcactctgggatttggctgcagataagcagacactccagagtgaacagcctttacaggttgccaggtgtacaaagataatcaatgctgattcggaggacccaaaatacattatcaacgtaaagcagtttgccaagtttgtggtggaccttagtgatcaggtggcacctactgacattgaagaagggatgagagtgggcgtggatagaaataaatatcaaattcacattccattgcctcctaagattgacccaacagttaccatgatgcaggtggaagagaaacctgatgtcacatacagtgatgttggtggctgtaaggaacagattgagaaactgcgagaagtagttgaaaccccattacttcatccagagaggtttgtgaaccttggcattgagcctcccaagggcgtgctgctctttggtccacccggtacaggcaagacactctgtgcgcgggcagttgctaatcggactgatgcgtgcttcattcgagttattggatctgagcttgtacagaaatacgtcggtgagggggctcgaatggttcgtgaactctttgaaatggccagaacaaaaaaagcctgccttatcttctttgatgaaattgatgctattggaggggctcgttttgatgatggtgctggaggtgacaatgaagtgcagagaacaatgttggaactgatcaatcagcttgatggttttgatcctagaggcaatattaaagtgctgatggccactaacagacctgatactttggatccagcactgatgaggccagggagattggatagaaaaattgaatttagcttgcccgatctagagggtcggacccacatatttaagattcacgctcgttcaatgagtgttgaaagagatatcagatttgaactgttagcacgactgtgtccaaatagcactggtgctgagattagaagcgtctgcacagaggctggtatgtttgccatcagagcacggcgaaaaattgctaccgagaaggatttcttggaagctgtaaataaggtcattaagtcttatgccaaattcagtgctactcctcgttacatgacatacaactgaaccctgaaggctttcaagtgaaaactttaaattggaatcctaaccttatatagacttgttaataaccaattcataaacaaataaatggcttcaaaattgtatgcttttttccatatctcttcttgtaatataataaaaggtgatttctaatgtt

SEQ ID NO: 24010 - DNA, 656 bp, Homo sapiens
  source 1..656: mol_type = unassigned DNA
ctggggtgctggggggttccgtcccgaaatgctcagcccaatccatgagtcagcagcggcgagaggaggaagcaacggtaatcagtccaaaaaccagcgtgccaaagcgtttccccagggctctgtccggactctgaagcactgcataaaggggtctgtctgagcccaatttacttccggtggggaagggaaagggaagacaccaccggaagcaaggaaggtgctgtgtaatcattaaggagcggaggcttttggagctgctaaaatgccggattacctcggtgccgatcagcggaagaccaaagaggatgagaaggacgacaagcccatccgagctctggatgagggggatattgccttgttgaaaacttatggtcagagcacttactctaggcagatcaagcaagttgaagatgacattcagcaacttctcaagaaaattaatgagctcactggtattaaagaatctgacactggcctggccccaccagcactctgggatttggctgcagataagcagacactccagagtgaacagcctttacaggttgccaggtgtacaaagataatcaatgctgattcggaggacccaaaatacattatcaacgtaaagcagtttgccaagtttgtggtggaccttagtgatcaggtggcac

SEQ ID NO: 24011 - DNA, 3054 bp, Homo sapiens
  source 1..3054: mol_type = unassigned DNA
agttttcctgtaaaaaggattatattccacgtcccagtgcaatacatagaacataacctttaaaagcagttctttttatattatctttaagttcttactgctttatgtattaatctgaacctaatcagtgattttcccaggagcgctatacttttaagtaaaaaatgaaaatacctgtatgaaccagtatcgacgactagtatatacatttgcggagaattacgtaatcagtccaaaaaccagcgtgccaaagcgtttccccagggctctgtccggactctgaagcactgcataaaggggtctgtctgagcccaatttacttccggtggggaagggaaagggaagacaccaccggaagcaaggaaggtgctgtgtaatcattaaggagcggaggcttttggagctgctaaaatgccggattacctcggtgccgatcagcggaagaccaaagaggatgagaaggacgacaagcccatccgagctctggatgagggggatattgccttgttgaaaacttatggtcagagcacttactctaggcagatcaagcaagttgaagatgacattcagcaacttctcaagaaaattaatgagctcactggtattaaagaatctgacactggcctggccccaccagcactctgggatttggctgcagataagcagacactccagagtgaacagcctttacaggttgccaggtgtacaaagataatcaatgctgattcggaggacccaaaatacattatcaacgtaaagcagtttgccaagtttgtggtggaccttagtgatcaggtggcacctactgacattgaagaagggatgagagtgggcgtggatagaaataaatatcaaattcacattccattgcctcctaagattgacccaacagttaccatgatgcaggtggaagagaaacctgatgtcacatacagtgatgttggtggctgtaaggaacagattgagaaactgcgagaagtagttgaaaccccattacttcatccagagaggtttgtgaaccttggcattgagcctcccaagggcgtgctgctctttggtccacccggtacaggcaagacactctgtgcgcgggcagttgctaatcggactgatgcgtgcttcattcgagttattggatctgagcttgtacagaaatacgtcggtgagggggctcgaatggttcgtgaactctttgaaatggccagaacaaaaaaagcctgccttatcttctttgatgaaattgatgctattggaggggctcgttttgatgatggtgctggaggtgacaatgaagtgcagagaacaatgttggaactgatcaatcagcttgatggttttgatcctagaggcaatattaaagtgctgatggccactaacagacctgatactttggatccagcactgatgaggccagggagattggatagaaaaattgaatttagcttgcccgatctagagggtcggacccacatatttaagattcacgctcgttcaatgagtgttgaaagagatatcagatttgaactgttagcacgactgtgtccaaatagcactggtgctgagattagaagcgtctgcacagaggctggtatgtttgccatcagagcacggcgaaaaattgctaccgagaaggatttcttggaagctgtaaataaggtcattaagtcttatgccaaattcagtgctactcctcgttacatgacatacaactgaaccctgaaggctttcaagtgaaaactttaaattggaatcctaaccttatatagacttgttaataaccaattcataaacaaataaatggcttcaaaattgtatgcttttttccatatctcttcttgtaatataataaaaggtgatttctaatgttattaggcagaaaagcttgttagaatatattttgactatttttttgacccacacccgtttaaggatttcacatcatacaaagcgcttgcttagatggcttctatcctaggcatatgctggccgggtgctctacatataaattctcattgtatcctcccatctgtccactgaggaagattatcaaatggatcttcatccaatggatgcataaactttcctacttacttgtagtggcaaagctggctttcaagtacaagtttgttggctccattacctatgctcctattatccgcttctgtcccgcaacaaagtagctcacttaggcgtatgaccacatgcattatgatagtttcccaccaccatattgaataataaaagctttggccaaagcttttttaaagtaggagaaacattggatgtatatgttttgcattgccatttgatttcaaattaatcaggaagaattagtgattttaatgagcagtaaagtggtgcaataaagcagaaagaaaaatgttcagccagaagtgaaagactagtaaaaaaagaaaaaaaaatatttgtacatatgatctaatttagaaagtccagaattggcttcatacagaaaagtgattactttcattttacaaattactttaaaattttggtaaagtttctgttaggcttctggtctacagtgaggtattttaaaaataaaggttatattagaatcctcaacatctctttaaaattacctcctgtgtaaccaccaccaaatcctatcttctaccacaattaccccttcccccaatgccaagaccaaagcacaataatgaatatttttattgaagttcgatattcataaataagttgcaaaataagagttggatatatttttaattcacaatagaaaaagttgacaacatagaaaatgctgctttgcactgaaatacttaaaattatgaaagttttcaagtaaagaaattaaagccttttataaaatccaaccaacattcttgatttttcatttttatgaacttgatcagaaaaattcatcttttttaaccctgccctaatttttcttgaggaattaaatagagcaaactattttcaggttatgcttacaataaaatatacttaagaaaatgactgaagatgtatgtttttgaatgttttgattaaataaatgtacacatttagaacaca

SEQ ID NO: 24012 - DNA, 682 bp, Homo sapiens
  source 1..682: mol_type = unassigned DNA
atgagaacctttctggggtgctggggggttccgtcccgaaatgctcagcccaatccatgagtcagcagcggcgagaggaggaagcaacgtttccttctcacaggtaatcagtccaaaaaccagcgtgccaaagcgtttccccagggctctgtccggactctgaagcactgcataaaggggtctgtctgagcccaatttacttccggtggggaagggaaagggaagacaccaccggaagcaaggaaggtgctgtgtaatcattaaggagcggaggcttttggagctgctaaaatgccggattacctcggtgccgatcagcggaagaccaaagaggatgagaaggacgacaagcccatccgagctctggatgagggggatattgccttgttgaaaacttatggtcagagcacttactctaggcagatcaagcaagttgaagatgacattcagcaacttctcaagaaaattaatgagctcactggtattaaagaatctgacactggcctggccccaccagcactctgggatttggctgcagataagcagacactccagagtgaacagcctttacaggttgccaggtgtacaaagataatcaatgctgattcggaggacccaaaatacattatcaacgtaaagcagtttgccaagtttgtggtggaccttagtgatcaggtggcac

SEQ ID NO: 24013 - DNA, 1415 bp, Homo sapiens
  source 1..1415: mol_type = unassigned DNA
gaaggtgctgtgtaatcattaaggagcggaggcttttggagctgctaaaatgccggattacctcggtgccgatcagcggaagaccaaagaggatgagaaggacgacaagcccatccgagctctggatgagggggatattgccttgttgaaaacttatggtcagagcacttactctaggcagatcaagcaagttgaagatgacattcagcaacttctcaagaaaattaatgagctcactggtgtacaaagataatcaatgctgattcggaggacccaaaatacattatcaacgtaaagcagtttgccaagtttgtggtggaccttagtgatcaggtggcacctactgacattgaagaagggatgagagtgggcgtggatagaaataaatatcaaattcacattccattgcctcctaagattgacccaacagttaccatgatgcaggtggaagagaaacctgatgtcacatacagtgatgttggtggctgtaaggaacagattgagaaactgcgagaagtagttgaaaccccattacttcatccagagaggtttgtgaaccttggcattgagcctcccaagggcgtgctgctctttggtccacccggtacaggcaagacactctgtgcgcgggcagttgctaatcggactgatgcgtgcttcattcgagttattggatctgagcttgtacagaaatacgtcggtgagggggctcgaatggttcgtgaactctttgaaatggccagaacaaaaaaagcctgccttatcttctttgatgaaattgatgctattggaggggctcgttttgatgatggtgctggaggtgacaatgaagtgcagagaacaatgttggaactgatcaatcagcttgatggttttgatcctagaggcaatattaaagtgctgatggccactaacagacctgatactttggatccagcactgatgaggccagggagattggatagaaaaattgaatttagcttgcccgatctagagggtcggacccacatatttaagattcacgctcgttcaatgagtgttgaaagagatatcagatttgaactgttagcacgactgtgtccaaatagcactggtgctgagattagaagcgtctgcacagaggctggtatgtttgccatcagagcacggcgaaaaattgctaccgagaaggatttcttggaagctgtaaataaggtcattaagtcttatgccaaattcagtgctactcctcgttacatgacatacaactgaaccctgaaggctttcaagtgaaaactttaaattggaatcctaaccttatatagacttgttaataaccaattcataaacaaataaatggcttcaaaattgtatgcttttttccatatctcttcttgtaatataataaaaggtgatttctaatgttattaggcaga

SEQ ID NO: 24014 - DNA, 1544 bp, Homo sapiens
  source 1..1544: mol_type = unassigned DNA
attcgctgctccgcagcacggccggagctggtcgggtcaagagtcgggatttgtggggagaggttttccactggtcaagagaaggctttaagaaagacggtattaatctcccgttgcggctcccgcctggtcccatcttctgcccgctcctccaggaaatgaatctgctgccgaatattgagagtccagtgactcggcaggagaagatggcgaccgtgtgggatgaggccgagcaagatggaattggggaggaggtgctcaagatgtccacggaggagatcatccagcgcacacggctgctggacagtgagatcaagatcatgaagagtgaagtgttgagagtcacccatgagctccaagccatgaaggacaagataaaagagaacagtgagaaaatcaaagtgaacaagaccctgccgtaccttgtctccaacgtcatcgagctcctggatgttgatcctaatgaccaagaggaggatggtgccaatattgacctggactcccagaggaagggcaagtgtgctgtgatcaaaacctctacacgacagacgtacttccttcctgtgattgggttggtggatgctgaaaagctaaagccaggagacctggtgggtgtgaacaaagactcctatctgatcctggagacgctgcccacagagtatgactcgcgggtgaaggccatggaggtagacgagaggcccacggagcaatacagtgacattgggggtttggacaagcagatccaggagctggtggaggccattgtcttgccaatgaaccacaaggagaagtttgagaacttggggatccaacctccaaaaggggtgctgatgtatgggcccccagggacggggaagaccctcctggcccgggcctgtgccgcacagactaaggccaccttcctaaagctggctggcccccagctggtgcagatgttcattggagatggtgccaagctagtccgggatgcctttgccctggccaaggagaaagcgccctctatcatcttcattgatgagttggatgccatcggcaccaagcgctttgacagtgagaaggctggggaccgggaggtgcagaggacaatgctggagcttctgaaccagctggatggcttccagcccaacacccaagttaaggtaattgcagccacaaacagggtggacatcctggaccccgccctcctccgctcgggccgccttgaccgcaagatagagttcccgatgcccaatgaggaggcccgggccagaatcatgcagatccactcccgaaagatgaatgtcagtcctgacgtgaactacgaggagctggcccgctgcacagatgacttcaatggggcccagtgcaaggctgtgtgtgtggaggcgggcatgatcgcactgcgcaggggtgccacggagctcacccacgaggactacatggaaggcatcctggaggtgcaggccaagaagaaagccaacctacaatactacgcctagggcacacaggccagccccagtctcacggctgaagtgcgcaataaaagatggtttagggtccctgcc

SEQ ID NO: 24015 - DNA, 1433 bp, Homo sapiens
  source 1..1433: mol_type = unassigned DNA
gatcatcccaggccacacagaggccggcttggtcactatggaggagataggcatcttggtggagaaggctcaggatgagatcccagcactgtccgtgtcccggccccagaccggcctgtccttcctgggccctgagcctgaggacctggaggacctgtacagccgctacaagaagctgcagcaagagctggagttcctggaggtgcaggaggaatacatcaaagatgagcaaaagaacctgaaaaaggaatttctccatgcccaggaggaggtgaagcgaatccaaagcatcccgctggtcatcggacaatttctggaggctgtggatcagaatacagccatcgtgggctctaccacaggctccaactattatgtgcgcatcctgagcaccatcgatcgggagctgctcaagcccaacgcctcagtggccctccacaagcacagcaatgcactggtggacgtgctgccccccgaagccgacagcagcatcatgatgctcacctcagaccagaagccagatgtgatgtacgcggacatcggaggcatggacatccagaagcaggaggtgcgggaggccgtggagctcccgctcacgcatttcgagctctacaagcagatcggcatcgatcccccccgaggcgtcctcatgtatggcccacctggctgtgggaagaccatgttggcaaaggcggtggcacatcacacaacagctgcattcatccgggtcgtgggctcggagtttgtacagaagtatctgggtgagggcccccgcatggtccgggatgtgttccgcctggccaaggagaatgcacctgccatcatcttcatagacgagattgatgccatcgccaccaagagattcgatgctcagacaggggccgacagggaggttcagaggatcctgctggagctgctgaatcagatggatggatttgatcagaatgtcaatgtcaaggtaatcatggccacaaacagagcagacaccctggatccggccctgctacggccaggacggctggaccgtaaaattgaatttccacttcctgaccgccgccagaagagattgattttctccactatcactagcaagatgaacctctctgaggaggttgacttggaagactatgtggcccggccagataagatttcaggagctgatattaactccatctgtcaggagagtggaatgttggctgtccgtgaaaaccgctacattgtcctggccaaggacttcgagaaagcatacaagactgtcatcaagaaggacgagcaggagcatgagttttacaagtgacccttcccttccctccaccacaccactcaggggctggggcttctctcgcacccccagcacctctgtcccaaaacctcattcccttttttctttacccaggattggtttcttcaataaatagataagatcgaatccattt

SEQ ID NO: 24016 - DNA, 1340 bp, Homo sapiens
  source 1..1340: mol_type = unassigned DNA
gatcatcccaggccacacagaggccggcttggtcactatggaggagataggcatcttggtggagaaggctcaggatgagatcccagcactgtccgtgtcccggccccagaccggcctgtccttcctgggccctgagcctgaggacctggaggacctgtacagccgctacaaggaggaggtgaagcgaatccaaagcatcccgctggtcatcggacaatttctggaggctgtggatcagaatacagccatcgtgggctctaccacaggctccaactattatgtgcgcatcctgagcaccatcgatcgggagctgctcaagcccaacgcctcagtggccctccacaagcacagcaatgcactggtggacgtgctgccccccgaagccgacagcagcatcatgatgctcacctcagaccagaagccagatgtgatgtacgcggacatcggaggcatggacatccagaagcaggaggtgcgggaggccgtggagctcccgctcacgcatttcgagctctacaagcagatcggcatcgatcccccccgaggcgtcctcatgtatggcccacctggctgtgggaagaccatgttggcaaaggcggtggcacatcacacaacagctgcattcatccgggtcgtgggctcggagtttgtacagaagtatctgggtgagggcccccgcatggtccgggatgtgttccgcctggccaaggagaatgcacctgccatcatcttcatagacgagattgatgccatcgccaccaagagattcgatgctcagacaggggccgacagggaggttcagaggatcctgctggagctgctgaatcagatggatggatttgatcagaatgtcaatgtcaaggtaatcatggccacaaacagagcagacaccctggatccggccctgctacggccaggacggctggaccgtaaaattgaatttccacttcctgaccgccgccagaagagattgattttctccactatcactagcaagatgaacctctctgaggaggttgacttggaagactatgtggcccggccagataagatttcaggagctgatattaactccatctgtcaggagagtggaatgttggctgtccgtgaaaaccgctacattgtcctggccaaggacttcgagaaagcatacaagactgtcatcaagaaggacgagcaggagcatgagttttacaagtgacccttcccttccctccaccacaccactcaggggctggggcttctctcgcacccccagcacctctgtcccaaaacctcattcccttttttctttacccaggattggtttcttcaataaatagataagatcgaatccattt

SEQ ID NO: 24017 - DNA, 1319 bp, Homo sapiens
  source 1..1319: mol_type = unassigned DNA
aagacggctcggatgccggcggtctctgctgaagagagaagatggcgcttgacggaccagagcagatggagctggaggaggggaaggcaggcagcggactccgccaatattatctgtccaagattgaagaactccagctgattgtgaatgataagagccaaaacctccggaggctgcaggcacagaggaacgaactaaatgctaaagttcgcctattgcgggaggagctacagctgctgcaggagcagggctcctatgtgggggaagtagtccgggccatggataagaagaaagtgttggtcaaggtacatcctgaaggtaaatttgttgtagacgtggacaaaaacattgacatcaatgatgtgacacccaattgccgggtggctctaaggaatgacagctacactctgcacaagatcctgcccaacaaggtagacccattagtgtcactgatgatggtggagaaagtaccagattcaacttatgagatgattggtggactggacaaacagatcaaggagatcaaagaagtgatcgagctgcctgttaagcatcctgagctcttcgaagcactgggcattgctcagcccaagggagtgctgctgtatggacctccaggcactgggaagacactgttggcccgggctgtggctcatcatacggactgtacctttattcgtgtctctggctctgaactggtacagaaattcataggggaaggggcaagaatggtgagggagctgtttgtcatggcacgggaacatgctccatctatcatcttcatggacgaaatcgactccatcggctcctcgcggctggaggggggttctggaggggacagtgaagtgcagcgcacgatgctggagttgctcaaccagctcgacggctttgaggccaccaagaacatcaaggttatcatggctactaataggattgatatcctggactcggcactgcttcgcccagggcgcattgacagaaaaattgaattcccaccccccaatgaggaggcccggctggacattttgaagattcattctcggaagatgaacctgacccgggggatcaacctgagaaaaattgctgagctcatgccaggagcatcaggggctgaagtgaagggcgtgtgcacagaagctggcatgtatgccctgcgagaacggcgagtccatgtcactcaggaggactttgagatggcagtagccaaggtcatgcagaaggacagtgagaaaaacatgtccatcaagaaattatggaagtgagtggacagcctttgtgtgtatctctccaataaagctctgtgggccaagtcctctagg

SEQ ID NO: 24018 - DNA, 1449 bp, Homo sapiens
  source 1..1449: mol_type = unassigned DNA
agaagcggagtgagtgagggaagcgatgggcgcgggaatggccggcccacgggtcgcaggagacgggacgccagtcctttggctccgttccgctggctccttcgtcagtactgacacctcgggcttgtagagcacttcacgcagtgcaaagcgccccccgtctatatcatatcgcctctcggtcctcctaaaagtcgtatgagatggagctggaggaggggaaggcaggcagcggactccgccaatattatctgtccaagattgaagaactccagctgattgtgaatgataagagccaaaacctccggaggctgcaggcacagaggaacgaactaaatgctaaagttcgcctattgcgggaggagctacagctgctgcaggagcagggctcctatgtgggggaagtagtccgggccatggataagaagaaagtgttggtcaaggtacatcctgaaggtaaatttgttgtagacgtggacaaaaacattgacatcaatgatgtgacacccaattgccgggtggctctaaggaatgacagctacactctgcacaagatcctgcccaacaaggtagacccattagtgtcactgatgatggtggagaaagtaccagattcaacttatgagatgattggtggactggacaaacagatcaaggagatcaaagaagtgatcgagctgcctgttaagcatcctgagctcttcgaagcactgggcattgctcagcccaagggagtgctgctgtatggacctccaggcactgggaagacactgttggcccgggctgtggctcatcatacggactgtacctttattcgtgtctctggctctgaactggtacagaaattcataggggaaggggcaagaatggtgagggagctgtttgtcatggcacgggaacatgctccatctatcatcttcatggacgaaatcgactccatcggctcctcgcggctggaggggggttctggaggggacagtgaagtgcagcgcacgatgctggagttgctcaaccagctcgacggctttgaggccaccaagaacatcaaggttatcatggctactaataggattgatatcctggactcggcactgcttcgcccagggcgcattgacagaaaaattgaattcccaccccccaatgaggaggcccggctggacattttgaagattcattctcggaagatgaacctgacccgggggatcaacctgagaaaaattgctgagctcatgccaggagcatcaggggctgaagtgaagggcgtgtgcacagaagctggcatgtatgccctgcgagaacggcgagtccatgtcactcaggaggactttgagatggcagtagccaaggtcatgcagaaggacagtgagaaaaacatgtccatcaagaaattatggaagtgagtggacagcctttgtgtgtatctctccaataaagctctgtgggccaagt

SEQ ID NO: 24019 - DNA, 2188 bp, Homo sapiens
  source 1..2188: mol_type = unassigned DNA
acggccatggccattcccggcatcccctatgagagacggcttctcatcatggcggaccctagagataaggcgcttcaggactaccgcaagaagttgcttgaacacaaggagatcgacggccgtcttaaggagttaagggaacaattaaaagaacttaccaagcagtatgaaaagtctgaaaatgatctgaaggccctacagagtgttgggcagatcgtgggtgaagtgcttaaacagttaactgaagaaaaattcattgttaaagctaccaatggaccaagatatgttgtgggttgtcgtcgacagcttgacaaaagtaagctgaagccaggaacaagagttgctttggatatgactacactaactatcatgagatatttgccgagagaggtggatccactggtttataacatgtctcatgaggaccctgggaatgtttcttattctgagattggagggctatcagaacagatccgggaattaagagaggtgatagaattacctcttacaaacccagagttatttcagcgtgtaggaataatacctccaaaaggctgtttgttatatggaccaccaggtacgggaaaaacactcttggcacgagccgttgctagccagctggactgcaatttcttaaaggttgtatctagttctattgtagacaagtacattggtgaaagtgctcgtttgatcagagaaatgtttaattatgctagagatcatcaaccatgcatcatttttatggatgaaatagatgctattggtggtcgtcggttttctgagggtacttcagctgacagagagattcagagaacgttaatggagttactgaatcaaatggatggatttgatactctgcatagagttaaaatgatcatggctacaaacagaccagatacactggatcctgctttgctgcgtccaggaagattagatagaaaaatacatattgatttgccaaatgaacaagcaagattagacatactgaaaatccatgcaggtcccattacaaagcatggtgaaatagattatgaagcaattgtgaagctttcggatggctttaatggagcagatctgagaaatgtttgtactgaagcaggtatgttcgcaattcgtgctgatcatgattttgtagtacaggaagacttcatgaaagcagtcagaaaagtggctgattctaagaagctggagtctaaattggactacaaacctgtgtaatttactgtaagatttttgatggctgcatgacagatgttggcttattgtaaaaataaagttaaagaaaataatgtatgtattggtaatgatgtcattaaaagtatatgaataaaaatatgagtaacatcataaaaattagtaattcaacttttaagatacagaagaaatttgtatgtttgttaaagttgcatttattgcagcaagttacaaagggaaagtgttgaagcttttcatatttgctgcgtgagcattttgtaaaatattgaaagtggtttgagatagtggtataagaaagcatttcttatgacttattttgtatcatttgttttcctcatctaaaaagttgaataaaatctgtttgattcagttctcctacatatatattcttgtcttttctgagtatatttactgtggtcctttaggttctttagcaagtaaactatttgataacccagatggattgtggatttttgaatattattttaaaatagtacacatacttaatgttcataagatcatcttcttaaataaaacatggatgtgtgggtatgtctgtactcctcctttcagaaagtgtttacatattcttcatctactgtgattaagctcattgttggttaattgaaaatatacatgcacatccataactttttaaagagtatgattcaacgtaatatttgctaatatgtgactgggttttcttggtttatgtaagacgataggtccctgttgaggatgtggaggtctggaccctcttccaggaaaaattctaacatacaattttgcgtatactataatttcaggaaatttattgtttcccaagctcatccaaggactctttaggtatgtatggatacctggctaagagtgtatgatgtaggggatgtaggagtgtcagaaatgttcaaaacatgatttctgttacctatacatgattcttatatcatctggcaataaaagctataacaaa

SEQ ID NO: 24020 - DNA, 1954 bp, Homo sapiens
  source 1..1954: mol_type = unassigned DNA
agataaccaagttaaatctagctcaaatgaaccttttagtttttgaggagggcaataatagtagtgaacaccaaaacgaaaggggatctgggcttcaaaatactaacagttctatttcctagccagtcgtctcccgggctggatgtgccgccgtcccagatctcagcggcggccgcagagcgcagaggtagggagagaaaaaggaggcgtcggcggggcgcgagcgaccagggcgctaagtgccgcctcacagtcctgccagagacaggagacgccgggccgcccgcgccgtctgtcccaagagctcctcctggacatccgcttgactctccgtcgtctccaattggccgtcggggaacggaagccgaagcaaactagtgaacccggaagtgcttcgcggcggaggcccgggcaactcttttgaatggaatcgggctgattcatcgccggtttgcagacagagccgcgtcgggtgtgcgccgctgctgctgttgcctctgtcttcgcgtcaccacagaggcaagacaagggtccatatcgcggcatccggctcccgcccgtcttcaggagagaaagaaaaaataaaatatacttggggaagttgtacctgccagaattagcaagagctttctttaagaagacatttgtcaaactcaacaaattgaaggttaacaccttaagagttgtagttactgaccagaaatatggacagacttcttagacttggaggaggtatgcctggactgggccaggggccacctacagatgctcctgcagtggacacagcagaacaagtctatatctcttccctggcactgttaaaaatgttaaaacatggccgtgctggagttccaatggaagttatgggtttgatgcttggagaatttgttgatgattataccgtcagagtgattgatgtgtttgctatgccacagtcaggaacaggtgtcagtgtggaggcagttgatccagtgttccaagctaaaatgttggatatgttgaagcagacaggaaggccggagatggttgttggttggtatcacagtcaccctggctttggttgttggctttctggtgtggatatcaacactcagcagagctttgaagccttgtcggagagagctgtggcagtggttgtggatcccattcagagtgtaaaaggaaaggttgttattgatgccttcagattgatcaatgctaatatgatggtcttaggacatgaaccaagacaaacaacttcgaatctgggtcacttaaacaagccatctatccaggcattaattcatggactaaacagacattattactccattactattaactatcggaaaaatgaactggaacagaagatgttgctaaatttgcataagaagagttggatggaaggtttgacacttcaggactacagtgaacattgtaaacacaatgaatcagtggtaaaagagatgttggaattagccaagaattacaataaggctgtagaagaagaagataagatgacacctgaacagctggcaataaagaatgttggcaagcaggaccccaaacgtcatttggaggaacatgtggatgtacttatgacctcaaatattgtccagtgtttagcagctatgttggatactgtcgtatttaaataaagcaacgaaaaacgctattaatgatgccttcagtgtatattcctctgttgttcctaatgctcaaaatcaagggacctctgaaggtgtacttggctaaatgtaagacatctggcatcatttgcagcactgtaacaccttcagtctcagttgtgcaattacttctgtttctttagtcagggtctttgcagattctaaagttatacatgaatacatcaaagtggacaaattttgttaagatcccatttaatatttgaaaaaatcagtagcacaaatatattttgattgtcacttacaaaataaaatacatttacagtcta

SEQ ID NO: 24021 - DNA, 577 bp, Homo sapiens
  source 1..577: mol_type = unassigned DNA
ttcaggtaagacccagaaggcaggcctgggaggtctggggaggcagccgtgctaggccgccgccagccccgtgctttcctgagtcacgttgcccagctgagttgccacaggaggcctgggccgcgagggaggagcccggcctccttcattctcttcgcctgctctcagggctctctggcagggtcaggagagaaagaaaaaataaaatatacttggggaagttgtacctgccagaattagcaagagctttctttaagaagacatttgtcaaactcaacaaattgaaggttaacaccttaagagttgtagttactgaccagaaatatggacagacttcttagacttggaggaggtatgcctggactgggccaggggccacctacagatgctcctgcagtggacacagcagaacaagtctatatctcttccctggcactgttaaaaatgttaaaacatggccgtgctggagttccaatggaagttatgggtttgatgcttggagaatttgttgatgattataccgtcagagtgattgatgtgtttgctatgccacagtcaggaacaggtgtcagtgtgg

SEQ ID NO: 24022 - DNA, 3449 bp, Homo sapiens
  source 1..3449: mol_type = unassigned DNA
caacaacaacaacaaaaccaaatgaggttaatattccacagtggtgtggggctagacacagttacacagactttatacaggcggcaatcaagcgtcctggacgtcaagaaatctagtttgtctgtcgcgccacgcagtcaactggagtgtcactgtgggttctatttacaccgttatgagaaaaacctgtggcggagtaaaactcggtaactccgctcgcagaccgcccatctacagcagtgagcgaacccaaaccccacacggccaagtcccgcgggtttcaggaaactccgaagaggtcgggggccaggggcgactatggcgcgggggaggctgggaattgtagtctccacctgcctccgagggcggggtccgagggcggggctctcaggccgagggggtgggtgggtcgccgagcgccccggctcgccccggcgtttccggtcgcaggcgggctctggaggaggaggggcgccgcgaccgacgcgcgcgagttggtctgggaaaaagggcggtgcgagcgggtgcgcgcgcagcgggccggcagtggcggcggagatggaggagggaggccgggacaaggcgccggtgcagccccagcagtctccagcggcggcccccggcggcacggacgagaagccgagcggcaaggagcggcgggatgccggggacaaggacaaagaacaggagctgtctgaagaggataaacagcttcaagatgaactggagatgctcgtggaacgactaggggagaaggatacatccctgtatcgaccagcgctggaggaattgcgaaggcagattcgttcttctacaacttccatgacttcagtgcccaagcctctcaaatttctgcgtccacactatggcaaactgaaggaaatctatgagaacatggcccctggggagaataagcgttttgctgctgacatcatctccgttttggccatgaccatgagtggggagcgtgagtgcctcaagtatcggctagtgggctcccaggaggaattggcatcatggggtcatgagtatgtcaggcatctggcaggagaagtggctaaggagtggcaggagctggatgacgcagagaaggtccagcgggagcctctgctcactctggtgaaggaaatcgtcccctataacatggcccacaatgcagagcatgaggcttgcgacctgcttatggaaattgagcaggtggacatgctggagaaggacattgatgaaaatgcatatgcaaaggtctgcctttatctcaccagttgtgtgaattacgtgcctgagcctgagaactcagccctactgcgttgtgccctgggtgtgttccgaaagtttagccgcttccctgaagctctgagattggcattgatgctcaatgacatggagttggtagaagacatcttcacctcctgcaaggatgtggtagtacagaaacagatggcattcatgctaggccggcatggggtgttcctggagctgagtgaagatgtcgaggagtatgaggacctgacagagatcatgtccaatgtacagctcaacagcaacttcttggccttagctcgggagctggacatcatggagcccaaggtgcctgatgacatctacaaaacccacctagagaacaacaggtttgggggcagtggctctcaggtggactctgcccgcatgaacctggcctcctcttttgtgaatggctttgtgaatgcagcttttggccaagacaagctgctaacagatgatggcaacaaatggctttacaagaacaaggaccacggaatgttgagtgcagctgcatctcttgggatgattctgctgtgggatgtggatggtggcctcacccagattgacaagtacctgtactcctctgaggactacattaagtcaggagctcttcttgcctgtggcatagtgaactctggggtccggaatgagtgtgaccctgctctggcactgctctcagactatgttctccacaacagcaacaccatgagacttggttccatctttgggctaggcttggcttatgctggctcaaatcgtgaagatgtcctaacactgctgctgcctgtgatgggagattcaaagtccagcatggaggtggcaggtgtcacagctttagcctgtggaatgatagcagtagggtcctgcaatggagatgtaacttccactatccttcagaccatcatggagaagtcagagactgagctcaaggatacttatgctcgttggcttcctcttggactgggtctcaaccacctggggaagggtgaggccatcgaggcaatcctggctgcactggaggttgtgtcagagccattccgcagttttgccaacacactggtggatgtgtgtgcatatgcaggctctgggaatgtgctgaaggtgcagcagctgctccacatttgtagcgaacactttgactccaaagagaaggaggaagacaaagacaagaaggaaaagaaagacaaggacaagaaggaagcccctgctgacatgggagcacatcagggagtggctgttctggggattgcccttattgctatgggggaggagattggtgcagagatggcattacgaacctttggccacttgctgagatatggggagcctacactccggagggctgtacctttagcactggccctcatctctgtttcaaatccacgactcaacatcctggataccctaagcaaattctctcatgatgctgatccagaagtttcctataactccatttttgccatgggcatggtgggcagtggtaccaataatgcccgtctggctgcaatgctgcgccagttagctcaatatcatgccaaggacccaaacaacctcttcatggtgcgcttggcacagggcctgacacatttagggaagggcacccttaccctctgcccctaccacagcgaccggcagcttatgagccaggtggccgtggctggactgctcactgtgcttgtctctttcctggatgttcgaaacattattctaggcaaatcacactatgtattgtatgggctggtggctgccatgcagccccgaatgctggttacgtttgatgaggagctgcggccattgccagtgtctgtccgtgtgggccaggcagtggatgtggtgggccaggctggcaagccgaagactatcacagggttccagacgcatacaaccccagtgttgttggcccacggggaacgggcagaattggccactgaggagtttcttcctgttacccccattctggaaggttttgttatccttcggaagaaccccaattatgatctctaagtgaccaccaggggctctgaactgcagctgatgttatcagcaggccatgcatcctgctgccaagggtggacacggctgcagacttctgggggaattgtcgcctcctgctcttttgttactgagtgagataaggttgttcaataaagacttttatccccaaggtc

SEQ ID NO: 24023 - DNA, 2877 bp, Homo sapiens
  source 1..2877: mol_type = unassigned DNA
gcagtggcggcggagatggaggagggaggccgggacaaggcgccggtgcagccccagcagtctccagcggcggcccccggcggcacggacgagaagccgagcggcaaggagcggcgggatgccggggacaaggacaaagaacaggagctgtctgaagaggataaacagcttcaagatgaactggagatgctcgtggaacgactaggggagaaggatacatccctgtatcgaccagcgctggaggaattgcgaaggcagattcgttcttctacaacttccatgacttcagtgcccaagcctctcaaatttctgcgtccacactatggcaaactgaaggaaatctatgagaacatggcccctggggagaataagcgttttgctgctgacatcatctccgttttggccatgaccatgagtggggagcgtgagtgcctcaagtatcggctagtgggctcccaggaggaattggcatcatggggtcatgagtatgtcaggcatctggcaggagaagtggctaaggagtggcaggagctggatgacgcagagaaggtccagcgggagcctctgctcactctggtgaaggaaatcgtcccctataacatggcccacaatgcagagcatgaggcttgcgacctgcttatggaaattgagcaggtggacatgctggagaaggacattgatgaaaatgcatatgcaaaggtctgcctttatctcaccagttgtgtgaattacgtgcctgagcctgagaactcagccctactgcgttgtgccctgggtgtgttccgaaagtttagccgcttccctgaagctctgagattggcattgatgctcaatgacatggagttggtagaagacatcttcacctcctgcaaggatgtggtagtacagaaacagatggcattcatgctaggccggcatggggtgttcctggagctgagtgaagatgtcgaggagtatgaggacctgacagagatcatgtccaatgtacagctcaacagcaacttcttggccttagctcgggagctggacatcatggagcccaactgatgctacaaaacccacctagagaacaacaggtttgggggcagtggctctcaggtggactctgcccgcatgaacctggcctcctcttttgtgaatggctttgtgaatgcagcttttgggacaagctgctaacagatgatggcaacaaatggctttacaagaacaaggaccacggaatgttgagtgcagctgcatctcttgggatgattctgctgtgggatgtggatggtggcctcacccagattgacaagtacctgtactcctctgaggactacattaagtcaggagctcttcttgcctgtggcatagtgaactctggggtccggaatgagtgtgaccctgctctggcactgctctcagactatgttctccacaacagcaacaccatgagacttggttccatctttgggctaggcttggcttatgctggctcaaatcgtgaagatgtcctaacactgctgctgcctgtgatgggagattcaaagtccagcatggaggtggcaggtgtcacagctttagcctgtggaatgatagcagtagggtcctgcaatggagatgtaacttccactatccttcagaccatcatggagaagtcagagactgagctcaaggatacttatgctcgttggcttcctcttggactgggtctcaaccacctggggaagggtgaggccatcgaggcaatcctggctgcactggaggttgtgtcagagccattccgcagttttgccaacacactggtggatgtgtgtgcatatgcaggctctgggaatgtgctgaaggtgcagcagctgctccacatttgtagcgaacactttgactccaaagagaaggaggaagacaaagacaagaaggaaaagaaagacaaggacaagaaggaagcccctgctgacatgggagcacatcagggagtggctgttctggggcccttattgctatgggggaggagattggtgcagagatggcattacgaaccttatcatcagctgagatatggggagcctacactccggagggctgtacctttagcactggccctcatctctgtttcaaatccacgactcaacatcctggataccctaagcaaattctctcatgatgctgatccagaagtttcctataactccatttttgccatgggcatggtgggcagtggtaccaataatgcccgtctggctgcaatgctgcgccagttagctcaatatcatgccaaggacccaaacaacctcttcatggtgcgcttggcacagggcctgacacatttagggaagggcacccttaccctctgcccctaccacagcgaccggcagcttatgagccaggtggccgtggctggactgctcactgtgcttgtctctttcctggatgttcgaaacattattctaggcaaatcacactatgtattgtatgggctggtggctgccatgcagccccgaatgctggttacgtttgatgaggagctgcggccattgccagtgtctgtccgtgtgggccaggcagtggatgtggtgggccaggctggcaagccgaagactatcacagggttccagacgcatacaaccccagtgttgttggcccacggggaacgggcagaattggccactgaggagtttcttcctgttacccccattctggaaggttttgttttcggaagaaccccaattatgatctctaagtgaccaccaggggctctgaactgcagctgatgttatcagcaggccatgcatcctgctgccaagggtggacacggctgcagacttctgggggaattgtcgcctcctgctcttttgttactgagtgagataaggttgttcaataaagacttttatcccc

SEQ ID NO: 24024 - DNA, 2861 bp, Homo sapiens
  source 1..2861: mol_type = unassigned DNA
atggaggagggaggccgggacaaggcgccggtgcagccccagcagtctccagcggcggcccccggcggcacggacgagaagccgagcggcaaggacaaagaacaggagctgtctgaagaggataaacagcttcaagatgaactggagatgctcgtggaacgactaggggagaaggatacatccctgtatcgaccagcgctggaggaattgcgaaggcagattcgttcttctacaacttccatgacttcagtgcccaagcctctcaaatttctgcgtccacactatggcaaactgaaggaaatctatgagaacatggcccctggggagaataagcgttttgctgctgacatcatctccgttttggccatgaccatgagtggggagcgtgagtgcctcaagtatcggctagtgggctcccaggaggaattggcatcatggggtcatgagtatgtcaggcatctggcaggagaagtggctaaggagtggcaggagctggatgacgcagagaaggtccagcgggagcctctgctcactctggtgaaggaaatcgtcccctataacatggcccacaatgcagagcatgaggcttgcgacctgcttatggaaattgagcaggtggacatgctggagaaggacattgatgaaaatgcatatgcaaaggtctgcctttatctcaccagttgtgtgaattacgtgcctgagcctgagaactcagccctactgcgttgtgccctgggtgtgttccgaaagtttagccgcttccctgaagctctgagattggcattgatgctcaatgacatggagttggtagaagacatcttcacctcctgcaaggatgtggtagtacagaaacagatggcattcatgctaggccggcatggggtgttcctggagctgagtgaagatgtcgaggagtatgaggacctgacagagatcatgtccaatgtacagctcaacagcaacttcttggccttagctcgggagctggacatcatggagcccaaggtgcctgatgacatctacaaaacccacctagagaacaacaggtttgggggcagtggctctcaggtggactctgcccgcatgaacctggcctcctcttttgtgaatggctttgtgaatgcagcttttggccaagacaagctgctaacagatgatggcaacaaatggctttacaagaacaaggaccacggaatgttgagtgcagctgcatctcttgggatgattctgctgtgggatgtggatggtggcctcacccagattgacaagtacctgtactcctctgaggactacattaagtcaggagctcttcttgcctgtggcatagtgaactctggggtccggaatgagtgtgaccctgctctggcactgctctcagactatgttctccacaacagcaacaccatgagacttggttccatctttgggctaggcttggcttatgctggctcaaatcgtgaagatgtcctaacactgctgctgcctgtgatgggagattcaaagtccagcatggaggtggcaggtgtcacagctttagcctgtggaatgatagcagtagggtcctgcaatggagatgtaacttccactatccttcagaccatcatggagaagtcagagactgagctcaaggatacttatgctcgttggcttcctcttggactgggtctcaaccacctggggaagggtgaggccatcgaggcaatcctggctgcactggaggttgtgtcagagccattccgcagttttgccaacacactggtggatgtgtgtgcatatgcaggctctgggaatgtgctgaaggtgcagcagctgctccacatttgtagcgaacactttgactccaaagagaaggaggaagacaaagacaagaaggaaaagaaagacaaggacaagaaggaagcccctgctgacatgggagcacatcagggagtggctgttctggggattgcccttattgctatgggggaggagattggtgcagagatggcattacgaacctttggccacttgctgagatatggggagcctacactccggagggctgtacctttagcactggccctcatctctgtttcaaatccacgactcaacatcctggataccctaagcaaattctctcatgatgctgatccagaagtttcctataactccatttttgccatgggcatggtgggcagtggtaccaataatgcccgtctggctgcaatgctgcgccagttagctcaatatcatgccaaggacccaaacaacctcttcatggtgcgcttggcacagggcctgacacatttagggaagggcacccttaccctctgcccctaccacagcgaccggcagcttatgagccaggtggccgtggctggactgctcactgtgcttgtctctttcctggatgttcgaaacattattctaggcaaatcacactatgtattgtatgggctggtggctgccatgcagccccgaatgctggttacgtttgatgaggagctgcggccattgccagtgtctgtccgtgtgggccaggcagtggatgtggtgggccaggctggcaagccgaagactatcacagggttccagacgcatacaaccccagtgttgttggcccacggggaacgggcagaattggccactgaggagtttcttcctgttacccccattctggaaggttttgttatccttcggaagaaccccaattatgatctctaagtgaccaccaggggctctgaactgcagctgatgttatcagcaggccatgcatcctgctgccaagggtggacacggctgcagacttctgggggaattgtcgcctcctgctcttttgttactgagtgagataaggttgttcaataaagacttttatcccc

SEQ ID NO: 24025 - DNA, 3371 bp, Homo sapiens
  source 1..3371: mol_type = unassigned DNA
aagatggcagcccaggctttggcgctgctgagagaggtagcgaggctggaagcgccgctggaggagctacgcgcgcttcactccgtgctgcaggcagtgccgctcaacgagcttcgccagcaagcggcggagctgcgcctcggcccgctcttctccctgcttaacgagaaccatagggaaaagactactttgtgtgtatccattctggagagattgctccaagctatggaaccggttcacgtggcccggaacctcagggttgacctgcagaggggactaattcaccctgatgattctgtaaaaatcctcactctttcccagattggaagaattgttgaaaattctgatgctgttactgagattctaaataatgctgaattactaaaacaaattgtttattgcattggtggagagaatctatctgtagcaaaagcggctatcaaatccctgtcaagaatatcactaacccaagctggactggaggctttatttgaaagcaatctgctggatgatttgaaaagtgtaatgaaaacaaatgacattgttcgatacagggtgtatgagctaattatagagatttcttccgtgtcaccagaatctttaaactactgtaccacaagtggattggtaacccagctcctgagagagctgactggtgaggatgtgttggtcagagccacctgtatagaaatggtgacatcactggcatatactcatcatgggcgacaatatcttgctcaagaaggagtaattgaccaaatttctaatataattgttggggcagattcagaccctttctctagcttctatctgccaggattcgtgaagttttttggaaacctggctgtcatggatagtcctcaacagatctgtgagcgttatcctatctttgtggaaaaagtctttgaaatgatagaaagtcaggaccccactatgattggtgtagctgtagacacagttggaatcttgggatccaatgttgaaggaaaacaggttttacagaaaacaggaactcgctttgaacgcttgcttatgagaataggacatcaatcaaagaatgccccagtggagctaaaaattagatgtttggatgcaatttcatctcttctgtacttaccacctgagcagcagactgatgaccttctgaggatgacagaatcctggttttcttctttatctcgggatccactggagctcttccgtggcattagtagtcagcccttccctgaactacactgtgctgccttaaaagtgtttacggccattgcaaaccaaccctgggctcagaaacttatgtttaacagtccaggttttgtagaatatgtggtggaccggtctgtggagcatgacaaagcttcaaaggatgccaaatatgaactagtgaaagcacttgccaattccaagacaattgcagaaatctttgggaacccaaattatttgaggctcagaacttacctgagtgaagggccatactatgtgaaacctgtttccacgacagcagtagaaggagccgaatgatttcttctagagctcatgtagaggaccacgttttgaccaaaacttctcctaaggcatttgactccatctatatttcacaaaagagacttcctttccccaagaattatcatggaatgtcagatgttactttgttaccaacactgttatatttctacattgaaatgcaaagtggaactaggagtttggaatgcattaagagcagacaagcttggtcataatagatccagtgtttttcagattcctttcactgccttaatctttgcaacagggtggaagtttttttcttccctcaaaattttcatggacatgcaatcttatctaaaagcctgcttcagggctgggcgcggtggctaacacctataattcccagcactttgggaggccaagatgggcaaatcacttgagtctaggagttcaagaccagcctggccaatatggcaaaaccctgtctctactaaaaatataaaatcagccaggcatggtggcgcacacctataatctcagctactcaggaggctgaggcacgagaatcgcttgagcctgggaggcagaggttgcagtgagctgagatcttgccactgcacaccagcctgggcaacacagcaagactctgtctcaaaaataaatgaataaaataaaaacctgccaccaaattatttctggattctcttcactatctttttttttctttttggtcctttttccatttctgattccactttcaaagtcttggatatattctttgaaaaatgagtagtatggaatattaagattatgttccttatactcagaatactttttatgagctctcttgtttttttgttactattattcctttgaaaaaaagacaaaatatctaaaaaatgtttatagtgttcatgtaattttttttgctgtttaccaatgaactttgccctgttgtggttttgggggatcagaaggattcctaaactgtcatttcatttattggtaggtcatgattgctgagggttttgctttggatttttcatacctataaagtcaatcttgagttgatcagagaaagggaaacttactcctaataaacagactcagaacagaagggacatatgcataaatcaggataccatctcattaatttacaaaggataatctttcttttcattgacaacacctacacccacctgttttccagtgttcttctctctaaacagcaaagccaaagcactctgcacaccaaatcacctgttcagaggtttatgcatgagcatatttcttttaggccgtggtgaagttgataaaccacccctgctttgtaacaaaattattttaaagtgactggaattatctagtccccagattgatcatctcccctggcaacgtgactctgttttttgtgtgtgtttccatgctgactagtcccctactgttaatatcactactaattaggctataaccaggtctttcctggcctgagaaatattctcttaaaatgacctttgttttaatctcattcatgatgttgattttttttcaatgtggtgcaatatatacaataaaatttgtcataactattttaagtgtacagttcagtatattacatatgttcataagttgtacaaccatcaccaccatccatcttcagaattattttcatcttatacaattgaaactgtattcattaaacaataactgtctattccctcttttccccagcctctggcaaccaccattctgcttcatgacattgattttattcacttaacatcagattttggggggatgccctctctcctatgtatggtctacacattctgattttttttttagattgaataaaatttgtaaatcattattttcatttcataagtaaa

SEQ ID NO: 24026 - DNA, 686 bp, Homo sapiens
  source 1..686: mol_type = unassigned DNA
gaaatggtgacatcactggcatatactcatcatgggcgacaatatcttgctcaagaaggagtaattgaccaaatttctaatataattgttggggcagattcagaccctttctctagcttctatctgccaggattcgtgaagttttttggaaacctggctgtcatggatagtcctcaacagatctgtgagcgttatcctatctttgtggaaaaagtctttgaaatgatagaaagtcaggaccccactatgattggtgtagctgtagacacagttggaatcttgggatccaatgttgaaggaaaacaggttttacagaaaacaggttggtatgacttggccctgttcagggatatcttaatctttgacaggggttcaatatgtaagttcatttgctggtgggttaactacattgtagaaactattttatgggtggcagtcttgttaaccatgaccttgtactcatgtctgaaaatctaataattattacggaaaacctttttttttttttttttgacttttcactggtttaggttttcattggtttaggtttctaccaatcgatttcaaccaaacattgtttcctgtttcccctctatgatgtcttctttgactagatttcatggtacaaagaccacgggctagagtcagaaaggtctggattcatgtccttgggttttctattcttt

SEQ ID NO: 24027 - DNA, 1538 bp, Homo sapiens
  source 1..1538: mol_type = unassigned DNA
gggaactgggccgctgggccagcccctgcgtcggggggcaagatggcagcccaggctttggcgctgctgagagaggtagcgaggctggaagcgccgctggaggagctacgcgcgcttcactccgtgctgcaggcagtgccgctcaacgagcttcgccagcaagcggcggagctgcgcctcggcccgctcttctccctgcttaacgagaaccatagggaaaagactactttgtgtgtatccattctggagagattgctccaagctatggaaccggttcacgtggcccggaacctcagggttgacctgcagaggggactaattcaccctgatgattctgtaaaaatcctcactctttcccagattggaagaattgttgaaaattctgatgctgttactgagattctaaataatgctgaattactaaaacaaattgtttattgcattggtggagagaatctatctgtagcaaaagcgctaattatagagatttcttccgtgtcaccagaatctttaaactactgtaccacaagtggattggtaacccagctcctgagagagctgactggtgaggatgtgttggtcagagccacctgtatagaaatggtgacatcactggcatatactcatcatgggcgacaatatcttgctcaagaaggagtaattgaccaaatttctaatataattgttggggcagattcagaccctttctctagcttctatctgccaggattcgtgaagttttttggaaacctggctgtcatggatagtcctcaacagatctgtgagcgttatcctatctttgtggaaaaagtctttgaaatgatagaaagtcaggaccccactatgattggtgtagctgtagacacagttggaatcttgggatccaatgttgaaggaaaacaggttttacagaaaacaggaactcgctttgaacgcttgcttatgagaataggacatcaatcaaagaatgccccagtggagctaaaaattagatgtttggatgcaatttcatctcttctgtacttaccacctgagcagcagactgatgaccttctgaggatgacagaatcctggttttcttctttatctcgggatccactggagctcttccgtggcattagtagtcagcccttccctgaactacactgtgctgccttaaaagtgtttacggccattgcaaaccaaccctgggctcagaaacttatgtttaacagtccaggttttgtagaatatgtggtggaccggtctgtggagcatgacaaagcttcaaaggatgccaaatatgaactagtgaaagcacttgccaattccaagacaattgcagaaatctttgggaacccaaattatttgaggctcagaacttacctgagtgaagggccatactatgtgaaacctgtttccacgacagcagtagaaggagccgaatgatttcttctagagctcatgtagaggaccacgttttgaccaaaacttctcctaaggcatttgactccatctatatttcacaaaagagacttcctttccccaagaattatcat

SEQ ID NO: 24028 - DNA, 546 bp, Homo sapiens
  source 1..546: mol_type = unassigned DNA
aggaactcgctttgaacgcttgcttatgagaataggacatcaatcaaagaatgccccagtggagctaaaaattagatgtttggatgcaatttcatctcttctgtacttaccacctgagcagcagactgatgaccttctgaggatgacagaatcctggttttcttctttatctcgggatccactggagctcttccgtggcattagtagtcagcccttccctgaactacactgtgctgccttaaaagtgtttacgggaaggaaacacctgcatcttgaagaactagtaggaggcaatcaagtgaagaatacagtggagtagcaaagcaagacagcaggtacacatgaaaacaagagaacatgtttgagaaactacaagtaattcaatatgaccaacgcctaggatttaaagggaaatttttgcaaaattctttatcattattactaataatagctaccatttcttagcattgattttatgttaggcacttggcatgcatttcttactttatcatcataatagccataaaagttacgtatcatttcaca

SEQ ID NO: 24029 - DNA, 5689 bp, Homo sapiens
  source 1..5689: mol_type = unassigned DNA
gggagcggaagaaggaggccgcgcgagggctgacgaaccggaagaagaggaactgggcctgaaagggtaccggtgaccgctactgctgccggtgtttgcgtgtggcagggagccaggcctggcgagcggggtgtgtcgcgatgccggagctggcagtgcagaaggtggtggtccaccccctggtgctgctcagtgtggtggatcatttcaaccgaatcggcaaggttggaaaccagaagcgtgttgttggtgtgcttttggggtcatggcaaaagaaagtacttgatgtatcgaacagttttgcagttccttttgatgaagatgacaaagacgattctgtatggtttttagaccatgattatttggaaaacatgtatggaatgtttaagaaagtcaatgccagggaaagaatagttggctggtaccacacaggccctaaactacacaagaatgacattgccatcaacgaactcatgaaaagatactgtcctaattccgtattggtcatcattgatgtgaagccgaaggacctagggctgcctacagaagcgtacatttcagtggaagaagtccatgatgatggaactccaacctcgaaaacatttgaacacgtgaccagtgaaattggagcagaggaagctgaggaagttggagttgaacacttgttacgagatatcaaagacacgacggtgggcactctgtcccagcggatcacaaaccaggtccatggtttgaagggactgaactccaagcttctggatatcaggagctacctggaaaaagtcgccacaggcaagctgcccatcaaccaccagatcatctaccagctgcaggacgtcttcaacctgctgccagatgtcagcctgcaggagttcgtcaaggccttttacctgaagaccaatgaccagatggtggtagtgtacttggcctcgctgatccgttccgtggtcgccctgcacaacctcatcaacaacaagattgccaaccgggatgcagagaagaaagaagggcaggagaaagaagagagcaaaaaggataggaaagaggacaaggagaaagataaagataaggaaaagagtgatgtaaagaaagaggagaaaaaggagaaaaagtaaaacatgtattaaatagcttttttaatttgtaaattaaaatcttacaaactaaatcagtgtgctgctagagggttctttttcacttgacatgcttattagaaagctgacccaacaagagctctctgcctccggtcactcttgctgtggtgctacgtggaagtgaatggagactgatctcaaatctgaactgcagctttcgctgctgtgagttggggatatgatagtcagctcaggcttcagattgtatgagaaaaatgaagagaagtcaacaaatattttggtactcttcattcatttatctctaaaaccaggagttgaattttcctcatcttgaaagactcttggggtctgtttctggtattttacaaaattgctaagtggaatgcatgaattgcattatgttctctggtaacacgtagagttcagacccttctgaactctgttgataataccacaccatgttctggacccatagctctggcatcctcaggggttgtgatccagctccatatattgtttaccttcaaagatacaattaaatggcttgatttttaagctgtgttctagtcgtttttgacttcgggagtagtgatctgtagtttccagaagcagccaagacagtcttcgattggagctgccttaagttctcttgcacttggtatcatttatgaaagagcatctcattcccctaaatggaaacaggcagtctgctgtagtgaggagagttctctgagcccagaagacccgggttccagtttgtacctcagatccctcatttatgaggtggtaggttgcagtccgtcatctctgaagtccccagaacagtgtttcaaaagggacacatttaccacactgcagcaagttgtaagtacctcagaccacaggccaaacaggcatgttactaagaatggaacaatgtttcccccaagataagtgcacaggactcctagaggaacaaattaaataaggcactaaatcatttgacatacagtagtcacggatattaaatttcctctcttgaacagatagaacctctcaaatgcactacgtggattattcatcttcaaagatataagaatacaataaaatagcacaaaaactcagttgcatctcagaaaccacttcatgaggttataatgccttaaagtaatcagaagcatcgatttttattccatagacctgccaaagagctagttagtgggaatttgggaataggtagagcttgagtatcccttatctgaaatgcttggaaccagaagtattaaaagatttaggaaatttttttttttaatatttgcattatgcttaacggctgagcatgcctaataggaaatgttccaatgagcatttcctttcaataccatgtaagtgctcaaaaagtttcagattttggagcatttcaaatttttggattaggggcactcaacctgtagtaaaatgtaaaatggctcttattcagcataaatagaggcatgcccccatcaggggtcatttcagagttcatcaagattctgagataaaaaagcatggtacagtgaaaacaacaaaattgactttcctgtttcagaagccaaaagtcagacggtttgtatctaattgaataaaagaaacttgaagtacgtaagttaaaacttgaggtgtatcccaaaccatgggagcgttgaagaagcttttgagatctgggtgccatgtttggaacacactgatgtgacaggttgcctggaccacaaaccctggctaggaaatgggcaagagcaagacccaggcatcgggggagagccaggtgccatggtgctgaggctctaagcaagggaacgcaacgtcatcctaaggaacgggtcctgtatgtaaggctcaggggccagtgcacacctgaattgacaccgcacaggattcaggtctgcctttaagaacataatgcagggttgggggcagtggctggtgcttgtagtcccaacactgggaggctgaggcaggaggatcacttgaggccaggagtaagagaccagcctgaacaacatagtaagagccatctacaaaaaattctaaaattgcctgggtgtggtgggatgtgccttagtcctagctactgaagaggctgaggtaggacactggagcccaggagctcaaggttacagtgagctgtgatcacatgccactgcactccagcctaggcaacagagcaaaatcctgtctctttaaaaaacaaaaagtatcatttggatttaaaagactttcccagggtccagtgaactagcacaatgccacagacttgtaagttggtcatagtttgatgaactgaaatgtttattgagcatctaagaacataggaatccccaggccttattatttttaatagtttggcccacatacggacaaaactgacttctaccttcctaacagaaatcttccatttctacttatgaagaaaatagcttatagcctgtggagtcacttaggcatattttctaaggccaaattgctgccatcatgtagaagagggggagcccagtagtgctaccgatgaagtcttgctcatacaaatagcggctgacttgactgcaaaacccagggcccacccctaaaataaagccttacatttgtgtattctggcattctggagatgagacttctaaacggcttttgctggctttggaaacactaaaaaagtattctggaaaaagtgtgatcctcagcctggatctcatcttcctagctgcaacattagcttcccttcgatttcaccacagcttcagaatgactgcctaatggatttcaggctgctcctgtgacaccttacagaggatgctgttcactcctgaattacggttttctgtttgaaaacacgaaatatgcgagttatagactggggataaatgtggagagggtcctgaagtcaaggagaagattttaccaaaactagagcacttcaatggagaagtaggcggagtgtggtggctcatgcctgtaatcctagcactttgggaggtcgaggctggtggattacttgaggtcaggagttcaagaccagcctggccaacatggtaaaaccccatctctactaaaaatacaaaaattagctgggcgtggtggtgtgcacctgtaatcccagctacctgggaggttgaggcaggagaatcgcttgaactggggatgtggaagttgcagtgagccgagattgtgccactgcactccagcctgggcaacagagcgagactctgtctcaaaaaaaaaaaaaaaaaaaattgccagaagcagatgaaagacaaccacaggtttaaatgaaaacaagctgaaacaatgcaaactttttatactagatattcgacttaaaaatatctcaatgaagggttagttttctcaaaaaaaaatgaaaaagaaaacaggaaatagccctcaacttatggaaaagaatgaaatctcccattcactgggtagttatgcaaaggctttttcttctaccattttccattaagcagaataaaacttgagaatgagttaggattgtttgttagactataacatgctaacaaaaccactttcatctgccctgtctgggaaaatgcggtggatacaggacatgtgggaaggcagagaaacatttgatttatatggcccacaagagaaaatgtttacaacttccctaagcaaatgtactgcaaattattacacataatacctgtgtacattcctatgccattcaactcttggcattaccgatttttgcctggtagcagtgcaaaattgagatctttttttaaaaactaaagcctgttttttggccaggcacagtggctcacacctgtaattgggaggccgaggcgggcggatcacacggttaggagttcgagaccagcctggccaatatggagaaacaccatctctactaaaaatacaacaattagctgggcatggtgatgggagcctgtaatcccagctactcgggaggctgaggcaggagaattgcttgaacccgggaggcggaggttgcactgagctggagatcgtgccactgcactccagcctgggtaacagagcaagactccatctcaaaaaaaaaaaagtaaaggctgtttttattgggggaataattaagaattgactcagtatagacatggaagtgaggaaagaaaatatgtgaaaagaaaggaagaagaaattatggaagtcgtgtttctagggcccaaatcaagagaaatcttttgctaatcattgctctttggagccaacctgttcttcgacactagatggcgtcattcactcacctcagctcatctcttggcaagagaaaaatttgattcccagttgggcatagatttgggaatctcccccaattacttcctgccatttctgctttcagctgaagccacccaggcaaaattttgaaggaacttgaagaggctatgggtgcaaaaagactgggttaagcatccacacctccacccttactgtcctcttgcacactgctgctgggggatgaatacattaatacaagcagatagtatgtgcttcgatttcccttactgctggtattactcttctaattttttttttttcctcgagactgggtcttg

SEQ ID NO: 24030 - DNA, 1395 bp, Homo sapiens
  source 1..1395: mol_type = unassigned DNA
agaggaactgggcctgaaagggtaccggtgaccgctactgctgccggtgtttgcgtgtggcagggagccaggcctggcgagcggggtgtgtcgcgatgccggagctggcagtgcagaaggtggtggtccaccccctggtgctgctcagtgtggtggatcatttcaaccgggtttcgccatgttgcccacgctgcccatgctcgtctcaaactcctgagctcaagtgatctgcccacctcagcctctcgaagtgctgggattacaggcatgagccactgcatccggcctactccatcatctttattccaaaaaagatttcaggatgggaaaagtttaaagaatcggcaaggttggaaaccagaagcgtgttgttggtgtgcttttggggtcatggcaaaagaaagtacttgatgtatcgaacagttttgcagttccttttgatgaagatgacaaagacgattctgtatggtttttagaccatgattatttggaaaacatgtatggaatgtttaagaaagtcaatgccagggaaagaatagttggctggtaccacacaggccctaaactacacaagaatgacattgccatcaacgaactcatgaaaagatactgtcctaattccgtattggtcatcattgatgtgaagccgaaggacctagggctgcctacagaagcgtacatttcagtggaagaagtccatgatgatggaactccaacctcgaaaacatttgaacacgtgaccagtgaaattggagcagaggaagctgaggaagttggagttgaacacttgttacgagatatcaaagacacgacggtgggcactctgtcccagcggatcacaaaccaggtccatggtttgaagggactgaactccaagcttctggatatcaggagctacctggaaaaagtcgccacaggcaagctgcccatcaaccaccagatcatctaccagctgcaggacgtcttcaacctgctgccagatgtcagcctgcaggagttcgtcaaggccttttacctgaagaccaatgaccagatggtggtagtgtacttggcctcgctgatccgttccgtggtcgccctgcacaacctcatcaacaacaagattgccaaccgggatgcagagaagaaagaagggcaggagaaagaagagagcaaaaaggataggaaagaggacaaggagaaagataaagataaggaaaagagtgatgtaaagaaagaggagaaaaaggagaaaaagtaaaacatgtattaaatagcttttttaatttgtaaattaaaatcttacaaactaaatcagtgtgctgctagagggttctttttcacttgacatgcttattagaaagctgacccaacaagagctctctgcctccggtcactcttgctgtggtgctacgt

SEQ ID NO: 24031 - DNA, 741 bp, Homo sapiens
  source 1..741: mol_type = unassigned DNA
cgcgttcgcggacggctgtggtgttttggcgcatgggcggagccgtagttacggtcgactggggcgtcgtccctagcccgggagccgggtctctggagtcgcggcccggggttcacgatgtccgacgaggaagcgaggcagagcggaggctcctcgcaggccggcgtcgtgactgtcagcgacgtccaggagctgatgcggcgcaaggaggagatagaagcgcagatcaaggccaactatgacgtgctggaaagccaaaaaggcattgggatgaacgagccgctggtggactgtgagggctacccccggtcagacgtggacctgtaccaagtccgcaccgccaggcacaacatcatatgcctgcagaatgatcacaaggcagtgatgaagcaggtggaggaggccctgcaccagctgcacgctcgcgacaaggagaagcaggcccgggacatggctgaggcccacaaagaggccatgagccgcaaactgggtcagagtgagagccagggccctccacgggccttcgccaaagtgaacagcatcagccccggctccccagccagcatcgcgggtctgcaagtggatgatgagattgtggagttcggctctgtgaacacccagaacttccagtcactgcataacattggcagtgtggtgcagcacagtgagggggccctggcacccaccatcctactttctgtctctatgaatttgactactccagggacctcatctaggtga

SEQ ID NO: 24032 - DNA, 2784 bp, Homo sapiens
  source 1..2784: mol_type = unassigned DNA
gactgttctcgcgttcgcggacggctgtggtgttttggcgcatgggcggagccgtagttacggtcgactggggcgtcgtccctagcccgggagccgggtctctggagtcgcggcccggggttcacgatgtccgacgaggaagcgaggcagagcggaggctcctcgcaggccggcgtcgtgactgtcagcgacgtccaggagctgatgcggcgcaaggaggagatagaagcgcagatcaaggccaactatgacgtgctggaaagccaaaaaggcattgggatgaacgagccgctggtggactgtgagggctacccccggtcagacgtggacctgtaccaagtccgcaccgccaggcacaacatcatatgcctgcagaatgatcacaaggcagtgatgaagcaggtggaggaggccctgcaccagctgcacgctcgcgacaaggagaagcaggcccgggacatggctgaggcccacaaagaggccatgagccgcaaactgggtcagagtgagagccagggccctccacgggccttcgccaaagtgaacagcatcagccccggctccccagccagcatcgcgggtctgcaagtggatgatgagattgtggagttcggctctgtgaacacccagaacttccagtcactgcataacattggcagtgtggtgcagcacagtgaggggaagcccctgaatgtgacagtgatccgcaggggggaaaaacaccagcttagacttgttccaacacgctgggcaggaaaaggactgctgggctgcaacattattcctctgcaaagatgattgtccctggggaacagtaacaggaaagcatcttcccttgccctggacttgggtctagggatttccaacttgtcttctctccctgaagcataaggatctggaagaggcttgtaacctgaacttctgtgtggtggcagtactgtggcccaccagtgtaatctccctggattaaggcattcttaaaaacttaggcttggcctctttcacaaattaggccacggccctaaataggaattccctggattgtgggcaagtgggcggaagttattctggcaggtactggtgtgattattattattatttttaataaagagttttacagtgctgatatgaccctgttgtcaccccagctgaatttcttatgaccctcccaaaccaaagctcagatggggtcagaagagcttcatagaaagttgggcaaaacaggctagcaattgcaaagtcaggctttgaccaacatatttctttgcactgaggccttgctgctgtggatacggaaatggttaagtactgtgcttcctcagcagctgggctgtcagggccatagtagctccctttggagaacagggaaagcctggaggcttcccaggtggcccagcgtggtgtcctgtcagcttcctctttaggaacccaccagagggcagcaagctcctttcacttcgctagtaagaacccctccgtttttgtgtgtttttgtttttgttttctggagacaaggtcttgctttgtcacccaggctggagtgcagtgtcgtgatcaaggttcactgaagccttgacgctgtgggcactgcctcagccgcccaagtatctgggaccacaggcgtgcaccaccatgcatagctaatttattttttgtagagacagggtctccctgtgttgaccaggttggtctcgaactcctgggctcaagcagtcctcctgccttggcctcctaaagtgctgggatcacaggcgtgagccactgcgcccagcccactgctagtttgactttttataattgaacctcctggctatgccctgagatcagcgctattttgtaaaccgctgaggtatggataggaacgagtagatcagacctcttgaaaatgcttattcttcctcccttttattttttgtctcttttaagatggtaaaatggttctcagggattcctgccaatactttgaattattttttcctctccatggtatcagtgttcatttccccagttcttgcacaccgctttctgttttggcagttctgccaggcaagccctgtgttccttgggactggttttgctgtggttggatacagataccagcttgccttgatgggattggtattgctgtgtgcttccagccacaggttctcacactcaattccaaagccttcctattgggcgaattccctcaaactctatttgacctgacagccatacgtattcccctctggtagccacagacatgctgtgtttaccaatgtttgctgtttaaattgcatgttctaattccacgtatcttccagtctcttttataaagtctcagactataataaacacagcttgcccagtttatcctttcttttttattttaagatgtatgcatattaatcaatttaccatcactggggcatggcagtgtgggcggggagaattattcacattctcctaaaatgacagcagcagagagccttctgcctcagtggctctggctggtttcctgcaggggtcccagtggaaacccgtgtggccacctgttgccgtcttccatgagatgttagtggagagccactttgacgtggaatgatcctaatagatatagccagaccggttttgcggaaacgctttgtgctgagaaccgcaagctggtgcaccctgtgtcatatctgcccccagccagctggaattgtctgcaacacgcggtgcccggtgaggaggcaggcaggacggttgtgtgctgcatccatgagacctggaaattcagtttgcttttggaaaagagcattg

SEQ ID NO: 24033 - DNA, 1006 bp, Homo sapiens
  source 1..1006: mol_type = unassigned DNA
actacccaggaaggcggagctgggtgcgagcgccctaccgctttcgctttcccttcgcggtgcccactccactccttgtgcggcgctaggccccccgtcccggtcatggccatgctcagggtccagcccgaggcccaagccaaggtggatgtgtttcgtgaagacctctgtaccaagacagagaacctgctcgggagctatttccccaagaagatttctgagctggatgcatttttaaaggagccagctctcaatgaagccaacttgagcaatctgaaggccccattggacatcccagtgcctgatccagtcaaggagaaagagaaagaggagcggaagaaacagcaggagaaggaagacaaggatgaaaagaagaagggggaggatgaagacaaaggtcctccctgtggcccagtgaactgcaatgaaaagatcgtggtccttctgcagcgcttgaagcctgagatcaaggatgtcattgagcagctcaacctggtcaccacctggttgcagctgcagatacctcggattgaggatggtaacaattttggagtggctgtccaggagaaggtgtttgagctgatgaccagcctccacaccaagctagaaggcttccacactcaaatctctaagtatttctctgagcgtggtgatgcagtgactaaagcagccaagcagccccatgtgggtgattatcggcagctggtgcacgagctggatgaggcagagtaccgggacatccggctgatggtcatggagatccgcaatgcttatgctgtgttatatgacatcatcctgaagaacttcgagaagctcaagaagcccaggggagaaacaaagggaatgatctattgagagccctctctcccattctgtgatgagtacagcagagaccttcctgctttttactggggactccagattttccccaaacttgcttctgttgagatttttccctcaccttgcctctcaggcacaataaatatagttataccactgcccatca

SEQ ID NO: 24034 - DNA, 1136 bp, Homo sapiens
  source 1..1136: mol_type = unassigned DNA
ttcgctttcccttcgcggtgcccactccactccttgtgcggcgctaggccccccgtcccggtcatggccatgctcagggtccagcccgaggcccaagccaaggtggatgtgtttcgtgaagacctctgtaccaagacagagaacctgctcgggagctatttccccaagaagatttctgagctggatgcatttttaaaggagccagctctcaatgaagccaacttgagcaatctgaaggccccattggacatcccagtgcctgatccagtcaaggagaaagagaaagaggagcggaagaaacagcaggagaaggaagacaaggatgaaaagaagaagggggaggatgaagacaaaggtcctccctgtggcccagtgaactgcaatgaaaagatcgtggtccttctgcagcgcttgaagcctgagatcaaggatgtcattgagcagctcaacctggtcaccacctggttgcagctgcagatacctcggattgaggatggtaacaattttggagtggctgtccaggagaaggtgtttgagctgatgaccagcctccacaccaagctagaaggcttccacactcaaatctctaagtatttctctgagcgtggtgatgcagtgactaaagcagccaagcagccccatgtgggtgattatcggcagctggtgcacgagctggatgaggcagagtaccgggacatccggctgatggtcatggagatccgcaatgcttatgtgaggaggcaagggcagggcaggggtgggcagaggcagctttcccaggccacccactccctgaccctgcaggctaggggttaagggtgacaaagctcagcttctccacaaggctagaaatggggcacagagccactggaggcctctgactgacctctactccctggccctgtaggctgtgttatatgacatcatcctgaagaacttcgagaagctcaagaagcccaggggagaaacaaagggaatgatctattgagagccctctctcccattctgtgatgagtacagcagagaccttcctgctttttactggggactccagattttccccaaacttgcttctgttgagatttttccctcaccttgcctctcaggcacaataaatatagttataccactgccca

SEQ ID NO: 24035 - DNA, 1404 bp, Homo sapiens
  source 1..1404: mol_type = unassigned DNA
ctggaccagtccggtacgctccgggcctcaccgaggaagtcccaccctgcaggggaaccgactctggccggccctaacccctctcgagcgagtcccgccccatctccggtctgtcctgaaggcagagggaagaccctcacccaacccctgcccgctctcttctaagagctgctagtccttctccaccccaggcgctccctctggctgcccctcccactcgctctgatctctctccgtccgctacttgcggtcgagccttcttgggggagccccgccactgaataccccctttgccatactcccacctctcttaccccaaccctggacttccagttggccctagctataagccccgcccctctccgagggacagcccccgctccagtctccgcggtcccacttaccctagcccctccctcgggcagcccctggactgtgacccagccagcaccgcctctcctagtggcaactggctgggaatggctgaggggctacctactgcttgcggcctgccagcgggaggaggggggcggaaagaagaaagggggcggggttgaggggggcgggcctggacctggggagtgaaagcgaaagcccgggcgactagccgggagaccagagatctagcgactgaagcagcatggccaagccgtgtggggtgcgcctgagcggggaagcccgcaaacaggtggaggtcttcagacagaatcttttccaggaggctgaggaattcctctacagattcttgccacagaaaatcatatacctgaatcagctcttgcaagaggactccctcaatgtggctgacttgacttccctccgggccccactggacatccccatcccagaccctccacccaaggatgatgagatggaaacagataagcaggagaagaaagaagtccataagtgtggatttctccctgggaatgagaaagtcctgtccctgcttgccctggttaagccagaagtctggactctcaaagagaaatgcattctggtgattacatggatccaacacctgatccccaagattgaagatggaaatgattttggggtagcaatccaggagaaggtgctggagagggtgaatgccgtcaagaccaaagtggaagctttccagacaaccatttccaagtacttctcagaacgtggggatgctgtggccaaggcctccaaggagactcatgtaatggattaccgggccttggtgcatgagcgagatgaggcagcctatggggagctcagggccatggtgctggacctgagggccttctatgctgagctttatcatatcatcagcagcaacctggagaaaattgtcaacccaaagggtgaagaaaagccatctatgtactgaacccgggactagaaggaaaataaatgatctatatgttgtgtgga

SEQ ID NO: 24036 - DNA, 3210 bp, Homo sapiens
  source 1..3210: mol_type = unassigned DNA
ggcgtgagcggcgaaagccgggagggcgagcgagagagcaagcaggcagcaggctgccggcgggcgggcggacggcacagagggagggagcgagcgagcagtgagtaagccagcaagggcggtcgggtcccgaggtcagccgagatttctcaggtccctccggccccctccctggagtccacagcgcctccggtgtccagaggatcggacacggcccggcccggccatggcctcgttgctgaaggtggatcaggaagtgaagctcaaggttgattctttcagggagcggatcacaagtgaggcagaagacttggtggcaaattttttcccaaagaagttattagaacttgatagttttctgaaggaaccaatcttaaacatccatgacctaactcagatccactctgacatgaatctcccagtccctgaccccattcttctcaccaatagccatgatggactggatggtcccacttataagaagcgaaggttggatgagtgtgaagaagccttccaaggaaccaaggtgtttgtgatgcccaatgggatgctgaaaagcaaccagcagctggtggacattattgagaaagtgaaacctgagatccggctgttgattgagaaatgtaacacgccttcaggcaaaggtcctcatatatgttttgacctccaggtcaaaatgtgggtacagctcctgattcccaggatagaagatggaaacaactttggggtgtccattcaggaggaaacagttgcagagctaagaactgttgagagtgaagctgcatcttatctggaccagatttctagatattatattacaagagccaaattggtttctaaaatagctaaatatccccatgtggaggactatcgccgcaccgtgacagagattgatgagaaagaatatatcagccttcggctcatcatatcagagctgaggaatcaatatgtcactctacatgacatgatcctgaaaaatatcgagaagatcaaacggccccggagcagcaatgcagagactctgtactgaggccagggccagggccaggggactctgtgagtctggctcaagaccgacattgccttggtttgttacatgactatcgtgatggggaaactggctggaaatagtaatcacacctctctgtttttagttagagtctaatgaaactctcatctagttctgtgatgtgtttacctcttttttcaggcctcaggaactcttctatttccttccctaataccccacacccaacctgtcgtaatttctggagaactccaggtttgtgtgtgcaggatgttggcacaaaaatacctgtgttttcattctccccctctctccctcctgtgtcttgcgctttatgttttcttccgtttgataattagttggttaaaagctgagggaaccggaaggaaagtgctaggtgttttttaggaactagggtggcggggggacgaacttctcttcctcacatgaggttactgtttctttcctctgtggggcattggatcctcccacagttgccctggtgatgacttagggcttcccatctgtgtacatcccactttgaatcttgatcgtgacaagaaataccttaggccttcagtcaattccgaagctccttcagttgtttttataatgggcgttttcacatgcacatatgtgtatgcatgtatacgcccatacagacatgcacacacagactcctactccattagctaacataccctccctctccacaacccctgtcacatacctttcaggaggtgacagttgtcttagttgtcatctacccagacaaacgtcctgggcccgtcctccctcctgatactgtagcctcttggtacccagggtgagttggtggagaacagagagatgagaagcagagggcttggggaaagcctgttcctctctgactcagccctttttggcattattgcaagagcttgactcctggttgccttttcccagccagttttcagttggggtgaaggtttctgcaagtgtgaggtccagatgctgctgctcatgttgggctttccttttgggaactatttctctttatttatagtgtcgggcttccggggaaagcaatcattggtgtgtatgtgtatgtgcatgcacacacgtgcatatacacatttgtgtatgtggaaatgtgctgggcaagtcaaaactatagaagagttgcctcctgtctctcgaatcttccagagatatcacttaattgttaacagcttttgtgttaatccccttcagcccctagctcttttattctaccacggctggagagttgatacctgcagtcagcctgccagtgactcttagtgtctgtttctgacttatttttcctgtctctgtcttccaacccccaataatatttccaccggggatgcatcatttttactcccaatattctgtagagagggagtcaggatgctgtcttcccacgaatagtactcagtaacaaaccaattgcattttagttgggcagtgctcccacccaccctccagatcccttccagctaaaacccttcccccttccctccatgtgtttctcagtttcccgtttcgtttgttggactgttccactgcccctcctcctcaccctatcacccatggatcgtaatgtaaaattcttttaccatgtcaagaaattattaaaaatacaggtactttgacctctttctaaagccgcagaccctggtgcaatgctctggtggctagggatgtactcatgctcatatgtgtgcacgcttggacacccacctccatggacacctagccaccctgttgtgtgtccttatgccagttgagctgaatcttttccccagtatagtggaaagactgaggcttctgcctactgagcaaggttgggtgcttcatttgtgttcagtctgaattatgggaaagttagctcttcccagacctaagctgccttctctccctactttcagaagatcctagttccttccttcccgagtgatacccatgaactgccagtagaggctgctatcgttccatgtgtaaggaatgaactggttcaaggcgcgtcctacccagtcattttctttaccttatactaattcttcctgaataatgtcttcagtttcttgaggagactcctagttttggttttcaaattacttggagggctgcctaggaatctatctccctctgaaataaagtttcctcatcttccaccttgc

SEQ ID NO: 24037 - DNA, 3171 bp, Homo sapiens
  source 1..3171: mol_type = unassigned DNA
ggcgtgagcggcgaaagccgggagggcgagcgagagagcaagcaggcagcaggctgccggcgggcgggcggacggcacagagggagggagcgagcgagcagtgagtaagccagcaagggcggtcgggtcccgaggtcagccgagatttctcaggtccctccggccccctccctggagtccacagcgcctccggtgtccagaggatcggacacggcccggcccggccatggcctcgttgctgaaggtggatcaggaagtgaagctcaaggttgattctttcagggagcggatcacaagtgaggcagaagacttggtggcaaattttttcccaaagaagttattagaacttgatagttttctgaaggaaccaatcttaaacatccatgacctaactcagatccactctgacatgaatctcccagtccctgaccccattcttctcaccaatagccatgatggactggatggtcccacttataagaagcgaaggttggatgagtgtgaagaagccttccaaggaaccaaggtgtttgtgatgcccaatgggatgctgaaaagcaaccagcagctggtggacattattgagaaagtgaaacctgagatccggctgttgattgagaaatgtaacacggtcaaaatgtgggtacagctcctgattcccaggatagaagatggaaacaactttggggtgtccattcaggaggaaacagttgcagagctaagaactgttgagagtgaagctgcatcttatctggaccagatttctagatattatattacaagagccaaattggtttctaaaatagctaaatatccccatgtggaggactatcgccgcaccgtgacagagattgatgagaaagaatatatcagccttcggctcatcatatcagagctgaggaatcaatatgtcactctacatgacatgatcctgaaaaatatcgagaagatcaaacggccccggagcagcaatgcagagactctgtactgaggccagggccagggccaggggactctgtgagtctggctcaagaccgacattgccttggtttgttacatgactatcgtgatggggaaactggctggaaatagtaatcacacctctctgtttttagttagagtctaatgaaactctcatctagttctgtgatgtgtttacctcttttttcaggcctcaggaactcttctatttccttccctaataccccacacccaacctgtcgtaatttctggagaactccaggtttgtgtgtgcaggatgttggcacaaaaatacctgtgttttcattctccccctctctccctcctgtgtcttgcgctttatgttttcttccgtttgataattagttggttaaaagctgagggaaccggaaggaaagtgctaggtgttttttaggaactagggtggcggggggacgaacttctcttcctcacatgaggttactgtttctttcctctgtggggcattggatcctcccacagttgccctggtgatgacttagggcttcccatctgtgtacatcccactttgaatcttgatcgtgacaagaaataccttaggccttcagtcaattccgaagctccttcagttgtttttataatgggcgttttcacatgcacatatgtgtatgcatgtatacgcccatacagacatgcacacacagactcctactccattagctaacataccctccctctccacaacccctgtcacatacctttcaggaggtgacagttgtcttagttgtcatctacccagacaaacgtcctgggcccgtcctccctcctgatactgtagcctcttggtacccagggtgagttggtggagaacagagagatgagaagcagagggcttggggaaagcctgttcctctctgactcagccctttttggcattattgcaagagcttgactcctggttgccttttcccagccagttttcagttggggtgaaggtttctgcaagtgtgaggtccagatgctgctgctcatgttgggctttccttttgggaactatttctctttatttatagtgtcgggcttccggggaaagcaatcattggtgtgtatgtgtatgtgcatgcacacacgtgcatatacacatttgtgtatgtggaaatgtgctgggcaagtcaaaactatagaagagttgcctcctgtctctcgaatcttccagagatatcacttaattgttaacagcttttgtgttaatccccttcagcccctagctcttttattctaccacggctggagagttgatacctgcagtcagcctgccagtgactcttagtgtctgtttctgacttatttttcctgtctctgtcttccaacccccaataatatttccaccggggatgcatcatttttactcccaatattctgtagagagggagtcaggatgctgtcttcccacgaatagtactcagtaacaaaccaattgcattttagttgggcagtgctcccacccaccctccagatcccttccagctaaaacccttcccccttccctccatgtgtttctcagtttcccgtttcgtttgttggactgttccactgcccctcctcctcaccctatcacccatggatcgtaatgtaaaattcttttaccatgtcaagaaattattaaaaatacaggtactttgacctctttctaaagccgcagaccctggtgcaatgctctggtggctagggatgtactcatgctcatatgtgtgcacgcttggacacccacctccatggacacctagccaccctgttgtgtgtccttatgccagttgagctgaatcttttccccagtatagtggaaagactgaggcttctgcctactgagcaaggttgggtgcttcatttgtgttcagtctgaattatgggaaagttagctcttcccagacctaagctgccttctctccctactttcagaagatcctagttccttccttcccgagtgatacccatgaactgccagtagaggctgctatcgttccatgtgtaaggaatgaactggttcaaggcgcgtcctacccagtcattttctttaccttatactaattcttcctgaataatgtcttcagtttcttgaggagactcctagttttggttttcaaattacttggagggctgcctaggaatctatctccctctgaaataaagtttcctcatcttccaccttgc

SEQ ID NO: 24038 - DNA, 2941 bp, Homo sapiens
  source 1..2941: mol_type = unassigned DNA
gcgaaagccgggagggcgagcgagagagcaagcaggcagcaggctgccggcgggcgggcggacggcacagagggagggagcgagcgagcagtgagtaagccagcaagggcggtcgggtcccgaggtcagccgagatttctcaggtccctccggccccctccctggagtccacagcgcctccggtgtccagaggatcggacacggcccggcccggccatggcctcgttgctgaaggtggatcaggaagtgaagctcaagctctgagcttccgctcggctcagcccagcccccaactcccggggtcggcttcgcgggagaggaaaatataggatggctttctgtaccgcgtctgatgatggagagtcccggggacacctccgcggacacgtgttggactcagggctttaggcccgtgacagctgacagcttcagacacaggaggaagggagggaagggggaggacagaggagacaggcaggtgctgtcctcaaagccctgcgttcttctgagatggaaaaatggatcctcaaaaaaataaagtatttgcagtctgggggcctctcagcttcttattacagttacaaggttgattctttcagggagcggatcacaagtgaggcagaagacttggtggcaaattttttcccaaagaagttattagaacttgatagttttctgaaggaaccaatcttaaacatccatgacctaactcagatccactctgacatgaatctcccagtccctgaccccattcttctcaccaatagccatgatggactggatggtcccacttataagaagcgaaggttggatgagtgtgaagaagccttccaaggaaccaaggtgtttgtgatgcccaatgggatgctgaaaagcaaccagcagctggtggacattattgagaaagtgaaacctgagatccggctgttgattgagaaatgtaacacggtcaaaatgtgggtacagctcctgattcccaggatagaagatggaaacaactttggggtgtccattcaggaggaaacagttgcagagctaagaactgttgagagtgaagctgcatcttatctggaccagatttctagatattatattacaagagccaaattggtttctaaaatagctaaatatccccatgtggaggactatcgccgcaccgtgacagagattgatgagaaagaatatatcagccttcggctcatcatatcagagctgaggaatcaatatgtcactctacatgacatgatcctgaaaaatatcgagaagatcaaacggccccggagcagcaatgcagagactctgtactgaggccagggccagggccaggggactctgtgagtctggctcaagaccgacattgccttggtttgttacatgactatcgtgatggggaaactggctggaaatagtaatcacacctctctgtttttagttagagtctaatgaaactctcatctagttctgtgatgtgtttacctcttttttcaggcctcaggaactcttctatttccttccctaataccccacacccaacctgtcgtaatttctggagaactccaggtttgtgtgtgcaggatgttggcacaaaaatacctgtgttttcattctccccctctctccctcctgtgtcttgcgctttatgttttcttccgtttgataattagttggttaaaagctgagggaaccggaaggaaagtgctaggtgttttttaggaactagggtggcggggggacgaacttctcttcctcacatgaggttactgtttctttcctctgtggggcattggatcctcccacagttgccctggtgatgacttagggcttcccatctgtgtacatcccactttgaatcttgatcgtgacaagaaataccttaggccttcagtcaattccgaagctccttcagttgtttttataatgggcgttttcacatgcacatatgtgtatgcatgtatacgcccatacagacatgcacacacagactcctactccattagctaacataccctccctctccacaacccctgtcacatacctttcaggaggtgacagttgtcttagttgtcatctacccagacaaacgtcctgggcccgtcctccctcctgatactgtagcctcttggtacccagggtgagttggtggagaacagagagatgagaagcagagggcttggggaaagcctgttcctctctgactcagccctttttggcattattgcaagagcttgactcctggttgccttttcccagccagttttcagttggggtgaaggtttctgcaagtgtgaggtccagatgctgctgctcatgttgggctttccttttgggaactatttctctttatttatagtgtcgggcttccggggaaagcaatcattggtgtgtatgtgtatgtgcatgcacacacgtgcatatacacatttgtgtatgtggaaatgtgctgggcaagtcaaaactatagaagagttgcctcctgtctctcgaatcttccagagatatcacttaattgttaacagcttttgtgttaatccccttcagcccctagctcttttattctaccacggctggagagttgatacctgcagtcagcctgccagtgactcttagtgtctgtttctgacttatttttcctgtctctgtcttccaacccccaataatatttccaccggggatgcatcatttttactcccaatattctgtagagagggagtcaggatgctgtcttcccacgaatagtactcagtaacaaaccaattgcattttagttgggcagtgctcccacccaccctccagatcccttccagctaaaacccttcccccttccctccatgtgtttctcagtttcccgtttcgtttgttggactgttccactgcccctcctcctcaccctatcacccatggatcgtaatgtaaaattcttttaccatgtcaagaaattatt

SEQ ID NO: 24039 - DNA, 956 bp, Homo sapiens
  source 1..956: mol_type = unassigned DNA
aagcaggcagcaggctgccggcgggcgggcggacggcacagagggagggagcgagcgagcagtgagtaagccagcaagggcggtcgggtcccgaggtcagccgagatttctcaggtccctccggccccctccctggagtccacagcgcctccggtgtccagaggatcggacacggcccggcccggccatggcctcgttgctgaaggtggatcaggaagtgaagctcaaggttgattctttcagggagcggatcacaagtgaggcagaagacttggtggcaaattttttcccaaagaagttattagaacttgatagttttctgaaggaaccaatcttaaacatccatgacctaactcagatccactctgacatgaatctcccagtccctgaccccattcttctcaccaatagccatgatggactggatggtcccacttataagaagcgaaggttggatgagtgtgaagaagccttccaaggtcaaaatgtgggtacagctcctgattcccaggatagaagatggaaacaactttggggtgtccattcaggaggaaacagttgcagagctaagaactgttgagagtgaagctgcatcttatctggaccagatttctagatattatattacaagagccaaattggtttctaaaatagctaaatatccccatgtggaggactatcgccgcaccgtgacagagattgatgagaaagaatatatcagccttcggctcatcatatcagagctgaggaatcaatatgtcactctacatgacatgatcctgaaaaatatcgagaagatcaaacggccccggagcagcaatgcagagactctgtactgaggccagggccagggccaggggactctgtgagtctggctcaagaccgacattgccttggtttgttacatgactatcgtgatggggaaactggctggaaatagtaatcacacctctctg

SEQ ID NO: 24040 - DNA, 3082 bp, Homo sapiens
  source 1..3082: mol_type = unassigned DNA
aagtgtaggagccaaggccgcagagaatggggaggctccgctattctctaaattcagggggcggcgggcgcggtggctcacgcctgtaatctcagcacttggggaggccgaggagggcggatcacgtgaggtcaggagttcgagaccagcctggccaacacagtgaaaccccgtctctactaaaaatacaaaaactagccgggcgtggtggggcacgcctataatcccagcttaatcccagctactcgggaggctgaggcaggagaatcgcttgaacctgggaggtggaggttgcagtgagccgagatcgggccactgcactccagcctgggcgacagggcaaggctccatctcagaacaacaacagcaacaacaaaaggccgggcatggtggctcacgcttgtaattccagcactttgggaggccgaggcgggcggatcacaaggctggagtgaagcggaacaaacaaacatggctcactgcagatttgacttcctggctcaagcaatcctcttgcttcaacctccagtgtagcagggaccacagcatgaaagcccctttaggggaggtgactggaatcatccccaaagaattctcacctagtcctggtgtggctgcttcatagtcctgcgtttcttcctgcttggctgtccctaacatctcagaaacgcatagagaagtaacgggcttctagagaggttgattctttcagggagcggatcacaagtgaggcagaagacttggtggcaaattttttcccaaagaagttattagaacttgatagttttctgaaggaaccaatcttaaacatccatgacctaactcagatccactctgacatgaatctcccagtccctgaccccattcttctcaccaatagccatgatggactggatggtcccacttataagaagcgaaggttggatgagtgtgaagaagccttccaaggaaccaaggtgtttgtgatgcccaatgggatgctgaaaagcaaccagcagctggtggacattattgagaaagtgaaacctgagatccggctgttgattgagaaatgtaacacggtcaaaatgtgggtacagctcctgattcccaggatagaagatggaaacaactttggggtgtccattcaggaggaaacagttgcagagctaagaactgttgagagtgaagctgcatcttatctggaccagatttctagatattatattacaagagccaaattggtttctaaaatagctaaatatccccatgtggaggactatcgccgcaccgtgacagagattgatgagaaagaatatatcagccttcggctcatcatatcagagctgaggaatcaatatgtcactctacatgacatgatcctgaaaaatatcgagaagatcaaacggccccggagcagcaatgcagagactctgtactgaggccagggccagggccaggggactctgtgagtctggctcaagaccgacattgccttggtttgttacatgactatcgtgatggggaaactggctggaaatagtaatcacacctctctgtttttagttagagtctaatgaaactctcatctagttctgtgatgtgtttacctcttttttcaggcctcaggaactcttctatttccttccctaataccccacacccaacctgtcgtaatttctggagaactccaggtttgtgtgtgcaggatgttggcacaaaaatacctgtgttttcattctccccctctctccctcctgtgtcttgcgctttatgttttcttccgtttgataattagttggttaaaagctgagggaaccggaaggaaagtgctaggtgttttttaggaactagggtggcggggggacgaacttctcttcctcacatgaggttactgtttctttcctctgtggggcattggatcctcccacagttgccctggtgatgacttagggcttcccatctgtgtacatcccactttgaatcttgatcgtgacaagaaataccttaggccttcagtcaattccgaagctccttcagttgtttttataatgggcgttttcacatgcacatatgtgtatgcatgtatacgcccatacagacatgcacacacagactcctactccattagctaacataccctccctctccacaacccctgtcacatacctttcaggaggtgacagttgtcttagttgtcatctacccagacaaacgtcctgggcccgtcctccctcctgatactgtagcctcttggtacccagggtgagttggtggagaacagagagatgagaagcagagggcttggggaaagcctgttcctctctgactcagccctttttggcattattgcaagagcttgactcctggttgccttttcccagccagttttcagttggggtgaaggtttctgcaagtgtgaggtccagatgctgctgctcatgttgggctttccttttgggaactatttctctttatttatagtgtcgggcttccggggaaagcaatcattggtgtgtatgtgtatgtgcatgcacacacgtgcatatacacatttgtgtatgtggaaatgtgctgggcaagtcaaaactatagaagagttgcctcctgtctctcgaatcttccagagatatcacttaattgttaacagcttttgtgttaatccccttcagcccctagctcttttattctaccacggctggagagttgatacctgcagtcagcctgccagtgactcttagtgtctgtttctgacttatttttcctgtctctgtcttccaacccccaataatatttccaccggggatgcatcatttttactcccaatattctgtagagagggagtcaggatgctgtcttcccacgaatagtactcagtaacaaaccaattgcattttagttgggcagtgctcccacccaccctccagatcccttccagctaaaacccttcccccttccctccatgtgtttctcagtttcccgtttcgtttgttggactgttccactgcccctcctcctcaccctatcacccatggatcgtaatgtaaaattcttttaccatgtcaagaaattattaaaaatacaggtactttgacctctttct

SEQ ID NO: 24041 - DNA, 7099 bp, Homo sapiens
  source 1..7099: mol_type = unassigned DNA
ggtgggggccggggagggttcgggtgggagggggtggggggggtgtccctgggctcatggagccggccgagcgggcgggagtcggagagcccccggagccgggcgggcgtcccgagccgggcccgcggggcttcgtcccgcagaaggagatcgtctacaacaagctgctgccctacgcggagcggctagacgccgagtccgacttgcagctggcccagatcaaatgcaacctgggccgggccgtgcagctccaagagctgtggcccgggggcctcttctggaccaggaaactctccacatatattcgactttatgggagaaaatttagcaaagaagatcatgttctttttattaagttattgtatgagctggtatcaattccaaaactggaaatcagcatgatgcagggatttgcccgccttttgatcaacttgttaaagaaaaaggaacttctttcaagagctgatttggagttaccctggagaccactttatgacatggtagaaagaatattatattccaagacagagcacctaggattaaattggtttcctaattctgtagaaaatattctcaaaacactcgtgaaaagctgccgaccatattttccagcagatgccaccgctgagatgctagaagaatggcgacctttaatgtgcccttttgatgtaaccatgcaaaaggccatcacttattttgaaatatttcttcctacctcccttcctccagaacttcatcataaaggttttaaactttggtttgatgaattaattggcctttgggtttcagtgcaaaatctcccacaatgggaggggcaactagtaaatctctttgctcgattggctacagataatatagggtacatagattgggatccatatgtaccaaagatatttacaagaattctgagaagcttgaacctcccagtgggaagcagtcaagtgttagtcccaagatttttaacaaatgcttatgatataggacatgctgtaatatggatcaccgccatgatgggtggaccaagtaagctagtgcaaaaacacttagctggtttgtttaacagcatcacatctttttaccatccttcaaataatgggcgctggctgaacaagttaatgaaactacttcagcggttgccaaacagtgttgttagaagattgcatcgtgaaagatacaagaagccctcttggttaactcctgtgcctgatagccacaagcttactgatcaagatgttacagactttgtacaatgcattattcagcctgtcctcttggctatgtttagcaaaaccggtagtctagaagcagcccaggctttgcagaatcttgcactcatgagacctgaattggtaataccccctgtacttgaaagaacatatcctgcattagagacattaacagaacctcaccagctcacagctactttaagttgtgtaattggagtagcccgcagtttggtatcaggaggcagatggtttcctgaaggtcctacacatatgctacctctgttgatgagagcattgcctggggtggatccaaatgactttagtaaatgcatgatcacattccagttcatagcaacattttctactctggtgcctttagtagattgttcatctgtactacaagaaagaaatgacctcacagaagtggaacgagaactttgttcagccacagctgaatttgaggatttcgtcttacagtttatggacagatgttttggacttatagaaagtagcacattggagcaaacaagagaagagacagaaactgagaaaatgacacacttggagagtttggtcgaattaggtctgtcttctacgtttagtacaatcctcacccaatgttccaaagaaatatttatggtggcccttcagaaggtttttaatttttctacttcacatatatttgaaacaagagtagcaggtcgcatggtggcagacatgtgccgcgctgctgtaaagtgctgcccagaagaatctttgaagctctttgttccccactgctgcagtgttataactcagcttacaatgaatgatgatgtattaaatgatgaagagctagacaaggaattactatggaatcttcaacttttgtctgagattactcgagtggatggaaggaagttgcttctttatagggagcagcttgtaaagattctccaaagaaccctacatttaacctgtaagcagggttacactctgtcttgtaaccttttgcatcatcttctccgttctaccacacttatctaccctacagaatactgcagtgtgccaggtggctttgacaagcctccttctgaatactttcctatcaaggactggggcaaacccggggacttgtggaatctgggaatccagtggcatgttccttcttcagaagaagtgtcttttgccttttatcttttggactcctttcttcagcctgagctcgtcaaactccagcattgtggggatggaaaacttgaaatgtctagagatgatattctacagagtctgactatagtgcacaactgtttaattggctctggaaacctcctacctccgttgaaaggagagccagttactaacttagtaccaagtatggtgtccttggaagagacaaagttgtatactggacttgaatatgatctgtctcgagagaaccaccgagaagtaattgctacagttataaggaaacttcttaaccacatacttgataattcagaagatgatactaagtcattgtttcttattataaagattattggagaccttttacaattccaaggatctcacaagcatgaatttgactcccgatggaaaagcttcaacttagtaaagaaatcaatggaaaatcggctccatgggaaaaaacaacatatcagagcactgttgattgatagagtaatgttacagcatgagctacggacactaactgttgagggttgtgaatacaaaaagatacatcaagatatgatcagagatcttcttcgtttatctacaagttcatacagtcaggtgagaaataaggctcagcaaacattttttgctgccttgggagcatataacttctgttgcagagatatcattcccttggttttggagttcttaaggcctgatagacaaggtgttacacagcaacaattcaagggtgccttgtactgtctccttggaaatcacagtggtgtgtgcttggcaaaccttcatgattgggactgtattgtacagacgtggccagcgattgtttcttcagggcttagccaagcaatgtccctggaaaagccatcaatagtgagattgtttgatgatcttgcagaaaagattcataggcagtatgaaacaattggcttggacttcacaattccaaagtcatgtgttgaaatagcggaattacttcaacagtcaaaaaacccctctatcaaccagatattgcttagcccagaaaaaattaaggaaggaattaaacgccaacaggaaaagaatgccgatgccctaaggaactatgaaaatttggtagacaccttgctagatggtgtggagcaaagaaacctgccctggaaatttgaacatataggcattgggcttctgtctctactgctgagagatgaccgagtgttgcctcttcgtgccatacggttttttgttgagaatctcaaccatgatgcaattgtagttcgaaagatggctatctcagctgttgctggtatccttaaacagctaaaaagaacccacaaaaagctgaccattaacccctgtgaaatcagtggatgccctaaacccacccaaattattgctggtgataggcctgataatcattggttgcattatgacagcaaaactataccaagaactaaaaaagaatgggagtcaagttgctttgtggaaaaaactcactggggatactacacctggccaaagaatatggttgtttatgctggtgtggaagagcagcctaagcttggcagaagcagggaggatatgacagaggcagaacagattatatttgatcatttttctgatcctaaatttgttgagcagttaattacttttctatcattagaagacagaaaaggaaaagataagtttaatccacgacgtttttgcctctttaagggtatattcaggaattttgatgatgccttcctgccagttctgaagccccatttagaacatttggttgcagattcacatgaaagcacccagcgatgtgttgcagaaattatagctggtttaatcagaggttctaagcactggacatttgaaaaggtggagaagctttgggagcttctgtgccctctgcttagaacagcactgtccaatattaccgtagaaacttataatgactggggagcttgtatagcaacatcctgtgaaagcagagatccccggaaacttcactggctttttgaactgctgttggaatcaccattgagtggtgaaggaggatcctttgtagatgcatgtcgactttatgtactacaaggtggccttgcccagcaagaatggagagtgcctgaactattgcacagactactgaagtacttggaacccaaactcacccaggtttacaaaaatgtcagagaaagaataggaagtgtgctgacctacatattcatgatagatgtatctttgccaaataccacaccaaccatatcgcctcatgtccctgagtttactgctcgaattctggagaaattgaaacctctcatggatgtggatgaagaaattcagaaccatgttatggaagaaaatggaattggtgaagaagatgagcgaactcagggcattaaactcttgaaaaccatattgaaatggctgatggcaagtgcaggaagatccttttctacagcagttacagaacaacttcagcttctacctttgtttttcaagattgccccagtggaaaatgacaatagctacgatgaactgaaaagagatgcaaagttatgtttatcattaatgtctcaggggttgctttaccctcatcaagtgcctttggtacttcaggtgctaaaacaaacagcaagaagcagttcttggcatgcacgatacacagtactgacctacctccagaccatggtattttataacctctttattttcctaaacaatgaagatgcagttaaagatatcaggtggctggttataagtcttttggaggacgaacaactggaggttcgagaaatggctgctactaccttaagcggtctgctacagtgtaactttcttaccatggacagtcctatgcagattcattttgagcaactttgcaaaacaaaactacctaagaaaagaaagcgagaccctggttctgtaggagataccattccttctgcagagttggtcaaacgccatgctggggtgctaggacttggtgcatgtgttctttctagtccttacgatgttcccacctggatgccccagctcctcatgaatctcagtgcacatctaaatgatcctcagcctattgagatgactgtaaaaaaaaccttatccaatttccgaaggactcaccatgacaactggcaggaacataaacagcaattcactgatgaccaactgcttgttctcaccgatcttcttgtgtcaccatgctattatgcatagaaagatgactagtcctcacttcaggctcttttcatcaaaaattccacaccctcaggtaccatctgtggtggctctctgcaagttttaaaactgcctctgctgagctctcatcattttggtggtttctgtgttagatctcgttagtctgcattccacagcttctcagttgccatttgatttcccaacttgtccggaagtgtttccagaatactgatcactttttttttttgaggcatctgacaaagtcacaaagtctcagactagaaataattacccagtatgatcatggcatccaagaccagagtctcagaactcattaagaaacagtttacttggaatggagaatacccatctgtaatacaggtcctgtcatttcattcatctcaaattattttgaattcttcccaaatggctgctggatttaggtggtaataggggctgtgggccataaatctgaagccttgagaaccttgggtctggagagccatgaagagggaaggaaaagagggcaagtcctgaacctaaccaatgacctgatggattgctcgaccaagacacagaagtgaagtctgtgtctgtgcacttcccacagactggagtttttggtgctgaatagagccagttgctaaaaaattgggggtttggtgaagaaatctgattgttgtgtgtattcaatgtgtgattttaaaaataaacagcaacaacaataaaaaccctgactggctgttttttccctgtattctttacaactattttttgaccctctgaaaattattatacttcacctaaatggaagactgctgtgtttgtggaaattttgtaattttttaatttattttattctctctccctttttattttgcctgcagaatcgttgagagactaataaggcttaatatttaattgatttgtttaatatgttatataaatgtaaaagagtgtataaactgtagagatagcattggcaagacattgtacagatgcaaccttttacacaacatcattgtgtaatttgtaaagattcacgtgtagttctttattatagtgattttgggctttgtacccactgaatgccattttttgtgtttttaaattattttctttatcttgttacaaaaactgagatgtggggttttttttttttcagttcacttatcattagaatgtctgaacttttatgtaacatttttgtgtgcatctctcaatgctaacaccacatgtttgcctatgacaagtttatagagtgaaaggtatcttctgggttgaaataattcacaaattggtgaatgtcatcttgcaacacaccctgtacagtcttccttaaaggaacactacagtatatttttagtatctacatgctgaatgactgaatacagacctaagcacagcagtggtcctggtacagtatttaagtgtcggcatacacaggcgtaatccctgtataaagtagtgccaaactgatttcagttgtgtaactagtttaaaacccaataaatggattctttttaaca

SEQ ID NO: 24042 - DNA, 4475 bp, Homo sapiens
  source 1..4475: mol_type = unassigned DNA
atgggagaaaatttagcaaagaagatcatgttctttttattaactataaaattgatcctgaaccacatacttgataattcagaagatgatactaagtcattgtttcttattataaagattattggagaccttttacaattccaaggatctcacaagcatgaatttgactcccgatggaaaagcttcaacttagtaaagaaatcaatggaaaatcggctccatgggaaaaaacaacatatcagagcactgttgattgatagagtaatgttacagcatgagctacggacactaactgttgagggttgtgaatacaaaaagatacatcaagatatgatcagagatcttcttcgtttatctacaagttcatacagtcaggtgagaaataaggctcagcaaacattttttgctgccttgggagcatataacttctgttgcagagatatcattcccttggttttggagttcttaaggcctgatagacaaggtgttacacagcaacaattcaagggtgccttgtactgtctccttggaaatcacagtggtgtgtgcttggcaaaccttcatgattgggactgtattgtacagacgtggccagcgattgtttcttcagggcttagccaagcaatgtccctggaaaagccatcaatagtgagattgtttgatgatcttgcagaaaagattcataggcagtatgaaacaattggcttggacttcacaattccaaagtcatgtgttgaaatagcggaattacttcaacagtcaaaaaacccctctatcaaccagatattgcttagcccagaaaaaattaaggaaggaattaaacgccaacaggaaaagaatgccgatgccctaaggaactatgaaaatttggtagacaccttgctagatggtgtggagcaaagaaacctgccctggaaatttgaacatataggcattgggcttctgtctctactgctgagagatgaccgagtgttgcctcttcgtgccatacggttttttgttgagaatctcaaccatgatgcaattgtagttcgaaagatggctatctcagctgttgctggtatccttaaacagctaaaaagaacccacaaaaagctgaccattaacccctgtgaaatcagtggatgccctaaacccacccaaattattgctggtgataggcctgataatcattggttgcattatgacagcaaaactataccaagaactaaaaaagaatgggagtcaagttgctttgtggaaaaaactcactggggatactacacctggccaaagaatatggttgtttatgctggtgtggaagagcagcctaagcttggcagaagcagggaggatatgacagaggcagaacagattatatttgatcatttttctgatcctaaatttgttgagcagttaattacttttctatcattagaagacagaaaaggaaaagataagtttaatccacgacgtttttgcctctttaagggtatattcaggaattttgatgatgccttcctgccagttctgaagccccatttagaacatttggttgcagattcacatgaaagcacccagcgatgtgttgcagaaattatagctggtttaatcagaggttctaagcactggacatttgaaaaggtggagaagctttgggagcttctgtgccctctgcttagaacagcactgtccaatattaccgtagaaacttataatgactggggagcttgtatagcaacatcctgtgaaagcagagatccccggaaacttcactggctttttgaactgctgttggaatcaccattgagtggtgaaggaggatcctttgtagatgcatgtcgactttatgtactacaaggtggccttgcccagcaagaatggagagtgcctgaactattgcacagactactgaagtacttggaacccaaactcacccaggtttacaaaaatgtcagagaaagaataggaagtgtgctgacctacatattcatgatagatgtatctttgccaaataccacaccaaccatatcgcctcatgtccctgagtttactgctcgaattctggagaaattgaaacctctcatggatgtggatgaagaaattcagaaccatgttatggaagaaaatggaattggtgaagaagatgagcgaactcagggcattaaactcttgaaaaccatattgaaatggctgatggcaagtgcaggaagatccttttctacagcagttacagaacaacttcagcttctacctttgtttttcaagattgccccagtggaaaatgacaatagctacgatgaactgaaaagagatgcaaagttatgtttatcattaatgtctcaggggttgctttaccctcatcaagtgcctttggtacttcaggtgctaaaacaaacagcaagaagcagttcttggcatgcacgatacacagtactgacctacctccagaccatggtattttataacctctttattttcctaaacaatgaagatgcagttaaagatatcaggtggctggttataagtcttttggaggacgaacaactggaggttcgagaaatggctgctactaccttaagcggtctgctacagtgtaactttcttaccatggacagtcctatgcagattcattttgagcaactttgcaaaacaaaactacctaagaaaagaaagcgagaccctggttctgtaggagataccattccttctgcagagttggtcaaacgccatgctggggtgctaggacttggtgcatgtgttctttctagtccttacgatgttcccacctggatgccccagctcctcatgaatctcagtgcacatctaaatgatcctcagcctattgagatgactgtaaaaaaaaccttatccaatttccgaaggactcaccatgacaactggcaggaacataaacagcaattcactgatgaccaactgcttgttctcaccgatcttcttgtgtcaccatgctattatgcatagaaagatgactagtcctcacttcaggctcttttcatcaaaaattccacaccctcaggtaccatctgtggtggctctctgcaagttttaaaactgcctctgctgagctctcatcattttggtggtttctgtgttagatctcgttagtctgcattccacagcttctcagttgccatttgatttcccaacttgtccggaagtgtttccagaatactgatcactttttttttttgaggcatctgacaaagtcacaaagtctcagactagaaataattacccagtatgatcatggcatccaagaccagagtctcagaactcattaagaaacagtttacttggaatggagaatacccatctgtaatacaggtcctgtcatttcattcatctcaaattattttgaattcttcccaaatggctgctggatttaggtggtaataggggctgtgggccataaatctgaagccttgagaaccttgggtctggagagccatgaagagggaaggaaaagagggcaagtcctgaacctaaccaatgacctgatggattgctcgaccaagacacagaagtgaagtctgtgtctgtgcacttcccacagactggagtttttggtgctgaatagagccagttgctaaaaaattgggggtttggtgaagaaatctgattgttgtgtgtattcaatgtgtgattttaaaaataaacagcaacaacaataaaaaccctgactggctgttttttccctgtattctttacaactattttttgaccctctgaaaattattatacttcacctaaatggaagactgctgtgtttgtggaaattttgtaattttttaatttattttattctctctccctttttattttgcctgcagaatcgttgagagactaataaggcttaatatttaattgatttgtttaatatgttatataaatgtaaaagagtgtataaactgtagagatagcattggcaagacattgtacagatgcaaccttttacacaacatcattgtgtaatttgtaaagattcacgtgtagttctttattatagtgattttgggctttgtacccactgaatgccattttttgtgtttttaaattattttctttatcttgttacaaaaactgagatgtggggttttttttttttcagttcacttatcattagaatgtctgaacttttatgtaacatttttgtgtgcatctctcaatgctaacaccacatgtttgcctatgacaagtttatagagtgaaaggtatcttctgggttgaaataattcacaaattggtgaatgtcatcttgcaacacaccctgtacagtcttccttaaaggaacactacagtatatttttagtatctacatgctgaatgactgaatacagacctaagcacagcagtggtcctggtacagtatttaagtgtcggcatacacaggcgtaatccctgtataaagtagtgccaaactgatttcagttgtgtaactagtttaaaacccaataaatggattctttttaaca

SEQ ID NO: 24043 - DNA, 2154 bp, Homo sapiens
  source 1..2154: mol_type = unassigned DNA
ccacctcctggcgcccgcagggctcaagctgcgaatgaaagcctttgggggccggacgcggtggctgaggcctgtaatccaagcactttgggaggtctaaggaggacgatcgctagagtcctggagttcgagaccagtctgggcaacatagcgagaccccctcccccaatctgtaatttaaaaacaaaaaagctgcggggactgctggcccagggcatgacagcgcgggcgggcggtgtagagggcgtggccgcgagctcagggtgtgcctgggagcgagccctgtgcggggcgggacgtagcgcccgcgcggtgggggtgtggccgcgagcttgggctgtgcgcggagggcgtggcctgtgcggggcgggacttattgcccgcgcggtgagggagcgtggtctcgcgcaagccggcgtgcggtcccgcggcgctgcagttgtgtccagccggtcacggggcggctatggcggccacgttcttcggagaggtggtgaaggcgccgtgccgagctgggactgaggacgaagaggaggaggaggaggggcggagggagacgcccgaggacagggaggtgcgtctgcagctggcgcggaagagggaagtgcggctccttcgaagacaaacaaaaacatctttggaagtttctttgctagaaaaatatccgtgctccaagtttataattgctataggaaataatgcagtagcatttctgtcatcatttgttatgaattcaggagtctgggaggaagttggttgtgctaaactctggaatgaatggtgtagaacaacagacactacacatctgtcctccacagaggctttttgtgtgttttatcatctaaaatccaatccctcggtttttctctgtcagtgcagttgctatgttgcagaagatcaacagtatcagtggctggaaaaggtttttggctcttgtccaaggaagaacatgcagataactattctcacatgtcgacatgttaccgattataaaacctcagaatccaccggcagccttccttctcctttcctgagagccctaaaaacacagaatttcaaagactcggcgtgttgtccattgctagaacaaccgaatatagtacacgaccttcctgcagcagttctaagctactgtcaagtatggaaaatcccagcaattctgtacttgtgttatactgatgtgatgaaattagacctaatcacagtggaagcttttaagcctatactttctaccagaagcttgaagggtttggttaagaatattccccaaagcactgagatactaaagaaattgatgacaacaaatgagattcagagtaacatttatacatgatcttaaacattgttttgtagtgtatattacttgtccattcctttaaggggagcagcctgcactcttttgtagattacttttgggggatatattttgagaatgatgaaacggaataaaattgtaaaaaattaattgtagttttaattccttatttatggtggtattattcacaaccaaaataagccaagcattttccttttatccactaggtgggagtattgttgtatttgaatattttaaggtactatagttaaatttttatcttatttatttatttatttattttttgaggctgggtcttgctctgttgcccaggctgaagtgcagtgtgctatcatggttcactgcatcctcgacctcctgggctcaagcatttcccccgcctcggcctcccaaaatgctgggattacaggtgtgagccactgtgcccaactttagttaaatttttcaaagctacagatatcagcagatggtattcatgtggcaaagtgtagttaattaggtgtaactattcattgacctgttggtgattcttaatatgtggaaagtttctggatattttaggagtcctgcagttttttttatcttgtgggtaaaaattgatgacaaagtaacaaaattatatatttactaaaaatgaaacagaaatgtgtatgtcctcactttttagtaatatctgacagatagcctcttcacccagactttcccagggctctctttcaaggctggctctgcgcgtgtcagcagttctcttacagtcatgtgttatcattaggagtgtgaatggaatcatgaacccggagtagccacacaacttcaca

SEQ ID NO: 24044 - DNA, 907 bp, Homo sapiens
  source 1..907: mol_type = unassigned DNA
ggggcgggacttattgcccgcgcggtgagggagcgtggtctcgcgcaagccggcgtgcggtcccgcggcgctgcagttgtgtccagccggtcacggggcggctatggcggccacgttcttcggagaggtggtgaaggcgccgtgccgagctgggactgaggacgaagaggaggaggaggaggggcggagggagacgcccgaggacagggaggtgcgtctgcagctggcgcggaagagggaagtgcggctccttcgaagacaaacaaaaacatctttggaagtttctttgctagaaaaatatccgtgctccaagtttataattgctataggaaataatgcagtagcatttctgtcatcatttgttatgaattcaggagtctgggaggaagttggttgtgctaaactctggaatgaatggtgtagaacaacagacactacacatctgtcctccacagaggctttttgtgtgttttatcatctaaaatccaatccctcggtttttggctcttgtccaaggaagaacatgcagataactattctcacatgtcgacatgttaccgattataaaacctcagaatccaccggcagccttccttctcctttcctgagagccctaaaaacacagaatttcaaagactcggcgtgttgtccattgctagaacaaccgaatatagtacacgaccttcctgcagcagttctaagctactgtcaagtatggaaaatcccagcaattctgtacttgtgttatactgatgtgatgaaattagacctaatcacagtggaagcttttaagcctatactttctaccagaagcttgaagggtttggttaagaatattccccaaagcactgagatactaaagaaattgatgacaacaaatgagattcagagtaacatttatacatga

SEQ ID NO: 24045 - DNA, 1686 bp, Homo sapiens
  source 1..1686: mol_type = unassigned DNA
ggcaggagggaaaggttatgggtcggcccggcggtctctcccagcacccgcgactctcaccttgctcagctgctggtggatgagctgcttcagctcggaggctttctccggaggcagcgacatgctggcagccggcgtctccccgccgcttctccccgcctcagatgccctaactgcgcggccccggccgggccagggagcgttaggagcgactggagcacaaagcgccgcagccgttcgcctagcgcagctcccgggggacgcaacgccgcgtcaggccgggggctgacctggaaatgaggccccggcggcggcggcgccaactgttttcaaacagtggcggacaaacagggcttggggctggcccgcacgctgcctgatcgtttccgcccgccgctccacctccccgcgggccccgcaccccgagacctcagcgcaccccatcgccttgcttgccagggtctccgaaagcgctgctggcccctcttcgcggccacccggcggcctctttccgccctctgaaccggcagttagctggacgggcctcaagggcccggcgcccagggactcaaaggaccctcccgcgccccgcgaggctccggggtctcgggcttccgccttcttgctgccctcgttcttgccagggccgcggttagtccctgctggccaccccactgcgaccatgttcgttccctgcggggagtcggcccccgaccttgccggcttcaccctcctaatgccagcagtatctgttggaaatgttggccagcttgcaatggatctgattatttctacactgaatatgtctaagattggttacttctataccgattgtcttgtgccaatggttggaaacaatccatatgcgaccacagaaggaaattcaacagaacttagcataaatgctgaagtgtattcattgccttcaagaaagctggtggctctacagttaagatccatttttattaagtataaatcaaagccattctgtgaaaaactgctttcctgggtgaaaagcagtggctgtgccagagtcattgttctttcaagcagtcattcatatcagcgtaatgatctgcagcttcgtagtactcccttccggtacctacttacaccttccatgcaaaaaagtgttcaaaataaaataaagagccttaactgggaagaaatggaaaaaagccggtgcattcctgaaatagatgattccgagttttgtatccgcattccgggaggaggtatcacaaaaacactctatgatgaaagctgttctaaagaaatccaaatggcagttctgctgaaatttgtttcagaaggggacaacatcccagatgcattaggtcttgttgagtatcttaatgagtggcttcagatactcaaaccacttagcgatgaccccacagtatctgcctcacggtggaaaataccaagttcttggagattactctttggcagtggtcttccccctgcacttttctgatctaatttctgttttataccttatacccaaaacacttactaccaacacagctgttaaacattctatacaaaaaaattgtatgatctggtattaggaaattactttcacagtaaatatcaaagaaaaaagattaagggtctctttgccatgcttttcatcatatgcaccaaatgtaaattttgtacaataaaattttatttcctaagtaa

SEQ ID NO: 24046 - DNA, 1050 bp, Homo sapiens
  source 1..1050: mol_type = unassigned DNA
ctcgttcttgccagggccgcggttagtccctgctggccaccccactgcgaccatgttcgttccctgcggggagtcggcccccgaccttgccggcttcaccctcctaatgccagcagtatctgttggaaatgttggccagcttgcaatggatctgattatttctacactgaatatgtctaagattggttacttctataccgattgtcttgtgccaatggttggaaacaatccatatgcgaccacagaaggaaattcaacagaacttagcataaatgctgaagtgtattcattgccttcaagaaagctggtggctctacagttaagatccatttttattaagtataaatcaaagccattctgtgaaaaactgctttcctgggtgaaaagcagtggctgtgccagagtcattgttctttcaagcagtcattcatatcagcgtaatgatctgcagcttcgtagtactcccttccggtacctacttacaccttccatgcaaaaaagtgttcaaaataaaataaagagccttaactgggaagaaatggaaaaaggtgcattcctgaaatagatgattccgagttttgtatccgcattccgggaggaggtatcacaaaaacactctatgatgaaagctgttctaaagaaatccaaatggcagttctgctgaaatttgtttcagaaggggacaacatcccagatgcattaggtcttgttgagtatcttaatgagtggcttcagatactcaaaccacttagcgatgaccccacagtatctgcctcacggtggaaaataccaagttcttggagattactctttggcagtggtcttccccctgcacttttctgatctaatttctgttttataccttatacccaaaacacttactaccaacacagctgttaaacattctatacaaaaaaattgtatgatctggtattaggaaattactttcacagtaaatatcaaagaaaaaagattaagggtctctttgccatgcttttcatcatatgcaccaaatgtaaattttgtacaataaaattttatttcctaagt

SEQ ID NO: 24047 - DNA, 1107 bp, Homo sapiens
  source 1..1107: mol_type = unassigned DNA
atgtttcgaaatcagtatgacaatgatgtcactgtttggagcccccagggcaggattcatcaaattgaatatgcaatggaagctgttaaacaaggttcagccacagttggtctgaaatcaaaaactcatgcagttttggttgcattgaaaagggcgcaatcagagcttgcagctcatcagaaaaaaattctccatgttgacaaccatattggtatctcaattgcggggcttactgctgatgctagactgttatgtaattttatgcgtcaggagtgtttggattccagatttgtattcgatagaccactgcctgtgtctcgtcttgtatctctaattggaagcaagacccagataccaacacaacgatatggccggagaccatatggtgttggtctccttattgctggttatgatgatatgggccctcacattttccaaacctgtccatctgctaactattttgactgcagagccatgtccattggagcccgttcccaatcagctcgtacttacttggagagacatatgtctgaatttatggagtgtaatttaaatgaactagttaaacatggtctgcgtgccttaagagagacgcttcctgcagaacaggacctgactacaaagaatgtttccattggaattgttggtaaagacttggagtttacaatctatgatgatgatgatgtgtctccattcctggaaggtcttgaagaaagaccacagagaaaggcacagcctgctcaacctgctgatgaacctgcagaaaaggctgatgaaccaatggaacattaagtgataagccagtctatatatgtattatcaaatatgtaagaatacaggcaccacatactgatgacaataatctatactttgaaccaaaagttgcagagtggtggaatgctatgttttaggaatcagtccagatgtgagttttttccaagcaacctcactgaaacctatataatggaatacatttttctttgaaagggtctgtataatcattttctagaaagtatgggtatctatactaatgtttttatatgaagaacataggtgtctttgtggttttaaagacaactgtgaaataaaattgtttcaccgcctggt

SEQ ID NO: 24048 - DNA, 1505 bp, Homo sapiens
  source 1..1505: mol_type = unassigned DNA
agtatcacccagagtcacggctgttgactcggacgactttagatgcagcccgccagcgggagaaactggagggaatccgccatacacaggaacctagaagggctacgtgacaggggctgccccgcagctctcagccgccggcactcccagccaggttttcccgccagtctcagttcctagatcttccgaggctccgcccgccgccgagcggtcggaaagttttaaggagggggaagtgttgcaagcctatcgatatctctggaatagactgcgctaccctgcgccgccgccgtcaaactcccgcagacttctctgtagatcgctgagcgatactttcggcagcacctccttgattctcagttttgctggaggccgcaaccaggcccgcgccgccaccatgtttcgaaatcagtatgacaatgatgtcactgtttggagcccccagggcaggattcatcaaattgaatatgcaatggaagctgttaaacaaggttcagccacagttggtctgaaatcaaaaactcatgcagttttggttgcattgaaaagggcgcaatcagagcttgcagctcatcagaaaaaaattctccatgttgacaaccatattggtatctcaattgcggggcttactgctgatgctagactgttatgtaattttatgcgtcaggagtgtttggattccagatttgtattcgatagaccactgcctgtgtctcgtcttgtatctctaattggaagcaagacccagataccaacacaacgatatggccggagaccatatggtgttggtctccttattgctggttatgatgatatgggccctcacattttccaaacctgtccatctgctaactattttgactgcagagccatgtccattggagcccgttcccaatcagctcgtacttacttggagagacatatgtctgaatttatggagtgtaatttaaatgaactagttaaacatggtctgcgtgccttaagagagacgcttcctgcagaacaggacctgactacaaagaatgtttccattggaattgttggtaaagacttggagtttacaatctatgatgatgatgatgtgtctccattcctggaaggtcttgaagaaagaccacagagaaaggcacagcctgctcaacctgctgatgaacctgcagaaaaggctgatgaaccaatggaacattaagtgataagccagtctatatatgtattatcaaatatgtaagaatacaggcaccacatactgatgacaataatctatactttgaaccaaaagttgcagagtggtggaatgctatgttttaggaatcagtccagatgtgagttttttccaagcaacctcactgaaacctatataatggaatacatttttctttgaaagggtctgtataatcattttctagaaagtatgggtatctatactaatgtttttatatgaagaacataggtgtctttgtggttttaaagacaactgtgaaataaaattgtttcaccgcctggta

SEQ ID NO: 24049 - DNA, 1266 bp, Homo sapiens
  source 1..1266: mol_type = unassigned DNA
cgcgagccgggaccacgccgacccagcgtgcccaggccgaggaaagcgcggcggcggcagtccgaagacccaccgggactgaaagagaaggacgaggtcatcttcggacgggaggggcaagccagccatcctgggaccccaggcgtgcaggttctctttgagggtattccaccctgcaaaaagcatgtattcatggtcagctctcagcaaggccagtagcagagtggtaaaggccttggccctccaaggctgggaaaagacaatgacaagtcaaatccagacctatgttgtatgttggtctactaggtgactgtctcctggaaatgttatgcagctcagcaaggtgaagtttcgaaatcagtatgacaatgatgtcactgtttggagcccccagggcaggattcatcaaattgaatatgcaatggaagctgttaaacaaggttcagccacagttggtctgaaatcaaaaactcatgcagttttggttgcattgaaaagggcgcaatcagagcttgcagctcatcagaaaaaaattctccatgttgacaaccatattggtatctcaattgcggggcttactgctgatgctagactgttatgtaattttatgcgtcaggagtgtttggattccagatttgtattcgatagaccactgcctgtgtctcgtcttgtatctctaattggaagcaagacccagataccaacacaacgatatggccggagaccatatggtgttggtctccttattgctggttatgatgatatgggccctcacattttccaaacctgtccatctgctaactattttgactgcagagccatgtccattggagcccgttcccaatcagctcgtacttacttggagagacatatgtctgaatttatggagtgtaatttaaatgaactagttaaacatggtctgcgtgccttaagagagacgcttcctgcagaacaggacctgactacaaagaatgtttccattggaattgttggtaaagacttggagtttacaatctatgatgatgatgatgtgtctccattcctggaaggtcttgaagaaagaccacagagaaaggcacagcctgctcaacctgctgatgaacctgcagaaaaggctgatgaaccaatggaacattaagtgataagccagtctatatatgtattatcaaatatgtaagaatacaggcaccacatactgatgacaataatctatactttgaaccaaaagttgcagagtggtggaatgctatgttttaggaatcagtc

SEQ ID NO: 24050 - DNA, 1221 bp, Homo sapiens
  source 1..1221: mol_type = unassigned DNA
attctcagttttgctggaggccgcaaccaggcccgcgccgccaccatgtttcgaaatcagtatgacaatgatgtcactgtttggagcccccagggcaggattcatcaaattgaatatgcaatggaagctgttaaacaaggttcagccacagttggtctgaaatcaaaaactcatgcagttttggttgcattgaaaagggcgcaatcagagcttgcagctcatcagaaaaaaattctccatgttgacaaccatattggtatctcaattgcggggcttactgctgatgctagactgttatgtaattttatgcgtcaggagtgtttggattccagatttgtattcgatagaccactgcctgtgtctcgtcttgtatctctaattggaagcagtatcctttttatgatatgggccctcacattttccaaacctgtccatctgctaactattttgactgcagagccatgtccattggagcccgttcccaatcagctcgtacttacttggagagacatatgtctgaatttatggagtgtaatttaaatgaactagttaaacatggtctgcgtgccttaagagagacgcttcctgcagaacaggacctgactacaaagaatgtttccattggaattgttggtaaagacttggagtttacaatctatgatgatgatgatgtgtctccattcctggaaggtcttgaagaaagaccacagagaaaggcacagcctgctcaacctgctgatgaacctgcagaaaaggctgatgaaccaatggaacattaagtgataagccagtctatatatgtattatcaaatatattttctggcatccttaaatcttgtgtcaaggattggttataatataaccagaaaccatgacggcggctgagaacgtatgctacacgttaattaacgtgccaatggattcagaaccaccatctgaaattagcttaaaaaatgatctagaaaaaggagatgtaaagtcaaagactgaagctttgaagaaagtaatcattatgattctgaatggtgaaaaacttcctggacttctgatgaccatcattcgttttgtgctacctcttcaggatcacactatcaagaaattacttctggtattttgggaaattgttcctaaaacaactccagatgggagacttttacatgagatgatccttgtatgtgatgcatacagaaaggatcttcaacatcctaatgaatttattcg

SEQ ID NO: 24051 - DNA, 1483 bp, Homo sapiens
  source 1..1483: mol_type = unassigned DNA
ggaaatgaaaggaaatcggccacagtgcgcatgtgtgcggctgtgctttggctcttcgggtaaagatggcggagcgcgggtacagcttttcgctgactacattcagcccgtctggtaaacttgtccagattgaatatgctttggctgctgtagctggaggagccccgtccgtgggaattaaagctgcaaatggtgtggtattagcaactgagaaaaaacagaaatccattctgtatgatgagcgaagtgtacacaaagtagaaccaattaccaagcatataggtttggtgtacagtggcatgggccccgattacagagtgcttgtgcacagagctcgaaaactagctcaacaatactatcttgtgtaccaagaacccattcctacagctcagctggtacagagagtagcttctgtgatgcaagaatatactcagtcaggtggtgttcgtccatttggagtttctttacttatttgtggttggaatgagggacgaccatatttatttcagtcagatccatctggagcttactttgcctggaaagctacagcaatgggaaagaactatgtgaatgggaagactttccttgagaaaagatataatgaagatctggaacttgaagatgccattcatacagccatcttaaccctaaaggaaagctttgaagggcaaatgacagaggataacatagaagttggaatctgcaatgaagctggatttaggaggcttactccaactgaagttaaggattacttggctgccatagcataacaatgaagtgactgaaaaatccagaatttcagataatctatctacttaaacatgtttaaagtatgttttgttttgcagactttttgcatacttatttctacatggtttaaatcgactgtttttaaaatgacacttataaatcctaataaactgttaaacccaccttccagccttttaggagttgctaaaattttaacagttatttcctgctttttatcacagttgatttctgaagactacattgccaagcagaatgatgaaatgactttttcgttgtcaggcaattttggttaagtcaaatcttaatgccctcttcgctatcagatgttgcctgtgtttccataaagcaaaatgctgattttggtaaaaaacatgactgcttctagagctgggaggatctgcagactttcacggattcatggaacaagaaaagaagcataggtacttttaggtgccattaggtattgatcagtgaaatcctagggtgctctatgagattgtactaggcctatgaagagtggtaagccaaataggtctccatgggagatacattatgtaaataaataaacaatggtttgctggttcctgttggtgtctccacaagtaggtaaacatgtttaaaggaacccgggttcttagattttgttagactttttaaactcaaggatgagcataagtgcttgaaataaaatgctaatacttaagtgtcaaaa

SEQ ID NO: 24052 - DNA, 4237 bp, Homo sapiens
  source 1..4237: mol_type = unassigned DNA
ggctcttcgggtaaagatggcggagcgcgggtacagcttttcgctgactacattcagctgcaaatggtgtggtattagcaactgagaaaaaacagaaatccattctgtatgatgagcgaagtgtacacaaagtagaaccaattaccaagcatataggtttggtgtacagtggcatgggccccgattacagagtgcttgtgcacagagctcgaaaactagctcaacaatactatcttgtgtaccaagaacccattcctacagctcagctggtacagagagtagcttctgtgatgcaagaatatactcagtcaggtggtgttcgtccatttggagtttctttacttatttgtggttggaatgagggacgaccatatttatttcagtcagatccatctggagcttactttgcctggaaagctacagcaatgggaaagaactatgtgaatgggaagactttccttgagaaaaggtaggcctactcattgtaactgcattctttagcaaactcactttatggtttttggtgctctttaagtaaattaatatcatgggactaaagaaacttgctatattactctgtatatgaatctagttacagataaaccaaaaacttctctcccttctagtttcctagacttcagtatattaagtggtaattaatattcatttcctaaggagttctctttctacattctatggtttcctaaatgcttttggtttttttactttttacttcactttttgtgccatttcaggagggaaaaaaaagaacattgaatctggaataaaacatttggggagacaaatttttaaatgatttaatgataacagtttacgacagtaaaaaaaattgtgaaaccaaatgcctggagttgaaggtatattaaatatttgatacatgtgcttgataaaaagtggagcactatgtaaaaatctgtcggtgcccaagtacaagctgctcttacttatttccagctgtattctagtctcagtgttactgtagtccttcgggactctccaagcttttgaagaagaaaatgttttatttcttgatatgtaatagttgcacatatttttgcagtacatgtgatattttgatacctgtatacagtgtcaaatcagggtaattggatatccattacctcaaacatctgtcttttctttgtgttgggaacatagcagatcttctagctgttctgaaatatacagtaaattgttaacgataatttcctgactgtactactggacaccagaacttattcctcctgtctgaccgtatttttagaccccttaaccaacttccttcagttcttcttcccttctcccttcccagcctctggtaaccactgtgctactctctccctccatgagatccacttttttagctcccacatatgagtgacaacatgcaatatttatctttctgtgcctggcttattttgcttaacgtaatgacctcgagttccatccatgttgctgcaaatgacaggatttcatttttttatggctgaataataataaaaaacttcgtaactccgtttaacagatgagccttcacagtacatttttcacgtaacgttaaggttattaaaaatcttaggcctggatttaaatggtaaacttaatcttaggctcttaaagcactttttcatttttcttttatatattaatgagtcttccaaagatttcacattgttattacatgatatgttatgatttgttttattttttgtttcagaggcattttatttagacaactaaaaataattagatgttcagaaccagtgtacaatgaaagaaattaaaccagttactttatcatgtattccctctttacaaccaaagcaaaaaacaatagcaacaaagacattctgctttaagggaaaagtcagacaaataagccaatatatttttcttctccataatgacataaacagctgcaagaactcttaattgtaataagagaagttggatgttatcttgtacatattcattaaaaagatgacaggccattgtactacaagaggataactcaacctcccttcatctgatactcttgagatttcacttatgggtaacaccatgttagttgtttcagcaatggagctaattcatattcctcattatttattgctgtttttgccttaagcagagagtaactctggaaggctgatgcttttctctgcttgctcgttctagtccagttgtatgctgtctgtggcacatgcttgatgttcaggccttaacttgaggagttgaagaatagatggaatctgaattctctgaagcaatttcttctagctcttctcttgtctttggaaaaccaatctttggctttgccagctcaccagtatcttcttcaggaagcacacatttccaaaggccatatgtttttcctaccacagtttgccagtctcagtgttccatcttcagaaccactggcatagagttctccatcaggatcaaatctcacacagtgaataggaccagagtgtcctttgtaggattctaattcttctccactattatcatcatacttataagtttaacatcttcaccacctgcaacaagaaattctttctcaaggtgaagagattcagagttaatgtttgcaggagcttgaaaggatttaattggttccaaacttactgtactgtcaaaagcactggatcagccataagttattaccaaaatctctccctcagaaatatattccatactactagccaacataataaaatttagagatttcacttctgtcatagtagcatgatcccaaagtcttaacagttttgtcatcagaagaaagaatctgtttatcctcactgtaccatagggcctttttaatatcagagctgtgatcactaatttcctcaggttctgcttcgggtttgttcaagtcatatatgcaaaacagtttattctgtcccctggttaacaaataattactatcctgcatgaaatccatagtcttgataatgtgtttatgagccagggtcatcagttcatctcctgggatagcatcccacactttgtgaaatctgcagctgctgtggctgctttggtggcatccttattcagtgttgcattccagacagcatctttatgacccaaaattgttccaatccagtctcctgtatctccctggcatagcataggtttgccgtctttgcaagcactgatttagaaatactcataagactggccaggcgcagtggctcacgcctgtaatcccagcactttgggaggccaaggcaggcggatcacctgaggtcagaagttcgagaccagctgggccaacatggtgaaaccccgtctctactaaaaatacaaaaattagccaggagtgatagcgcgcgcctgtaatcccagctactcgggaggctgaggcaggagaatcacttgaacctgggaggcggagtttgcagtgagccaagattgcaccactgcactccagcctgggcgacagagcaagattctgtcttgagggaaaaaaaagcccctaaggcatgatgccactgaaggccaagtcagccacgggccatatgtggccagaacaggtgagcagcatcagtctcattgctatggaggtggtgaacccagtgattgggctggtgggctgagggtcatccttgtcttttctcctctggtacagcgcccggggttcctccaggcttcaccctaacacgggctgagcagagaaaaaggaaaaggtggcaccgagattaggaaggagctagggaggggctggggagtctgggaagggtgagcaacagttgacaatggagggaggaaagtaggggatggggagaaccgaagaaacgacccagccactcttcgcaccgtccacactggtatcggcaggaagtgacatgttatgttttaacttataagaaaaagattttagcaaagttctgatttttctgtgttttaaaaattataataatgccaccacatcctgattgttaaaatatttatacttaagaagtttcctggctgggtgtgttggctcgtgcctgtaatcccagcactttggtaggtcaaggcaggcggatcacgaggtcaggagatcgagaccatcctggctgacacagtgaaacccatctctactaaaaatacaaagaaattagctgggcgtagtgggcgcctgtagtcccagctacttgggaggctgaggcaggagaatggcatgagcccgggaggtggagcttgcagtaagccaagataactgtgtctc

SEQ ID NO: 24053 - DNA, 970 bp, Homo sapiens
  source 1..970: mol_type = unassigned DNA
agcgggcctgttactagtttgcggcatcctgtggtataggggaagcgctccgggcctggaatccctacgcgtccctttgggtttagcacgatgagctcaatcggcactgggtatgacctgtcagcctctacattctctcctgacggaagagtttttcaagttgaatatgctatgaaggctgtggaaaatagtagtacagctattggaatcagatgcaaagatggtgttgtctttggggtagaaaaattagtcctttctaaactttatgaagaaggttccaacaaaagactttttaatgttgatcggcatgttggaatggcagtagcaggtttgttggcagatgctcgttctttagcagacatagcaagagaagaagcttccaacttcagatctaactttggctacaacattccactaaaacatcttgcagacagagtggccatgtatgtgcatgcatatacactctacagtgctgttagaccttttggctgcagtttcatgttagggtcttacagtgtgaatgacggtgcgcaactctacatgattgacccatcaggtgtttcatacggttattggggctgtgccatcggcaaagccaggcaagctgcaaagacggaaatagagaagcttcagatgaaagaaatgacctgccgtgatatcgttaaagaagttgcaaaaataatttacatagtacatgacgaagttaaggataaagcttttgaactagaactcagctgggttggtgaattaactaatggaagacatgaaattgttccaaaagatataagagaagaagcagagaaatatgctaaggaatctctgaaggaagaagatgaatcagatgatgataatatgtaacatttactccagcatctattgtattttaaatttctactccagtccaatgtaactatttagccctggattatacatactgtccaattttcattaaatttttgtcttataacta

SEQ ID NO: 24054 - DNA, 908 bp, Homo sapiens
  source 1..908: mol_type = unassigned DNA
gctccgggcctggaatccctacgcgtccctttgggtttagcacgatgagctcaatcggcactgggtatgacctgtcagcctctacattctctcctgacggaagagtttttcaagttgaatatgctatgaaggctgtggaaaatagtagtacagctattggaatcagatgcaaagatggtgttgtctttggggtagaaaaattagtcctttctaaactttatgaagaaggttccaacaaaagactttttaatgttgatcggcatgttggaatggcagtagcaggtttgttggcagatgctcgttctttagcagacatagcaagagaagaagcttccaacttcagatctaactttggctacaacattccactaaaacatcttgcagacagagtggccatgtatgtgcatgcatatacactctacagtgctgttagaccttttggctgcagtgtgaatgacggtgcgcaactctacatgattgacccatcaggtgtttcatacggttattggggctgtgccatcggcaaagccaggcaagctgcaaagacggaaatagagaagcttcagatgaaagaaatgacctgccgtgatatcgttaaagaagttgcaaaaataatttacatagtacatgacgaagttaaggataaagcttttgaactagaactcagctgggttggtgaattaactaatggaagacatgaaattgttccaaaagatataagagaagaagcagagaaatatgctaaggaatctctgaaggaagaagatgaatcagatgatgataatatgtaacatttactccagcatctattgtattttaaatttctactccagtccaatgtaactatttagccctggattatacatactgtccaattttcattaaatttttgtcttataactattgaa

SEQ ID NO: 24055 - DNA, 1254 bp, Homo sapiens
  source 1..1254: mol_type = unassigned DNA
aacccagcggttctgcgcatgcgcgggggccatattagcagcggttattcggtgagcggtggtggtttattcttccgtggagttaagggctccgtggacatctcaggtcttcagggtcttccatctggaactatataaagttcagaaaacatgtctcgaagatatgactccaggaccactatattttctccagaaggtcgcttataccaagttgaatatgccatggaagctattggacatgcaggcacctgtttgggaattttagcaaatgatggtgttttgcttgcagcagagagacgcaacatccacaagcttcttgatgaagtctttttttctgaaaaaatttataaactcaatgaggacatggcttgcagtgtggcaggcataacttctgatgctaatgttctgactaatgaactaaggctcattgctcaaaggtatttattacagtatcaggagccaataccttgtgagcagttggttacagcgctgtgtgatatcaaacaagcttatacacaatttggaggaaaacgtccctttggtgtttcattgctgtacattggctgggataagcactatggctttcagctctatcagagtgaccctagtggaaattacgggggatggaaggccacatgcattggaaataatagcgctgcagctgtgtcaatgttgaaacaagactataaagaaggagaaatgaccttgaagtcagcacttgctttagctatcaaagtactaaataagaccatggatgttagtaaactctctgctgaaaaagtggaaattgcaacactaacaagagagaatggaaagacagtaatcagagttctcaaacaaaaagaagtggagcagttgatcaaaaaacatgaggaagaagaagccaaagctgagcgtgagaagaaagaaaaagaacagaaagaaaaggataaatagaatcagagattttattactcatttggggcaccatttcagtgtaaaagcagtcctactcttccacactaggaaggctttactttttttaactggtgcagtgggaaaataggacattacatactgaattgggtccttgtcatttctgtccaattgaatactttattgtaacgatgatggttacccttcatggacgtcttaatcttccacacacatcccctttttttggaataaaatttggaaaatggaaatgaaggaataaattctctgtagcagtaattgttaaatatacaaaaactgacagggcgattactttttgca

SEQ ID NO: 24056 - DNA, 1019 bp, Homo sapiens
  source 1..1019: mol_type = unassigned DNA
gcgcatgcgcgggggccatattagcagcggttattcggtgagcggtggtggtttattcttccgtggagttaagggctccgtggacatctcaggtcttcagggtcttccatctggaactatataaagttcagaaaacatgtctcgaagatatgactccaggaccactatattttctccagaagggacatggcttgcagtgtggcaggcataacttctgatgctaatgttctgactaatgaactaaggctcattgctcaaaggtatttattacagtatcaggagccaataccttgtgagcagttggttacagcgctgtgtgatatcaaacaagcttatacacaatttggaggaaaacgtccctttggtgtttcattgctgtacattggctgggataagcactatggctttcagctctatcagagtgaccctagtggaaattacgggggatggaaggccacatgcattggaaataatagcgctgcagctgtgtcaatgttgaaacaagactataaagaaggagaaatgaccttgaagtcagcacttgctttagctatcaaagtactaaataagaccatggatgttagtaaactctctgctgaaaaagtggaaattgcaacactaacaagagagaatggaaagacagtaatcagagttctcaaacaaaaagaagtggagcagttgatcaaaaaacatgaggaagaagaagccaaagctgagcgtgagaagaaagaaaaagaacagaaagaaaaggataaatagaatcagagattttattactcatttggggcaccatttcagtgtaaaagcagtcctactcttccacactaggaaggctttactttttttaactggtgcagtgggaaaataggacattacatactgaattgggtccttgtcatttctgtccaattgaatactttattgtaacgatgatggttacccttcatggacgtcttaatcttccacacacatcccctttttttggaataaaatttggaaaatggaaatgaaggaataaa

SEQ ID NO: 24057 - DNA, 1094 bp, Homo sapiens
  source 1..1094: mol_type = unassigned DNA
ggttctgcgcatgcgcgggggccatattagcagcggttattcggaactatataaagttcagaaaacatgtctcgaagatatgactccaggaccactatattttctccagaaggtcgcttataccaagttgaatatgccatggaagctattggacatgcaggcacctgtttgggaattttagcaaatgatggtgttttgcttgcagcagagagacgcaacatccacaagcttcttgatgaagtctttttttctgaaaaaatttataaactcaatgaggacatggcttgcagtgtggcaggcataacttctgatgctaatgttctgactaatgaactaaggctcattgctcaaaggtatttattacagtatcaggagccaataccttgtgagcagttggttacagcgctgtgtgatatcaaacaagcttatacacaatttggaggaaaacgtccctttggtgtttcattgctgtacattggctgggataagcactatggctttcagctctatcagagtgaccctagtggaaattacgggggatggaaggccacatgcattggaaataatagcgctgcagctgtgtcaatgttgaaacaagactataaagaaggagaaatgaccttgaagtcagcacttgctttagctatcaaagtactaaataagaccatggatgttagtaaactctctgctgaaaaagtggaaattgcaacactaacaagagagaatggaaagacagtaatcagagttctcaaacaaaaagaagtggagcagttgatcaaaaaacatgaggaagaagaagccaaagctgagcgtgagaagaaagaaaaagaacagaaagaaaaggataaatagaatcagagattttattactcatttggggcaccatttcagtgtaaaagcagtcctactcttccacactaggaaggctttactttttttaactggtgcagtgggaaaataggacattacatactgaattgggtccttgtcatttctgtccaattgaatactttattgtaacgatgatggttacccttcatggacgtcttaatcttccacacacatcccctttttttggaataaaatttggaaaa

SEQ ID NO: 24058 - DNA, 786 bp, Homo sapiens
  source 1..786: mol_type = unassigned DNA
agtgccaagcctggacgccggggcccgcgagggggcgggctgagggtgggggtctgtgggcaggaccgagagttggggtggcttccgtcctcaggagttcggaactatataaagttcagaaaacatgtctcgaagatatgactccaggaccactatattttctccagaaggtcgcttataccaagttgaatatgccatggaagctattggacatgcaggcacctgtttgggaattttagcaaatgatggtgttttgcttgcagcagagagacgcaacatccacaagcttcttgatgaagtctttttttctgaaaaaatttataaactcaatgaggacatggcttgcagtgtggcaggcataacttctgatgctaatgttctgactaatgaactaaggctcattgctcaaaggtatttattacagtatcaggagccaataccttgtgagcagttggttacagcgctgtgtgatatcaaacaagcttatacacaatttggaggaaaacgtccctttggtgtttcattgctgtacattggctgggataagcactatggctttcagctctatcagagtgaccctagtggaaattacgggggatggaaggccacatgcattggaaataatagcgctgcagctgtgtcaatgttgaaacaagactataaagaaggagaaatgaccttgaagtcagcacttgctttagctatcaaagtactaaataagaccatggatgttagtaaactctctgctgaaaaagtggaaattgcaacactaacaagagagaatgg

SEQ ID NO: 24059 - DNA, 756 bp, Homo sapiens
  source 1..756: mol_type = unassigned DNA
ttagctctcccggaggtgccggtgaactcaaaatagtgctgtgcccggcgtcaggcgtggagacaacagaaagttgtgcttaaagctcgaatcagaaatccccggaactatataaagttcagaaaacatgtctcgaagatatgactccaggaccactatattttctccagaaggtcgcttataccaagttgaatatgccatggaagctattggacatgcaggcacctgtttgggaattttagcaaatgatggtgttttgcttgcagcagagagacgcaacatccacaagcttcttgatgaagtctttttttctgaaaaaatttataaactcaatgaggacatggcttgcagtgtggcaggcataacttctgatgctaatgttctgactaatgaactaaggctcattgctcaaaggtatttattacagtatcaggagccaataccttgtgagcagttggttacagcgctgtgtgatatcaaacaagcttatacacaatttggaggaaaacgtccctttggtgtttcattgctgtacattggctgggataagcactatggctttcagctctatcagagtgaccctagtggaaattacgggggatggaaggccacatgcattggaaataatagcgctgcagctgtgtcaatgttgaaacaagactataaagaaggagaaatgaccttgaagtcagcacttgctttagctatcaaagtactaaataagaccatggatgttagtaaactctctgctgaaaa

SEQ ID NO: 24060 - DNA, 944 bp, Homo sapiens
  source 1..944: mol_type = unassigned DNA
cccgccccaacccagcggttctgcgcatgcgcgggggccatattagcagcggttattcggtgagcggtggtggtttattcttccgtggagttaagggctccgtggacatctcaggtcttcagggtcttccatctggaactatataaagttcagaaaacatgtctcgaagatatgactccaggaccactatattttctccagaagcagagagacgcaacatccacaagcttcttgatgaagtctttttttctgaaaaaatttataaactcaatgaggacatggcttgcagtgtggcaggcataacttctgatgctaatgttctgactaatgaactaaggctcattgctcaaaggtatttattacagtatcaggagccaataccttgtgagcagttggttacagcgctgtgtgatatcaaacaagcttatacacaatttggaggaaaacgtccctttggtgtttcattgctgtacattggctgggataagcactatggctttcagctctatcagagtgaccctagtggaaattacgggggatggaaggccacatgcattggaaataatagcgctgcagctgtgtcaatgttgaaacaagactataaagaaggagaaatgaccttgaagtcagcacttgctttagctatcaaagtactaaataagaccatggatgttagtaaactctctgctgaaaaagtggaaattgcaacactaacaagagagaatggaaagacagtaatcagagttctcaaacaaaaagaagtggagcagttgatcaaaaaacatgaggaagaagaagccaaagctgagcgtgagaagaaagaaaaagaacagaaagaaaaggataaatagaatcagagattttattactcatttggggcaccatttcagtgtaaaagcagtcctactcttccacactaggaaggctttactttttttaactgg

SEQ ID NO: 24061 - DNA, 815 bp, Homo sapiens
  source 1..815: mol_type = unassigned DNA
ccacattataatctatgactgcctctctcacctaactgccagtattagcttttcaggacaggaactggttttacacattttggaactatataaagttcagaaaacatgtctcgaagatatgactccaggaccactatattttctccagaaggtcgcttataccaagttgaatatgccatggaagctattggacatgcaggcacctgtttgggaattttagcaaatgatggtgttttgcttgcagcagagagacgcaacatccacaagcttcttgatgaagtctttttttctgaaaaaatttataaactcaatgaggacatggcttgcagtgtggcaggcataacttctgatgctaatgttctgactaatgaactaaggctcattgctcaaaggtatttattacagtatcaggagccaataccttgtgagcagttggttacagcgctgtgtgatatcaaacaagcttatacacaatttggaggaaaacgtccctttggtgtttcattgctgtacattggctgggataagcactatggctttcagctctatcagagtgaccctagtggaaattacgggggatggaaggccacatgcattggaaataatagcgctgcagctgtgtcaatgttgaaacaagactataaagaaggagaaatgaccttgaagtcagcacttgctttagctatcaaagtactaaataagaccatggatgttagtaaactctctgctgaaaaagtggaaattgcaacactaacaagagagaatggaaagacagtaatcagagttctcaaacaaaaagaagtggagcagttgat

SEQ ID NO: 24062 - DNA, 912 bp, Homo sapiens
  source 1..912: mol_type = unassigned DNA
ctgcctcctcctaccctcgccatgtttcttacccggtctgagtacgacaggggcgtgaatactttttctcccgaaggaagattatttcaagtggaatatgccattgaggctatcaagcttggttctacagccattgggatccagacatcagagggtgtgtgcctagctgtggagaagagaattacttccccactgatggagcccagcagcattgagaaaattgtagagattgatgctcacataggttgtgccatgagtgggctaattgctgatgctaagactttaattgataaagccagagtggagacacagaaccactggttcacctacaatgagacaatgacagtggagagtgtgacccaagctgtgtccaatctggctttgcagtttggagaagaagatgcagatccaggtgccatgtctcgtccctttggagtagcattattatttggaggagttgatgagaaaggaccccagctgtttcatatggacccatctgggacctttgtacagtgtgatgctcgagcaattggctctgcttcagagggtgcccagagctccttgcaagaagtttaccacaagtctatgactttgaaagaagccatcaagtcttcactcatcatcctcaaacaagtaatggaggagaagctgaatgcaacaaacattgagctagccacagtgcagcctggccagaatttccacatgttcacaaaggaagaacttgaagaggttatcaaggacatttaaggaatcctgatcctcagaacttctctgggacaatttcagttctaataatgtccttaaattttatttccagctcctgttccttggaaaatctccattgtatgtgcattttttaaatgatgtctgtacataaaggcagttctgaaataaagaaaattttaaaatatt

SEQ ID NO: 24063 - DNA, 985 bp, Homo sapiens
  source 1..985: mol_type = unassigned DNA
cttagtactgcggccgtgtgggtgagttggctgccggtgagttgggtgccggtggagtcgtgttggtcctcagaatccccgcgtagccgctgcctcctcctaccctcgccatgtttcttacccggtctgagtacgacagcttggttctacagccattgggatccagacatcagagggtgtgtgcctagctgtggagaagagaattacttccccactgatggagcccagcagcattgagaaaattgtagagattgatgctcacataggttgtgccatgagtgggctaattgctgatgctaagactttaattgataaagccagagtggagacacagaaccactggttcacctacaatgagacaatgacagtggagagtgtgacccaagctgtgtccaatctggctttgcagtttggagaagaagatgcagatccaggtgccatgtctcgtccctttggagtagcattattatttggaggagttgatgagaaaggaccccagctgtttcatatggacccatctgggacctttgtacagtgtgatgctcgagcaattggctctgcttcagagggtgcccagagctccttgcaagaagtttaccacaagtctatgactttgaaagaagccatcaagtcttcactcatcatcctcaaacaagtaatggaggagaagctgaatgcaacaaacattgagctagccacagtgcagcctggccagaatttccacatgttcacaaaggaagaacttgaagaggttatcaaggacatttaaggaatcctgatcctcagaacttctctgggacaatttcagttctaataatgtccttaaattttatttccagctcctgttccttggaaaatctccattgtatgtgcattttttaaatgatgtctgtacataaaggcagttctgaaataaagaaaattttaaaatatttgttaatagactgttctcttctaatagtcttttttttttttttttttttaa

SEQ ID NO: 24064 - DNA, 1029 bp, Homo sapiens
  source 1..1029: mol_type = unassigned DNA
gcggaagaaacgcggctggtaccccggaagcagtcgctgcaacttccgggaggtgcttgtgtgcctggtgcgggagctacggggcccagggattgtgtttaaagtagtgcttctaccaacatgtcccgtggttccagcgccggttttgaccgccacattaccattttttcacccgagggtcggctctaccaagtagaatatgcttttaaggctattaaccagggtggccttacatcagtagctgtcagagggaaagactgtgcagtaattgtcacacagaagaaagtacctgacaaattattggattccagcacagtgactcacttattcaagataactgaaaacattggttgtgtgatgaccggaatgacagctgacagcagatcccaggtacagagggcacgctatgaggcagctaactggaaatacaagtatggctatgagattcctgtggacatgctgtgtaaaagaattgccgatatttctcaggtctacacacagaatgctgaaatgaggcctcttggttgttgtatgattttaattggtatagatgaagagcaaggccctcaggtatataagtgtgatcctgcaggttactactgtgggtttaaagccactgcagcgggagttaaacaaactgagtcaaccagcttccttgaaaaaaaagtgaagaagaaatttgattggacatttgaacagacagtggaaactgcaattacatgcctgtctactgttctatcaattgatttcaaaccttcagaaatagaagttggagtagtgacagttgaaaatcctaaattcaggattcttacagaagcagagattgatgctcaccttgttgctctagcagagagagactaaacattgtcgttagtttaccagatccgtgatgccacttacctgtgtgtttggtaacaacaaaccaacatcatggaggtccctggattgaaaaaggagcctctcccactcctcctaccaccgaagtggttaggactctatataaataaaaacaaggcttttggaaaataa

SEQ ID NO: 24065 - DNA, 912 bp, Homo sapiens
  source 1..912: mol_type = unassigned DNA
agtgtcctaggctgggagaatgggatggagcctccacctcatgaagtagcttcctttggaggtggctatggcaggtcttcggagagaatatgcttttaaggctattaaccagggtggccttacatcagtagctgtcagagggaaagactgtgcagtaattgtcacacagaagaaagtacctgacaaattattggattccagcacagtgactcacttattcaagataactgaaaacattggttgtgtgatgaccggaatgacagctgacagcagatcccaggtacagagggcacgctatgaggcagctaactggaaatacaagtatggctatgagattcctgtggacatgctgtgtaaaagaattgccgatatttctcaggtctacacacagaatgctgaaatgaggcctcttggttgttgtatgattttaattggtatagatgaagagcaaggccctcaggtatataagtgtgatcctgcaggttactactgtgggtttaaagccactgcagcgggagttaaacaaactgagtcaaccagcttccttgaaaaaaaagtgaagaagaaatttgattggacatttgaacagacagtggaaactgcaattacatgcctgtctactgttctatcaattgatttcaaaccttcagaaatagaagttggagtagtgacagttgaaaatcctaaattcaggattcttacagaagcagagattgatgctcaccttgttgctctagcagagagagactaaacattgtcgttagtttaccagatccgtgatgccacttacctgtgtgtttggtaacaacaaaccaacatcatggaggtccctggattgaaaaaggagcctctcccactcctcctaccaccgaagtggttaggactctatataaataaaaacaaggcttttgg

SEQ ID NO: 24066 - DNA, 879 bp, Homo sapiens
  source 1..879: mol_type = unassigned DNA
acttccgggaggtgcttgtgtgcctggtgcgggagctacggggcccagggattgtgtttaaagtagtgcttctaccaacatgtcccgtggttccagcgccggttttgaccgccacattaccattttttcacccgagggtcggctctaccaagtagaatatgcttttaaggctattaaccagggtggccttacatcagtagctgtcagagggaaagactgtgcagtaattgtcacacagaagaaagtacctgacaaattattggattccagcacagtgactcacttattcaagataactgaaaacattggttgtgtgatgaccggaatgacagctgacagcagatcccaggtacagagggcacgctatgaggcagctaactggaaatacaagtatggctatgagattcctgtggacatgctgtgtaaaagaattgccgatatttctcaggtctacacacagaatgctgaaatgaggcctcttggttgttggtcttttctctttttaggtatgattttaattggtatagatgaagagcaaggccctcaggtatataagtgtgatcctgcaggttactactgtgggtttaaagccactgcagcgggagttaaacaaactgagtcaaccagcttccttgaaaaaaaagtgaagaagaaatttgattggacatttgaacagacagtggaaactgcaattacatgcctgtctactgttctatcaattgatttcaaaccttcagaaatagaagttggagtagtgacagttgaaaatcctaaattcaggattcttacagaagcagagattgatgctcaccttgttgctctagcagagagagactaaacattgtcgttagtttaccagatccgtgatgccacttacct

SEQ ID NO: 24067 - DNA, 790 bp, Homo sapiens
  source 1..790: mol_type = unassigned DNA
ctgcaacttccgggaggtgcttgtgtgcctggtgcgggagctacggggcccagggattgtgtttaaagtagtgcttctaccaacatgtcccgtggttccagcgccggttttgaccgccacattaccattttttcacccgagggtcggctctaccaagtagaatatgcttttaaggctattaaccagggtggccttacatcagtagctgtcagagggaaagactgtgcagtaattgtcacacagaagaaagtacctgacaaattattggattccagcacagtgactcacttattcaagataactgaaaacattggttgtgtgatgaccggaatgacagtctcactttgtcgcccaggctgctccgcctcctgggttcaagcaattctcgtgcctcaacctcccaggtagctgggactacagctgacagcagatcccaggtacagagggcacgctatgaggcagctaactggaaatacaagtatggctatgagattcctgtggacatgctgtgtaaaagaattgccgatatttctcaggtctacacacagaatgctgaaatgaggcctcttggttgttgtatgattttaattggtatagatgaagagcaaggccctcaggtatataagtgtgatcctgcaggttactactgtgggtttaaagccactgcagcgggagttaaacaaactgagtcaaccagcttccttgaaaaaaaagtgaagaagaaatttgattggacatttgaacagacagtggaaactgcaattacatgcctgtctactgttctatcaat

SEQ ID NO: 24068 - DNA, 814 bp, Homo sapiens
  source 1..814: mol_type = unassigned DNA
ctgcaacttccgggaggtgcttgtgtgcctggtgcgggagctacggggcccagggattgtgtttaaagtagtgcttctaccaacatgtcccgtggttccagcgccggttttgaccgccacattaccattttttcacccgagggtcggctctaccaagtagaatatgcttttaaggctattaaccagggtggccttacatcagtagctgtcagagggaaagactgtgcagtaattgtcacacagaagaaagtacctgacaaattattggattccagcacagtgactcacttattcaagataactgaaaacattggttgtgtgatgaccggaatgacagctgacagcagatcccaggtacagagggcacgctatgaggcagctaactggaaatacaagtatggctatgagattcctgtggacatgctgtgtaaaagaattgccgatatttctcaggtctacacacagaatgctgaaatgaggcctcttggttgttactgcaattacatgcctgtctactgttctatcaattgatttcaaaccttcagaaatagaagttggagtagtgacagttgaaaatcctaaattcaggattcttacagaagcagagattgatgctcaccttgttgctctagcagagagagactaaacattgtcgttagtttaccagatccgtgatgccacttacctgtgtgtttggtaacaacaaaccaacatcatggaggtccctggattgaaaaaggagcctctcccactcctcctaccaccgaagtggttaggactctatataaataaaaacaaggcttttggaaaataa

SEQ ID NO: 24069 - DNA, 1002 bp, Homo sapiens
  source 1..1002: mol_type = unassigned DNA
gtgtttaaagtagtgcttctaccaacatgtcccgtggttccagcgccggttttgaccgccacattaccattttttcacccgagggtcggctctaccaagtaggtgagtgaaccaggttcgcctgtgggccacctgaattgccctgtcatgaatatgcttttaaggctattaaccagggtggccttacatcagtagctgtcagagggaaagactgtgcagtaattgtcacacagaagaaagtacctgacaaattattggattccagcacagtgactcacttattcaagataactgaaaacattggttgtgtgatgaccggaatgacagctgacagcagatcccaggtacagagggcacgctatgaggcagctaactggaaatacaagtatggctatgagattcctgtggacatgctgtgtaaaagaattgccgatatttctcaggtctacacacagaatgctgaaatgaggcctcttggttgttgtatgattttaattggtatagatgaagagcaaggccctcaggtatataagtgtgatcctgcaggttactactgtgggtttaaagccactgcagcgggagttaaacaaactgagtcaaccagcttccttgaaaaaaaagtgaagaagaaatttgattggacatttgaacagacagtggaaactgcaattacatgcctgtctactgttctatcaattgatttcaaaccttcagaaatagaagttggagtagtgacagttgaaaatcctaaattcaggattcttacagaagcagagattgatgctcaccttgttgctctagcagagagagactaaacattgtcgttagtttaccagatccgtgatgccacttacctgtgtgtttggtaacaacaaaccaacatcatggaggtccctggattgaaaaaggagcctctcccactcctcctaccaccgaagtggttaggactctatataaataaaaacaaggcttttggaaaataattgcatcctgttgttttca

SEQ ID NO: 24070 - DNA, 763 bp, Homo sapiens
  source 1..763: mol_type = unassigned DNA
caacatgtcccgtggttccagcgccggttttgaccgccacattaccattttttcacccgagggtcggctctaccaagtagaatatgcttttaaggctattaaccagggtggccttacatcagtagctgtcagagggaaagactgtgcagtaattgtcacacagaagaaagtacctgacaaattattggattccagcacagtgactcacttattcaagataactgaaaacattggttgtgtgatgaccggaatgacagctgacagcagatcccaggtacagagggcacgctatgaggcagctaactggaaatacaagtatggctatgagattcctgtggacatgctgtgtaaaagaattgccgatatttctcaggtctacacacagaatgctgaaatgaggcctcttggttgttgtatgattttaattggtatagatgaagagcaaggccctcaggtatataagtgtgatcctgcaggttactactgtgggtttaaagccactgcagcgggagttaaacaaactgagtcaaccagcttccttgaaaaaaaagtgaagaagaaatttgattggacatttgaacagacagtggaagattcttacagaagcagagattgatgctcaccttgttgctctagcagagagagactaaacattgtcgttagtttaccagatccgtgatgccacttacctgtgtgtttggtaacaacaaaccaacatcatggaggtccctggattgaaaaaggagcctctcccactcctcct

SEQ ID NO: 24071 - DNA, 925 bp, Homo sapiens
  source 1..925: mol_type = unassigned DNA
cagcgcaggacacggcgccgagggtggggcgcgggcgtagtggcgccgggagtcgcgggtgcgcgcgggccgtgagtgtgcgcttttgagagtcgcggcggaaggagcccggccgccgcccgccggcatgagctacgaccgcgccatcaccgtcttctcgcccgacggccacctcttccaagtggagtacgcgcaggaggccgtcaagaagggctcgaccgcggttggtgttcgaggaagagacattgttgttcttggtgtggagaagaagtcagtggccaaactgcaggatgaaagaacagtgcggaagatctgtgctttggatgacaacgtctgcatggcctttgcaggcctcaccgccgatgcaaggatagtcatcaacagggcccgggtggagtgccagagccaccggctgactgtggaggacccggtcactgtggagtacatcacccgctacatcgccagtctgaagcaggtgggtgcctgcccgcttgcatgctcacctctggcagcagggcagtcacggctccgccatggagggtcctgccatgtcacttcaggtgaatcagaaaactgatttattctggggcgtgatcctaatcttgacttgcacaagtgtaacttgacctagctcaccaatttcagtaacattgttctgttctcagttcctggcatgggatattccaaattcctgtgtctggagggaaatgatagcttttgtcttgccatcctgagtgaccagtcacaaagcagttgaagggggctggaagccaccctatgaggacacgccattagtatgtaagcagaatgtgtgtctacctgtcaaagtaatttccagtaacctgagttcacaattctggtcctaggtgagtttttctaggagtgaaaatgcagaaaaggatgttgaaagctattggctaatgta

SEQ ID NO: 24072 - DNA, 773 bp, Homo sapiens
  source 1..773: mol_type = unassigned DNA
ccgcccgggtcaggactggtttggacgcggccgtttcgttttgacgagggctcgtgtacattgaccttagtgacattgtttgaaacttaaattcgtaccatcaagacgtgtcagtttaattggttggtgttcgaggaagagacattgttgttcttggtgtggagaagaagtcagtggccaaactgcaggatgaaagaacagtgcggaagatctgtgctttggatgacaacgtctgcatggcctttgcaggcctcaccgccgatgcaaggatagtcatcaacagggcccgggtggagtgccagagccaccggctgactgtggaggacccggtcactgtggagtacatcacccgctacatcgccagtctgaagcagcgttatacgcagagcaatgggcgcaggccgtttggcatctctgccctcatcgtgggtttcgactttgatggcactcctaggctctatcagactgacccctcgggcacataccatgcctggaaggccaatgccataggtcggggtgccaagtcagtgcgcgagttcctggagaagaactatactgacgaagccattgaaacagatgatctgaccattaagctggtgatcaaggcactcctggaagtggttcagtcaggtggcaaaaacattgaacttgctgtcatgaggcgagatcaatccctcaagattttaaatcctgaagaaattgagaagtatgttgctgaaattgaaaaagaaaaagaagaaaacgaaaagaagaaacaaaagaaagcatcatga

SEQ ID NO: 24073 - DNA, 996 bp, Homo sapiens
  source 1..996: mol_type = unassigned DNA
cagcgcaggacacggcgccgagggtggggcgcgggcgtagtggcgccgggagtcgcgggtgcgcgcgggccgtgagtgtgcgcttttgagagtcgcggcggaaggagcccggccgccgcccgccggcatgagctacgaccgcgccatcaccgtcttctcgcccgacggccacctcttccaagtggagtacgcgcaggaggccgtcaagaagggctcgaccgcggttggtgttcgaggaagagacattgttgttcttggtgtggagaagaagtcagtggccaaactgcaggatgaaagaacagtgcggaagatctgtgctttggatgacaacgtctgcatggcctttgcaggcctcaccgccgatgcaaggatagtcatcaacagggcccgggtggagtgccagagccaccggctgactgtggaggacccggtcactgtggagtacatcacccgctacatcgccagtctgaagcagcgttatacgcagagcaatgggcgcaggccgtttggcatctctgccctcatcgtgggtttcgactttgatggcactcctaggctctatcagactgacccctcgggcacataccatgcctggaaggccaatgccataggtcggggtgccaagtcagtgcgcgagttcctggagaagaactatactgacgaagccattgaaacagatgatctgaccattaagctggtgatcaaggcactcctggaagtggttcagtcaggtggcaaaaacattgaacttgctgtcatgaggcgagatcaatccctcaagattttaaatcctgaagaaattgagaagtatgttgctgaaattgaaaaagaaaaagaagaaaacgaaaagaagaaacaaaagaaagcatcatgatgaataaaatgtctttgcttgtaatttttaaattcatatcaatcatggatgagtctcgatgtgtaggcctttccattccatttattcacactgagtgtcctacaataaacttccgtattttt

SEQ ID NO: 24074 - DNA, 685 bp, Homo sapiens
  source 1..685: mol_type = unassigned DNA
gcctcaccgccgatgcaaggatagtcatcaacagggcccgggtggagtgccagagccaccggctgactgtggaggacccggtcactgtggagtacatcacccgctacatcgccagtctgaagcagcgttatacgcagagcaatgggcgcaggccgtttggcatctctgccctcatcgtgggtttcgactttgatggcactcctaggctctatcagactgacccctcgggcacataccatgcctggaaggccaatgccataggtcggggtgccaagtcagtgcgcgagttcctggagaagaactatactgacgaagccattgaaacagatgatctgaccattaagctggtgatcaaggcactcctggaaggaaaggtggttaatgctcctgtcttctgtcccttcaaggtggttcagtcaggtggcaaaaacattgaacttgctgtcatgaggcgagatcaatccctcaagattttaaatcctgaagaaattgagaagtatgttgctgaaattgaaaaagaaaaagaagaaaacgaaaagaagaaacaaaagaaagcatcatgatgaataaaatgtctttgcttgtaatttttaaattcatatcaatcatggatgagtctcgatgtgtaggcctttccattccatttattcacactgagtgtcctacaataaacttccgtattttt

SEQ ID NO: 24075 - DNA, 928 bp, Homo sapiens
  source 1..928: mol_type = unassigned DNA
agcgaacttcaggagaagccggaagtggcgtaacgtccggtcaaggcagccatctcgccgtgagacagcaagtgtcggatccgcaggcgcagccgtgcgatgttgtcctctacagccatgtattcggctcctggcagagacttggggatggaaccgcacagagccgcgggccctttgcagctgcgattttcgccctacgttttcaacggaggtactatactggcaattgctggagaagattttgcaattgttgcttctgatactcgattgagtgaagggttttcaattcatacgcgggatagccccaaatgttacaaattaacagacaaaacagtcattggatgcagcggttttcatggagactgtcttacgctgacaaagattattgaagcaagactaaagatgtataagcattccaataataaggccatgactacgggggcaattgctgcaatgctgtctacaatcctgtattcaaggcgcttctttccatactatgtttacaacatcatcggtggacttgatgaagaaggaaagggggctgtatacagctttgatccagtagggtcttaccagagagactccttcaaggctggaggctcagcaagtgccatgctacagcccctgcttgacaaccaggttggttttaagaacatgcagaatgtggagcatgttccgctgtccttggacagagccatgcggctggtgaaagatgtcttcatttctgcggctgagagagatgtgtacactggggacgcactccggatctgcatagtgaccaaagagggcatcagggaggaaactgtttccttaaggaaggactgatctgtgtgctcttatcaccaatcagttcagacctggttgattttgtactttggaactgtaccttggatggttttgtttattaaaagagaaacctgaagtactc

SEQ ID NO: 24076 - DNA, 660 bp, Homo sapiens
  source 1..660: mol_type = unassigned DNA
gagaagccggaagtggcgtaacgtccggtcaaggcagccatctcgccgtgagacagcaagtgtcggatccgcaggcgcagccgtgcgatgttgtcctctacagccatgtattcggctcctggcagagacttggggatggaaccgcacagagccgcgggccctttgcagctgcgattttcgccctacgttttcaacggaggtactatactggcaattgctggagaagattttgcaattgttgcttctgatactcgattgagtgaagggttttcaattcatacgcgggatagccccaaatgttacaaattaacagacaaaacagtcattggatgcagcggttttcatggagactgtcttacgctgacaaagattattgaagcaagactaaagatgtataagcattccaataataaggccatgactacgggggcaattgctgcaatgctgtctacaatcctgtattcaaggcgcttctttccatactatgtttacaacatcatcggtggacttgatgaagaaggaaagggggctgtatacagctttgatccagtagggtcttaccagagagactccttcaaggctggaggctcagcaagtgccatgctacagcccctgcttgacaaccagtacatatcaagcaattcagtcagtttatgtgta

SEQ ID NO: 24077 - DNA, 1218 bp, Homo sapiens
  source 1..1218: mol_type = unassigned DNA
aagagcaaggggctcagatggagggggaggaggacctgaacaagtccagaagggaagagatttgtccctctatccaacagagtacccagtgagcagcacagagggcacagcaagggacatcacccggttccccaaatgctcagagccacaagtgaagccaaaagtgaaagacaagatgcagaaaaccgccacgggcctttgaggaagggtaaaggcgaaagcgaaagcaggaagtacagacgtgaagcctagcagaggactttttagctgctcactggccccgcttgtctggccgactcatccgcccgcgacccctaatcccctctgcctgccccaagatgctgaagccagccctggagccccgagggggcttctccttcgagaactgccaaagaaatgcatcattggaacgcgtcctcccggggctcaaggtccctcacgcacgcaagaccgggaccaccatcgcgggcctggtgttccaagacggggtcattctgggcgccgatacgcgagccactaacgattcggtcgtggcggacaagagctgcgagaagatccacttcatcgcccccaaaatctactgctgtggggctggagtagccgcggacgccgagatgaccacacggatggtggcgtccaagatggagctacacgcgttatctacgggccgcgagccccgcgtggccacggtcactcgcatcctgcgccagacgctcttcaggtaccagggccacgtgggtgcatcgctgatcgtgggcggcgtagacctgactggaccgcagctctacggtgtgcatccccatggctcctacagccgtctgcccttcacagccctgggctctggtcaggacgcggccctggcggtgctagaagaccggttccagccgaacatgacgctggaggctgctcaggggctgctggtggaagccgtcaccgccgggatcttgggtgacctgggctccgggggcaatgtggacgcatgtgtgatcacaaagactggcgccaagctgctgcggacactgagctcacccacagagcccgtgaagaggtctggccgctaccactttgtgcctggaaccacagctgtcctgacccagacagtgaagccactaaccctggagctagtggaggaaactgtgcaggctatggaggtggagtaagctgaggcttagagcttggaacaagggggaataaacccagaaaatacagttaaacaga

SEQ ID NO: 24078 - DNA, 1894 bp, Homo sapiens
  source 1..1894: mol_type = unassigned DNA
accagaccccagccacaaattcctggcttgcttcttccaaacttcattcagccccagggatggctctgcaggatgtgtgcaagtggcagtcccctgacacccagggaccatcacctcacctgcctcgggctggcggctgggctgtgccccggggttgtgaccctcaaaccttcctgcagatccatggccccagactggcccacggcaccaccactctggccttccgcttccgtcatggagtcattgctgcagctgacacgcgttcctcctgtggcagctatgtggcgtgtccagcctcatgcaaggtcatccctgtgcaccagcacctcctgggtaccacctctggcacctctgccgactgtgctacctggtatcgggtattacagcgggagctgcggcttcgggaactgagggagggtcagctgcccagtgtggccagtgctgccaagctcttgtcagccatgatgtctcaataccggggactggatctctgtgtggccactgccctctgcggctgggaccgctctggccctgagctcttctacgtctatagcgacggcacccgcctgcagggggacatcttctctgtgggctctggatctccctatgcctacggcgtgctagaccgtggctatcgctacgacatgagcacccaggaagcctacgccctggctcgctgcgccgtggcccacgccacccaccgtgatgcctattcagggggctctgtagaccttttccacgtgcgggagagtggatgggagcatgtgtcacgcagtgatgcctgtgtgctgtacgtggagttacagaagctcctggagccggagccagaggaggatgccagccatgcccatcctgagcctgccactgcccacagagctgcagaagatagagagctctctgtggggccaggggaggtgacaccaggagactccaggatgccagcagggactgagacggtgtgagaagcaggacttggttggggatggtgtaggcctggggagtgggtgggaggatgggcagcagggggagggtcccgctggcagcagcctcacagcgtctggctctagcctgtatgggttgctggcttcatttattgcaagtctccatcctttcatgactcccagagctattatggctctgcccaacaagttcctattgactcccagtggattggtccagcctccttcttggcaccaagtccgtctttcattcaacacttgcagtgtgcctactgcatgccagacgcatgctaggtgctagaccctcttttcttgccatcttctctgcttttttccatcatctcatccccagtttctcttagtttcggtcctttatgtgtctcagcttcagcgtctttgtctttttctcctgatcactttgtcagcatggtaagatggggcacccgggaagggagcagcccctctcagaacgaggcgtagtgatagacaccctttggatggtgatgggcttgtcttatctgctctccttctctgacttgaccatcatgactagaatgattatccctttactgaatgcagttctcatcgcaaccctttgaggtaaaaatgagtctctctttacagaagaggaatcaggttcaaagggttatgtggcttgccagggtcacacagtaagtggcagggatgacacttagatccaggccttctcctccagggtccatgctctttcagcacagctccccctcccaggccctctgccctgcctttcctctcttccctgcaggcttccggagagggatgtggagggagaaagtagctaggccagtcccctgcctggtggctcatgtggctttatcttccaggcctggagccatcccccacagcccacccttgctctccagctttctgggcctggcggtgccgctgccagactt

SEQ ID NO: 24079 - DNA, 2701 bp, Homo sapiens
  source 1..2701: mol_type = unassigned DNA
ggggagattttaccgagcaacgtagggaaacggctgcctggctacctacccctttttgacacccacacgtgctcggcaccttacatacactgcgtgattttatcctaaagccacttttaaaatcttagtgtgtaaacagagaaactgggcgtcacataaggcaagtgacctgcacagcctgctccggaggagacccgtacgatcccagagacaagcactgaacataaggcacccggcgccgcgcccgctttgcaacctctcgcgacagttgtacgtcatccgagagcgccgtggaagtcgtgctgcaggcgtcgcgccaatcttcgctctgaggtgctgtctcaccggtgagacctggaagcgggcgagtctcgtgctgtgtcggacctgcagcccctggccttccgccaccatggagtacctcatcggtatccaaggccccgactatgttcttgtcgcctccgaccgggtggccgccagcaatattgtccagatgaaggacgatcatgacaagatgtttaagatgagtgaaaagatattactcctgtgtgttggagaggctggagacactgtacagtttgcagaatatattcagaaaaacgtgcaactttataagatgcgaaatggatatgaattgtctcccacggcagcagctaacttcacacgccgaaacctggctgactgtcttcggagtcggaccccatatcatgtgaacctcctcctggctggctatgatgagcatgaagggccagcgctgtattacatggactacctggcagccttggccaaggccccttttgcagcccacggctatggtgccttcctgactctcagtatcctcgaccgatactacacaccgactatctcacgtgagagggcagtggaactccttaggaaatgtctggaggagctccagaaacgcttcatcctgaatctgccaaccttcagtgttcgaatcattgacaaaaatggcatccatgacctggataacatttccttccccaaacagggctcctaacatcatgtcctccctcccacttgccagggaacttttttttgatgggctcctttatttttttctactcttttcaggcgcactcttgataaatggttaattcagaataaaggtgactatggatataattgagccctctggtccaggtctcagtttacctaatattacctcagaaaggatatggagggaagatgatctttttgccaggtctgacttttcttcctgctccgccctccattaacgctcagtaccctttagcagctgacggccccacgttctactccatgcttggcttcctttccaactagctctttcatatattttacttgctagtatctccattctctctaaagtagtggttctttttgcccttaaacttaaatttttaaattaattaacctgaattaataatacatgcacttaatgtaacatgcaaacagtacaaaaacatgtagtgaaaaatatttcttccagagctgggtgtggtggctcatacctgtaatcccagcactttgggaggccgaggcgggcggatcacgaggtcaagagagcgagaccatcctgaccaacatggtaaaaccccgtctctactaaaaatacaaaaattagctgggcgtggtggcacgcacccctagtcccagctactggggaggctgagacaggagaatcggtcgaacccgggaggcagaggttgcagtgagcctagatcgcgccactgtactccagcctggcaacagagtgagactccgtctcaaaaaaagaaggaaaaatgtttcttccatccctataatccagtcatctgcttcctgcttcccttcctggaggaaacttcagctactaatttcttatgttttttaagagatattctgttactgtgtaaagtatacatacatacagacacatgccccctttaaattttttagatttatttatttatttagagacagggtctcactctagcccaggctggagtgctgtggcgtaatcttggctcactgcaacctccgcctcccgggcccaagtgatcctcccatctcagcctcctgagtagctaggattacaggcgcacaccaccaatgcccagctagtttttgtgtttttcatagagacagggtctcaccatgtcattcaggttggtcttgaactcctgggctcaagcagtctgcctgccttggcttcccagtgctgggattacaggcgtgagccaccgtgcccggctaaaaagtatttttaagttctgcatattgcttatttcacttaacactatattagagattgttttatatcaatacatatagatatgcttattcttgttgacagttgcataattttccattaaattgatgtatcatgggcagttaaccagttactcgttttactcttagcataactttagggaacaatgtggatgttttgtggttaaagctattaaaacagtggttcttgaccagatgtgtgtttcagaatgttcatctcacatttccagttgctactgatgctgctggtctaggaaccacatatcaaaaccatttggtctccgactaagataaaccctactttatccaattctgtgctcctcttaatatcatatacagataggtttttgttttgtctgtgattaaatgtatcatctaagatactacctactgatcataacgttcatattaaagtattgggttaacatta

SEQ ID NO: 24080 - DNA, 758 bp, Homo sapiens
  source 1..758: mol_type = unassigned DNA
agcggttgcgcagtgaaggctagacccggtttactggaattgctctggcgatcgagggatcctagtacaccgcaatcatgtctattatgtcctataacggaggggccgtcatggccatgaaggggaagaactgtgtggccatcgctgcagacaggcgcttcgggatccaggcccagatggtgaccacggacttccagaagatctttcccatgggtgaccggctgtacatcggtctggccgggctcgccactgacgtccagacagttgcccagcgcctcaagttccggctgaacctgtatgagttgaaggaaggtcggcagatcaaaccttataccctcatgagcatggtggccaacctcttgtatgagaaacggtttggcccttactacactgagccagtcattgccgggttggacccgaagacctttaagcccttcatttgctctctagacctcatcggctgccccatggtgactgatgactttgtggtcagtggcacctgcgccgaacaaatgtacggaatgtgtgagtccctctgggagcccaacatggatccggatcacctgtttgaaaccatctcccaagccatgctgaatgctgtggaccgggatgcagtgtcaggcatgggagtcattgtccacatcatcgagaaggacaaaatcaccaccaggacactgaaggcccgaatggactaaccctgttcccagagcccacttttttttctttttttgaaataaaatagcctgtctttcactcct

SEQ ID NO: 24081 - DNA, 964 bp, Homo sapiens
  source 1..964: mol_type = unassigned DNA
acttccgcttccgttggcgcaagcgctttcattttttctgctaccgtgactaagatggaagcgtttttggggtcgcggtccggactttgggcggggggtccggccccaggacagttttaccgcattccgtccactcccgattccttcatggatccggcgtctgcactttacagaggtccaatcacgcggacccagaaccccatggtgaccgggacctcagtcctcggcgttaagttcgagggcggagtggtgattgccgcagacatgctgggatcctacggctccttggctcgtttccgcaacatctctcgcattatgcgagtcaacaacagtaccatgctgggtgcctctggcgactacgctgatttccagtatttgaagcaagttctcggccagatggtgattgatgaggagcttctgggagatggacacagctatagtcctagagctattcattcatggctgaccagggccatgtacagccggcgctcgaagatgaaccctttgtggaacaccatggtcatcggaggctatgctgatggagagagcttcctcggttatgtggacatgcttggtgtagcctatgaagccccttcgctggccactggttatggtgcatacttggctcagcctctgctgcgagaagttctggagaagcagccagtgctaagccagaccgaggcccgcgacttagtagaacgctgcatgcgagtgctgtactaccgagatgcccgttcttacaaccggtttcaaatcgccactgtcaccgaaaaaggtgttgaaatagagggaccattgtctacagagaccaactgggatattgcccacatgatcagtggctttgaatgaaatacagatgcattatccagaactgaagttgccctacttttaactttgaacttggctagttcaaagatagactcttcttttgtaaagtaaataaattcttcaaaatgcttgctga

SEQ ID NO: 24082 - DNA, 1294 bp, Homo sapiens
  source 1..1294: mol_type = unassigned DNA
aggactacttgcatgaccaaagccaagatggcaggtacgtccttttagaatttaaggttagtgaagccatctatttccccgacccccttcagtgaaaatggtctttcgcatctggcccttctttttggaggcgtgcttgccagcagtcaaaatggctccattccggaatagatttaataggaagtgaagctgtgacggcgaggcgttgcccggcctatctttgctaggcgttctcagaattagttctttctgcccacactagacatggcgcttgccagcgtgttggagagaccgctaccggtgaaccagcgcgggtttttcggacttgggggtcgtgcagatctgctggatctaggtccagggagtctcagtgatggtctgagcctggccgcgccaggctggggtgtcccagaagagccaggaatcgaaatgcttcatggaacaaccaccctggccttcaagttccgccatggagtcatagttgcagctgactccagggctacagcgggtgcttacattgcctcccagacggtgaagaaggtgatagagatcaacccatacctgctaggcaccatggctgggggcgcagcggattgcagcttctgggaacggctgttggctcggcaatgtcgaatctatgagcttcgaaataaggaacgcatctctgtagcagctgcctccaaactgcttgccaacatggtgtatcagtacaaaggcatggggctgtccatgggcaccatgatctgtggctgggataagagaggccctggcctctactacgtggacagtgaagggaaccggatttcaggggccaccttctctgtaggttctggctctgtgtatgcatatggggtcatggatcggggctattcctatgacctggaagtggagcaggcctatgatctggcccgtcgagccatctaccaagccacctacagagatgcctactcaggaggtgcagtcaacctctaccacgtgcgggaggatggctggatccgagtctccagtgacaatgtggctgatctacatgagaagtatagtggctctaccccctgaaagagggtggatgcagctgcttgtgtttcttggggtgactgtcattggtaatacggacacagtgacccatcctccatcctatttatagtggaagggccttcaattgtatcagtacttttttttaagctctggcacattgacctctatgtgttaccagtcattaatgagctgctgcagaggtgactatttgttttactttcttggatgttaacattacactactcactactcaatctca

SEQ ID NO: 24083 - DNA, 900 bp, Homo sapiens
  source 1..900: mol_type = unassigned DNA
cttctcaaagatggccgacctcacttcccttacgcaacatggacgttttcagtcacttcctgtgattttgaggttattctgatccaggactacttgcatgaccaaagccaagatggcagttccgccatggagtcatagttgcagctgactccagggctacagcgggtgcttacattgcctcccagacggtgaagaaggtgatagagatcaacccatacctgctaggcaccatggctgggggcgcagcggattgcagcttctgggaacggctgttggctcggcaatgtcgaatctatgagcttcgaaataaggaacgcatctctgtagcagctgcctccaaactgcttgccaacatggtgtatcagtacaaaggcatggggctgtccatgggcaccatgatctgtggctgggataagagaggccctggcctctactacgtggacagtgaagggaaccggatttcaggggccaccttctctgtaggttctggctctgtgtatgcatatggggtcatggatcggggctattcctatgacctggaagtggagcaggcctatgatctggcccgtcgagccatctaccaagccacctacagagatgcctactcaggaggtgcagtcaacctctaccacgtgcgggaggatggctggatccgagtctccagtgacaatgtggctgatctacatgagaagtatagtggctctaccccctgaaagagggtggatgcagctgcttgtgtttcttggggtgactgtcattggtaatacggacacagtgacccatcctccatcctatttatagtggaagggccttcaattgtatcagtacttttttttaagctctggcacattgacctctatgtgttaccagtcattaatgagctgctgcagaggtgactat

SEQ ID NO: 24084 - DNA, 1117 bp, Homo sapiens
  source 1..1117: mol_type = unassigned DNA
acactagacatggcgcttgccagcgtgttggagagaccgctaccggtgaaccagcgcgggtttttcggacttgggggtcgtgcagatctgctggatctaggtccagggagtctcagtgatggtctgagcctggccgcgccaggctggggtgtcccagaagagccaggaatcgaaatgcttcatggaacaaccaccctggccttcaagttccgccatggagtcatagttgcagctgactccagggctacagcgggtgcttacattgcctcccagacggtgaagaaggtgatagagatcaacccatacctgctaggcaccatggctgggggcgcagcggattgcagcttctgggaacggctgttggctcggcaatgtcgaatctatgagcttcgaaataaggaacgcatctctgtagcagctgcctccaaactgcttgccaacatggtgtatcagtacaaaggcatggggctgtccatgggcaccatgatctgtggctgggataagagaggccctgtgtctgaagttctgtgcttgaaacctaagtcatttggaatgtacttgttttgtgggtgtgctgagaggatcggcaacatggcaaggcctctactacgtggacagtgaagggaaccggatttcaggggccaccttctctgtaggttctggctctgtgtatgcatatggggtcatggatcggggctattcctatgacctggaagtggagcaggcctatgatctggcccgtcgagccatctaccaagccacctacagagatgcctactcaggaggtgcagtcaacctctaccacgtgcgggaggatggctggatccgagtctccagtgacaatgtggctgatctacatgagaagtatagtggctctaccccctgaaagagggtggatgcagctgcttgtgtttcttggggtgactgtcattggtaatacggacacagtgacccatcctccatcctatttatagtggaagggccttcaattgtatcagtacttttttttaagctctggcacattgacctctatgtgttaccagtcattaatgagctgctgcagaggtgactatttgttttactttcttggatgttaacattacactactcactactc

SEQ ID NO: 24085 - DNA, 980 bp, Homo sapiens
  source 1..980: mol_type = unassigned DNA
gctttcttgggaagatggcggctgtgtcggtgtatgctccaccagttggaggcttctcttttgataactgccgcaggaatgccgtcttggaagccgattttgcaaagaggggatacaagcttccaaaggtccggaaaactggcacgaccatcgctggggtggtctataaggatggcatagttcttggagcagatacaagagcaactgaagggatggttgttgctgacaagaactgttcaaaaatacacttcatatctcctaatatttattgttgtggtgctgggacagctgcagacacagacatgacaacccagctcatttcttccaacctggagctccactccctctccactggccgtcttcccagagttgtgacagccaatcggatgctgaagcagatgcttttcaggtatcaaggttacattggtgcagccctagttttagggggagtagatgttactggacctcacctctacagcatctatcctcatggatcaactgataagttgccttatgtcaccatgggttctggctccttggcagcaatggctgtatttgaagataagtttaggccagacatggaggaggaggaagccaagaatctggtgagcgaagccatcgcagctggcatcttcaacgacctgggctccggaagcaacattgacctctgcgtcatcagcaagaacaagctggattttctccgcccatacacagtgcccaacaagaaggggaccaggcttggccggtacaggtgtgagaaagggactactgcagtcctcactgagaaaatcactcctctggagattgaggtgctggaagaaacagtccaaacaatggacacttcctgaatggcatcagtgggtggctggccgcggttctggaaggtggtgagcattgaggcccagtaagacactcatgtggctagtgtttgccgaatgaaactcaactcaataaaaaacaaaaaccaaattgggcagctg

SEQ ID NO: 24086 - DNA, 650 bp, Homo sapiens
  source 1..650: mol_type = unassigned DNA
gaactgctttcttgggaagatggcggctgtgtcggtgtatgctccaccagttggaggcttctcttttgataactgccgcaggaatgccgtcttggaagccgattttgcaaagaggggatacaagcttccaaaggtccggaaaactggcacgaccatcgctggggtggtctataaggatggcatagttcttggagcagatacaagagcaactgaagggatggttgttgctgacaagaactgttcaaaaatacacttcatatctcctaatatttattgttgtggtgctgggacagctgcagacacagacatgacaacccagctcatttcttccaacctggagctccactccctctccactggccgtcttcccagagttgtgacagccaatcggatgctgaagcagatgcttttcaggtatcaaggttacattggtgcagccctagttttagggggagtagatgttactggacctcacctctacagcatctatcctcatggatcaactgataagttgccttatgtcaccatggtccattgtgaagaggagctctttacagagaatcttttctttattaggcaagctgaagtagtgtcagaagaagcttggggaccatcttttgctattagcttggcagtgttccttgtagcag

SEQ ID NO: 24087 - DNA, 988 bp, Homo sapiens
  source 1..988: mol_type = unassigned DNA
actgctttcttgggaagatggcggctgtgtcggtgtatgctccaccagttggaggcttctcttttgataactgccgcaggaatgccgtcttggaagccgattttgcaaagaggggatacaagcttccaaaggtccggaaaactggcacgaccatcgctggggtggtctataaggatggcatagttcttggagcagatacaagagcaactgaagggatggttgttgctgacaagaactgttcaaaaatacacttcatatctcctaatatttattgttgtggtgctgggacagctgcagacacagacatgacaacccagctcatttcttccaacctggagctccactccctctccactggccgtcttcccagagttgtgacagccaatcggatgctgaagcagatgcttttcaggttctggctccttggcagcaatggctgtatttgaagataagtttaggccagacatggaggaggaggaagccaagaatctggtgagcgaagccatcgcagctggcatcttcaacgacctgggctccggaagcaacattgacctctgcgtcatcagcaagaacaagctggattttctccgcccatacacagtgcccaacaagaaggggaccaggtgagtgaaggagacgaagttcttcctgggtcccctggcgtcgtggccacccttggtatctccatggcatctggatggagttttcctggttctttccacattaagtacatccagtgttcccaaatcaacctcccacacagaccttcggcttgttacttgctttatgacagtgggctgctgtcaggtgtaggaaagtgatttaatttgatgggagaggtggagggtggcccaggaaagagccctaggctgggaggtggggccggagaggtttggatcatctgctgtcctttctcaagtgtcttaaagaatcccctgatttctgggagaaggtgcatttttcagggcagccccagcactttccctca

SEQ ID NO: 24088 - DNA, 1351 bp, Homo sapiens
  source 1..1351: mol_type = unassigned DNA
gaagaggcggggtttagaggcgtgaaactccgcagtgctcagccaagcagggagcaacgctaggaagggcgggcagaaagggcacgctcttgtgggtgactacaggttaggagaccgttgaacctggaggggccctaggatggaccccgtggaaagattcagagactgcgccctctccctggcgccgccttcccctacacgcggcgggtatattctgttgcagttggcccaggacctgtttccaagactctgccccctcgcacttccgtccctcctggttttgtaaagtgatgctcataggaacccccaccccgcgtgacactactcccagctcctggctgacttctagtcttctggttgaagctgcgcctttagatgacacgaccctacccacccctgtttccagcggatgcccgggcctggagcccacagaattcttccagtccctgggtggggacggagaaaggaacgttcagattgagatggcccatggcaccaccacgctcgccttcaagttccagcatggagtgattgcagcagtggattctcgggcctcagctgggtcctacattagtgccttacgggtgaacaaggtgattgagattaacccttacctgcttggcaccatgtctggctgtgcagcagactgtcagtactgggagcgcctgctggccaaggaatgcaggctgtactatctgcgaaatggagaacgtatttcagtgtcggcagcctccaagctgctgtccaacatgatgtgccagtaccggggcatgggcctctctatgggcagtatgatctgtggctgggataagaagggtcctggactctactacgtggatgaacatgggactcggctctcaggaaatatgttctccacgggtagtgggaacacttatgcctacggggtcatggacagtggctatcggcctaatcttagccctgaagaggcctatgaccttggccgcagggctattgcttatgccactcacagagacagctattctggaggcgttgtcaatatgtaccacatgaaggaagatggttgggtgaaagtagaaagtacagatgtcagtgacctgctgcaccagtaccgggaagccaatcaataatggtggtggtggcagctgggcaggtctcctctgggaggtcttggccgactcagggacctaagccacgttaagtccaaggagaagaagaggcctagcctgagccaaagagagagtacgggctcagcagccagaggaggccggtgaagtgcatcttctgcgtgttctctatttgaacaagcatttcccccagggaagtttctgggtgccccactaagtagaataaagaaaaacggttataaata

SEQ ID NO: 24089 - DNA, 1124 bp, Homo sapiens
  source 1..1124: mol_type = unassigned DNA
gctttcacttcctcctccgagagcggacagatctctgggtgctgggcggtcatggcgctactagatgtatgcggagccccccgagggcagcggccggaatcggctctcccggttgcgggaagcgggcgtcgctcggacccaggacactacagtttctctatgcgatctccagagctcgctttaccccggggaatgcagcccacagaattcttccagtccctgggtggggacggagaaaggaacgttcagattgagatggcccatggcaccaccacgctcgccttcaagttccagcatggagtgattgcagcagtggattctcgggcctcagctgggtcctacattagtgccttacgggtgaacaaggtgattgagattaacccttacctgcttggcaccatgtctggctgtgcagcagactgtcagtactgggagcgcctgctggccaaggaatgcaggctgtactatctgcgaaatggagaacgtatttcagtgtcggcagcctccaagctgctgtccaacatgatgtgccagtaccggggcatgggcctctctatgggcagtatgatctgtggctgggataagaagggtcctggactctactacgtggatgaacatgggactcggctctcaggaaatatgttctccacgggtagtgggaacacttatgcctacggggtcatggacagtggctatcggcctaatcttagccctgaagaggcctatgaccttggccgcagggctattgcttatgccactcacagagacagctattctggaggcgttgtcaatatgtaccacatgaaggaagatggttgggtgaaagtagaaagtacagatgtcagtgacctgctgcaccagtaccgggaagccaatcaataatggtggtggtggcagctgggcaggtctcctctgggaggtcttggccgactcagggacctaagccacgttaagtccaaggagaagaagaggcctagcctgagccaaagagagagtacgggctcagcagccagaggaggccggtgaagtgcatcttctgcgtgttctctatttgaacaagcatttcccccagggaagtttctgggtgccccactaagtagaataaagaaaaacggttataaata

SEQ ID NO: 24090 - DNA, 1124 bp, Homo sapiens; identical to SEQ ID NO: 24089
  source 1..1124: mol_type = unassigned DNA

SEQ ID NO: 24091 - DNA, 1351 bp, Homo sapiens; identical to SEQ ID NO: 24088
  source 1..1351: mol_type = unassigned DNA

SEQ ID NO: 24092 - DNA, 1025 bp, Homo sapiens
  source 1..1025: mol_type = unassigned DNA
cagatctctgggtgctgggcggtcatggcgctactagatgtatgcggagccccccgagggcagcggccggaatcggctctcccggttgcgggaagcgggcgtcgctcggacccaggacactacagtttctctatgcgatctccagagctcgctttaccccggggaatgcagcccacagaattcttccagtccctgggtggggacggagaaaggaacgttcagattgagatggcccatggcaccaccacgctcgccttcaagttccagcatggagtgattgcagcagtggattctcgggcctcagctgggtcctacattaactgtcagtactgggagcgcctgctggccaaggaatgcaggctgtactatctgcgaaatggagaacgtatttcagtgtcggcagcctccaagctgctgtccaacatgatgtgccagtaccggggcatgggcctctctatgggcagtatgatctgtggctgggataagaagggtcctggactctactacgtggatgaacatgggactcggctctcaggaaatatgttctccacgggtagtgggaacacttatgcctacggggtcatggacagtggctatcggcctaatcttagccctgaagaggcctatgaccttggccgcagggctattgcttatgccactcacagagacagctattctggaggcgttgtcaatatgtaccacatgaaggaagatggttgggtgaaagtagaaagtacagatgtcagtgacctgctgcaccagtaccgggaagccaatcaataatggtggtggtggcagctgggcaggtctcctctgggaggtcttggccgactcagggacctaagccacgttaagtccaaggagaagaagaggcctagcctgagccaaagagagagtacgggctcagcagccagaggaggccggtgaagtgcatcttctgcgtgttctctatttgaacaagcatttcccccagggaagtttctgggtgccccactaagtagaataaagaaaaacggttataaata

SEQ ID NO: 24093 - DNA, 1025 bp, Homo sapiens; identical to SEQ ID NO: 24092
  source 1..1025: mol_type = unassigned DNA

SEQ ID NO: 24094 - DNA, 1351 bp, Homo sapiens; identical to SEQ ID NO: 24088
  source 1..1351: mol_type = unassigned DNA

SEQ ID NO: 24095 - DNA, 1351 bp, Homo sapiens; identical to SEQ ID NO: 24088
  source 1..1351: mol_type = unassigned DNA

SEQ ID NO: 24096 - DNA, 1124 bp, Homo sapiens; identical to SEQ ID NO: 24089
  source 1..1124: mol_type = unassigned DNA

SEQ ID NO: 24097 - DNA, 1025 bp, Homo sapiens; identical to SEQ ID NO: 24092
  source 1..1025: mol_type = unassigned DNA

SEQ ID NO: 24098 - DNA, 1025 bp, Homo sapiens; identical to SEQ ID NO: 24092
  source 1..1025: mol_type = unassigned DNA

SEQ ID NO: 24099 - DNA, 1124 bp, Homo sapiens; identical to SEQ ID NO: 24089
  source 1..1124: mol_type = unassigned DNA

SEQ ID NO: 24100 - DNA, 1299 bp, Homo sapiens
  source 1..1299: mol_type = unassigned DNA
agcaacgctaggaagggcgggcagaaagggcacgctcttgtgggtgactacaggttaggagaccgttgaacctggaggggccctaggatggaccccgtggaaagattcagagactgcgccctctccctggcgccgccttcccctacacgcggcgggtatattctgttgcagttggcccaggacctgtttccaagactctgccccctcgcacttccgtccctcctggttttgtaaagtgatgctcataggaacccccaccccgcgtgacactactcccagctcctggctgacttctagtcttctggttgaagctgcgcctttagatgacacgaccctacccacccctgtttccagcggatgcccgggcctggagcccacagaattcttccagtccctgggtggggacggagaaaggaacgttcagattgagatggcccatggcaccaccacgctcgccttcaagttccagcatggagtgattgcagcagtggattctcgggcctcagctgggtcctacattagtgccttacgggtgaacaaggtgattgagattaacccttacctgcttggcaccatgtctggctgtgcagcagactgtcagtactgggagcgcctgctggccaaggaatgcaggctgtactatctgcgaaatggagaacgtatttcagtgtcggcagcctccaagctgctgtccaacatgatgtgccagtaccggggcatgggcctctctatgggcagtatgatctgtggctgggataagaagggtcctggactctactacgtggatgaacatgggactcggctctcaggaaatatgttctccacgggtagtgggaacacttatgcctacggggtcatggacagtggctatcggcctaatcttagccctgaagaggcctatgaccttggccgcagggctattgcttatgccactcacagagacagctattctggaggcgttgtcaatatgtaccacatgaaggaagatggttgggtgaaagtagaaagtacagatgtcagtgacctgctgcaccagtaccgggaagccaatcaataatggtggtggtggcagctgggcaggtctcctctgggaggtcttggccgactcagggacctaagccacgttaagtccaaggagaagaagaggcctagcctgagccaaagagagagtacgggctcagcagccagaggaggccggtgaagtgcatcttctgcgtgttctctatttgaacaagcatttcccccagggaagtttctgggtgccccactaagtagaataaagaaaaacggttataaata

SEQ ID NO: 24101 - DNA, 1351 bp, Homo sapiens; identical to SEQ ID NO: 24088
  source 1..1351: mol_type = unassigned DNA

SEQ ID NO: 24102 - DNA, 1124 bp, Homo sapiens; identical to SEQ ID NO: 24089
  source 1..1124: mol_type = unassigned DNA

SEQ ID NO: 24103 - DNA, 1351 bp, Homo sapiens; identical to SEQ ID NO: 24088
  source 1..1351: mol_type = unassigned DNA

SEQ ID NO: 24104 - DNA, 1124 bp, Homo sapiens
  source 1..1124: mol_type = unassigned DNA
gctttcacttcctcctccgagagcggacagatctctgggtgctgggcggtcatggcgctactagatgtatgcggagccccccgagggcagcggccggaatcggctctcccggttgcgggaagcgggcgtcgctcggacccaggacactacagtttctctatgcgatctccagagctcgctttaccccggggaatgaagcccacagaattcttccagtccctgggtggggacggagaaaggaacgttcagattgagatggcccatggcaccaccacgctcgccttcaagttccagcatggagtgattgcagcagtggattctcgggcctcagctgggtcctacattagtgccttacgggtgaacaaggtgattgagattaacccttacctgcttggcaccatgtctggctgtgcagcagactgtcagtactgggagcgcctgctggccaaggaatgcaggctgtactatctgcgaaatggagaacgtatttcagtgtcggcagcctccaagctgctgtccaacatgatgtgccagtaccggggcatgggcctctctatgggcagtatgatctgtggctgggataagaagggtcctggactctactacgtggatgaacatgggactcggctctcaggaaatatgttctccacgggtagtgggaacacttatgcctacggggtcatggacagtggctatcggcctaatcttagccctgaagaggcctatgaccttggccgcagggctattgcttatgccactcacagagacagctattctggaggcgttgtcaatatgtaccacatgaaggaagatggttgggtgaaagtagaaagtacagatgtcagtgacctgctgcaccagtaccgggaagccaatcaataatggtggtggtggcagctgggcaggtctcctctgggaggtcttggccgactcagggacctaagccacgttaagtccaaggagaagaagaggcctagcctgagccaaagagagagtacgggctcagcagccagaggaggccggtgaagtgcatcttctgcgtgttctctatttgaacaagcatttcccccagggaagtttctgggtgccccactaagtagaataaagaaaaacggttataaata

SEQ ID NO: 24105 - DNA, 1025 bp, Homo sapiens; identical to SEQ ID NO: 24092
  source 1..1025: mol_type = unassigned DNA

SEQ ID NO: 24106 - DNA, 1025 bp, Homo sapiens; identical to SEQ ID NO: 24092
  source 1..1025: mol_type = unassigned DNA

SEQ ID NO: 24107 - DNA, 1025 bp, Homo sapiens
  source 1..1025: mol_type = unassigned DNA
cagatctctgggtgctgggcggtcatggcgctactagatgtatgcggagccccccgagggcagcggccggaatcggctctcccggttgcgggaagcgggcgtcgctcggacccaggacactacagtttctctatgcgatctccagagctcgctttaccccggggaatgaagcccacagaattcttccagtccctgggtggggacggagaaaggaacgttcagattgagatggcccatggcaccaccacgctcgccttcaagttccagcatggagtgattgcagcagtggattctcgggcctcagctgggtcctacattaactgtcagtactgggagcgcctgctggccaaggaatgcaggctgtactatctgcgaaatggagaacgtatttcagtgtcggcagcctccaagctgctgtccaacatgatgtgccagtaccggggcatgggcctctctatgggcagtatgatctgtggctgggataagaagggtcctggactctactacgtggatgaacatgggactcggctctcaggaaatatgttctccacgggtagtgggaacacttatgcctacggggtcatggacagtggctatcggcctaatcttagccctgaagaggcctatgaccttggccgcagggctattgcttatgccactcacagagacagctattctggaggcgttgtcaatatgtaccacatgaaggaagatggttgggtgaaagtagaaagtacagatgtcagtgacctgctgcaccagtaccgggaagccaatcaataatggtggtggtggcagctgggcaggtctcctctgggaggtcttggccgactcagggacctaagccacgttaagtccaaggagaagaagaggcctagcctgagccaaagagagagtacgggctcagcagccagaggaggccggtgaagtgcatcttctgcgtgttctctatttgaacaagcatttcccccagggaagtttctgggtgccccactaagtagaataaagaaaaacggttataaata

SEQ ID NO: 24108 - DNA, 1351 bp, Homo sapiens; identical to SEQ ID NO: 24088
  source 1..1351: mol_type = unassigned DNA

SEQ ID NO: 24109 - DNA, 1124 bp, Homo sapiens; identical to SEQ ID NO: 24089
  source 1..1124: mol_type = unassigned DNA

SEQ ID NO: 24110 - DNA, 1125 bp, Homo sapiens
  source 1..1125: mol_type = unassigned DNA
gctttcacttcctcctccgagagcggacagatctctgggtgctgggcggtcatggcgctactagatgtatgcggagccccccgagggcagcggccggaatcggctctcccggttgcgggaagcgggcgtcgctcggacccaggacactacagtttctctatgcgatctccagagctcgctttaccccggggaatgcagcccacagaattcttccagtccctgggtggggacggagaaaggaacgttcagattgagatggcccatggcaccaccacgctcgccttcaagttccagcatggagtgattgcagcagtggattctcgggcctcagctgggtcctacattagtgccttacgggtgaacaaggtgattgagattaacccttacctgcttggcaccatgtctggctgtgcagcagactgtcagtactgggagcgcctgctggccaaggaatgcaggctgtactatctgcgaaatggagaacgtatttcagtgtcggcagcctccaagctgctgtccaacatgatgtgccagtaccggggcatgggcctctctatgggcagtatgatctgtggctgggataagaagggtcctggactctactacgtggatgaacatgggactcggctctcaggaaatatgttctccacgggtagtgggaacacttatgcctacggggtcatggacagtggctatcggcctaatcttagccctgaagaggcctatgaccttggccgcagggctattgcttatgccactcacagagacagctattctggaggcgttgtcaatatgtaccacatgaaggaagatggttgggtgaaagtagaaagtacagatgtcagtgacctgctgcaccagtaccgggaagccaatcaataatggtggtggtggcagctgggcaggtctcctctgggaggtcttggccgactcagggacctaagccacgttaagtccaaggagaagaagaggcctagcctgagccaaagagagagtacgggctcagcagccagaggaggccggtgaagtgcatcttctgcgtgttctctatttgaacaagcatttcccccagggaagtttctgggtgccccactaagtagaataaagaaaaacggttataaatac

SEQ ID NO: 24111 - DNA, 1025 bp, Homo sapiens; identical to SEQ ID NO: 24092
  source 1..1025: mol_type = unassigned DNA

SEQ ID NO: 24112 - DNA, 1090 bp, Homo sapiens
  source 1..1090: mol_type = unassigned DNA
ttcctcctccgagagcggacagatctctgggtgctgggcggtcatggcgctactagatgtatgcggagccccccgagggcagcggccggaatcggctctcccggttgcgggaagcgggcgtcgctcggacccaggacactacagtttctctatgcgatctccagagctcgctttaccccggggaatgcagcccacagaattcttccagtccctgggtggggacggagaaaggaacgttcagattgagatggcccatggcaccaccacgctcgccttcaagttccagcatggagtgattgcagcagtggattctcgggcctcagctgggtcctacattagtgccttacgggtgaacaaggtgattgagattaacccttacctgcttggcaccatgtctggctgtgcagcagactgtcagtactgggagcgcctgctggccaaggaatgcaggctgtactatctgcgaaatggagaacgtatttcagtgtcggcagcctccaagctgctgtccaacatgatgtgccagtaccggggcatgggcctctctatgggcagtatgatctgtggctgggataagaagggtcctggactctactacgtggatgaacatgggactcggctctcaggaaatatgttctccacgggtagtgggaacacttatgcctacggggtcatggacagtggctatcggcctaatcttagccctgaagaggcctatgaccttggccgcagggctattgcttatgccactcacagagacagctattctggaggcgttgtcaatatgtaccacatgaaggaagatggttgggtgaaagtagaaagtacagatgtcagtgacctgctgcaccagtaccgggaagccaatcaataatggtggtggtggcagctgggcaggtctcctctgggaggtcttggccgactcagggacctaagccacgttaagtccaaggagaagaagaggcctagcctgagccaaagagagagtacgggctcagcagccagaggaggccggtgaagtgcatcttctgcgtgttctctatttgaacaagcatttcccccagggaagtttctgggtgccccactaagt

SEQ ID NO: 24113 - DNA, 782 bp, Homo sapiens
  source 1..782: mol_type = unassigned DNA
gcgcgttgtgcgctgtcccaggttggaaaccagtgccccaggcggcgaggagagcggtgccttgcagggatgctgcgggcgggagcaccaaccggggacttaccccgggcgggagaagtccacaccgggaccaccatcatggcagtggagtttgacgggggcgttgtgatgggttctgattcccgagtgtctgcaggcgaggcggtggtgaaccgagtgtttgacaagctgtccccgctgcacgagcgcatctactgtgcactctctggttcagctgctgatgcccaagccgtggccgacatggccgcctaccagctggagctccatgggatagaactggaggaacctccacttgttttggctgctgcaaatgtggtgagaaatatcagctataaatatcgagaggacttgtctgcacatctcatggtagctggctgggaccaacgtgaaggaggtcaggtatatggaaccctgggaggaatgctgactcgacagccttttgccattggtggctccggcagcacctttatctatggttatgtggatgcagcatataagccaggcatgtctcccgaggagtgcaggcgcttcaccacagacgctattgctctggccatgagccgggatggctcaagcgggggtgtcatctacctggtcactattacagctgccggtgtggaccatcgagtcatcttgggcaatgaactgccaaaattctatgatgagtgaaccttccccagacttctctttcttattttgtaataaactctctagggccaaaa

SEQ ID NO: 24114 - DNA, 782 bp, Homo sapiens; identical to SEQ ID NO: 24113
  source 1..782: mol_type = unassigned DNA

SEQ ID NO: 24115 - DNA, 782 bp, Homo sapiens; identical to SEQ ID NO: 24113
  source 1..782: mol_type = unassigned DNA

SEQ ID NO: 24116 - DNA, 792 bp, Homo sapiens
  source 1..792: mol_type = unassigned DNA
ggaccatcacactggggaccggcttctctgctctcccgttatgggggtcgggggaatgatgggtcaagggtcttccgaagaaagcgagaaaggaacaggcgccttcaaaagcccacttggcgatgggttacagtaagagaccaccatcatggcagtggagtttgacgggggcgttgtgatgggttctgattcccgagtgtctgcaggcgaggcggtggtgaaccgagtgtttgacaagctgtccccgctgcacgagcgcatctactgtgcactctctggttcagctgctgatgcccaagccgtggccgacatggccgcctaccagctggagctccatgggatagaactggaggaacctccacttgttttggctgctgcaaatgtggtgagaaatatcagctataaatatcgagaggacttgtctgcacatctcatggtagctggctgggaccaacgtgaaggaggtcaggtatatggaaccctgggaggaatgctgactcgacagccttttgccattggtggctccggcagcacctttatctatggttatgtggatgcagcatataagccaggcatgtctcccgaggagtgcaggcgcttcaccacagacgctattgctctggccatgagccgggatggctcaagcgggggtgtcatctacctggtcactattacagctgccggtgtggaccatcgagtcatcttgggcaatgaactgccaaaattctatgatgagtgaaccttccccagacttctctttcttattttgtaataaactctctagggccaaaa

SEQ ID NO: 24117 - DNA, 640 bp, Homo sapiens
  source 1..640: mol_type = unassigned DNA
ggatgctgcgggcgggagcaccaaccggggacttaccccgggcgggagaagtccacaccgggaccaccatcatggcagtggagtttgacgggggcgttgtgatgggttctgattcccgagtgtctgcagggatagaactggaggaacctccacttgttttggctgctgcaaatgtggtgagaaatatcagctataaatatcgagaggacttgtctgcacatctcatggtagctggctgggaccaacgtgaaggaggtcaggtatatggaaccctgggaggaatgctgactcgacagccttttgccattggtggctccggcagcacctttatctatggttatgtggatgcagcatataagccaggcatgtctcccgaggagtgcaggcgcttcaccacagacgctacttctactaaaagaagagtatgtggatactttctaagaactcaaaaacgagaaaaccaaaatcagagggtgcatgaatatatgtgcacaggtgagaggtcactatcctcctctccactgctttcttgttcctgaacctgatactttggctccaagccttcagcagcagctaagttcttagccaagctatctgttgccatagcttcagtggtttctgtatcactacatgcatcttc

SEQ ID NO: 24118 - DNA, 792 bp, Homo sapiens; identical to SEQ ID NO: 24116
  source 1..792: mol_type = unassigned DNA

SEQ ID NO: 24119 - DNA, 640 bp, Homo sapiens; identical to SEQ ID NO: 24117
  source 1..640: mol_type = unassigned DNA

SEQ ID NO: 24120 - DNA, 792 bp, Homo sapiens; identical to SEQ ID NO: 24116
  source 1..792: mol_type = unassigned DNA

SEQ ID NO: 24121 - DNA, 640 bp, Homo sapiens; identical to SEQ ID NO: 24117
  source 1..640: mol_type = unassigned DNA

SEQ ID NO: 24122 - DNA, 439 bp, Homo sapiens
  source 1..439: mol_type = unassigned DNA
gccaggcgagccaggaaggaccagcgggcgaggtgaccaccatcatggcagtggagtttgacgggggcgttgtgatgggttctgattcccgagtgtctgcaggcgaggcggtggtgaaccgagtgtttgacaagctgtccccgctgcacgagcgcatctactgtgcactctctggttcagctgctgatgcccaagccgtggccgacatggccgcctaccagctggagctccatgggatagaactggaggaacctccacttgttttggctgctgcaaatgtggtgagaaatatcagctataaatatcgagaggacttgtctgcacatctcatggtagctggctgggaccaacgtgaaggaggtcaggtatatggaaccctgggaggaatgctgactcgacagccttttgccattggtggctccggcagcacctttatcta

SEQ ID NO: 24123 - DNA, 439 bp, Homo sapiens; identical to SEQ ID NO: 24122
  source 1..439: mol_type = unassigned DNA

SEQ ID NO: 24124 - DNA, 439 bp, Homo sapiens; identical to SEQ ID NO: 24122
  source 1..439: mol_type = unassigned DNA

SEQ ID NO: 24125 - DNA, 439 bp, Homo sapiens; identical to SEQ ID NO: 24122
  source 1..439: mol_type = unassigned DNA

SEQ ID NO: 24126 - DNA, 661 bp, Homo sapiens
  source 1..661: mol_type = unassigned DNA
cgaggagagcggtgccttgcagggatgctgcgggcgggagcaccaaccggggacttaccccgggcgggagaagtccacaccgggaccaccatcatggcagtggagtttgacgggggcgttgtgatgggttctgattcccgagtgtctgcagggatagaactggaggaacctccacttgttttggctgctgcaaatgtggtgagaaatatcagctataaatatcgagaggacttgtctgcacatctcatggtagctggctgggaccaacgtgaaggaggtcaggtatatggaaccctgggaggaatgctgactcgacagccttttgccattggtggctccggcagcacctttatctatggttatgtggatgcagcatataagccaggcatgtctcccgaggagtgcaggcgcttcaccacagacgctacttctactaaaagaagagtatgtggatactttctaagaactcaaaaacgagaaaaccaaaatcagagggtgcatgaatatatgtgcacaagtgagaggtcactatcctcctctccactgctttcttgttcctgaacctgatactttggctccaagccttcagcagcagctaagttcttagcaagctatctgttgccatagcttcagtggtttctgtatcactacatgcatcttc

SEQ ID NO: 24127 - DNA, 439 bp, Homo sapiens
  source 1..439: mol_type = unassigned DNA
gccaggcgagccaggaaggaccagcgggcgaggtgaccaccatcatggcagtggagtttgacgggggcgttgtgatgggttctgattcccgagtgtctgcaggcgaggcggtggtgaaccgagtgtttgacaagctgtccccgctgcacgagcacatctactgtgcactctctggttcagctgctgatgcccaagccgtggccgacatggccgcctaccagctggagctccatgggatagaactggaggaacctccacttgttttggctgctgcaaatgtggtgagaaatatcagctataaatatcgagaggacttgtctgcacatctcatggtagctggctgggaccaacgtgaaggaggtcaggtatatggaaccctgggaggaatgctgactcgacagccttttgccattggtggctccggcagcacctttatcta

SEQ ID NO: 24128 - DNA, 792 bp, Homo sapiens; identical to SEQ ID NO: 24116
  source 1..792: mol_type = unassigned DNA

SEQ ID NO: 24129 - DNA, 782 bp, Homo sapiens; identical to SEQ ID NO: 24113
  source 1..782: mol_type = unassigned DNA

SEQ ID NO: 24130 - DNA, 792 bp, Homo sapiens
  source 1..792: mol_type = unassigned DNA
ggaccatcacactggggaccggcttctctgctctcccgttatgggggtcgggggaatgatgggtcaagggtcttccgaagaaagcgagaaaggaacaggcgccttcaaaagcccacttggcgatgggttacagtaagagaccaccatcatggcagtggagtttgacgggggcgttgtgatgggttctgattcccgagtgtctgcaggcgaggcggtggtgaaccgagtgtttgacaagctgtccccgctgcacgagcacatctactgtgcactctctggttcagctgctgatgcccaagccgtggccgacatggccgcctaccagctggagctccatgggatagaactggaggaacctccacttgttttggctgctgcaaatgtggtgagaaatatcagctataaatatcgagaggacttgtctgcacatctcatggtagctggctgggaccaacgtgaaggaggtcaggtatatggaaccctgggaggaatgctgactcgacagccttttgccattggtggctccggcagcacctttatctatggttatgtggatgcagcatataagccaggcatgtctcccgaggagtgcaggcgcttcaccacagacgctattgctctggccatgagccgggatggctcaagcgggggtgtcatctacctggtcactattacagctgccggtgtggaccatcgagtcatcttgggcaatgaactgccaaaattctatgatgagtgaaccttccccagacttctctttcttattttgtaataaactctctagggccaaaa

SEQ ID NO: 24131 - DNA, 661 bp, Homo sapiens; identical to SEQ ID NO: 24126
  source 1..661: mol_type = unassigned DNA

SEQ ID NO: 24132 - DNA, 673 bp, Homo sapiens
  source 1..673: mol_type = unassigned DNA
cgaggagagcggtgccttgcagggatgctgcgggcgggagcaccaaccggggacttaccccgggcgggagaagtccacaccgggaccaccatcatggcagtggagtttgacgggggcgttgtgatgggttctgattcccgagtgtctgcagggatagaactggaggaacctccacttgttttggctgctgcaaatgtggtgagaaatatcagctataaatatcgagaggacttgtctgcacatctcatggtagctggctgggaccaacgtgaaggaggtcaggtatatggaaccctgggaggaatgctgactcgacagccttttgccattggtggctccggcagcacctttatctatggttatgtggatgcagcatataagccaggcatgtctcccgaggagtgcaggcgcttcaccacagacgctacttctactaaaagaagagtatgtggatactttctaagaactcaaaaacgagaaaaccaaaatcagagggtgcatgaatatatgtgcacaagtgagaggtcactatcctcctctccactgctttcttgttcctgaacctgatactttggctccaagccttcagcagcagctaagttcttagcaagctatctgttgccatagcttcagtggtttctgtatcactacatgcatcttcatcatcacccat

SEQ ID NO: 24133 - DNA, 782 bp, Homo sapiens
  source 1..782: mol_type = unassigned DNA
gcgcgttgtgcgctgtcccaggttggaaaccagtgccccaggcggcgaggagagcggtgccttgcagggatgctgcgggcgggagcaccaaccggggacttaccccgggcgggagaagtccacaccgggaccaccatcatggcagtggagtttgacgggggcgttgtgatgggttctgattcccgagtgtctgcaggcgaggcggtggtgaaccgagtgtttgacaagctgtccccgctgcacgagcacatctactgtgcactctctggttcagctgctgatgcccaagccgtggccgacatggccgcctaccagctggagctccatgggatagaactggaggaacctccacttgttttggctgctgcaaatgtggtgagaaatatcagctataaatatcgagaggacttgtctgcacatctcatggtagctggctgggaccaacgtgaaggaggtcaggtatatggaaccctgggaggaatgctgactcgacagccttttgccattggtggctccggcagcacctttatctatggttatgtggatgcagcatataagccaggcatgtctcccgaggagtgcaggcgcttcaccacagacgctattgctctggccatgagccgggatggctcaagcgggggtgtcatctacctggtcactattacagctgccggtgtggaccatcgagtcatcttgggcaatgaactgccaaaattctatgatgagtgaaccttccccagacttctctttcttattttgtaataaactctctagggccaaaa

SEQ ID NO: 24134 - DNA, 792 bp, Homo sapiens; identical to SEQ ID NO: 24130
  source 1..792: mol_type = unassigned DNA

SEQ ID NO: 24135 - DNA, 782 bp, Homo sapiens; identical to SEQ ID NO: 24133
  source 1..782: mol_type = unassigned DNA

SEQ ID NO: 24136 - DNA, 439 bp, Homo sapiens; identical to SEQ ID NO: 24122
  source 1..439: mol_type = unassigned DNA

SEQ ID NO: 24137 - DNA, 439 bp, Homo sapiens; identical to SEQ ID NO: 24127
  source 1..439: mol_type = unassigned DNA

SEQ ID NO: 24138 - DNA, 792 bp, Homo sapiens; identical to SEQ ID NO: 24130
  source 1..792: mol_type = unassigned DNA

SEQ ID NO: 24139 - DNA, 782 bp, Homo sapiens; identical to SEQ ID NO: 24113
  source 1..782: mol_type = unassigned DNA

SEQ ID NO: 24140 - DNA, 640 bp, Homo sapiens; identical to SEQ ID NO: 24117
  source 1..640: mol_type = unassigned DNA

SEQ ID NO: 24141 - DNA, 640 bp, Homo sapiens; identical to SEQ ID NO: 24117
  source 1..640: mol_type = unassigned DNA

SEQ ID NO: 24142 - DNA, 792 bp, Homo sapiens; identical to SEQ ID NO: 24116
  source 1..792: mol_type = unassigned DNA

SEQ ID NO: 24143 - DNA, 782 bp, Homo sapiens; identical to SEQ ID NO: 24133
  source 1..782: mol_type = unassigned DNA

SEQ ID NO: 24144 - DNA, 534 bp, Homo sapiens
  source 1..534: mol_type = unassigned DNA
gcgcgttgtgcgctgtcccaggttggaaaccagtgccccaggcggcgaggagagcggtgccttgcagggatgctgcgggcgggagcaccaaccggggacttaccccgggcgggagaagtccacaccgggaccaccatcatggcagtggagtttgacgggggcgttgtgatgggttctgattcccgagtgtctgcagggatagaactggaggaacctccacttgttttggctgctgcaaatgtggtgagaaatatcagctataaatatcgagaggacttgtctgcacatctcatggtagctggctgggaccaacgtgaaggaggtcaggtatatggaaccctgggaggaatgctgactcgacagccttttgccattggtggctccggcagcacctttatctatggttatgtggatgcagcatataagccaggcatgtctcccgaggagtgcaggcgcttcaccacagacggtaaccagccaagtggaagggtacctggggagggctttgaaacatgggaaggaagtagattatga

SEQ ID NO: 24145 - DNA, 439 bp, Homo sapiens; identical to SEQ ID NO: 24127
  source 1..439: mol_type = unassigned DNA

SEQ ID NO: 24146 - DNA, 534 bp, Homo sapiens; identical to SEQ ID NO: 24144
  source 1..534: mol_type = unassigned DNA

SEQ ID NO: 24147 - DNA, 1089 bp, Homo sapiens
  source 1..1089: mol_type = unassigned DNA
gctgcgcgttgtgcgctgtcccaggttggaaaccagtgccccaggcggcgaggagagcggtgccttgcagggatgctgcgggcgggagcaccaaccggggacttaccccgggcgggagaagtccacaccgggaccaccatcatggcagtggagtttgacgggggcgttgtgatgggttctgattcccgagtgtctgcagggatagaactggaggaacctccacttgttttggctgctgcaaatgtggtgagaaatatcagctataaatatcgagaggacttgtctgcacatctcatggtagctggctgggaccaacgtgaaggaggtcaggtatatggaaccctgggaggaatgctgactcgacagccttttgccattggtggctccggcagcacctttatctatggttatgtggatgcagcatataagccaggcatgtctcccgaggagtgcaggcgcttcaccacagacggtaaccagccaagtggaagggtacctggggagggctttgaaacatgggaaggaagtagattatgaggaacaggaagagaaatacaggggtggccatttaagttaatgccgggcctggtacacttttaagagtgaaaaggggcaggacaaatgcaaagctcaatggggctcttgggcaatacggataaaccagggctgttctgagtaaatcaaatgaggatacacagtcactgtgagaaccagtggtgtgctaagcacagtggctcacacctgtaatgccaacaatttgggaggctgaggcaggaggattacttgagcccaggagtttgaggccagcctaggcaagatggtgaaaccctgtctccacaaaaaacaataaaaaaaagtaaaaaaaaaatgaactgggcatagtggtgcacacctgtagtcccagctactcaggaggctgaggtggaaagatcatctgagccggggagatcaaggctgtagtgagcggtgattgcaccactgcgctgcagcctaggtgacagagagagaccctgtctggagaaaaaaaaaaaaaaaaaagaaccagtggtgtgctgaggtgtgctgaggctggcttgggaccactcatga

SEQ ID NO: 24148 - DNA, 534 bp, Homo sapiens; identical to SEQ ID NO: 24144
  source 1..534: mol_type = unassigned DNA

SEQ ID NO: 24149 - DNA, 534 bp, Homo sapiens; identical to SEQ ID NO: 24144
  source 1..534: mol_type = unassigned DNA

SEQ ID NO: 24150 - DNA, 1089 bp, Homo sapiens; identical to SEQ ID NO: 24147
  source 1..1089: mol_type = unassigned DNA

SEQ ID NO: 24151 - DNA, 534 bp, Homo sapiens; identical to SEQ ID NO: 24144
  source 1..534: mol_type = unassigned DNA

SEQ ID NO: 24152 - DNA, 1089 bp, Homo sapiens; identical to SEQ ID NO: 24147
  source 1..1089: mol_type = unassigned DNA

SEQ ID NO: 24153 - DNA, 1330 bp, Homo sapiens
  source 1..1330: mol_type = unassigned DNA
gccagccctcggaaacggaagtgagcggcggggtcgactgacggtaacggggcagagaggctgttcgcagagctgcggaagatgaatgccagaggacttggatctgagctaaaggacagtattccagttactgaactttcagcaagtggaccttttgaaagtcatgatcttcttcggaaaggtttttcttgtgtgaaaaatgaacttttgcctagtcatccccttgaattatcagaaaaaaatttccagctcaaccaagataaaatgaatttttccacactgagaaacattcagggtctatttgctccgctaaaattacagatggaattcaaggcagtgcagcaggttcagcgtcttccatttctttcaagctcaaatctttcactggatgttttgaggggtaatgatgagactattggatttgaggatattcttaatgatccatcacaaagcgaagtcatgggagagccacacttgatggtggaatataaacttggtttactgtaatagtgtgctgttcatggaaaccgagggctgcatcttgtttatagtcatctttgtactgtaatttgatgtacacaacattaaaagtactgacacctgagaatttctgctcaagtagtatcagtgatcatttaaaatttggaggggtctttggtttacagccatgtgacaattaaaagcactaaagggagatcatgttaaagctcttaatttatattaaaacagtagcctttgtctttaaaaaagttgttgctcatgaatattataaaatgatctacaggtttcaattcaacctgtttctaggtttttttgtaaatttagttttgattaagcattataagcatttgagtctataaactttatagtagcatctttcagaataaacatttttaattgatttcagtggcaactctcaaattgattacaatatgagatatatcagtgtcgtccattaacactcataagaataatatttactgtgtcagtgctattttaggattatagttattgtttgattatttcaggttgaaaagtagaagttccaaggttttgattttggtctggtctttaagtgaaaaattaaagcaaccagtagatgtaggttaaacttttacttcatagacttaatatgtaattaatatattgccaagcaacactgttaaagaaaagtaaaactcattttttcttgttcttaatttatatattacaagatactgtaaggtattctttatgaagttgatatataaaaatttacatttttagaacattagtgaatggatcatcttttacaattaaaagtatattttgattatcagtttcttaggaa

SEQ ID NO: 24154 - DNA, 1321 bp, Homo sapiens
  source 1..1321: mol_type = unassigned DNA
tgagatgcggctttcaggcatttgtttaggacatgcccatggcggggcttctaaaggggcttgtacggcaactggagcggttcagcgttcaacaacaagcttccaagatgccgcccaaaggaaaaagtggttctggaaaagcggggaaagggggagcagcctctgggagtgacagtgctgacaagaaggctcaaggtcccaaaggtggtggcaatgcagtaaaggtcagacacattctatgtgaaaaacatggcaaaatcatggaagccatggaaaagttaaagtctgggatgagattcaatgaagtggccgcacagtatagtgaagataaagccaggcaagggggtgacttgggttggatgaccagagggtccatggtgggaccatttcaagaagcagcatttgccttgcctgtaagtgggatggataagcctgtgtttacagacccaccggttaagacaaaatttggatatcatattattatggtcgaaggaagaaaataaaatcatatgaaagactgaataagttttatacattttgtttctttaaaaggtattacatattcttttgagctggagctgcaaggaaatacaaaaatttttaaaaagaaaagatattggatgctccttgtattctgtgaaagctctaagtatgggtttgtaggtgtaagagagggtggggctaagtgaatgtcaactgtagtaggtattcagtcagtctttctcaaagagaagtcaagcagactccctttaacctgtattctctttcctcccagaactatatctgactctcagtctgtcccataaattaattcagaaaccatcttcaggggaagcagatatcaactcacactattcacacaactgaaaatattgggcatcaaatagattagtgtgtgagaatcataaaataagttcctagacaacatttgttttacatgttagtcaactctgatcttccaggacaggtggtattagctccactgtcttaacatagtacgtggcacgttatgcctttcagtgttaactcctttctttttaaataaatgtttattggaggaaaaaagcactcagttgttccatgagttgttttgtactagactaaccgagtgctggttaaagggagggatgtcagcataaaaatgtcattccctcatcttcagtgtatgggttacattaagactgtcctttccagggccaatgttctgtgcatctaaatttttaaaatttaaaatgccatatttatgacatataaaaaagtataaagattactaatataaatactatactgcttcaaaaataaaactttgccaacacagcta

SEQ ID NO: 24155 - DNA, 1605 bp, Homo sapiens
  source 1..1605: mol_type = unassigned DNA
aattgagatgcggctttcaggcatttgtttaggacatgcccatggcggggcttctaaaggggcttgtacggcaactggagcggttcagcgttcaacaacaagcttccaagatgccgcccaaaggaaaaagtggttctggaaaagcggggaaagggggagcagcctctgggagtgacagtgctgacaagaaggctcaaggtcccaaaggtggtggcaatgcagtaaaggtcagacacattctatgtgaaaaacatggcaaaatcatggaagccatggaaaagttaaagtctgggatgagattcaatgaagtggccgcacagtatagtgaagataaagccaggcaagggattcccagcctgcagcaacatgctggtcaccatagagacctgagaagcaccctcatctcattggtatcatatttacaaaccaccccttaaagtggattattttgcagatggctgatctcatctattcaatgttgattctattagttccaatttcagaaggtgacattttctgactttgtccccttaagcacaaacaaaaactatggatttttgtttttgttttcagaaaagagaaagtacaaggtgtgcttggggaacagcaaggaaaccagacagatgtgggggcgggtttgtaggggaactgctggatgtacctcattaatttgttcatttgttcagcacccacagggtgccagtgaacgggctaggtgctggggatagagtggtgaacaagatgagccttatgcacctcacagtctcctgggggagacagccaaatagacaattttaatacaatgtggcaaattctatgatgggaagaagagagaaatggtgtgtgtgagtccctcaccttcccagaggtttcccaggggaagcaacgtttcagctgagacctgaaggatggatgacagtccaccagaaaaaagttagtggagcggggacaagcagggttgcagagtggaagaaaaatgttcctgtgagaagaaactgtccaaagagtctgaagagaaaagggaacagggtgaatttgaggccctacaagaaaaacaggagaccattcaacaggagacgcccagggagcaggtggctttgtgggcctgatgtccaagaaagaagtcgtggtggtaaacagagacttgggattgcaagctactgttgtctttctattgaaaaaatagctgagcaccacactagggaggccttgcaaggacagcccaaagaatttgaacttgattctacaggcagtgattttgaacaagaggttttgaagagaacgtgacacacgtcaagctgagctctagggagtgggcagcagcctgcagaagagggactaggctaggagcacagaaagtagcccacggcagaggtagcagaaggaatggaggagtgcccatgtgaggggtactgaggtggcacacttgccagaatcagggcagcctgcttggtctcataccagctggaaccagttcctaccagctcccaagggctaattgttaaactttcaggaattttctcagcattcattaaaaatgaaaaaaagtatcaatattaaaaatatttttgctggacatggtgtctcaggcctgtaatcccagct

SEQ ID NO: 24156 - DNA, 1393 bp, Homo sapiens
  source 1..1393: mol_type = unassigned DNA
attgccaatgaaatcttccagcggggtcgcggtaggcgggccgtggaccctctggtataaggcggtcccgggggagtgaggagaaagggggggtcttggcggccggaggaggagtaggtgcgggtgaagatggcggcagccgaggccgcgaactgcatcatggaggtgtcctgtggccaggcggaaagcagtgagaagcccaacgctgaggacatgacatccaaagattactactttgactcctacgcacactttggcatccacgaggagatgctgaaggacgaggtgcgcaccctcacttaccgcaactccatgtttcataaccggcacctcttcaaggacaaggtggtgctggacgtcggctcgggcaccggcatcctctgcatgtttgctgccaaggccggggcccgcaaggtcatcgggatcgagtgttccagtatctctgattatgcggtgaagatcgtcaaagccaacaagttagaccacgtggtgaccatcatcaaggggaaggtggaggaggtggagctcccagtggagaaggtggacatcatcatcagcgagtggatgggctactgcctcttctacgagtccatgctcaacaccgtgctctatgcccgggacaagtggctggcgcccgatggcctcatcttcccagaccgggccacgctgtatgtgacggccatcgaggaccggcagtacaaagactacaagatccactggtgggagaacgtgtatggcttcgacatgtcttgcatcaaagatgtggccattaaggagcccctagtggatgtcgtggaccccaaacagctggtcaccaacgcctgcctcataaaggaggtggacatctataccgtcaaggtggaagacctgaccttcacctccccgttctgcctgcaagtgaagcggaatgactacgtgcacgccctggtggcctacttcaacatcgagttcacacgctgccacaagaggaccggcttctccaccagccccgagtccccgtacacgcactggaagcagacggtgttctacatggaggactacctgaccgtgaagacgggcgaggagatcttcggcaccatcggcatgcggcccaacgccaagaacaaccgggacctggacttcaccatcgacctggacttcaagggccagctgtgcgagctgtcctgctccaccgactaccggatgcgctgaggcccggctctcccgccctgcacgagcccaggggctgagcgttcctaggcggtttcggggctcccccttcctctccctccctcccgcagaagggggttttaggggcctgggctggggggatggggagggcacatcgtgactgtgtttttcataacttatgtttttatatggttgcatttacgccaataaatcctcagctggg

SEQ ID NO: 24157 - DNA, 1618 bp, Homo sapiens
  source 1..1618: mol_type = unassigned DNA
aagggggggtcttggcggccggaggaggagtaggtgcgggtgaagatggcggcagccgaggccgcgaactgcatcatggagaattttgtagccaccttggctaatgggatgagcctccagccgcctcttgaagaagtaacccccctttgcccttccctgtgtctgcccccattttccttcccctcccctccccagctgtgggctgagctagagacggggtcagagagactggagagatggtaggcgtggctgaggtgtcctgtggccaggcggaaagcagtgagaagcccaacgctgaggacatgacatccaaagattactactttgactcctacgcacactttggcatccacgaggagatgctgaaggacgaggtgcgcaccctcacttaccgcaactccatgtttcataaccggcacctcttcaaggacaaggtggtgctggacgtcggctcgggcaccggcatcctctgcatgtttgctgccaaggccggggcccgcaaggtcatcgggatcgagtgttccagtatctctgattatgcggtgaagatcgtcaaagccaacaagttagaccacgtggtgaccatcatcaaggggaaggtggaggaggtggagctcccagtggagaaggtggacatcatcatcagcgagtggatgggctactgcctcttctacgagtccatgctcaacaccgtgctctatgcccgggacaagtggctggcgcccgatggcctcatcttcccagaccgggccacgctgtatgtgacggccatcgaggaccggcagtacaaagactacaagatccactggtgggagaacgtgtatggcttcgacatgtcttgcatcaaagatgtggccattaaggagcccctagtggatgtcgtggaccccaaacagctggtcaccaacgcctgcctcataaaggtgagggggtgggcatggccaggtgccccctgggttgaaaccaaagagaggccatcacctggccctggcatgggactttggggcccagaatgttggcctgaggtctcagagcctgatctgccagccagaggtggtgctagaggcccaggaaagacacttcgtcctttaaatatctttgtgagcgctgctgtgtgagaaccatgcttggcacttggcttctggcggaggaaacacccaaagctggcagctaaagcccacagcccatgcacggaaaggcaggaccccagggcgatgagcggatgcacatgcacgcgggccactgcagaagagcacggggccaggctgggctccgagatgtgcctgaggtcccagctactcgggaggatcacttgggcctgggagttcaaggctgcagtgagctgtgatcacatcactgcactccagctttggtgacaatgttttgttttgttttttccttttgtttttttttacttctgagaccctgtttaaaaaaaaaaaatacggcgatgagtatttgttgagctgggatgtgtgagccgggtgaagctgggtggctgaccgggggatcctgtcggggaggagaggtggacatctataccgtcaaggtggaagacctgaccttcacctccccgttctgcctgcaagtgaagcggaatgactacgtgcacgccctg

SEQ ID NO: 24158 - DNA, 1327 bp, Homo sapiens
  source 1..1327: mol_type = unassigned DNA
cgggtgaagatggcggcagccgaggccgcgaactgcatcatggagaattttgtagccaccttggctaatgggatgagcctccagccgcctcttgaagaagtgtcctgtggccaggcggaaagcagtgagaagcccaacgctgaggacatgacatccaaagattactactttgactcctacgcacactttggcatccacgaggagatgctgaaggacgaggtgcgcaccctcacttaccgcaactccatgtttcataaccggcacctcttcaaggacaaggtggtgctggacgtcggctcgggcaccggcatcctctgcatgtttgctgccaaggccggggcccgcaaggtcatcgggatcgagtgttccagtatctctgattatgcggtgaagatcgtcaaagccaacaagttagaccacgtggtgaccatcatcaaggggaaggtggaggaggtggagctcccagtggagaaggtggacatcatcatcagcgagtggatgggctactgcctcttctacgagtccatgctcaacaccgtgctctatgcccgggacaagtggctggcgcccgatggcctcatcttcccagaccgggccacgctgtatgtgacggccatcgaggaccggcagtacaaagactacaagatccactggtgggagaacgtgtatggcttcgacatgtcttgcatcaaagatgtggccattaaggagcccctagtggatgtcgtggaccccaaacagctggtcaccaacgcctgcctcataaaggaggtggacatctataccgtcaaggtggaagacctgaccttcacctccccgttctgcctgcaagtgaagcggaatgactacgtgcacgccctggtggcctacttcaacatcgagttcacacgctgccacaagaggaccggcttctccaccagccccgagtccccgtacacgcactggaagcagacggtgttctacatggaggactacctgaccgtgaagacgggcgaggagatcttcggcaccatcggcatgcggcccaacgccaagaacaaccgggacctggacttcaccatcgacctggacttcaagggccagctgtgcgagctgtcctgctccaccgactaccggatgcgctgaggcccggctctcccgccctgcacgagcccaggggctgagcgttcctaggcggtttcggggctcccccttcctctccctccctcccgcagaagggggttttaggggcctgggctggggggatggggagggcacatcgtgactgtgtttttcataacttatgtttttatatggttgcatttacgccaataaatcctcagctggg

SEQ ID NO: 24159 - DNA, 578 bp, Homo sapiens
  source 1..578: mol_type = unassigned DNA
gagctttaccctactggagccgtttatctcccccgggtctttgtgagggtgtcctgtggccaggcggaaagcagtgagaagcccaacgctgaggacatgacatccaaagattactactttgactcctacgcacactttggcatccacgaggagatgctgaaggacgaggtgcgcaccctcacttaccgcaactccatgtttcataaccggcacctcttcaaggacaaggtggtgctggacgtcggctcgggcaccggcatcctctgcatgtttgctgccaaggccggggcccgcaaggtcatcgggatcgagtgttccagtatctctgattatgcggtgaagatcgtcaaagccaacaagttagaccacgtggtgaccatcatcaaggggaaggtggaggaggtggagctcccagtggagaaggtggacatcatcatcagcgagtggatgggctactgcctcttctacgagtccatgctcaacaccgtgctctatgcccgggacaagtggctggcgcccgatggcctcatcttcccagaccgggccacgctgtatgtgacggccatcgaggaccggca

SEQ ID NO: 24160 - DNA, 699 bp, Homo sapiens
  source 1..699: mol_type = unassigned DNA
caaagagcgagctcattccgggattggagagaagtgtgtcctgtggccaggcggaaagcagtgagaagcccaacgctgaggacatgacatccaaagattactactttgactcctacgcacactttggcatccacgaggagatgctgaaggacgaggtgcgcaccctcacttaccgcaactccatgtttcataaccggcacctcttcaaggacaaggtggtgctggacgtcggctcgggcaccggcatcctctgcatgtttgctgccaaggccggggcccgcaaggtcatcgggatcgagtgttccagtatctctgattatgcggtgaagatcgtcaaagccaacaagttagaccacgtggtgaccatcatcaaggggaaggtggaggaggtggagctcccagtggagaaggtggacatcatcatcagcgagtggatgggctactgcctcttctacgagtccatgctcaacaccgtgctctatgcccgggacaagtggctggcgcccgatggcctcatcttcccagaccgggccacgctgtatgtgacggccatcgaggaccggcagtacaaagactacaagatccactggtgggagaacgtgtatggcttcgacatgtcttgcatcaaagatgtggccattaaggagcccctagtggatgtcgtggaccccaaacagctggtcaccaacgcctgcctca

SEQ ID NO: 24161 - DNA, 1182 bp, Homo sapiens
  source 1..1182: mol_type = unassigned DNA
agtgcagtggcgcgatctcagctcactgcaagctccgcctcccgggttcacgccatcctcctgcctaagcctccacgcccggctaattttttgtatttttagtagagacgggggtttcaccatgttagccaggatggtctcgacctcctgaccttgtgatccgcccgcctcggtctcccaaaatgctgggattacaggcgtgagccaccgcgcccggccgcctggcgtaatttttgtatttttaatagaaatgggggtttcaccatgttgcccagactggtctcgaactcctgatgtcaagtgatccgcctgcctccgcctcctaaagtgctggaattacacccgtgagccatcgcgcccgaaccctattgtaaattttaagtctcaggcgtttgccagcggcacgccagagagtatagcctgcgcggaggcccagaaaccaaagagcgagctcattccgggattggagagaagtgtgagcagagggaagtagagggatcggggagaggaggggcaggacccacgcattcggccctttgcattcagcttcattcaactaggaactttttctgcaaatcaaggaaagcttcccggaggaagtggtgcctaagctgtgctctgattcacgtttagaagctgaccagacaaagagaggtgtcctgtggccaggcggaaagcagtgagaagcccaacgctgaggacatgacatccaaagattactactttgactcctacgcacactttggcatccacgaggagatgctgaaggacgaggtgcgcaccctcacttaccgcaactccatgtttcataaccggcacctcttcaaggacaaggtggtgctggacgtcggctcgggcaccggcatcctctgcatgtttgctgccaaggccggggcccgcaaggtcatcgggatcgagtgttccagtatctctgattatgcggtgaagatcgtcaaagccaacaagttagaccacgtggtgaccatcatcaaggggaaggtggaggaggtggagctcccagtggagaaggtggacatcatcatcagcgagtggatgggctactgcctcttctacgagtccatgctcaacaccgtgctctatgcccgggacaagtggctggcgcccgatggcctcatcttcccagaccgggccacgctgtatgtgacggccatcgaggaccgg

SEQ ID NO: 24162 - DNA, 785 bp, Homo sapiens
  source 1..785: mol_type = unassigned DNA
agagttggcaaacccctgacctatgatggacgtattctctagccaattactagacggtattctcagacgggccgcctccattgccaatgaaatcttccagcggggtcgcggtgtcctgtggccaggcggaaagcagtgagaagcccaacgctgaggacatgacatccaaagattactactttgactcctacgcacactttggcatccacgaggagatgctgaaggacgaggtgcgcaccctcacttaccgcaactccatgtttcataaccggcacctcttcaaggacaaggtggtgctggacgtcggctcgggcaccggcatcctctgcatgtttgctgccaaggccggggcccgcaaggtcatcgggatcgagtgttccagtatctctgattatgcggtgaagatcgtcaaagccaacaagttagaccacgtggtgaccatcatcaaggggaaggtggaggaggtggagctcccagtggagaaggtggacatcatcatcagcgagtggatgggctactgcctcttctacgagtccatgctcaacaccgtgctctatgcccgggacaagtggctggcgcccgatggcctcatcttcccagaccgggccacgctgtatgtgacggccatcgaggaccggcagtacaaagactacaagatccactggtgggagaacgtgtatggcttcgacatgtcttgcatcaaagatgtggccattaaggagcccctagtggatgtcgtggaccccaaacagctggtcaccaacgcctgcctcataaaggtgagg

SEQ ID NO: 24163 - DNA, 1480 bp, Homo sapiens
  source 1..1480: mol_type = unassigned DNA
ggcctgcgtgcactgcgcttgcgcgggttgagggcggtggctcaggctcctggaaaggaccgtccacccctccgcgctggcggtgtggacgcggaactcagcggagaaacgcgattgagaaatggaaaagaaaatgaaataaatcagcagttatgaggcagagcctaagagaactatggcaacatcaggtgactgtcccagaagtgaatcgcagggagaagagcctgctgagtgcagtgaggccggtctcctgcaggagggagtacagccagaggagtttgtggccatcgcggactacgctgccaccgatgagacccagctcagttttttgagaggagaaaaaattcttatcctgagacaaaccactgcagattggtggtggggtgagcgtgcgggctgctgtgggtacattccggcaaaccatgtggggaagcacgtggatgagtacgaccccgaggacacgtggcaggatgaagagtacttcggcagctatggaactctgaaactccacttggagatgttggcagaccagccacgaacaactaaataccacagtgtcatcctgcagaataaagaatccctgacggataaagtcatcctggacgtgggctgtgggactgggatcatcagtctcttctgtgcacactatgcgcggcctagagcggtgtacgcggtggaggccagtgagatggcacagcacacggggcagctggtcctgcagaacggctttgctgacatcatcaccgtgtaccagcagaaggtggaggatgtggtgctgcccgagaaggtggacgtgctggtgtctgagtggatggggacctgcctgctggttggagaaaaagtcttccccatctggagatgacagttgatgctttatttggaaagcagtgtgcatatcttgaggggtgatgaacacaagcaaaccaagttgcacctggcttctgcacactcctgcgaaagtcggtgaacattcactccacattgacccctccctagcctggcaggtgacgtcagggtccttcacagacaaacacgcttgggctcggcaggagctgccgtggccacccccgctgcccagtgtctgccctctagaagtaggctgtgtttccaggtgttcacccgtggtgcccacagtgccgacccgtggctgggtcggagctccatgttcctaagctaggtctaggtctacactcctaggacgcacgcatatcagcccgtgtaccctgtgacagtgactgtccccacctcctatgttagtggtgcccttactgccgtcgctcatccactcgtgtgggacgtaggattgcacagggctgtgccagtggcgtgtagggaacactgccctggctcagcgtgcgagctaaggtggtgatgtatgcgatgggactctgcatgggatagtacagttgtgtagacgtcttccaaataaattatgtgttggtccatcgcacatgctcaataaatatttttaaatgagtga

SEQ ID NO: 24164 - DNA, 1334 bp, Homo sapiens
  source 1..1334: mol_type = unassigned DNA
tgcactgcgcttgcgcgggttgagggcggtggctcaggctcctggaaaggaccgtccacccctccgcgctggcggtgtggacgcggaactcagcggagaaacgcgattgagaaatggaaaagaaaatgaaataaatcagcagttatgaggcagagcctaagagaactatggcaacatcaggtgactgtcccagaagtgaatcgcagggagaagagcctgctgagtgcagtgaggccggtctcctgcaggagggagtacagccagaggagtttgtggccatcgcggactacgctgccaccgatgagacccagctcagttttttgagaggagaaaaaattcttatcctgagacaaaccactgcagattggtggtggggtgagcgtgcgggctgctgtgggtacattccggcaaaccatgtggggaagcacgtggatgagtacgaccccgaggacacgtggcaggatgaagagtacttcggcagctatggaactctgaaactccacttggagatgttggcagaccagccacgaacaactaaataccacagtgtcatcctgcagaataaagaatccctgacggataaagtcatcctggacgtgggctgtgggactgggatcatcagtctcttctgtgcacactatgcgcggcctagagcggtgtacgcggtggaggccagtgagatggcacagcacacggggcagctggtcctgcagaacggctttgctgacatcatcaccgtgtaccagcagaaggtggaggatgtggtgctgcccgagaaggtggacgtgctggtgtctgagtggatggggacctgcctgctggctgcgcctctcctgagctgccgcattctcccctgcacctgtgcgtctggccctcttcacgtcctcctggcctgctgtctgcctctcccctgcacctgtgcgtctgtccctcttcatgtcctccttgcctgctgtctgcctgttctcagagcccctcagccctcaggccttcatctctcctggcccatcttcctactctgacgctgacatgtagtaaaagtctgaagacagagaagagtgcatgtgcgtttagcataggaggggcagctttcagtcagtgcagcaagggcatgtagttgttcagagatggtgctggaacgactgatttggagaaaagaggcccttcttcacaccatctgctaaaataaacctcagatgggctcaagagttaaatatttaagaaaaggaggaaacaaaaaaattgctacaagtttatttgttgttaggatgggaaaggtttttctaagaaccaagttcataatgaagctgtcaaataaaatacttgacaaaaaa

SEQ ID NO: 24165 - DNA, 2688 bp, Homo sapiens
  source 1..2688: mol_type = unassigned DNA
acttatccagaagaaaggcagagggcgcacactgcgcagcgcggatgggaaagttaactgaattatttgcgggaagacagaggaggtggggggtcccccaagccccagccattttgtggctcgtaggggttgtcgcttcccaagccgtgaatggcccaaacccgccccccgccccaggtcggactcctgccccgcgcccctctgggtcggaccccaagccgagccccccaaccccgcggctgggctgggcgattggggacgagctccacacatggagaacctggcctcgcctcgcaagaccgcgggacgcgcagatgtgaagtgcgcctgcgcggggcgcagccccagctgcagacgatctgtgagcgacgcgccggcgcaagtcgagggcggtggcttggcttccctggaatgggggacgtcttaggactgcgcctgcgcggggcgccgggccctgggcggggccttcccggctgacggcctgcgtgcactgcgcttgcgcgggttgagggcggtggctcaggctcctggaaaggaccgtccacccctccgcgctggcggtgtggacgcggaactcagcggagaaacgcgattgagagcagtgtgtggattacactatcactggaaaaatacgaattgagaagaaggaaaagactggaagatgcagaccttggttcctgttagtggaaacactgtaaggtcccagaaatggaaaagaaaatgaaataaatcagcagttatgaggcagagcctaagagaactatggcaacatcaggtgactgtcccagaagtgaatcgcagggagaagagcctgctgagtgcagtgaggccggtctcctgcaggagggagtacagccagaggagtttgtggccatcgcggactacgctgccaccgatgagacccagctcagttttttgagaggagaaaaaattcttatcctgagacaaaccactgcagattggtggtggggtgagcgtgcgggctgctgtgggtacattccggcaaaccatgtggggaagcacgtggatgagtacgaccccgaggacacgtggcaggatgaagagtacttcggcagctatggaactctgaaactccacttggagatgttggcagaccagccacgaacaactaaataccacagtgtcatcctgcagaataaagaatccctgacggataaagtcatcctggacgtgggctgtgggactgggatcatcagtctcttctgtgcacactatgcgcggcctagagcggtgtacgcggtggaggccagtgagatggcacagcacacggggcagctggtcctgcagaacggctttgctgacatcatcaccgtgtaccagcagaaggtggaggatgtggtgctgcccgagaaggtggacgtgctggtgtctgagtggatggggacctgcctgctgtttgagttcatgatcgagtccatcctgtatgcccgggatgcctggctgaaggaggacggggtcatttggcccaccatggctgcgttgcaccttgtgccctgcagtgctgataaggattatcgtagcaaggtgctcttctgggacaacgcgtacgagttcaacctcagcgctctgaaatctttagcagttaaggagtttttttcaaagcccaagtataaccacattttgaaaccagaagactgtctctctgaaccgtgcactatattgcagttggacatgagaaccgtgcaaatttctgatctagagaccctgaggggcgagctgcgcttcgacatcaggaaggcggggaccctgcacggcttcacggcctggtttagcgtccacttccagagcctgcaggaggggcagccgccgcaggtgctcagcaccgggcccttccaccccaccacacactggaagcagacgctgttcatgatggacgacccagtccctgtccatacaggagacgtggtcacgggttcagttgtgttgcagagaaacccagtgtggagaaggcacatgtctgtggctctgagctgggctgtcacttccagacaagaccccacatctcaaaaagttggagaaaaagtcttccccatctggagatgacagttgatgctttatttggaaagcagtgtgcatatcttgaggggtgatgaacacaagcaaaccaagttgcacctggcttctgcacactcctgcgaaagtcggtgaacattcactccacattgacccctccctagcctggcaggtgacgtcagggtccttcacagacaaacacgcttgggctcggcaggagctgccgtggccacccccgctgcccagtgtctgccctctagaagtaggctgtgtttccaggtgttcacccgtggtgcccacagtgccgacccgtggctgggtcggagctccatgttcctaagctaggtctaggtctacactcctaggacgcacgcatatcagcccgtgtaccctgtgacagtgactgtccccacctcctatgttagtggtgcccttactgccgtcgctcatccactcgtgtgggacgtaggattgcacagggctgtgccagtggcgtgtagggaacactgccctggctcagcgtgcgagctaaggtggtgatgtatgcgatgggactctgcatgggatagtacagttgtgtagacgtcttccaaataaattatgtgttggtccatcgcacatgctcaataaatatttttaaatgagtgaatgtca

SEQ ID NO: 24166 - DNA, 1301 bp, Homo sapiens
  source 1..1301: mol_type = unassigned DNA
gggagaagagcctgctgagtgcagtgaggccggtctcctgcaggagggagtacagccagaggagtttgtggccatcgcggactacgctgccaccgatgagacccagctcagttttttgagaggagaaaaaattcttatcctgagacaaaccactgcagattggtggtggggtgagcgtgcgggctgctgtgggtacattccggcaaaccatgtggggaagcacgtggatgagtacgaccccgaggacacgtggcaggatgaagagtacttcggcagctatggaactctgaaactccacttggagatgttggcagaccagccacgaacaactaaataccacagtgtcatcctgcagaataaagaatccctgcggataaagtcatcctggacgtgggctgtgggactgggatcatcagtctcttctgtgcacactatgcgcggcctagagcgggtgtacgcggtggaggccagtgagatggcacagcacacggggcagctggtcctgcagaacggctttgctgacatcatcaccgtgtaccagcagaaggtggaggatgtggtgctgcccgagaaggtggacgtgctggtgtctgagtggatggggacctgcctgctgtttgagttcatgatcgagtccatcctgtatgcccgggatgcctggctgaaggagacggggtcatttggcccaccatggctgcgttgcaccttgtgccctgcagtgctgataaggattatcgtagcaaggtgctcttctgggacaacgcgtacgagttcaacctcagcgctctgaagtaagtgtccacagctgggactggcaccgtcttgtggggcctcctggtccacagtctgcaggtgggccaaggccctgggagatcccatacgacggttggataaatgagggtacctgtgcacccagataggacaatctgttgtagcattggagtaattaaagcagtatggtgctataacaagacagatgggcagagcagggtagaatgcaaggaacaaaaattttcgtatgtgaaaaaggtggcattacgattaggagggagtgagggccaagtcagcaaattattctggagcagttgattagcccttgttctctcacgccatacgtgaaaacttaattctgcatggaatcagcgtcagcgacagacatccatgggggcctgtgtgcaccatcttaggtggagaaatgagcagcaacaatggatggaatggaccctgggctagatagaatctggcagtctatgtggcagaaatcagcaaaaacacgattgtaaaagcaaacaagtaattag

SEQ ID NO: 24167 - DNA, 2880 bp, Homo sapiens
  source 1..2880: mol_type = unassigned DNA
gcgtgcactgcgcttgcgcgggttgagggcggtggctcaggctcctggaaaggaccgtccacccctccgcgctggcggtgtggacgcggaactcagcggagaaacgcgattgaggtaggtgtcctgatgggcagctcagatggctggactgcacgtaaggaaggacaggccaggtgaggcgtcctcgcactgcgtgtgcgtcgctggcggacagaggcctccgcccccttttgggacctccgagcgccttcgcgatctcagccactttccctggcgtccaaacgggagctcggtccccgtcacacccttccctgcgtgccgcaccccttcccggccactcccgccgtccagcgccttctacggccacgcccaccccaccaccatctctgtcacgcccttcgcggccacgcccacctgcctggcggcccctgccccgaagctcgcggcgctgtcccagcctgaccctctcgtgcccctgcgtccacgcgtggccctctcgcttcctgcccccttctcaccccccttcactggccacctgttccaaccctccatgatcctgttcctcccgagggcatcttaggagggcagggtcctgcgcgcactgcggcctccactccgaccccgtcccagtttggacccaggtcttccaatgaaaatataattatgcaaatcagtaagcatttgtaactacgaatatcacaaaaataagcttcaagtctggatttagaagtgaagcatgcattttaaacaaagaattgctatgcaattttaaaaacacattgatcccagagcagtgtgtggattacactatcactggaaaaatacgaattgagaagaaggaaaagactggaagatgcagaccttggttcctgttagtggaaacactgtaaggtcccagaaatggaaaagaaaatgaaataaatcagcagttatgaggcagagcctaagagaactatggcaacatcaggtgactgtcccagaagtgaatcgcagggagaagagcctgctgagtgcagtgaggccggtctcctgcaggagggagtacagccagaggagtttgtggccatcgcggactacgctgccaccgatgagacccagctcagttttttgagaggagaaaaaattcttatcctgagacaaaccactgcagattggtggtggggtgagcgtgcgggctgctgtgggtacattccggcaaaccatgtggggaagcacgtggatgagtacgaccccgaggacacgtggcaggatgaagagtacttcggcagctatggaactctgaaactccacttggagatgttggcagaccagccacgaacaactaaataccacagtgtcatcctgcagaataaagaatccctgacggataaagtcatcctggacgtgggctgtgggactgggatcatcagtctcttctgtgcacactatgcgcggcctagagcggtgtacgcggtggaggccagtgagatggcacagcacacggggcagctggtcctgcagaacggctttgctgacatcatcaccgtgtaccagcagaaggtggaggatgtggtgctgcccgagaaggtggacgtgctggtgtctgagtggatggggacctgcctgctgtttgagttcatgatcgagtccatcctgtatgcccgggatgcctggctgaaggaggacggggtcatttggcccaccatggctgcgttgcaccttgtgccctgcagtgctgataaggattatcgtagcaaggtgctcttctgggacaacgcgtacgagttcaacctcagcgctctgaaatctttagcagttaaggagtttttttcaaagcccaagtataaccacattttgaaaccagaagactgtctctctgaaccgtgcactatattgcagttggacatgagaaccgtgcaaatttctgatctagagaccctgaggggcgagctgcgcttcgacatcaggaaggcggggaccctgcacggcttcacggcctggtttagcgtccacttccagagcctgcaggaggggcagccgccgcaggtgctcagcaccgggcccttccaccccaccacacactggaagcagacgctgttcatgatggacgacccagtccctgtccatacaggagacgtggtcacgggttcagttgtgttgcagagaaacccagtgtggagaaggcacatgtctgtggctctgagctgggctgtcacttccagacaagaccccacatctcaaaaagttggagaaaaagtcttccccatctggagatgacagttgatgctttatttggaaagcagtgtgcatatcttgaggggtgatgaacacaagcaaaccaagttgcacctggcttctgcacactcctgcgaaagtcggtgaacattcactccacattgacccctccctagcctggcaggtgacgtcagggtccttcacagacaaacacgcttgggctcggcaggagctgccgtggccacccccgctgcccagtgtctgccctctagaagtaggctgtgtttccaggtgttcacccgtggtgcccacagtgccgacccgtggctgggtcggagctccatgttcctaagctaggtctaggtctacactcctaggacgcacgcatatcagcccgtgtaccctgtgacagtgactgtccccacctcctatgttagtggtgcccttactgccgtcgctcatccactcgtgtgggacgtaggattgcacagggctgtgccagtggcgtgtagggaacactgccctggctcagcgtgcgagctaaggtggtgatgtatgcgatgggactctgcatgggatagtacagttgtgtagacgtcttccaaataaattatgtgttggtccatcgcacatgctcaataaatatttttaaatgagtgaatgtca

SEQ ID NO: 24168 - DNA, 2131 bp, Homo sapiens
  source 1..2131: mol_type = unassigned DNA
cgggccctgggcggggccttcccggctgacggcctgcgtgcactgcgcttgcgcgggttgagggcggtggctcaggctcctggaaaggaccgtccacccctccgcgctggcggtgtggacgcggaactcagcggagaaacgcgattgagaaatggaaaagaaaatgaaataaatcagcagttatgaggcagagcctaagagaactatggcaacatcaggtgactgtcccagaagtgaatcgcagggagaagagcctgctgagtgcagtgaggccggtctcctgcaggagggagtacagccagaggagtttgtggccatcgcggactacgctgccaccgatgagacccagctcagttttttgagaggagaaaaaattcttatcctgagacaaaccactgcagattggtggtggggtgagcgtgcgggctgctgtgggtacattccggcaaaccatgtggggaagcacgtggatgagtacgaccccgaggacacgtggcaggatgaagagtacttcggcagctatggaactctgaaactccacttggagatgttggcagaccagccacgaacaactaaataccacagtgtcatcctgcagaataaagaatccctgacggataaagtcatcctggacgtgggctgtgggactgggatcatcagtctcttctgtgcacactatgcgcggcctagagcggtgtacgcggtggaggccagtgagatggcacagcacacggggcagctggtcctgcagaacggctttgctgacatcatcaccgtgtaccagcagaaggtggaggatgtggtgctgcccgagaaggtggacgtgctggtgtctgagtggatggggacctgcctgctgtttgagttcatgatcgagtccatcctgtatgcccgggatgcctggctgaaggaggacggggtcatttggcccaccatggctgcgttgcaccttgtgccctgcagtgctgataaggattatcgtagcaaggtgctcttctgggacaacgcgtacgagttcaacctcagcgctctgaaatctttagcagttaaggagtttttttcaaagcccaagtataaccacattttgaaaccagaagactgtctctctgaaccgtgcactatattgcagttggacatgagaaccgtgcaaatttctgatctagagaccctgaggggcgagctgcgcttcgacatcaggaaggcggggaccctgcacggcttcacggcctggtttagcgtccacttccagagcctgcaggaggggcagccgccgcaggtgctcagcaccgggcccttccaccccaccacacactggaagcagacgctgttcatgatggacgacccagtccctgtccatacaggagacgtggtcacgggttcagttgtgttgcagagaaacccagtgtggagaaggcacatgtctgtggctctgagctgggctgtcacttccagacaagaccccacatctcaaaaagttggagaaaaagtcttccccatctggagatgacagttgatgctttatttggaaagcagtgtgcatatcttgaggggtgatgaacacaagcaaaccaagttgcacctggcttctgcacactcctgcgaaagtcggtgaacattcactccacattgacccctccctagcctggcaggtgacgtcagggtccttcacagacaaacacgcttgggctcggcaggagctgccgtggccacccccgctgcccagtgtctgccctctagaagtaggctgtgtttccaggtgttcacccgtggtgcccacagtgccgacccgtggctgggtcggagctccatgttcctaagctaggtctaggtctacactcctaggacgcacgcatatcagcccgtgtaccctgtgacagtgactgtccccacctcctatgttagtggtgcccttactgccgtcgctcatccactcgtgtgggacgtaggattgcacagggctgtgccagtggcgtgtagggaacactgccctggctcagcgtgcgagctaaggtggtgatgtatgcgatgggactctgcatgggatagtacagttgtgtagacgtcttccaaataaattatgtgttggtccatcgcacatgctcaataaatatttttaaatgagtgaatgtca

SEQ ID NO: 24169 - DNA, 1932 bp, Homo sapiens
  source 1..1932: mol_type = unassigned DNA
gtggctcaggctcctggaaaggaccgtccacccctccgcgctggcggtgtggacgcggaactcagcggagaaacgcgattgagaaatggaaaagaaaatgaaataaatcagcagttatgaggcagagcctaagagaactatggcaacatcaggtgactgtcccagaagtgaatcgcagggagaagagcctgctgagtgcagtgaggccggtctcctgcaggagggagtacagccagaggagtttgtggccatcgcggactacgctgccaccgatgagacccagctcagttttttgagaggagaaaaaattcttatcctgagacaaaccactgcagattggtggtggggtgagcgtgcgggctgctgtgggtacattccggcaaaccatgtggggaagcacgtggatgagtacgaccccgaggacacgtggcaggatgaagagtacttcggcagctatggaactctgaaactccacttggagatgttggcagaccagccacgaacaactaaataccacagtgtcatcctgcagaataaagaatccctgacggataaagtcatcctggacgtgggctgtgggactgggatcatcagtctcttctgtgcacactatgcgcggcctagagcggtgtacgcggtggaggccagtgagatggcacagcacacggggcagctggtcctgcagaacggctttgctgacatcatcaccgtgtaccagcagaaggtggaggatgtggtgctgcccgagaaggtggacgtgctggtgtctgagtggatggggacctgcctgctgaccctgaggggcgagctgcgcttcgacatcaggaaggcggggaccctgcacggcttcacggcctggtttagcgtccacttccagagcctgcaggaggggcagccgccgcaggtgctcagcaccgggcccttccaccccaccacacactggaagcagacgctgttcatgatggacgacccagtccctgtccatacaggagacgtggtcacgggttcagttgtgttgcagagaaacccagtgtggagaaggcacatgtctgtggctctgagctgggctgtcacttccagacaagaccccacatctcaaaaagttggagaaaaagtcttccccatctggagatgacagttgatgctttatttggaaagcagtgtgcatatcttgaggggtgatgaacacaagcaaaccaagttgcacctggcttctgcacactcctgcgaaagtcggtgaacattcactccacattgacccctccctagcctggcaggtgacgtcagggtccttcacagacaaacacgcttgggctcggcaggagctgccgtggccacccccgctgcccagtgtctgccctctagaagtaggctgtgtttccaggtgttcacccgtggtgcccacagtgccgacccgtggctgggtcggagctccatgttcctaagctaggtctaggtctacactcctaggacgcacgcatatcagcccgtgtaccctgtgacagtgactgtccccacctcctatgttagtggtgcccttactgccgtcgctcatccactcgtgtgggacgtaggattgcacagggctgtgccagtggcgtgtagggaacactgccctggctcagcgtgcgagctaaggtggtgatgtatgcgatgggactctgcatgggatagtacagttgtgtagacgtcttccaaataaattatgtgttggtccatcgcacatgctcaataaatatttttaaatgagtgaatgtcattgtgtatcctgttttatgcatatatgttattttttgtaattacaggatcatactatatgcattgctttataagtttttctcaatattgtgaaaaaacttccacatcagtagatacatgtccataatttttttttgtattgttttgatttttattaaattttattgaaatata

SEQ ID NO: 24170 - DNA, 1656 bp, Homo sapiens
  source 1..1656: mol_type = unassigned DNA
ggcctgcgtgcactgcgcttgcgcgggttgagggcggtggctcaggctcctggaaaggaccgtccacccctccgcgctggcggtgtggacgcggaactcagcggagaaacgcgattgagaaatggaaaagaaaatgaaataaatcagcagttatgaggcagagcctaagagaactatggcaacatcaggtgactgtcccagaagtgaatcgcagggagaagagcctgctgagtgcagtgaggccggtctcctgcaggagggagtacagccagaggagtttgtggccatcgcggactacgctgccaccgatgagacccagctcagttttttgagaggagaaaaaattcttatcctgagacaaaccactgcagattggtggtggggtgagcgtgcgggctgctgtgggtacattccggcaaaccatgtggggaagcacgtggatgagtacgaccccgaggacacgtggcaggatgaagagtacttcggcagctatggaactctgaaactccacttggagatgttggcagaccagccacgaacaactaaataccacagtgtcatcctgcagaataaagaatccctgacggataaagtcatcctggacgtgggctgtgggactgggatcatcagtctcttctgtgcacactatgcgcggcctagagcggtgtacgcggtggaggccagtgagatggcacagcacacggggcagctggtcctgcagaacggctttgctgacatcatcaccgtgtaccagcagaaggtggaggatgtggtgctgcccgagaaggtggacgtgctggtgtctgagtggatggggacctgcctgctgtttgagttcatgatcgagtccatcctgtatgcccgggatgcctggctgaaggaggacggggtcatttggcccaccatggctgcgttgcaccttgtgccctgcagtgctgataaggattatcgtagcaaggtgctcttctgggacaacgcgtacgagttcaacctcagcgctctgaagttggagaaaaagtcttccccatctggagatgacagttgatgctttatttggaaagcagtgtgcatatcttgaggggtgatgaacacaagcaaaccaagttgcacctggcttctgcacactcctgcgaaagtcggtgaacattcactccacattgacccctccctagcctggcaggtgacgtcagggtccttcacagacaaacacgcttgggctcggcaggagctgccgtggccacccccgctgcccagtgtctgccctctagaagtaggctgtgtttccaggtgttcacccgtggtgcccacagtgccgacccgtggctgggtcggagctccatgttcctaagctaggtctaggtctacactcctaggacgcacgcatatcagcccgtgtaccctgtgacagtgactgtccccacctcctatgttagtggtgcccttactgccgtcgctcatccactcgtgtgggacgtaggattgcacagggctgtgccagtggcgtgtagggaacactgccctggctcagcgtgcgagctaaggtggtgatgtatgcgatgggactctgcatgggatagtacagttgtgtagacgtcttccaaataaattatgtgttggtccatcgcacatgctcaataaatatttttaaatgagtga

SEQ ID NO: 24171 - DNA, 1652 bp, Homo sapiens
  source 1..1652: mol_type = unassigned DNA
ggcctgcgtgcactgcgcttgcgcgggttgagggcggtggctcaggctcctggaaaggaccgtccacccctccgcgctggcggtgtggacgcggaactcagcggagaaacgcgattgagaaatggaaaagaaaatgaaataaatcagcagttatgaggcagagcctaagagaactatggcaacatcaggtgactgtcccagaagtgaatcgcagggagaagagcctgctgagtgcagtgaggccggtctcctgcaggagggagtacagccagaggagtttgtggccatcgcggactacgctgccaccgatgagacccagctcagttttttgagaggagaaaaaattcttatcctgagacaaaccactgcagattggtggtggggtgagcgtgcgggctgctgtgggtacattccggcaaaccatgtggggaagcacgtggatgagtacgaccccgaggacacgtggcaggatgaagagtacttcggcagctatggaactctgaaactccacttggagatgttggcagaccagccacgaacaactaaataccacagtgtcatcctgcagaataaagaatccctgacggataaagtcatcctggacgtgggctgtgggactgggatcatcagtctcttctgtgcacactatgcgcggcctagagcggtgtacgcggtggaggccagtgagatggcacagcacacggggcagctggtcctgcagaacggctttgctgacatcatcaccgtgtaccagcagaaggtggaggatgtggtgctgcccgagaaggtggacgtgctggtgtctgagtggatggggacctgcctgctgcaccacacactggaagcagacgctgttcatgatggacgacccagtccctgtccatacaggagacgtggtcacgggttcagttgtgttgcagagaaacccagtgtggagaaggcacatgtctgtggctctgagctgggctgtcacttccagacaagaccccacatctcaaaaagttggagaaaaagtcttccccatctggagatgacagttgatgctttatttggaaagcagtgtgcatatcttgaggggtgatgaacacaagcaaaccaagttgcacctggcttctgcacactcctgcgaaagtcggtgaacattcactccacattgacccctccctagcctggcaggtgacgtcagggtccttcacagacaaacacgcttgggctcggcaggagctgccgtggccacccccgctgcccagtgtctgccctctagaagtaggctgtgtttccaggtgttcacccgtggtgcccacagtgccgacccgtggctgggtcggagctccatgttcctaagctaggtctaggtctacactcctaggacgcacgcatatcagcccgtgtaccctgtgacagtgactgtccccacctcctatgttagtggtgcccttactgccgtcgctcatccactcgtgtgggacgtaggattgcacagggctgtgccagtggcgtgtagggaacactgccctggctcagcgtgcgagctaaggtggtgatgtatgcgatgggactctgcatgggatagtacagttgtgtagacgtcttccaaataaattatgtgttggtccatcgcacatgctcaataaatatttttaaatgagtga

SEQ ID NO: 24172 - DNA, 2639 bp, Homo sapiens
  source 1..2639: mol_type = unassigned DNA
agaagcccccgtttcctggagcccgcgccgtgccgcgctacgcccgccgggagccgggcagagcggccaagatgtcgcagcccaagaaaagaaagcttgagtcggggggcggcggcgaaggaggggagggaactgaagaggaagatggcgcggagcgggaggcggccctggagcgaccccggaggactaagcgggaacgggaccagctgtactacgagtgctactcggacgtttcggtccacgaggagatgatcgcggaccgcgtccgcaccgatgcctaccgcctgggtatccttcggaactgggcagcactgcgaggcaagacggtactggacgtgggcgcgggcaccggcattctgagcatcttctgtgcccaggccggggcccggcgcgtgtacgcggtagaggccagcgccatctggcaacaggcccgggaggtggtgcggttcaacgggctggaggaccgggtgcacgtcctgccgggaccagtggagactgtagagttgccggaacaggtggatgccatcgtgagcgagtggatgggctacggactcctgcacgagtccatgctgagctccgtcctccacgcgcgaaccaagtggctgaaggagggcggtcttctcctgccggcctccgccgagctcttcatagcccccatcagcgaccagatgctggaatggcgcctgggcttctggagccaggtgaagcagcactatggtgtggacatgagctgcctggagggcttcgccacgcgctgtctcatgggccactcggagatcgttgtgcagggattgtccggcgaggacgtgctggcccggccgcagcgctttgctcagctagagctctcccgcgccggcttggagcaggagctggaggccggagtgggcgggcgcttccgctgcagctgctatggctcggcgcccatgcatggctttgccatctggttccaggtgaccttccctggaggggagtcggagaaacccctggtgctgtccacctcgccttttcacccggccactcactggaaacaggcgctcctctacctgaacgagccggtgcaagtggagcaagacacggacgtttcaggagagatcacgctgctgccctcccgggacaacccccgtcgcctgcgcgtgctgctgcgctacaaagtgggagaccaggaggagaagaccaaagactttgccatggaggactgagcgttgccttttctcccagctacctcccaaagcagcctgacctgcgtgggagaggcgtagcgaggtcggaggggaaagggagatcccacgtgcaagtagggggaatatctcccccttttccctcatagcctctagggagggagagtgacttcattctccatttgaagagattcttctggtgatgtttacttaaaaagtgatccccctcaacaacggatacagcgtgcttattattgggcatttagcctcaaaagcatgtagtaccaagcacttgtatttccgtatattttgtttcgcgggggagtgagggggaagaacacggatgaaaatgtcagtttttgaagggtccatgcacatccctgacacctcacaccttatctaagtctgaagctggggagaaaggggttcatttagacttcatacatttccagtacgactttagtatctctccagagccatattttctcagtccgaattaattccccctccctaggtgcctgtaggctatggtacttcttcctcattgttttctaggtaaacttcactactggtaattaaggggaaggatatgaggaagcagtttaaatagccctgttctcattactctgaccacatacatcatagggtgctaaagttgatgaacacattaatccgttaagtaaaatggactttgtaattgtacagcatacctaagaaactcagaaggtgcatttaagagagagacctgaaagaaatagtatggatttttaaaaattcttgtctctactattataaccaaaaaatatttcttgtatgtcccataaaaatatttgtgtaattcttatgaaacaggctggtagaggaggtttctgagcctagcccaagggcttattcatcaccatgggtaaattatttaaactcacttaattaaggaaaatattttcccagctagaaaagtatactcattctcatttaaactctctcatttggagggatcatgtgagttggcctacttacaagtagtgaaagttcccttttcagttttgttttgttttgttttgtttttctctttcactcagccaaatgtgaaagttgtgaatttaggaaaatcacttgtaatgaagtgtgaatcttgttatcaaatttatttctctgatgtttccttccttatccttgtagccaataaaacattgacattctcacgttttatagatgaggtaaaaagtcttgtgtgctgtgagttataatgcttttgcctttttaatattattagttcttaagtgttacagccccttcagaatataacttcaggacaattcaaactatgcttaatgtatgattttcgagcttctgtatgctaagaaaataggtgtgaaaaactggtgttctgaaatagcctaacatttattgtaattctgaattttctgcccttttattcattgcatattaaagtattagagt

SEQ ID NO: 24173 - DNA, 2616 bp, Homo sapiens
  source 1..2616: mol_type = unassigned DNA
gcgctacgcccgccgggagccgggcagagcggccaagatgtcgcagcccaagaaaagaaagcttgagtcggggggcggcggcgaaggaggggagggaactgaagaggaagatggcgcggagcgggaggcggccctggagcgaccccggaggactaagcgggaacgggaccagctgtactacgagtgctactcggacgtttcggtccacgaggagatgatcgcggaccgcgtccgcaccgatgcctaccgcctgggtatccttcggaactgggcagcactgcgaggcaagacggtactggacgtgggcgcgggcaccggcattctgagcatcttctgtgcccaggccggggcccggcgcgtgtacgcggtagaggccagcgccatctggcaacaggcccgggaggtggtgcggttcaacgggctggaggaccgggtgcacgtcctgccgggaccagtggagactgtagagttgccggaacaggtggatgccatcgtgagcgagtggatgggctacggactcctgcacgagtccatgctgagctccgtcctccacgcgcgaaccaagtggctgaaggagggcggtcttctcctgccggcctccgccgagctcttcatagcccccatcagcgaccagatgctggaatggcgcctgggcttctggagccaggtgaagcagcactatggtgtggacatgagctgcctggagggcttcgccacgcgctgtctcatgggccactcggagatcgttgtgcagggattgtccggcgaggacgtgctggcccggccgcagcgctttgctcagctagagctctcccgcgccggcttggagcaggagctggaggccggagtgggcgggcgcttccgctgcagctgctatggctcggcgcccatgcatggctttgccatctggttccaggtgaccttccctggaggggagtcggagaaacccctggtgctgtccacctcgccttttcacccggccactcactggaaacaggcgctcctctacctgaacgagccggtgcaagtggagcaagacacggacgtttcaggagagatcacgctgctgccctcccgggacaacccccgtcgcctgcgcgtgctgctgcgctacaaagtgggagaccaggaggagaagaccaaagactttgccatggaggactgagcgttgccttttctcccagctacctcccaaagcagcctgacctgcgtgggagaggcgtagcgaggtcggaggggaaagggagatcccacgtgcaagtagggggaatatctcccccttttccctcatagcctctagggagggagagtgacttcattctccatttgaagagattcttctggtgatgtttacttaaaaagtgatccccctcaacaacggatacagcgtgcttattattgggcatttagcctcaaaagcatgtagtaccaagcacttgtatttccgtatattttgtttcgcgggggagtgagggggaagaacacggatgaaaatgtcagtttttgaagggtccatgcacatccctgacacctcacaccttatctaagtctgaagctggggagaaaggggttcatttagacttcatacatttccagtacgactttagtatctctccagagccatattttctcagtccgaattaattccccctccctaggtgcctgtaggctatggtacttcttcctcattgttttctaggtaaacttcactactggtaattaaggggaaggatatgaggaagcagtttaaatagccctgttctcattactctgaccacatacatcatagggtgctaaagttgatgaacacattaatccgttaagtaaaatggactttgtaattgtacagcatacctaagaaactcagaaggtgcatttaagagagagacctgaaagaaatagtatggatttttaaaaattcttgtctctactattataaccaaaaaatatttcttgtatgtcccataaaaatatttgtgtaattcttatgaaacaggctggtagaggaggtttctgagcctagcccaagggcttattcatcaccatgggtaaattatttaaactcacttaattaaggaaaatattttcccagctagaaaagtatactcattctcatttaaactctctcatttggagggatcatgtgagttggcctacttacaagtagtgaaagttcccttttcagttttgttttgttttgttttgtttttctctttcactcagccaaatgtgaaagttgtgaatttaggaaaatcacttgtaatgaagtgtgaatcttgttatcaaatttatttctctgatgtttccttccttatccttgtagccaataaaacattgacattctcacgttttatagatgaggtaaaaagtcttgtgtgctgtgagttataatgcttttgcctttttaatattattagttcttaagtgttacagccccttcagaatataacttcaggacaattcaaactatgcttaatgtatgattttcgagcttctgtatgctaagaaaataggtgtgaaaaactggtgttctgaaatagcctaacatttattgtaattctgaattttctgcccttttattcattgcatattaaagtattagagtataaaaactaa

SEQ ID NO: 24174 - DNA, 1718 bp, Homo sapiens
  source 1..1718: mol_type = unassigned DNA
agagcggccaagatgtcgcagcccaagaaaagaaagcttgagtcggggggcggcggcgaaggaggggagggaactgaagaggaagatggcgcggagcgggaggcggccctggagcgaccccggaggactaagcggtgcggttcaacgggctggaggaccgggtgcacgtcctgccgggaccagtggagactgtagagttgccggaacaggtggatgccatcgtgagcgagtggatgggctacggactcctgcacgagtccatgctgagctccgtcctccacgcgcgaaccaagtggctgaaggagggcggtcttctcctgccggcctccgccgagctcttcatagcccccatcagcgaccagatgctggaatggcgcctgggcttctggagccaggtgaagcagcactatggtgtggacatgagctgcctggagggcttcgccacgcgctgtctcatgggccactcggagatcgttgtgcagggattgtccggcgaggacgtgctggcccggccgcagcgctttgctcagctagagctctcccgcgccggcttggagcaggagctggaggccggagtgggcgggcgcttccgctgcagctgctatggctcggcgcccatgcatggctttgccatctggttccaggtgaccttccctggaggggagtcggagaaacccctggtgctgtccacctcgccttttcacccggccactcactggaaacaggcgctcctctacctgaacgagccggtgcaagtggagcaagacacggacgtttcaggagagatcacgctgctgccctcccgggacaacccccgtcgcctgcgcgtgctgctgcgctacaaagtgggagaccaggaggagaagaccaaagactttgccatggaggactgagcgttgccttttctcccagctacctcccaaagcagcctgacctgcgtgggagaggcgtagcgaggtcggaggggaaagggagatcccacgtgcaagtagggggaatatctcccccttttccctcatagcctctagggagggagagtgacttcattctccatttgaagagattcttctggtgatgtttacttaaaaagtgatccccctcaacaacggatacagcgtgcttattattgggcatttagcctcaaaagcatgtagtaccaagcacttgtatttccgtatattttgtttcgcgggggagtgagggggaagaacacggatgaaaatgtcagtttttgaagggtccatgcacatccctgacacctcacaccttatctaagtctgaagctggggagaaaggggttcatttagacttcatacatttccagtacgactttagtatctctccagagccatattttctcagtccgaattaattccccctccctaggtgcctgtaggctatggtacttcttcctcattgttttctaggtaaacttcactactggtaattaaggggaaggatatgaggaagcagtttaaatagccctgttctcattactctgaccacatacatcatagggtgctaaagttgatgaacacattaatccgttaagtaaaatggactttgtaattgtacagcatacctaagaaactcagaaggtgcatttaagagagagacctgaaagaaatagtatggatttttaaaaattcttgtctctactattataaccaaaaaatatttcttgtatgtcccataaaaatatttgtgtaattcttatg

SEQ ID NO: 24175 - DNA, 1449 bp, Homo sapiens
  source 1..1449: mol_type = unassigned DNA
gacacagtagaaataacactttataagcctcttcctcctcccatctcctggcctccttccatcctcctctgcccagactccgcccctcccagacggtcctcacttctcttttccctagactgcagccagcggagcccgcagccggcccgagccaggaacccaggtccggagcctcaacttcaggatgttgacaacattgctgccgatactgctgctgtctggctgggccttttgtagccaagacgcctcagatggcctccaaagacttcatatgctccagatctcctacttccgcgacccctatcacgtgtggtaccagggcaacgcgtcgctggggggacacctaacgcacgtgctggaaggcccagacaccaacaccacgatcattcagctgcagcccttgcaggagcccgagagctgggcgcgcacgcagagtggcctgcagtcctacctgctccagttccacggcctcgtgcgcctggtgcaccaggagcggaccttggcctttcctctgaccatccgctgcttcctgggctgtgagctgcctcccgagggctctagagcccatgtcttcttcgaagtggctgtgaatgggagctcctttgtgagtttccggccggagagagccttgtggcaggcagacacccaggtcacctccggagtggtcaccttcaccctgcagcagctcaatgcctacaaccgcactcggtatgaactgcgggaattcctggaggacacctgtgtgcagtatgtgcagaaacatatttccgcggaaaacacgaaagggagccaaacaagccgctcctacacttcgctggtcctgggcgtcctggtgggcagtttcatcattgctggtgtggctgtaggcatcttcctgtgcacaggtggacggcgatgttaattactctccagccccctcagaaggggctggattgatggaggctggcaagggaaagtttcagctcactgtgaagccagactccccaactgaaacaccagaaggtttggagtgacagctcctttcttctcccacatctgcccactgaagatttgagggaggggagatggagaggagaggtggacaaagtacttggtttgctaagaacctaagaacgtgtatgctttgctgaattagtctgataagtgaatgtttatctatctttgtggaaaacagataatggagttggggcaggaagcctatggcccatcctccaaagacagacagaatcacctgaggcgttcaaaagatataaccaaataaacaagtcatccacaatcaaaatacaacattcaatacttccaggtgtgtcagacttgggatgggacgctgatataatagggtagaaagaagtaacacgaagaagtggtggaaatgtaaaatccaagtcatatggcagtgatcaattattaatcaattaataatattaataaatttcttatatttaaggc

SEQ ID NO: 24176 - DNA, 1538 bp, Homo sapiens
  source 1..1538: mol_type = unassigned DNA
agacagaatcttgccgcatgacccaggctagaatgcagtggtgtgatctcggccctctgcaacctccacctcccagagacgttcgccatattggccaggctggtctcaaactcctggcctcaagtgatctgcccacctcggcctcccaaagtgccagcagcatgctcggaggagtgactttaaagcttttctacttgcttcctagaactgcagccagcggagcccgcagccggcccgagccaggaacccaggtccggagcctcaacttcaggatgttgacaacattgctgccgatactgctgctgtctggctgggccttttgtagccaagacgcctcagatggcctccaaagacttcatatgctccagatctcctacttccgcgacccctatcacgtgtggtaccagggcaacgcgtcgctggggggacacctaacgcacgtgctggaaggcccagacaccaacaccacgatcattcagctgcagcccttgcaggagcccgagagctgggcgcgcacgcagagtggcctgcagtcctacctgctccagttccacggcctcgtgcgcctggtgcaccaggagcggaccttggcctttcctctgaccatccgctgcttcctgggctgtgagctgcctcccgagggctctagagcccatgtcttcttcgaagtggctgtgaatgggagctcctttgtgagtttccggccggagagagccttgtggcaggcagacacccaggtcacctccggagtggtcaccttcaccctgcagcagctcaatgcctacaaccgcactcggtatgaactgcgggaattcctggaggacacctgtgtgcagtatgtgcagaaacatatttccgcggaaaacacgaaagggagccaaacaagccgctcctacacttcgctggtcctgggcgtcctggtgggcagtttcatcattgctggtgtggctgtaggcatcttcctgtgcacaggtggacggcgatgttaattactctccagccccctcagaaggggctggattgatggaggctggcaagggaaagtttcagctcactgtgaagccagactccccaactgaaacaccagaaggtttggagtgacagctcctttcttctcccacatctgcccactgaagatttgagggaggggagatggagaggagaggtggacaaagtacttggtttgctaagaacctaagaacgtgtatgctttgctgaattagtctgataagtgaatgtttatctatctttgtggaaaacagataatggagttggggcaggaagcctatggcccatcctccaaagacagacagaatcacctgaggcgttcaaaagatataaccaaataaacaagtcatccacaatcaaaatacaacattcaatacttccaggtgtgtcagacttgggatgggacgctgatataatagggtagaaagaagtaacacgaagaagtggtggaaatgtaaaatccaagtcatatggcagtgatcaattattaatcaattaataatattaataaatttcttatatttaaggca

SEQ ID NO: 24177 - DNA, 11716 bp, Homo sapiens
  source 1..11716: mol_type = unassigned DNA
aaaaccagtagcatcagcagcagcagcagcagccgccgccgccaccaccgccgccacagcagtagcattagcggcagtagcagcatttagcaatagctttaacagctatagcgacagtagcagccgccctcctctctccctctcgcggacggccgcagccaccgcacagagcgggctccaggcgccgagcgcgcagcccgctcgctaggtagctccagccggggcgagcgacagtgtaagcgaagcacggacccttggagcagccgggcagccgcggaggctctgagtttcagggccagagcccgacagctctgactccatctagcgcggcggcggcggagcctgagggagcgagcgaggagagaggcgcgtccacctggcgggcccagcgtatggagctgaggcagaggcggcggcggcggcggcagcagtagcagcggcggtggcggctaaggcagctcgaacagctgcggcgacggcgacagcccagccttgactgcgaccgcgctagctacagcgcctgctgcctgagcccgccagcgacgtgcgcctcgggagtcggcctgtgaggttggacagcatttggacttggaatgaaacaataagaggttatattcatggataaccaacaagataaggctattgttgcctcagccaacggagaaaacactctgattaatggggtcaaagaaaatgactcagaggaccaggatgtggcaatgaagtcatttgcagctctagaagctgctgcacctatccagcctacaccggtggcacaaaaagagaccctgatgtatcccagaggtctcctgcctctaccctctaagaagccctgtatgcagagcccgccctctcctttgggcctgattgaagcacccgaacatgctgctaatagtgcttctgtgaatgccatctccctcacatctggcattgcaaaaggcctgaacacatggtcacttcccaatgaatgtgagaaagctccatttgccataatggagcctgcaggcatgtcagctctgaatggggactgtctcatgcagccaagtcggacttgcttaggctgcttcatggaatccaaggatgcagtagatcctgagccagggatcagtctgaaagttggtgatctaaatagggattatgaaacgtgtgcagtctctgatatagggattcagtgtattaatgctggagaaaatatgaaatatggagagcagctgctctcagaccagctcctaggcttccccctgcataagtcaagggcaggagacagacgagaaactgagaaacctgacattgacttggaggatccggctcagaaaagctattatgaggcattactgttagacaagtgcaatacagaagaagctttgcttgcaaattccaatcaggattggggttacttcgagacttttattagtgaaagtaagattgaactgcttgacctctgttccaaaaatgagctgtctgtcaacctattctctgaagaagatgtggataactacatgtttgatgatgatgaatcaacactaggcagtgatgtctgctccctgaaaattcgatatgaatcctttcaggacaatgttcgagacaagactactcttttgatgcaggaagatgcccaattcaacttttttcccagcgtctttactacctgccccaagcgagagtctaagagtggggccctgaagcagagcagtgatttttcccaattcaaggtccctgatgtgagcatcatctggggggaggaagataaaaacttggacaagaagaaaggcaaagaggaaggacaggaagacaaaggtgtagagaagaaagatggaaaggataatggagaaaagcctgccttaaataaaccatgcagtgggactgaagtagagcaacttaagaatccaaagcagggccatcttgctaattccctggagacatcagggagtttcagtgatgatagttccttcattgagatctcatatgatgctatgggtgagatcaaggactgtagtcgctatatggctcgggacactaattctggcagctcctcctcccaacagaactatgggctgcgagccaagagaaaagtcagatacagtgaagattatctatatgatgttgactcactagagggtgaaaaagtaaatgagaggaaggaatggctgccagttggttccaaagaggaagatgatgatgaatggtgtcccaaaaagagaagaaaagtaacccgtaaggagccccctgttattatcaaatatatcatcattaatcgctttaaaggtgagaagaacatgctggtgaagttgggtaaggtggatgccagtgagacaacagtgaatttgagtgagaatcagctcaacaaatatgccaagctggcacccttgaaaggcttctggcaaaagaagaagaagcagagaaacaccaacacggactccatcaagacacctttttcccaaaagcaaagctttgaaccaggtagctttgaggtgtcatttctgccacctgctcgcaaacgaaaatctaaacttggcaacaggcacaggattcaaagaatcccatccattgaaatttcagcaagtagtaaacagatttcattatgtaatgatcagaggcacgctagtaatcataaagaagatggaggcctaaaaggtacactgaagtcagcacctctgggtgctcctagctgtgcaaatggatcacatttaaatgacatcacaggccctgactcagtgaaagtcaaagcccaagacacagagtttaaggggccagagaggaaagtgctcaataaaatcaaatttaaaagtgaagctaggttaaaatctaagaaagtcaaagctgctgggcaagaaagcaagccaattgttcaaatgagccctctcttggaaaaccaatcctcaaaggctaatttaaagaatgaagttattcctgggacatcaaacagttcccgtctatctgaatttcatgaggcaaaggctgctaagagttccacttttctaccaacgacatgctcttctgaaatgcctttatcatctgctaatgttaccactaatatacctgttatcccgggagggtatctgcagacattgttagatgcttctgacttgtcaaataacactagtatctcatacttcagccaccattctccagagcaaaatgaaggcagcctcactcaaaccgaaaaatcatttgtacccctccagcctacccaggactgtgtgctcacctcatcctctgactctgagctgcagcagtcatctcataacttcaaaatggaatcaagcaactatagaaatgtgtggcccaacaaggctacttctggcacccaggaattcatggctgaagtctcaagggagatagccccaacccaatccagtgaatttggagcctcccaagtagtctccatggaaaataacctcacacctacaacatacaatccaatctgtctcaatagtggtggcagtaattgcaacaaggtcctgtatgactccatgcaagatacccaactcccatctgatgactcttaccaattatgtcactttaataatggagagatctgctttcctttccagcaggggccagtcaatatggatgatggtcggctctttagctttgattcaatggccccactctctgtcagctcaagtaattattgctccttaagcttgaagtcctgtgaaaaggatggcgatgatgatatcactgatgacttcctggcccattgcagccctaagctggtgatccagcaaagcattgatgagatagcaccactaaaggagtccactgacctcctggatatatccaacttcacccctgacaaattccgccactcttccctttcagagatgtccccaccggacacccctagtctttcccctcaaattaccagatgtgagagtatgaagacactaggaacactaaaggggttccaagagggtgtcccaggaccattggacagtgtggaaaaaatcaagtgggactgcagtaccctttcacggcaggtccaaatggaggatggatttactttaaataatcaccagtttcagttccatatgttcaatgatgaggattctgtcagcctgctccaaaaaaacccttgcctgtcaacatttaatgatccatctggtcaaattagtaccaacaacaaagtgtcaaaatcaagaaagaaaagttcacccagcaagagtggggctatgaaccaaagctcttctcagaaaaacaccaggaaaaaatccctcaaaggtaacaacaaggggattgaaaaaccacctggcaaaaactcccgccaggtccctaagtccacaaagaaagggaaatacatggctgccatcaatggagagaaaatgcaaattggcattggccgtgggggaagccaaaccaacaccatatcctccactgggaagacattggctgaatgtatccaacatggtggccctatggcctctatgaagatgccaagtcaaaagggactttctggagattgggccttggggaaggagagcagcccaggctggagtgatatgagcatgggcaccaacaccaacagccttctggatgatgaccaacgggaatttcaggagccttcctatatcttgtccaacattgcctctggtatggcagatgtgcagagattcatgatggcctccatagagcccctttgggaacccatggagcaccatggggatcccaacatattctactcccctgagtccaatagtctaaaattaaaaaccctcaaaatattggctgggacaccacaggagtctaagaaaaagatcaacagtgggtcccaaggagccactaagaatcacaggtcaatcaagggtgtgagcaaaagcaatgggaaaacagcaataggtgatcctggtcgtgcaaacatgcctggttataacgaggactctcgctctaccttctttgataaaaagtatagtaacatgagcactttaggcaataacggaccgacacacaaaaagttgtatcgtcacaaatccagctccaaggccctgagagatgagaaatgtaagggaaagcacatggagcgagaacaggtccacaaggatgagtctgggacagcttcttttgaaaaactgagggattccgactacaatctcctaaaagcagaaacaaccttttgggttttacctgtgtttgaagaagagactcgcattttccagaaagacatttgatgtttgtgttttatttctttcaaaatatgccttgtggtatgtatgttgacatgtaagtgcttaaagaaaagaattttaaattgtgggaatacgtctttggagcaaactttaatctcatgttctatgtaaaagacttaaaaagtcatacagttgcacaagtagtttatgcactatttacccacaaggaaaaaattgaaaacattgtgccaaactacaaacaagtgactgtactgtatatatttttacttctatatcaacatttggttgtatttggggaagttgtccctgttaatttactagaaacattccagtgattcttgctattaaccacccccacttatgtggatagcacctgtagatcatggtggaaaaatatgttgtgttacacaatttaccaaaattaaaggatactgtttgaaatgtgccaaattttcttacctcatctcacagattcacccacagtttaaagctcattaattatttttaaatggatatatacacacccaaacatatatatgtatatgtttgtgtgtgtgtgtgtgtgtgtatatatatgtatatatatatatacacacacacacgttcttttaaagttttagactctactgtcctgtgtggaaacatgaacagctaaacaaggcaaaataaagattttcttgttccattgtgtaagggttaaaattttggaaaagtctgaaggccacaacagctaagtccatcagggacccaagtatatgcatttacagaacgttttacaaggaaacaaaacagctgctttcaaagtttgttttctaaaagcaaaatctgtagctgaaaattatttaaagtgcaaagttatattgctgatactttatatctcagttttatatattttataatagtctgggataaattataaaaatagctataaaatcaacactaatgataaatgaagtatatagaatgcttttatttaaatagtttcctaaatgttttattccagttttgtcaaaagtgcactcatatcatggctttagtgttctttcagtgtttaatcttgcaatgccaatgtcatttaaagaaaatgttaaggcatcccagttcaaccaaatttttcttcttatgagtaaagtacatttactatcagataagatgaacaatttgtggcaacaactgatttgggccatatacccttagtctgaggataaccaatatttgatgccacacactaaacttaaatctcaattttaagtacaaatttttaaatcacattttttattcagtactccccctactttttaaaaaaaatttcacagccccaacattcctcactactactttttcttcccttttattcaccacttgacttctaacatttgatctcttttctttgcacaattgaaggcctgtgcatctgatgactgatgcattatggcacagatgagataatggatgtgagagcgctttgtagatcataaagtgctatacagatataggggattaatattattaatattgttagttgttgtcgttgttactattcttattaatattgttactaacctattaacttgtgaatatataggctggggtgggagggtggagaataagtgggaagggaaaaaggggatttaacaaaaaaagggaagatgtttcaaaaggaaaattttaagcaaaatatgaacctacctagtcaatgccacctaaatgtattcacaaacagagaagcaacatttgaaagtagtcagagagaaatggaaggaagcctgtcatgtatataagtatatacacttcccggtccatgattcctttcaccagcctgctctattccttacagctgggtcgtaaaatgaacaagcctgtgttcttgatcatgtgtgttcccagcgtcagtctcttgtgtctgtggggatgagtgggtgaggagcattctgtgaggctggtacaggcccattcctaggctttaatgctctgtttgcagtgagccctggaaaattacttagtggaaaggcaccagatgaaacatgtctcctgccccatagctaccattcaaaagggaaaataaccaaactggaaaaccttcttctatttctctattctgatagctagctgtactaaatgctatggccagtccctagaaactggtctttgttttgtttttgtttttgtttttgatttttctgttttgcagctgaattttggcttggaatcaccaactctgcctgtattgtgatccccaagactccagacctcagagtcacctgctggcttagaggagtggagtgctttctatgtaatgaaaaggtggcaattaatgaaaaaataaagaaaatgttccattaatacaatgtgtttttataaaagtaaatatgggagcagttgtcccagttttttttcggtatcagttcagctttggagaatggggtgtgagtggggtaggacagcctgaaactgttggaaacaatttccttgtgagaacttgctatcataagtcctttggaatggatattctttcagttgctcctatggagcccattaagggccaattctagggcatagttcatccctttctccaaagagaattgttattttaaagtacctttttaattggcctgcagtgtattatatgtttttaatatataaattagtgacgcataaccagtcactttgtactgaaacataaaaagaaacagagtttgagaaatgagcaataggccgaggcagaagatgtttattctcttaattgcatttaatattcctctcagtacattgtgttctgagatgttcatcatttagcattttgttggtcctgtctctgctctcacagttctttttcttcctgtcataaccagctgccttagtagagtataaaaatagtgttttgccctatcactggtatctcaagtcagaaatatatattatccttggtctgaaattcctgattaccgctcccttctaaccttccccctctgagaagctgtttcctattaatgcctccctaacagagtcccatttaatctttactttcctggaaatggtaacctcccttattcttcttacttaatctcagaccttggtcttagaatttttcttttatggtctcatatcccacctgcccaaattgtcagggctcaacaatcttaggctgctttcttctggaagttcagaaggaaaccttcccattcttaattgcctttaattgctttggctattttcaaatctaattttttaattaaattttttttaatttttatagagtaggggtacaaggacagttgtgttacatggatatattgcttagtgttgaaatctgggcttttagtgtacccatcaccgaaatagtgtacattgtacccaataggtggtatttcatccctcaaatataattttaaacacacactcgtgcccacatggacaaattatatcacatgactgaggaaacttagaaattccttttccctgaagatctgttaagaataggtctcatctcctgccctggttaggtgctatattatatggagaagggtattgagactttgggggtcatgtttgggctgtgataactggcttgaaccagtgaccatcctttctgcctcgccaaggtctcttataccagcttcttcacatatgctgcttcctcccagctttcccttctgacttcttgttactctgcaactatgtgtcaaggccttaccttttcctgatgttttcaaacctcctgcattactttgatcatcacttcttcagccatctcactgaagtccttggtgctagctgggcttttgtgacaactttcaccttctctgaactttttccttgctgggaagcatctgcgtgtgtgagggggctacggagggaagtgtgtgtgtgtgtaagagagaggcaaaaggatgcttcaaaagctataaacaactctagcaagcatcctaagtcctatgtgaggttttgcagttctagtgaatttctgttttagtaggtttcaattagcatttactgcctaaaggagaaaaaccatatccaaggaccttttagccatgcttgctattaccaagctggaccagtgtgatgtagatccaacatgtcttcagcttacagatgctctcagaacagttccaagaattgaagagagctaagtttttatgctgaagaggagaatggagcactagctagtcctaactattgctagaaatagaaatgtttattttctcctttattattgagaaattatctaatttaaggagtaaccattttcatttagggatttttttaatgactgcccatcactacagaaatatgttctttttataaaataaaactaatgtgaggttggtttgttttctaatcataaaattcactaagcctatagttacatttagaagatttagtaccaaaatcaaacttttagtaacaaacaggaatcttgtcaacacaatgtaggccagggattttgtaaaggtttctcaaagacccaaataagggagaaaaaaattttagttgggctgtttaacttgggaaacactgtcatcagcttgagggtcctcagccagcatgtgattattttgatgacaggactcaggctaccctttaaggcacattttttactcagcattaaacactagctacagtcgtgaagcagagctcccattgcagctacatacttgagatgtactcttggtttcagaatcgtaactaagaggtaaggcattggagaaggacaatgtaaaagacagaggtttagaacaaagtttatggtgtgaatgaggctttcaaaatcagtatctgggtaaattgatactaaagacactgaagaaacactcatccacataagatggaaaggatgtctgtccatctaacaagctcaggggtttctgagtctcagaatgacatcccatttcaaaaagaagaaaagagatattgaaatcattctgcctgtttgagagatgactggttatttacagcacaaaaaaaggcttagaatgaaaactagaagaggccttttgtttttcactcccagtgaggagagtagaaatcttaagatgctctactgggctacctgtagcactgactggagtttgctgcctacagagttttgaatgtactagtccttagtttccatagaactgaatgcacctctttagtaagttgctgatttatggtgctaaagaaaatgattattcccatttttttcttcttccccaagccccttaagcatttaagaaaatttaaaataaaagcgttagaggccctttttatgaatgtaacctaagtttctgtttgacatatgacactgcaacttaaaaatgttaggaaattatttgcctttttttttcttttagagttaagctttataaataatctgtagaatcaattgaagtttaaagcttaaggatcactcttaagacgtctacaaaatcttgtatatttttaagtgtgccaatttgtaacatattttgtaagtgtatatttttcttagaaaagtgctgtgaagtgtctgtatgtgagagttttcctttttctgcaccactaggtgctaataaaaggatatttacttcaaagtttctggttttagaaaccacaatacaaagaaaaaaaatacacttttgttggaaattttgtaacacaaaacatgttgtgaaagagtgtagtgatcttgtgcaaaaaaaatgaacatttgtgagcttcttgctgttttatagattttcttgtaaattattcttgtaacacttctggttttgttgttcttgttgcgaaggtttcaaatatttgtgactgaatgtacggtgaaactgtcataatgttacctagctgagttttgttattgtttatgaaataaataaaaagaaaagtttaaaatactgctttagaatcatatgtattagaaatcaaaccatttctaattaaatctatgtcccaaataaaacgttctttatcatctagagcagtgtttctcaaactatctgtggtgagggaccaatagtttttgcaatccatcacagaccaatactattataaaacacaacaaaaatgaatttctaagaaagttaaatggaaaaaagatatgcaaaataaaagcccaaatgtattagatttaacatgtaaaattacatttcgagataaacataacataaggggaaagaaacgaattgcaaaaagttggtaccctgtttgagacaagtccactcatcaatgtcaaattgccatagaaggttctaatcatactttgaataatactttgactagaccagcagcattgccatcatctgggaacttgttaggaatgcgaaattccaagccctacaccaattctgctgaatgagaatctgaattttaacaagatccctaggtgttttgtgtgcatgttaaagtttgagaagcactgggctagagttttgtgtaggggattcttttgcccctcaaattgaggaatcatcttctagtgtgtccagtcttcaaagaccttaaaacaaattgtgtctttgttttgtgatccagatggaatctgcagagatgcagtcctctcaaagtgttaaagctgtttattgaaagtaataaatgctgatttgcctggt

SEQ ID NO: 24178 - DNA, 7226 bp, Homo sapiens
  source 1..7226: mol_type = unassigned DNA
aaaagcggcctctcggctgagggccggggagctagcgctcaagcagagcccagcgcggtgctatcggacagagcctggcgagcgcaagcggcgcggggagccagcggggctgagcgcggccagggtctgaacccagatttcccagactagctaccactccgcttgcccacgccccgggagctcgcggcgcctggcggtcagcgaccagacgtccggggccgctgcgctcctggcccgcgaggcgtgacactgtctcggctacagacccagagggagcacactgccaggatgggagctgctgggaggcaggacttcctcttcaaggccatgctgaccatcagctggctcactctgacctgcttccctggggccacatccacagtggctgctgggtgccctgaccagagccctgagttgcaaccctggaaccctggccatgaccaagaccaccatgtgcatatcggccagggcaagacactgctgctcacctcttctgccacggtctattccatccacatctcagagggaggcaagctggtcattaaagaccacgacgagccgattgttttgcgaacccggcacatcctgattgacaacggaggagagctgcatgctgggagtgccctctgccctttccagggcaatttcaccatcattttgtatggaagggctgatgaaggtattcagccggatccttactatggtctgaagtacattggggttggtaaaggaggcgctcttgagttgcatggacagaaaaagctctcctggacatttctgaacaagacccttcacccaggtggcatggcagaaggaggctatttttttgaaaggagctggggccaccgtggagttattgttcatgtcatcgaccccaaatcaggcacagtcatccattctgaccggtttgacacctatagatccaagaaagagagtgaacgtctggtccagtatttgaacgcggtgcccgatggcaggatcctttctgttgcagtgaatgatgaaggttctcgaaatctggatgacatggccaggaaggcgatgaccaaattgggaagcaaacacttcctgcaccttggatttagacacccttggagttttctaactgtgaaaggaaatccatcatcttcagtggaagaccatattgaatatcatggacatcgaggctctgctgctgcccgggtattcaaattgttccagacagagcatggcgaatatttcaatgtttctttgtccagtgagtgggttcaagacgtggagtggacggagtggttcgatcatgataaagtatctcagactaaaggtggggagaaaatttcagacctctggaaagctcacccaggaaaaatatgcaatcgtcccattgatatacaggccactacaatggatggagttaacctcagcaccgaggttgtctacaaaaaaggccaggattataggtttgcttgctacgaccggggcagagcctgccggagctaccgtgtacggttcctctgtgggaagcctgtgaggcccaaactcacagtcaccattgacaccaatgtgaacagcaccattctgaacttggaggataatgtacagtcatggaaacctggagataccctggtcattgccagtactgattactccatgtaccaggcagaagagttccaggtgcttccctgcagatcctgcgcccccaaccaggtcaaagtggcagggaaaccaatgtacctgcacatcggggaggagatagacggcgtggacatgcgggcggaggttgggcttctgagccggaacatcatagtgatgggggagatggaggacaaatgctacccctacagaaaccacatctgcaatttctttgacttcgatacctttgggggccacatcaagtttgctctgggatttaaggcagcacacttggagggcacggagctgaagcatatgggacagcagctggtgggtcagtacccgattcacttccacctggccggtgatgtagacgaaaggggaggttatgacccacccacatacatcagggacctctccatccatcatacattctctcgctgcgtcacagtccatggctccaatggcttgttgatcaaggacgttgtgggctataactctttgggccactgcttcttcacggaagatgggccggaggaacgcaacacttttgaccactgtcttggcctccttgtcaagtctggaaccctcctcccctcggaccgtgacagcaagatgtgcaagatgatcacagaggactcctacccggggtacatccccaagcccaggcaagactgcaatgctgtgtccaccttctggatggccaatcccaacaacaacctcatcaactgtgccgctgcaggatctgaggaaactggattttggtttatttttcaccacgtaccaacgggcccctccgtgggaatgtactccccaggttattcagagcacattccactgggaaaattctataacaaccgagcacattccaactaccgggctggcatgatcatagacaacggagtcaaaaccaccgaggcctctgccaaggacaagcggccgttcctctcaatcatctctgccagatacagccctcaccaggacgccgacccgctgaagccccgggagccggccatcatcagacacttcattgcctacaagaaccaggaccacggggcctggctgcgcggcggggatgtgtggctggacagctgccggtttgctgacaatggcattggcctgaccctggccagtggtggaaccttcccgtatgacgacggctccaagcaagagataaagaacagcttgtttgttggcgagagtggcaacgtggggacggaaatgatggacaataggatctggggccctggcggcttggaccatagcggaaggaccctccctataggccagaattttccaattagaggaattcagttatatgatggccccatcaacatccaaaactgcactttccgaaagtttgtggccctggagggccggcacaccagcgccctggccttccgcctgaataatgcctggcagagctgcccccataacaacgtgaccggcattgcctttgaggacgttccgattacttccagagtgttcttcggagagcctgggccctggttcaaccagctggacatggatggggataagacatctgtgttccatgacgtcgacggctccgtgtccgagtaccctggctcctacctcacgaagaatgacaactggctggtccggcacccagactgcatcaatgttcccgactggagaggggccatttgcagtgggtgctatgcacagatgtacattcaagcctacaagaccagtaacctgcgaatgaagatcatcaagaatgacttccccagccaccctctttacctggagggggcgctcaccaggagcacccattaccagcaataccaaccggttgtcaccctgcagaagggctacaccatccactgggaccagacggcccccgccgaactcgccatctggctcatcaacttcaacaagggcgactggatccgagtggggctctgctacccgcgaggcaccacattctccatcctctcggatgttcacaatcgcctgctgaagcaaacgtccaagacgggcgtcttcgtgaggaccttgcagatggacaaagtggagcagagctaccctggcaggagccactactactgggacgaggactcagggctgttgttcctgaagctgaaagctcagaacgagagagagaagtttgctttctgctccatgaaaggctgtgagaggataaagattaaagctctgattccaaagaacgcaggcgtcagtgactgcacagccacagcttaccccaagttcaccgagagggctgtcgtagacgtgccgatgcccaagaagctctttggttctcagctgaaaacaaaggaccatttcttggaggtgaagatggagagttccaagcagcacttcttccacctctggaacgacttcgcttacattgaagtggatgggaagaagtaccccagttcggaggatggcatccaggtggtggtgattgacgggaaccaagggcgcgtggtgagccacacgagcttcaggaactccattctgcaaggcataccatggcagcttttcaactatgtggcgaccatccctgacaattccatagtgcttatggcatcaaagggaagatacgtctccagaggcccatggaccagagtgctggaaaagcttggggcagacaggggtctcaagttgaaagagcaaatggcattcgttggcttcaaaggcagcttccggcccatctgggtgacactggacactgaggatcacaaagccaaaatcttccaagttgtgcccatccctgtggtgaagaagaagaagttgtgaggacagctgccgcccggtgccacctcgtggtagactatgacggtgactcttggcagcagaccagtgggggatggctgggtcccccagcccctgccagcagctgcctgggaaggccgtgtttcagccctgatgggccaagggaaggctatcagagaccctggtgctgccacctgcccctactcaagtgtctacctggagcccctggggcggtgctggccaatgctggaaacattcactttcctgcagcctcttgggtgcttctctcctatctgtgcctcttcagtgggggtttggggaccatatcaggagacctgggttgtgctgacagcaaagatccactttggcaggagccctgacccagctaggaggtagtctggagggctggtcattcacagatccccatggtcttcagcagacaagtgagggtggtaaatgtaggagaaagagccttggccttaaggaaatctttactcctgtaagcaagagccaacctcacaggattaggagctggggtagaactggctatccttggggaagaggcaagccctgcctctggccgtgtccacctttcaggagactttgagtggcaggtttggacttggactagatgactctcaaaggcccttttagttctgagattccagaaatctgctgcatttcacatggtacctggaacccaacagttcatggatatccactgatatccatgatgctgggtgccccagcgcacacgggatggagaggtgagaactaatgcctagcttgaggggtctgcagtccagtagggcaggcagtcaggtccatgtgcactgcaatgccaggtggagaaatcacagagaggtaaaatggaggccagtgccatttcagaggggaggctcaggaaggcttcttgcttacaggaatgaaggctgggggcattttgctggggggagatgaggcagcctctggaatggctcagggattcagccctccctgccgctgcctgctgaagctggtgactacggggtcgccctttgctcacgtctctctggcccactcatgatggagaagtgtggtcagaggggagcaatgggctttgctgcttatgagcacagaggaattcagtccccaggcagccctgcctctgactccaagagggtgaagtccacagaagtgagctcctgccttagggcctcatttgctcttcatccagggaactgagcacagggggcctccaggagaccctagatgtgctcgtactccctcggcctgggatttcagagctggaaatatagaaaatatctagcccaaagccttcattttaacagatggggaaagtgagcccccaagatgggaaagaaccacacagctaagggagggcctggggagccccaccctagcccttgctgccacaccacattgcctcaacaaccggccccagagtgcccaggcactcctgaggtagcttctggaaatggggacaagtcccctcgaaggaaaggaaatgactagagtagaatgacagctagcagatctcttccctcctgctcccagcgcacacaaacccgccctccccttggtgttggcggtccctgtggccttcactttgttcactacctgtcagcccagcctgggtgcacagtagctgcaactccccattggtgctacctggctctcctgtctctgcagctctacaggtgaggcccagcagagggagtagggctcgccatgtttctggtgagccaatttggctgatcttgggtgtctgaacagctattgggtccaccccagtccctttcagctgctgcttaatgccctgctctctccctggcccaccttatagagagcccaaagagctcctgtaagagggagaactctatctgtggtttataatcttgcacgaggcaccagagtctccctgggtcttgtgatgaactacatttatcccctttcctgccccaaccacaaactctttccttcaaagagggcctgcctggctccctccacccaactgcacccatgagactcggtccaagagtccattccccaggtgggagccaactgtcagggaggtctttcccaccaaacatctttcagctgctgggaggtgaccatagggctctgcttttaaagatatggctgcttcaaaggccagagtcacaggaaggacttcttccagggagattagtggtgatggagaggagagttaaaatgacctcatgtccttcttgtccacggttttgttgagttttcactcttctaatgcaagggtctcacactgtgaaccacttaggatgtgatcactttcaggtggccaggaatgttgaatgtctttggctcagttcatttaaaaaagatatctatttgaaagttctcagagttgtacatatgtttcacagtacaggatctgtacataaaagtttctttcctaaaccattcaccaagagccaatatctaggcattttcttggtagcacaaattttcttattgcttagaaaattgtcctccttgttatttctgtttgtaagacttaagtgagttaggtctttaaggaaagcaacgctcctctgaaatgcttgtcttttttctgttgccgaaatagctggtcctttttcgggagttagatgtatagagtgtttgtatgtaaacatttcttgtaggcatcaccatgaacaaagatatattttctatttatttattatatgtgcacttcaagaagtcactgtcagagaaataaagaattgtcttaaatgtcatgattggagatgtcctttgcattgcttggaaggggtgtacctagagccaaggaaattggctctggtttggaaaaattttgctgttattatagtaaacatacaaaggatgtcatcatc

SEQ ID NO: 24179 - DNA, 12180 bp, Homo sapiens
  source 1..12180: mol_type = unassigned DNA
atgcattgcactaacccagctctgattttcttgatagatgagctctctccggaacagcacaacctttctttatactccatggagctcgtgctgaagaaaagcactgggcacagcgctgcacaagtggccttaacagaaactgctcccggctcccagcacagcagtcctctccatgtcacagccccgccgtctgccactacttttgatacagccttttttaaccaaggaaaacagaccaaaagtacagcagatcccagcatctttgtggcaacttacgtgtcagtgacgagtaaagaggtggccgtcaatgacgatgagatggataactttctgccagatactcactggaccactccacggatggtttctccaatacagtatatcacagtcagcccaccagggctgcccagggaagcattagaacctatgctcactccatcattacccatggtttctttacaagatgaagaagtgacatcgggctggcagaacacaacgcgacaaccagcggcatatgctgagtccgccagtcatttccacacctttcggtcagcttttcgcacctctgagggcatcgttccaactcctggcaggaatttggtgctttatcctactgatgcttacagtcatttatcaagcaggactctgccagagattgtggcttccctaacagagggtgtggaaaccaccctttttttaagctcccggtctttaatgccacagccgttaggcgacggcattactataccgttgccctccttgggggaggtctcacagcctccagaggaggtttgggccacaagtgcagacagatacactgatgtgaccactgtgttgagtcaaagcctagaagaaaccatctctccaagaacataccccactgtgactgcatcgcacgcagcccttgcattcagcaggacacattctccattgctttcaactcctcttgcatttgcgtcctctgcttcaccaactgatgtttcatctaacccctttctccctagcgactccagcaaaacatccgaattgcatagcaattcagccctccccggtcctgtggacaacactcatatcctgagcccggtgtcctcattcagaccatacacttggtgtgcggcctgcactgtgccttcacctcagcaagttctggccacgagcctcatggagaaagacgtgggatcaggggatggtgccgagactctgtgcatgaccgtgctggaagaaagcagcatctctctaatgagtagcgtcgtagcagacttctctgaatttgaggaagatcctcaagtatttaatacgcttttcccctccagacctatcgtcccactttcttctagatccatggaaatctcagagacgagtgttggcatttctgccgaggtggatatgagtagtgttacaaccacacaggttccccctgcccacggccgcctctctgtgccggcgtcacttgatcctactgctggctccttgtctgttgctgaaacccaagtgacgccatccagcgtgaccactgcatttttctcggtcatcaccagcattctccttgactcatctttctctgtcatagcaaacaaaaacacaccgtcgcttgccgtcagagacccgagtgtttttacgccttatagtctggttccttcagtggagtcttcacttttctctgaccaagaacgttccagtttttctgagcataaacccagaggtgctttggattttgcatccagctttttctcaacacccccgctggaactcagcggctccatctcttcgccttcggaagcacctgcgtctctgtctctgatgccgagtgacttgtcccccttcacatctcagtctttttctcccttggttgagacatttacattgtttgactctagtgatctgcagtcatctcagctgtctcttcccagttccacaaatcttgagttttcgcagctccagccaagttccgagctgcctttaaacaccatcatgttgctacctagccgttctgaggtgtcaccatggtcaagcttcccttctgattctctcgagtttgttgaagcgtctacggtttcactgacggattcagaagctcattttacctcagctttcattgaaactacctcctatcttgagtcttcactcatttcccatgaatccgcagtcactgcactggtgccccccggctctgagtcttttgacattttgactgccgggattcaagcaacatcaccattgaccactgtccacacaacgcccattttaactgagtcttctttgttctcaactctgacacctcctgacgaccaaatcagtgctctagacggtcacgtgtctgtcctggcctctttctccaaagccattcccactggtacggtgttgatcactgacgcgtacctgccatcaggatcctcgtttgtttctgaagcaacccccttccctctgcccacagagctgaccgtcgtgggcccatcactcacacccacagaggtgccactgaacacctccacggaagtgagcacaaccagcaccggtgctgccactggtggtcccctcgactccaccctgatgggtgacgccgcaagtcagagccccccagagagtagtgctgctcctcccctgccatccctgcgtcccgtgactgccttcactctcgaagcaacagtcgacacaccaacactggctactgccaagccgccatatgtttgtgatatcacagtccccgatgcctatctgatcacaactgtgctggccagaagagctgtgcaggagtacatcattacagcaatcaaagaagtactgaggattcacttcaaccgtgcagtggaactgaaggtttacgaactatttactgacttcacttttctggtaacatccggtcctttcgtttacacggcaatatccgtcataaatgtgcttataaacagtaagcttgtccgtgaccagactcctttaatcctgtctgtgaaaccttctttccttgtgccagagtccaggttccaagttcaaacagtacttcagtttgtgcctccgagtgtggatactggcttctgcaacttcacccagcgcattgagaaaggcctaatgacagctctctttgaagtgagaaaacaccaccagggaacgtataacctcacggtgcagatcttgaatatcaccatcagttcctcaagggtgactcctcggcggggcccggtgaatatcatctttgcggttaaaagcacacagggatttttgaatgggtcggaagtgagcgagctgctcagaaacttgagtgtggtggagttcagtttctatctgggatacccagtgctgcagatcgcagagcccttccagtatccacagctcaacttatctcagttgctgaagtcctcttgggtcagaacagttctcctgggcgtcatggagaagcaactccagaatgaagtgtttcaagccgagatggaacgcaagctggcccagctgctcagcgaggtttccaccagaaggcggatgtggagaagggccactgtagctgcagggaacagtgtggtgcaggtggtaaatgtgtcgaggctggagggagatgacaatccggtacagctcatctactttgtggaggatcaagatggagaaagactcagtgcagtcaagtcttcggacctgattaacaaaatggacctccagagagcagccatcatcttgggttaccgaattcaaggtgtcattgcccagcctgtcgacagggtgaagaggccgtctccggaatcccagagcaacaacttgtgggtcattgttggcgtggtcatcccagtgctggtggtgatggtgattgttgtcatcctctactggaaactatgccgcacagacaagctagactttcagcctgacactgtggccaacattcagcagcgtcagaagctgcagatccctagtgtgaagggcttcgattttgctaagcagcatctgggtcagcacaataaagacgacatattgattattcatgagccagcgccactgccaggacctctgaaggaccacaccacgccctcggaaaatggagacgtgccaagccccaagtcaaagatcccttccaagaatgttcgtcacagaggaagagtttctccctcagatgctgactctacggtcagtgaagagtccagcgagagggacgcaggagataagacgccgggagccgtcaacgatggcaggtcccacagagctccgcagagcgggccaccactgcccagttcgggaaatgagcagcactcatcagcctccatcttcgagcacgtggacaggatctcccgccccccggaggctagccggcgggtccccagtaagatccagcttatcgccatgcagccgatcccggcacctcccgtccagcgcccctccccagccgaccgagtggcggaaagcaataaaatcaacaaagagattcagaccgcgctgcggcacaagtctgagatcgagcaccatcgcaacaagatccgcctgcgcgccaagcgccgcgggcactacgagttcccggtggtagacgacctgtcctcgggcgacactaaggagcgacaccgggtgtaccgcagggcacagatgcagatcgacaagatcctggaccccacggccagcgtgccctccgtgttcatagagcccaggaagagctcacggataaaacgttctcccaagcctcgccggaaacaccaggtcaacggctgtcctgccgacgctgagaaggaccggctcatcaccacagacagcgatggcacctacaggaggccccccggcgtccacaactcagcctacatcggatgcccatcggatcctgacctcccagccgatgtgcagacaccatcctcggtggaactggggaggtatccagcccttcccttcccggcctcccagtacatcccaccccagccgtccatcgaggaggcacgccagaccatgcactccctcctggacgacgcctttgccctcgtggcccccagcagccagcctgccagcaccgcaggtgtaggccccggagtcccacccggcctgcccgcaaacagcaccccttcccaggaagagaggcgagccacccagtgggggtccttctacagcccagcccagacggccaacaatccctgcagtagatacgaagactatggaatgactcccccgacgggtccattgccaagaccaggttttggccccggtttgctgcagtctacagagctggtgccccctgaccctcagcagccacaggcctccgccgaagccccatttgctgccagagggatctactcggaggagatgccgtcggtggcccggcctcggcctgtcgggggtaccacaggctcccagatccagcacctgacacaggtggggattgccagcagaattggagctcagccagtggaaatcccgccaagcagaggcagccagtatggggggccaggctggccttcgtacggggaggacgaagcggggcgaagagaggccgtgccaaggacttcaggcagggagccctcagctccttccgggaacctcccccaccggggactgcagggccctgggctgggttaccccaccagctccacggaagacctccagcctggccactcctcggcctctctcatcaaagcaatccgcgaggagctcctccggctctcccagaaacagagcaccgtgcagaacttccacagctgatcggcctcgcctcgcagatttgccaagtatccgcttcctgtggaagcaagaccaaaaggaaatcaactgagtgggtgtttggaagaggaaggagcaactctcgggcagcctgcccaagggagggagcaagttgcaatttagaagatgccatacgtcgtgtgacagctcatgagcctttcactgggctggcaattgtctgaacacttgggttcagttgaaatatatgtattttggccaaaagccagcagcacttcacaaaaacaaaacacaaacctaagctaacaaaatgactgcattcgtctcttttttaaaggtagagattaaactgtatagacagcatagggatgaaaggaaccaagcgtttctgtgggattgagactggtacgtgtacgatgaacctgctgctttgttttctgagaagaggtttgaagacattttattaacagcttaatttttctcttttactccataggaacttattttaatagtaacattaacaacaagaatactaagactgtttgggaattttaaaaagctactagtgagaaaccaaatgataggttgtagagcctgatgactccaaacaaagccatcacccgcattcttcctccttcttctggtgctacagctccaagggcccttcaccttcatgtctgaaatggaactttggctttttcagtggaagaatatgttgaaggtttcattttgttctagaaaaaaaaaatccctcccaaagtggggcaaaaagctttatatttatttgattatccaaaatacagatcaaagtttagatctacattcttcattgtatttgctgtttcttaattgggcacacacaactcctggtcatgtcccagttcagcaccgatcgctaaggccgatcctgtagaatgcggctttcaagaggtcctaactgatcctttcttccactttgctgttgatttgttcacaaattatgtctgaatgagaaatcttctgtaagcagaagttatttaataattcccagcaccacgaaattgttatacatacatccctaccagtcacattccctgtgttcagagcctggaaatgaaattgagttcagttcagcctctctgtaatgaatcaagaaatgtaaaagagctttgagaccccaagggaaaggagagagttgcttctcatttctgattttattgtgctgttactctgtcgagtggctattaaaattgtcttatgctctttgggctaagaggggatcatctcgcttaagatgtactcctgatgtaaacatttcccccactttccaaataatggtaaagaaaacagtggcaagggctgttctgttttctggtacctgagtgaaactcagaagaaaagcaggcttagctaagagattttcactattaacctgtttttattagatcagcgaagacagtcatgcatcgcttaatgatggggatgcattctgagaaatgtgtcattaggctgttttgttgctgtgccaacatcctagattgtacttacacaacctacatggtatagcctactacacacctgggctgtgtggcatggcctattcctcttaggctacaaacctgtacagcatgttactgtactgaacacaatggtaagtatttgtgtatctaaacatagctaaacatagaaaaggtatggtaaaaatacaattttataatcttatgggactaccatcaatatgtagaccgtcattgaccaaaacatcctgatgtgtgcatgactgtacttttcattaaataacagataaggggctatagaatttggggctctgactgatcaaaacctgtgtatctgtgtcaagttttaagacccctgaaacagctaaaacaggtttccaaagtgtaatcactggatttcaaaaccatgttttagcccttcattaatgaagcctgttgtacagatttagagtcttacaatatgagggaagttggttctgggaaggtaagatgtagccagttttcatctgggcacctctgaaagagaaggagtgcaggagagtaagtctctcaaggacgttcaacaaaggaccagcagcatcttatcaggcgatcctcagaggctccaaggagcattggagagaatgcccctttctgggcttgatgtcttggttttggtttaataccaaatttctcttggtcttggtttaatacccgactcctcccaaattgaacgattatctttgtatgtcactcaaaaataccaggtttcctgaatatgttattaagaatttcagatatccaagcagaattttattatggacaccttgtaatgaattcaaatcgtgtgacagcaaacgggataaatggccccttctcacccagttccgctcagggccatacaggcttgcacatagagtgtgctaaaaatggtaacctcctttgagcattgcagaaagagggttctgtttcaaattgggctgaccgtaaaagcaattttgatgtctttcaaactaccataaagggattttaactgtatttttattcttagaaacaatacacctttaaacagatgtcaagaccaaagatgatgtataataaacagccggtggttatggtgtggtgtgagcaggcccccggatcaccagccctctgctggtggtcataaagcacacacagtttgtacttgcttcctctcgacgcctgccacaacagttttgccagtcaccaaactcagaaaaaactagctgtgtgagcagcaccgtaccctagcggtcttcagacattaagttcacgtcatccactgaaaggaagggtccttgcgttgacagcgtgtggctttggagtccgtttatggaagcactctacaatgaacagttgaattttatgtctattcttttttcctattttaaaagttctagtggtaacacaaactgtaaatttgagtcagaatgtttggagaaatgttgtttttttttttttcagagactactttgtcactcactgaccatgtctggttccttctctgaacttcattctccccataagccaaacaagaacagacctcccccgccacctcccaggcaccgtagttgtgagaatcagatgtgatcatgtgtgcagatgtcctgtgaggagggagcataaagcactgtgaaaatgtagcatgctgtctatgtggacgccctaggatgagtgatgtgaaacgctgcactactgcggtgaatgggttcacacatgggtaatgagcaaaaccgaaagctcggtgtgactcagtttcctcactcccattttgctttaatttcacttccttcaccaattttccgattgcatttattaagcatctttctgctcccgactttctggtgtctctggcaccaaataacccagcagacatgagccttgccttctgagattttagaatctaagatagcacgagtgggtatagaagatggaagataccgataaataacatggtttaagtgtcaataaaattcattcgaagagatcaggcgcggtggctcacgcctgtaatcccagcattttgggaggctgaggcaggtggatcacttgagatcaagagcttaaaaccagcccaggcaacatggcaaaaccccgtctctacaaaaaaatacaaaaactagctgggtgtggtggcgcatgcctgtagtcccagctgaggcacgataattgcttgaacccggggggtggaggttgcagtgagctgagattgcaccactgtactccaacctgggcgacagagcaagactgtgtctcaaaaagaaaaaaatttgttcaaaagacataaatgaattaggcacccagaagaagttgcatgtttggaaatgcaatatcttggggagacgtcaacttctgaagtgactttgaaggcagggcagctacccaggcaaatggcgtggaaggaagagctgagagtgggcctgggaaaggctgtagggaaggagtgaagctgtcactgaaatgaacttgatcttgatctgctttgatatggggacagaatccccgactgcactattgagggagtttcagaagagaaggaagaggtgctggaaggatgcttttgcagtcatgcagcaaggaaacgaccagggctgtgaagatctacagaggaagtactccagtgtgggggaggcaagggaagaggacgaaaatgatgagaatgacactgaggtcattgtttagagcagatctcaagcagccgtttggccacgccatatcctttgtggagcatagtgggttatctatctgtctgtctgtctatgtatctgtctatctatctatatatatattcagcttctttactgctacctacacatttttctccaaattttattaatttcatagtgttttgatttgggtggcagatgacttttaagcagtgggtgtttgccggccagatctttcctggcatgcggactgtgaggcaaagcacgggtgaaggtaggcgctaaaggctttgggctaaagccagcacgcggttctgtgctataggagtctcccgtttcccgtggacaggttcagcgttccttctttcgcacaacttttttctaagtgttccagtgaccaagccagtcattcggacactgatttgcagtgcattggcagtaattcacaaattagttgttatataagtctctctcatccctttcacactagattctcagacatgaatgaatttgtcgtttggaaggaaagctgggtaacgttttgggcacaggggaaggaggactccggtcttaactcccacgctaactttagctcaagtggagttttcaccgtggtcatttctacctccggagcaaggtgccagcgccagtactagagcctgcttatccacatttgccctggacaggagcaggaggaagtccacttctgtaccggcagacagagcatgtgaacacaaaacacatttctatggcatagtcaactgaacttcatttttacatttaatctaacatgttaacacgttctaacagggtttctatgagcagctgctgtaacatactcatcaactatgatagacttaacacttgttacctaatgaacaaggaggatgtgcatttcgggtttcttttgatattcgtggaggtgattgtcagtgtttaaacaggactactttctccactatgaagatgacttggaaatcgcaacatcatggtacattgctaagtccatgcttgtgtgtgtgacagtaggcttgataatttatcttaaaacacagcagcattgaaatttaggaaaagaatattaaatgcctttggaaacatgaaacaaagttaggagccagtaagaaagtgacagaagcaatgaatgtcttaatgcagtatagttaaaatggcttcccacagggtagataattatccaggatccttccttttccttcttcctccaggtttttcaggggtcacttcacatttctaaagaaagagtgaataggctgggcatggtggctcaagcctctaatctcaacgctttgggaggctgaggcaggaggatcgcttgaggccaggagtttgagaccaccttgggcaacataacgagaccccgtctctacaaaaaaaatttaaaaattagctgagcatggtggcatgtgccagtagtcccagctactcgaaaggctaagactggaggatcgcttgagccaatgagttggaggctgcagtgagctataatcacgccactgcactccagcctgggctgcagggtgaggtcctgtctctggaaaaaaaaaaaaaaaaaaaaggaataggtaaaagggacagaggtgaaattttgagtgacttgagtctcttgcagtccctgattacacagaacctttctgggctacttggagcatcacgaatagtctttcctgtacttaccagatttcaagtattcataacttgactccctaagtgtacaagttgggaatagtacagggccaagttcaagtcgcatatgctgtactgttcctcctgcaaatgtggggaaagaagagggagatactagaggaactgaggctccacccattcattcagttgctctaagcaccagaggacttgtttcagaaaaggggagtgggaacgccctcgactttgccctcctccggagcatctctgggacgcagggagtctggctagcgttaataggaaaggttgctcggcagagctgccctggagtactgacttgtctctccctcctttgtcaaggtccatgtttttctggctcttcctgcacactcatccctagattatgagcgttaatgtacgaaatgtgcagagcaaattgaggccaactgtggcatcaatactgcaacttaaacttgacaatcatggtttgctggtcctcaaacaggcactgaaatctcagtatgggtatacgatttaataatcggcccctcccttctatttgtcggttttatgtttctatccttcaatagctgcactgttttctaatgtgctgtagagtttttgaaataatttatgcaagtatttggtttccatgtttacaatttatacagctttcctagcattttaaatggaaatgtcaataaatgctatgaattggtgtcaaa

SEQ ID NO: 24180 - DNA, 7351 bp, Homo sapiens
  source 1..7351: mol_type = unassigned DNA
gcagcagccgagtctgacggcgccggttcgctgcccggtccgcccgcgatgccgtagggccaggtgagctgctgtgaaggactcattcttggtagccggcagttactggcaacttgtgagcttggtgggctcctactaacgcacctgggacaccaggctgctgggctcccctctaggcagcctcccctccaggcagcctcaccagcagctcccctgagccatggagaccccagaggtccccgtgggctcgctaatcgactttgggcctgaggcacccacctcttctcccctggaggcaccaccccctgtgctgcaggacggcgatggctccctgggggacggtgcatcagagagtgagaccactgagtctgcggacagtgagaatgacatgggcgagtcgccctcgcacccgtcctgggaccaagaccgccgttcctcctccaacgagtccttctcctccaaccagagcaccgagtctacccaggatgaagagaccctggcactcagggacttcatgcgtggctacgtggagaagatcttctctggaggggaggacttggatcaggaggagaaagccaagtttggagagtactgcagcagtgaaaatggaaaaggccgggagtggtttgctcgatacgtgagtgcccagcgctgcaactccaagtgtgtctcagaggcaaccttctaccgcctggtgcagtcttttgcagtggtgctgttcgagtgtcatcagatggatgactttgggcctgccaagaacctcatgaccatgtgcttcacctactaccacatcggaaaaccacagctgctgcccccggagtcccgggagaagcccgcgggcagcatcgactcctacctgaaatccgcaaacagctggctggccgaaaagaaggacatcgccgagcggctgctgaagaacacctcggccaggactgagaatgtcaagggcttcttcggggggctggagaccaagctgaaggggcccctggccaggaggaacgaggaagacgagaacaaaccccaggagaagcggcccagggctgtgaccgcgtacagccccgaggacgaaaagaagggggagaagatctacctgtacacgcacctgaagcaacagcccatctggcacactctgaggttctggaatgcagccttttttgacgctgtccattgtgagaggacaaagcgatctcccactaccagaggggatgctggagaggaggaggagaagagggagaagtggtgccacatgacccaggaggagcgcgacgacagcctccggttcaacgagaacatcaccttcgggcagctgggcacattcacgcacaacatgctggcctttggactgaacaagaagctgtgcaatgacttcctgaagaagcaggctgtgattggcaacctggatgaagagcaatacaagctgcttagtgaccacattgagcaaatggccactgagtaggccccagaggtcgcactccgcaggaggactgaggccatgtgccattctcccgggcccagcgcccggccgtcaccccacccgatgacctgcatgaagccagcagcacccagagccactcctgctgccctagaactagcggttagaagaatccgctgttcctccctcatctcctctgcctgtgtctgcgacccccatccatgtgccaaagtgtcccttgggtcacacagctaaagccgaggtgaccagttgtaccccgagtgccaggcttgtgagatgagaccaagagggaggaggggaaggactccatgggccatcgtgggccaagggctggcgagggtgggggcgggcaagggatgcaggcaggacagccatgaggtggggctgcagccggcacacccagtggtggagggccggcgctgccactcacggtgggtggccgtgggccaccttccctgcaatgggtgcacacgcggctcccatccagccctctcagcgtggggctgtggctggtcctcactattccccagtctcccgctgtggggcaggaacaggaagtgacgggaaccttgaggaggaaacgcctgtgttagggagagagtgggtgcggtgtagaggatgctcttggccggctggagcaagacctggctcccaccagagggacgtgtgtgtgcctgcagacggcccgggagctgtgtgtctccgccagagtcacagcagtgccgaggtgtccgcggcagaccacacagaccgtctgaaatgcgcccgcctggcggacagctcccttctgaagcagagaagcctccatggtcacgaagcagcgttgtgctgtgtgtccctcgcaagaagcacaggaaagagaagtttctttagtagccactagacaaccaccctttctgaaagcaaacagtgctgctctttattccagacaaggcaggaaagtctgagttgggagtgacagtggctggagagaagcagatctgtgcaacgtgcagggcaagccagtggcgtggcctctgcctctaagcgctgagcattgggccccttccccaccagacctttgtagctcctccagcctctgcagagactcccttcacctcgcacttactgcctgggaaccacggcccttctcttctgtgggtctgtaccaggtactccaggccagcccatgggcccggggcctgaccccaacacctgcatgctgggtccagagccttctgtttcaccgtgcgtggacactgctaggccgcctggggtcccctgcctcctgcctgtcgctgccgtggtccctgactgcgaaataggcccgcggggctctccctcctcctgccatcctcccctcccgcccttcctggctacctcctctgacatgcggtcagataagtcccgtcttgtttgtgagtaccacagaaacgcctgagagtcacttacccggccactgcttggaaggtttccctccggggaatgcctccctggaatgttccagagacggaacattctctagagacaacagtctgtgctgcagattggttggatcacagaatgtgtgtctggggcattatctgaaacgtggtgtcatctgatgcatttggaccatatgctgccagactgcagaacgggggagccggggctcagggcccctgactgcatggtgcatgagtgatctcagcctagcgatgccgctggccagaccgtgaccatgctgccagtgtgctcgccatgagctgggtcagggctggggagttgtgcaggctggggtgacccttcccccatcattgggccccaacgggcatgtctccaccgaatccatttagagaaatgtcagagcgagggttgtgtggacacccctcgctctgatgccaactgcagataatacacacctcctgcagcgtccagccacggctccagggcactgctctcctccttgcaccggtgaaactcaggccacactcaagggctgactgtccaggcgctcccttcagccgcctcgtcgtcagcgttcttagtcatgcattattcgtgttagctgaaatgcattcagactttgttctgcggtgcccacaggacttacccctgtatgtacaggatttttgtatgaaagttttgtttgattctgagactctcttgggaacgctggagagcttgtgcacagcctctggaaggaaaggcagcgctgacttcgttgggcttttttccaagcactttaacttcagaaatggtcttgacacttttttctccacatagactcttgaaatagccatttcaggggaggaaagggttggggttttctttgtttgtttgtttgtttccccctttactacctgttcttgtagatctagctcctcagagttggaggaaggctgacagagaaggtctcctctgtgctccatccacacaggatgccggagagacagccccttgtgctgtgagcagagcaggcagtggctctggaggctgcctgtggtctccttccggctgtggctgacagtggctctggccagggttgcttggagaaggctcagtgtgcctgggacagggcttaccacctgccaccaaggtttcctctcttcccccaggacctgggcagagcaggcatgagctgggctgtggtgcagagcaagcagacccagccacactgctcaaaggtccctgcgtggggaggtgtcacaccaggggcacacccagggccacctgggtgtaggagagctctggtggcccctccgtaaactcaggaagtgtcaggtgatttcctagggagaggttcccagtcccagcaggcagaatgcccaaaaccaggagcacgaaggcctgtcatccatggggccattgcaggcactctgccgcccgaccttgagggctgtgccaatcctagtgaaccaaaatgcaaacaactcacacaagtgaaaagctccctgctttgaaaacaggacatgttgacaggcagcatggtatgtttttagcctttgttacagttttagcaacattgatgtctaagaggggccgtggtaatagattgcatctgccctgtgcatgcgcatgtttaaccacaggccagagaactcaattctgatgtcgtaagttctctgtaagtgaaatggggtagactgtatgattttcctattgccaaaagaaagaaagggggccaaacagctctgaaatttccaaaaaatggctagagggagagtccagtttctgagctctgtacccaaattaaaatcctgatgttcaggttaatccaagcaacacgcattgggtttaaaaccagcaccgaggcccagtgggggaatcacagacatcaccaagtctcgtcttctttccttcctgtgagttgaaaccaaacaggcctctcgctcactcctcccagcccagtaatgctgaggagttcagttgtgaggaaagaaggctggagctgtgagattcgcttttccctaggctgttccgcgtgggttaccttatcaccctggagcacttggtattccagacccctgacatgaggaatgcaggttcacactgtaaagagtttgtgaaaggtttcagtctaactggggttccttagctggaagccagggctggaagctacaggcctgaccttcctgggtcccactatctgttggcattttttttttttttttttttttagacggagttttgctcttgttgcccaggctggagtgcagtgacacaatctctactcactgcaacctccacctcccgggttcaagcaattctcctgcctcagcctcctgagtagctgggatgacaggtgcacgccaccacgcccggctaatttttatatttttggtagagatggggtttcaccatgctggccaggctggtctcgaactcctgacctcaggtgatcccccccacctcagcctcccaaagtgctgggattacaggcgtgaggcatcacacctgcctctgttggctttttagttaggaaggatccagctaggcccgtgtggttagatcagctttgttactgaattacctaaaaccagaccacagcacagccagggagcccagtagtgtttccaagaacagtgtggagcttgagaaagagaactttaaaaattagagggtccctttctgcagaggaagggatgctcgcagggtggcagtggcccagccccagcctcagggacggggagggagagccccctctgggcccagcaggcaggtgttctgaggctggtccctcctcagtttccgcagccacaaggcgaaacggccagattctcactcaaggtcgttctcactccttttcctgtcccgtttccagtcccactgagccattcacttctgctgaaccatttttcttaggatgcagccgtctcactcccttgtcctgtaaatcgtgtattcatgttgatgattcttggagataggtttcactttttcccagctgcgtccacaggaaaggggagtcggatgccagctgcaccccgcctggctcgcacaggctaagaccacagacagagcagggcttcccggagccacacaggccacgcaccccaggaacccttgctgccgcgggccaggaacaggaatgtgttggtgcctgagacaccaaatggaagaagcacatcaagactgttctcctgcggccaacactggcccggaagccgccctccatacaggccctcagggggcctgccttctgcgcctcagtcccccgtgcatccctgggcctgggtatcacatgctctccaggaaagggacggaatcaatcctgtgaccgatgggctcgcaaggatgggtgccgccgtgggagccctgcctctggtgctggcaagggattgggtttgtgtgggtgtctctagcctgcagagtgcagtgagtgagagtccttgggagcgcggcgctgcctgtagctgtgcctggggatgcacgtggccacgggatttcagtgggacagcgctcccacaggggctgggggtgggggtggggtttcttagttactgttggaaagggaaaaattcaccatatccaaggggagagacgatgggctgggtttgtttactccaacttcccttctacacccctcctgcaggacagtacgatttggggagaacccagctccccactttatctgcagactctgggacctgacaaaacagtcagagcctgagtgcactgcagcctgaactcccttgagcagcgctataagggactttgcactttaaaaaggggatgcctgtcagtaaatcccctgtgcattgactagaactggggggctgcgcccgctccctccttaatcctagatgatttgctcatgaaatagaggtgggggacgaccgcatgcactctgggaggtgcagccctaaggggtggactccagatctccctgcaagagacagcttggcttggctttggctgttggggaggagtccctgccatcccggtgagcctggggctgttgcttagggtcttctgggtggacacgtggagaaagagaaggcaaacgttggaacactaggaaaagctagaaattcagacaacacacatggatccccttaaaacatgtaaatgtgtcagaacacggttgacctgccgccttcttgaacctggtggcccccgttggaactatcagtggcgtctcccatgcacacgccctctgctttctctttcctagactcgcggtgctcacatccagacattaccttgttggtagcccccaagtggcgtgcagtgacaccagtatcttctctgttgcatttttgcaatcttgtgtcccgctcggtgatgttctacaaactctgttttaaggttgagaaagtttcaagggtgaagatctcaaaacagtgctaaaatcaaaggtgtttgctgtgaagaaaaacatgtgtatatattgcaccttgagttgtcagaaggtagaaactgaaataaactaacttt

SEQ ID NO: 24181 - DNA, 15896 bp, Homo sapiens
  source 1..15896: mol_type = unassigned DNA
agtgccgcccggcctcggttgggacccctcccctcctcctccgcccccttgggtgtcggtggctgcggccagggtctggacctgggcggcggccccgggcggcggggctaaagggtgtgggcaccggcagagcttcgcaggctgcatccggctcggtgctgctgccgtcgccgcccctgccgccgcccaaggccctcggcgttccccggagagaggccagagggatttcgggctgcctcggcactcgcccaggtttgttaagatgaaacactgcagaaaggctatctgaagaaaagtagaaggaaaaacagaacgttgcaaactctggaaaaaaacttgggcctttagatgttgttctggaaaaactttagtaatggatcaaaggaagaatgagagtattgttcctagtataactcaattagaagattttcttacagaacacaattccaatgttgtttggctccttgttgctaccattttgtcctgtggatggattatttacctcacatattataattcccggaatgttggtcttattttaacactagttcttaacagattatacaagcatggctatatccatattggttccttctctttctctgttctttctggaaaagtcatggttcgtgaaatctattacattacagaagacatgtctattaggattcaagatggattcatcatttttcggtggtggaaaatgtataacccaaaacagaagcaacatgatccaaaggcagaaaccaggttatacatcacagtcaatgactttgaatttcatgtctataatcgctcggatctttatggacgccttcaagagttgtttggtttggagccaacaataattccacctaagaaagatgatgataaaacacgggaaattggaagaacaagaacccaatcgaaaattgaaagagttaaagtaaaaacagaatcccaagaccccacatcttcatggagatcacttattccagtcataaaggtcaatgtgagcacaggacgtttggcctttggaaatcactaccagccgcaaactctgtgcatcaactttgatgatgctttcttaacttatactacaaaaccaccttcaagtcatcttgaccaattcatgcatattgtgaaaggaaagcttgaaaatgttcgagtcatgcttgttcctagtccaagatatgttggtcttcaaaatgatgaaccaccgagattaatgggagaaggttttgtggtgatgcagtcaaatgatgttgacatctactactacatggatgagccaggacttgttccggaagaaacagaagaaaatattgaaggagaaatgagcagtgaggattgcaaattacaagacttgcctccatgttggggactggatatagtttgtggtaaaggaacagattttaattatggaccatgggccgataggcagagagattgtttgtggaagtttttctttccacctgactatcaagttctgaaagtttctgaaattgcacagcctgggagaccaagacagatccttgcttttgaattacgaatgaatattattgcagatgctacaattgatttgctgtttaccaaaaatagggaaacaaatgctgtacatgtaaatgtaggagctggctcatatttagaaattaatattccaatgacagttgaagaaaatggttacactcctgctattaagggacaactcttacatgtggatgccactaccagcatgcaatatcggacccttttagaagcagaaatgttagcattccacatcaatgccagctacccccgaatatggaacatgccgcagacatggcagtgtgaattagaggtttataaagccacttaccacttcatctttgcacagaaaaacttctttacagatttaattcaagactggtctagtgacagtcctccagacattttttcatttgttccatatacgtggaattttaaaatcatgtttcatcagtttgaaatgatttgggctgctaatcaacacaattggatcgactgttctactaaacaacaggaaaatgtgtatctggcagcctgtggagaaacactaaacattgatttttctttgccttttacggactttgttccagctacatgtaataccaagttctctttaagaggagaagatgttgatcttcatttgtttctaccagactgccaccctagtaaatattctttatttatgctggtaaaaaattgccatccaaataagatgattcatgatactggtattcctgctgagtgtcaaagtggccagaaaacagttaaaccaaaatggcgcaacgttactcaggaaaagtctggttgggttgaatgctggactgtcccaagtgtcatgcttacaattgattatacatggcatccaatttatccacaaaaagcagatgaacagctgaaacaatcattatcagaaatggaagagacaatgctatctgtattaaggccatcccagaagacatcagacagagttgtttcttctccctctacttcttcacgcccacctattgatccctcagaacttccacctgataaacttcatgtagaaatggaactttctccagattctcagataactctctatggacctctactaaatgcctttttgtgtataaaggaaaactactttggggaagatgacatgtatatggattttgaagaggttatctcaagtcctgttttgtcactgtcaacatcatccagctctgggtggactgctgttggaatggaaaatgacaaaaaggaaaatgaaggttcagccaagtcaattcatccacttgccttgcgtccttgggatattactgtacttgttaatttgtacaaagttcatgggcgtcttcctgttcatggaactactgatggtcctgaatgccctacagctttcttggaaagactatgttttgaaatgaaaaaaggatttagggagaccatgctgcaacttatcctgtcacccctgaatgtgtttgtcagtgataactatcagcagcgaccccctgtggatgaagtactcagggaaggtcacatcaatttgtcaggtctccagctgagagcacacgctatgttctcagcagaaggtcttcctttgggaagcgattccttagaatacgcatggttaattgatgtgcaggctggaagtcttacagctaaggtcacagcaccacagctggcatgcctcttggagtggggacagacatttgtttttcatgtggtatgtcgggagtatgaactggaaagaccgaaatcagttataatatgtcagcatggaattgatcgtcggttctgtgaatccaagttgagttgtattcctgggccttgtccaacttcagatgatttgaaatatactatgattcgtttagcagtagatggagccgatatttacattgttgagcatggttgtgctacaaatataaagatgggtgcaattcgagttgcaaactgtaatctccacaatcaatcggttggggaaggaatcagtgctgcaattcaggattttcaagtgagacagtacattgagcaattaaataattgcagaattggacttcagcctgcagtgctacggagggcctattggcttgaagctgggtcagccaatttaggacttattactgttgatattgctttagctgctgaccatcattctaaacatgaggcacaaagacatttcttagaaactcatgatgccagaactaagaggttgtggtttttatggccagatgatatcctgaagaataagaggtgtagaaacaaatgtggttgtctcggtggctgcagattctttggtggcacagtaactggcctagatttcttcaaacttgaagagttgacaccttccagtagctctgcattttcaagcacaagtgcagagtctgatatgtattatggacagtctctgctacagcctggagaatggataattactaaagaaattcccaaaattatagatggtaatgtgaatggcatgaagaggaaagaatgggaaaacaaatcagtgggaatagaagtagagagaaaaactcagcaccttagtcttcaagtaccattacgatctcatagttcatcctcttcctcagaagagaacagtagttctagtgctgcacagcctttgttggctggtgaaaaggaaagtccttcatctgttgctgatgaccatttggttcaaaaagagttcttgcatgggacaaaaagagatgatggccaagcaagtatccctacagaaatttcaggaaacagccctgtgtctcctaatactcaggataagtcagtaggtcaatctcctcttagatctcccttgaaacgacaagcctctgtctgttccacccgtcttggaagtactaagagtcttactgctgctttctatggggacaagcagcctgtaacagttggagtccagtttagtagtgatgtctctcgaagtgatgagaatgtactagactcaccaaagcagaggagaagttttggttcattcccatatacaccatcagcagactctaattcatttcatcagtatcgatcaatggattccagcatgtcaatggctgatagtgaagcctacttttctgctgctgaggaatttgagcccattagcagtgatgaaggccctggaacttatccgggtagaaaaaagaagaaaaagcaaacccagcagattgactacagtaggggttccatatatcacagtgtagaagggccacttactggacatggagaaagcattcaggattccagaactctgccattcaaaactcatccttctcaggcttcatttgtttctgcgttaggtggagaagatgatgttatagaacatctatatattgtagaaggtgagaaaacagtggagagtgaacagattactccgcaacaacccgtgatgaattgttatcagacttaccttactcagttccaggtaattaattggtcagttaagcacccaaccaacaaaagaacctctaaatcctcattgcatcgtccccttgatctggatacaccaaccagtgaagaaagttcatcgtcatttgaacagctttctgttccaacttttaaggttatcaagcaggggctcacagctaattctttgctagacagaggcatgcaactttcaggatcaacttcaaatacgccgtatactccattggaaaaaaaactcgctgataacacagatgatgaaacattaacagaagagtggaccctggatcaaccagtgtcccagaccaggacaacagccatagttgaagtaaaaggaactgttgatattgttttgactcccctggtggctgaagctttagacagatatattgaagcaatggttcattgtgctagtacccgacatccagctgcaattgtagatgatcttcatgctaaagtcctcagggaagctgtccaaaatagcaagactaccttttcagaaaatttatcttccaaacaagacattagaggaacaaaaactgagcagtctacaataggaacgactaaccaaggacaagcacagacaaatcttacaatgaagcaagataatgtaacaattaaaggtcttcagactaatgttagcataccaaaggtaaacttatgtttgttacaagcctcagtggaagaatctccaactacggctcctagtaggagtgtgactcatgtttccctagtggcattgtgttttgacagaattgctacacaggttcgcatgaacagaggtgtggttgaagagacttcaaacaatgcagaacctggtagaacatcaaattttgataggtatgttcatgccacaaagatgcagcctcagtcatctggatctctcagatcaaatgctggagcagaaaaaggcaaagaaattgcagctaagttaaacattcatcgagttcatgggcaacttaggggtcttgatacaacagacattgggacctgtgcaatcactgctattccttttgagaagtccaaagttttatttactcttgaagagttggatgaatttacttttgtggatgaaactgatcagcaagctgttccagatgtaactcgaataggtcccagccaagaaaaatggggatggataatgtttgaatgtggacttgaaaatttaaccataaaaggaggaagacagtctggtgctgttttatataacagttttggaattatgggtaaagctagtgacacagaaaggggtggagtgctgacatccaataattcttctgattctccaaccggcagtggctataatactgatgtctctgatgataatcttccatgtgaccggacaagcccttcctcagacttaaatggaaattctgtttcagatgaacaggatgaaggagtcgaatctgatgatttgaaaaaagatctacctctgatgcctcctcctccagattcatgtagcatgaagttgaccattaaagaaatttggtttagttttgcagctcccaccaatgtgagatctcacacacatgcattttctaggcagctgaaccttttaagcactgcaacaccagctgttggtgcatggcttgttcccattgaccaactcaagtcatctttaaacaaattggaaactgagggaaccttgagaatttgtgctgttatgggatgcataatgacagaagcattagagaataaaagtgtacattttcccctaagaagtaaatacaacaggcttacaaaagttgctcgctttctccaagaaaatccttcatgtttactatgtaatatactacaccactatctgcaccaggcaaattactccatcattgatgatgctacaatgagcgatggacttcctgctttggtaactttgaagaaaggtttagttgcactggcaaggcagtggatgaagtttattgtggtgacaccagcctttaaaggagttagcttacatagaccagctcagcctctgaaacctcaaatagctatggaccatgaacatgaagatggacttggattggacaatgggggtggtcttcaaagtgataccagtgctgatggagcagaatttgagttcgatgcagccacagtcagtgaacacacaatgctattagaaggaacagctaaccggcctccacctggtagctctggacctgtaactggagctgagataatgaggaaactttctaaaactcatacccatagtgactctgcattaaaaataaagggcattcacccatatcattctctgagctataccagtggagacactgccactgattctccagtgcatgttggacgtgctgggatgccagtaaaggacagtccaaggaaggagagcctactcagctacctgactggaagcttcccaagcctgcacaacctcctggaaggtactcctcagagaagcagtgctgctgtgaaaagtagctccctaacgagaacaggaaatacagtagccactgatatgttatctgaacatcccttgctatctgagccatcatctgtgagtttctataattggatgtcaaatgctgtgggtaatcgaggaagtgtgttacaagaatctcctgttacaaaatcaggacacaatagtcttcccacaggtgttgcacccaatcttccaacaataccctcagcctcagatttcaacactgtcttgtctagtgaccaaaatactttggatgggacacattctcagcatagcaccagtcaggatgatgtggcaggtgtagaagaagcaaaccaagggtttcctgctgttcagcttgctgatgcacaggttgttttcaagcctcttctgagtcatacagggatccagtcacaggatacaatgccattctgctaccgaatgtactttggagaacacctttcattttcagggactttggactgcctcagagcagatattgtggattcagacacagccaaagagagaaaaggcaaaagagcaagaaggcaaggccatgtgaatcttcctccacttgagttcaaaccagcattaatgttgggaacctttagcatcagtgctgttgtaatggaaaagtccgtgtgcacccctcagaactctaccagtgccctttcttttcatgatctcagcaagcggtattataacacctttcactgcaactttactatttcctgtcagtcaataagccagcatgtagatatggctttggttcgtcttattcatcagtttagcacaatgatagatgacatcaaagcaactcagactgatattaaacttagcagatatacagccggatctgcttccccaacacctaccttcaaaaccagaaaacatcgggactttcgttcatctgactttagccgcagttctagaggaagtcttaatggtggcaatagagtaaataatgcaaagaacaaacggaccaacaatgagaataacaaaaaggaatctcgaaacaagaattcattaggaagatctgaaagaagaacatcaaaagtgtctaggaaaggttcaaaagatgtggtggatcacatgactattcatatggatgactctgattcaattacagtgtcagaacaaagtgagccttcagctgagtgctggcagaatatgtataaattgcttaacttctattcacttatctccgatccaacaggaatattggaaaagtcttcagaaacatttggaccagcaggagttcggagccctacagagccaacatgtaaagttgtgtttgagaatgaacaagacaacagcagtttgactaagactcagaggaaacgtagcttggtaacttctgaacctcagcatgttactctaatagtgtttgggattggcatggtgaaccgcacacacctagaggcagatattggtggactaacaatggaatcagaactgaagaggatccatggcagttttactcttaaggaaaaaatgaaagatgttttacatcaaaagatgactgagacttgtgctactgctcatattggtggggttaatattgtgctgcttgaagggattacaccaaatatacaactggaggattttcctacatctcctacaagtacagccaaacaagagtttctaactgtagtgaaatgtagtattgccaagtcccaagccctctacagtgcccaaagagggctgaagacaaacaatgctgctgtgttcaaagtaggagctatcagtatcaacattcctcagcaccctgccaccttacatagcatgatggttcgaagttctcaccaactatctaaacaaatctcagacctaatcagacagccttctacagccccacagcctgtaaaagaagatattgcaaccccactaccttctgaaaaaaccccaacaagtgttaatcaaactcctgttgaaacaaatgaatttcctcagctaccagaaggcttagaaaagaagcctattgttcttaaattcagtgccatgttagatggtatagccattggagcagcacttttaccatctctgaaagcagaatacaagatgggaagaatgagaagtcatggaatgacaggtgcacagacaagatttacatttgagctgccaaatcacagattgcgttttacttcaaaagtttctgccacagatatgtcaaccattcctccttctgccagtcttaaccttccccctgttaccatgtcagggaaatatataatggaagaacatgatagttattcggatcaggtgtggagtatagatgaactgccttctaaacaaggttactatttacagggaaattatctgcgttgtgtggcagaagttggttcctttgaacataatcttacaactgatcttctaaaccacttggtatttgtacagaaagtgttcatgaaggaagttaatgaagtaatacaaaaagtttctggtggggagcagcctattcctctctggaacgaacatgatggaacagcagatggagataaacctaaaattctcctctattccctaaacttgcagttcaagggtattcaagtaacggccactactccatcaatgagagctgtaagatttgaaactggattgattgaactggaactttctaaccgacttcaaaccaaagcttcaccaggaagtagcagctatctgaaactgtttggcaaatgccaggtggatttaaatctggcattaggacaaattgtcaaacatcaggtttatgaggaagctggttctgattttcatcaagttgcctattttaaaaccagaattggattaagaaatgccctccgagaagaaatcagtggttcttcagatagggaagctgtgcttattactttgaatagaccaattgtttatgcacagcctgtggcctttgatagagctgtgctgttttggctgaattataaggccgcctatgacaactggaatgaacaacgaatggctttacataaggatattcatatggctacaaaggaagtagtagatatgctacctggtatccagcaaacatcagcccaggcctttgggactctttttctccagctcactgtcaatgatctgggaatttgcctacctatcacaaatactgcacagtctaatcatactggagaccttgacactggttctgctttggtattaaccattgaaagtactctcatcactgcatgctcttcagagtctctggttagcaaagggcatttcaaaaacttttgtatccgttttgctgatggatttgagacatcatgggatgactggaaaccagaaattcatggggatttagtgatgaatgcctgtgtagttccagatggcacctatgaagtatgttcaagaactacaggacaagcagcagctgaaagcagtagtgctggaacctggacactcaacgtattgtggaaaatgtgtgggattgatgttcacatggatcctaacattggcaaaaggcttaatgctctgggcaatactcttacaacactgacaggagaggaagacatagatgacattgctgacttaaattcagtgaacatagctgacctgtcagatgaggatgaagttgatactatgtctcccactatccatactgaagccacagattatcgaagacaggcagcatctgctagccagccgggagaacttagaggaagaaaaattatgaagcgtatagtggatatcagagaactgaatgaacaggccaaagtaatagatgatctgaaaaaattaggtgcaagtgaaggaaccataaaccaggaaattcaacgttaccaacagttagaatctgtggctgtgaatgacattagaagagatgttcgtaaaaaattacggaggtccagtatgcgggctgcttccctaaaggataagtggggtttgagttacaaaccaagttacagccgatcaaaaagcatttctgcttctggaagaccacctcttaagcgaatggaaagggcaagttctcgagtaggagaaactgaagagctcccagaaatccgtgtggatgcagcatctcctggacctagagtaacttttaatatccaggatacatttccagaggagacagaactggaccttttgtcagtaaccattgaaggtccatcccattattcatcaaatagtgaaggatcatgttctgtgttcagttctcccaaaactccaggaggcttttcaccaggcattcctttccaaactgaagagggccgacgggatgacagtttgtcttctaccagtgaagattccgagaaggatgaaaaagatgaagaccatgagagggaaaggttttatatttacaggaaaccctcacatacgtctcgtaaaaaagcaacaggctttgctgctgttcatcagctatttacagaacgctggccaacaacaccagtcaatagaagtcttagtggcacagctacagagagaaatattgactttgaacttgatatacgggttgaaattgatagtggaaaatgtgtactccacccaaccacccttctacaagaacatgatgatataagtttgagaaggagttatgatcgaagttccaggagcttagatcaagattcaccttcaaaaaagaagaagtttcaaactaattatgcttctaccacccatttaatgaccggcaagaaagtgccatcatctctacagacaaagcctagtgacttagaaacaacagtattttacattcccggagttgatgtaaagttgcattacaattccaagacgctaaagactgaatcacctaatgcctccaggggatcttccttgccaagaacactgtccaaagagtccaagctgtatggtatgaaagatagtgcaacatctcctccttctcctcctttaccttccactgtccagagcaagactaacaccttacttcctccccagcccccacctattcctgcagccaaaggaaaaggaagtggaggagtaaaaacagccaagttatatgcctgggtagcacttcagtcattgccagaagaaatggttattagtccctgcctattagactttctggaaaaagctctggaaactatcccaattacaccagttgaaaggaattatacagctgtcagctcacaagatgaagatatgggacattttgaaataccagatcctatggaagaatcaacaacatcactagtgtcgtcttcaacatctgcttactcttccttccctgtagatgttgtggtttatgtacgagttcagccctcacagatcaaatttagctgtttaccagtatcaagagtagaatgcatgttaaagctgccatccctggatttggtgttttcttcaaaccgaggagaactggagactttagggactacatatcctgcagagactttatcccctggaggtaatgctactcagagtggaacaaagacttctgctagcaaaactggaataccaggttcatcgggattaggcagccctcttggccgaagtcgacatagtagtagtcagtcagacctgaccagttccagcagtagttcatctggcttgagcttcactgcatgcatgtctgacttttccctttatgtatttcatccatatggagcagggaaacaaaaaactgctgtttctggcctcacacctggatcaggaggattagggaatgtggatgaggagcccacttcagtcactggtcgaaaagattcactcagtataaaccttgagtttgtaaaagtgagtttgtcacggatcaggcgttcaggaggtgcctcattttttgaaagtcagtctgtaagcaagtctgcaagcaaaatggatactacgttaataaatatatctgctgtttgtgatatagggtctgcctcctttaaatatgatatgcgccgactcagtgaaattctggcatttccaagagcatggtatagaagaagtattgcaagacgtctattccttggagaccaaactataaatttgccaacatctggcccagggacacctgattccattgaaggggtaagccaacacctttcccctgaatcatcaagaaaagcttactgcaagacctgggagcagccaagtcagtcagcctccttcacccacatgcctcagtcacctaatgtgttcaatgagcatatgacaaacagcaccatgtcaccagggacagtaggacagagcctaaaatccccagcttccataagatcaaggagtgtatctgattcttcagttcctcgaagagattcactttcaaaaacatcaactccttttaacaaatcaaacaaagcagcaagccaacaagggaccccatgggaaacacttgtcgtgtttgctatcaacttgaagcaattaaacgttcaaatgaatatgagtaatgtaatgggaaatacaacttggacaactagtggtttgaagagccagggccgtctgtcagtaggaagtaatcgtgatcgagagatcagcatgtctgttggtctgggaagatcacaattagattctaaaggaggagtagttggagggaccatagatgtcaatgctttggagatggttgctcatatttctgaacatccaaatcagcaacccagtcacaaaattcagattactatgggttctactgaagctcgtgttgattacatgggctcaagtatcctcatgggcatcttcagtaatgctgatcttaagcttcaggatgaatggaaagtaaacttgtataatacattggattcaagcataactgataaaagtgagattttcgtccatggagatttgaagtgggatattttccaagtaatgatatcaaggtcaaccacaccagatctgataaaaataggaatgaagctccaggaatttttcacacaacaatttgataccagcaaacgagctctgtctacctggggaccagttccttaccttccgccaaagacaatgactagcaacctagaaaaaagttcacaagaacaattacttgatgcagcacatcatcgacactggcctggagtattgaaggtggtatcaggatgccacatatccttatttcagattccattaccagaagatggaatgcaatttggaggatcaatgagcttacatggaaatcatatgacactggcatgttttcatggtccaaattttcgttcaaaatcttgggccctttttcatttagaagaaccaaatattgctttttggactgaagctcagaaaatctgggaagatggctccagtgatcattctacatatattgtacaaacactagattttcacctgggtcataatactatggttaccaaaccatgtggtgctttggaaagtcctatggcaacaataaccaagataacaaggcgtcgccatgaaaatccaccccatggagtagcaagtgtgaaagaatggttcaattatgttacagctacaaggaatgaagagctaaatctgcttcgtaatgttgatgctaacaacactgagaatagcactactgtgaagaattctagtttgttgagtggattcagaggaggttctagctacaaccatgaaacagagactatctttgcattaccaaggatgcagcttgactttaaatccattcatgttcaagaaccacaggagccttcattacaggatgccagcctgaagccaaaagtagaatgtagtgtggtgacagagttcactgaccacatttgtgtgactatggatgctgagctcatcatgtttcttcatgatttagtatcagcttatcttaaagaaaaagaaaaagccatctttccacctcggattttatctactcgaccaggacaaaaaagtccaattattatacatgacgacaattcctctgataaagatagagaagatagcatcacttatactactgtggactggagagattttatgtgcaatacatggcatctagaacctactcttagattaatttcttggactggaagaaagattgatccagtaggtgttgattatattcttcaaaaattgggctttcatcatgctaggactactattcctaaatggcttcaaagaggagtcatggatccactggacaaggttctgtcagttcttatcaaaaagctcggtactgcactacaggatgaaaaggaaaagaaaggcaaagacaaagaagaacactaaaaaagtaatttgatctgtgaacaaattatgattgtgtctgttttattacactggagtgtttttttagtataataatttgaaatataactttaaaataattctaaatttgtggctataattaaaagtttgtaagttaacctgttctagttccatcattctgtgtacagtgaagtattgcatgataatgtaaattttgtgaaaaactagattaaaatatataactgcttgttatggtttataattatataatgtgcaatacaattcctgcatctttaaaatgtctgcagaataactgtgaatttttttgttattggattggccgtaacttttagaaaaaaatcttgttgatgataatgtgattttggggaggtcattaattgctttttcttttttaaatgtagacttatataaatacctgtttgtatatagcttgagtaattgtgatatgattgtataccactaaaatattgttaactattataataaagtcacagtaatggtttaa

SEQ ID NO: 24182 - DNA, 7610 bp, Homo sapiens
  source 1..7610: mol_type = unassigned DNA
agcggcgcgcgccgaccgcggcgccaattggcgagcggctggagcgcggggtttcatgggaaggagttggcccggcttgtctctctgtcagtggcggctgctgcctgctctggaggcaggctgggcggtggcggccgagactggcgggggtggacgcccgggccgggctgcgcccgcttcttgcagctgtgaattcctttggacaattgatgatatttatcattgtgcccagtttctacaaataaaagatgggtggattattttctcgatggaggacaaaaccttcaactgtagaagttctagaaagtatagataaggaaattcaagcattggaagaatttagggaaaaaaatcagagattacaaaaattatgggttggaagattaattctgtattcctcagttctctatctgtttacatgcttaattgtatatttgtggtatcttcctgatgaatttacagcaagacttgccatgacactcccattttttgcttttccattgatcatctggagcataagaacagtaattattttcttcttttccaagagaacagaaagaaataatgaagcattggatgatttaaaatcccagaggaaaaaaatacttgaagaagtcatggaaaaagaaacttacaagacggctaaattaattcttgaaaggtttgatccggactcaaagaaagcaaaggagtgtgagccgccatctgctggagcagctgtaactgcaagacctggacaagagattcgtcagcgaactgcagctcaaagaaacctttctccaacaccagcaagccctaaccagggccctcctccacaagttccagtatctcctggaccaccaaaggacagttctgcccctggtggacccccagaaaggactgttactccagccctatcatcaaatgtgttaccaagacatcttggatcccctgctacttcagtgcctggaatgggtcttcatcctccaggtccacctttagcaagacctattctcccccgagaacgaggtgctttggatagaattgttgaatatttggttggtgatggtccacaaaacaggtatgcacttatatgtcagcagtgtttttctcataatggcatggctttgaaggaagaatttgaatacattgcttttcgatgtgcctactgttttttcttgaaccctgcaagaaaaaccagacctcaggctccaagacttcctgagtttagttttgagaagaggcaggtggtggaaggttcaagttcagttggtcccttgccatcaggaagtgtgctttcatcagacaaccagtttaatgaagaatctttagaacacgatgttcttgatgataatacagagcagacagatgacaaaataccagctacagaacagacaaaccaagtgattgaaaaagcatctgactcagaggaaccagaggagaaacaagagactgagaatgaggaagcctcagtgattgaaaccaactccacagttcctggagctgattctattcctgatcctgaactaagtggagaatctttgacggcagagtagtaaatgcttccacgtgccttcaactggatatttatagtcttactgatgtcagttattgctttttcggtggcacttactttttttgcccctctaagggtatgcttgtgtatcatttgaattcagattgcctagctatttgaacatctcaaagttatatatactgggtattaaaattaaaagcaagttatatcagtgaagtaagatccttttgaatgtacaaagacccacactattgagacagcttttagatacttttttgtccattctaaaagtaagcaaacatgattgccttcttgttttctgtatgtataacccgtaaatatccattttgacataggaagaactttggttaagagtaagttctctaattgtgtttgttttaaggaatgaaacttggttaagattttgactacttcattattaaaaattgatagaattttagctcctgagatatttacaactgggagaaatgtctatttaggtgtttacattaagcggtatgaaagttgttaccacataggcactggtacgaattctcaataagaatgcagtggaacagttaagtagaactgtaactacgttggcactggtacgaattctcagtgagaatgcaatgaaacagtcaactgcagtgtttctttttgatgtcttttattttacaactgggccaaaggcacattatgtatataattagtttatatttacacactagcatataggaaatatttctgcacttgaccctatttgaattctgagcattatttataagtataaaatgatgatatataagtgaattttgtgctcttgtttgtattttattaaggaaaatgaaaataatctggcatcagtttcattttgctaaatatctagtcttcttcaaacagtatcttggtgggtgacttggctacctgaaaaatcttaggaggaatagctcacaatacaataaatctgtagattctgcttagagcaaattatggtacttttattcagacttgtttcctttctagttaacagaaatagtgacatttagaggttttaatcagaagttaggtttttctgattcaggaacatcgtaggccagccatttgtaatttttaactttgagaaacaaattttgtgagaataggtagtgggttgctggtagttaattggatttaatatttgtattaaggattaactggaaaaaatgtgtctcagtgctaattcttggacctttaatacagtgtgcttatctgttacggcctccttttatctctcttctccaatattaaaaaaaatggaaatcaaattattatgctgaagggaaaaatatacctgtataagaatggtgtgtttggctaatgtttctaagttgcacacagtttattaacaactgaacaaaacatttttatcatttaaaaatctatttttatgatttaatatctcatatgtgacagtttttttttttttttttttttggaactcaatctgttaacagtctgggacatccggtatagtaaccagagtttttgagcctgccgtattgggcttaaatttcaggtctgtagtcttgggcaagtcacctataaactcactgagattattttttcatctgtaaaatgggaagagttatgtttatttttgaagggtattaggataattaaaaataatgtaatgtgcctagcacactacctgaaaacgatggcatttgttcttattaatgtctttaaaatatgcaaggaccataagtttttcctcttgcagatgaggaaagtaaaaaataatacgaacatgtaattcagcttctcagattcaagccaatgttttttgcatcaacttttctatattgtatgtatgtatataaatacatagattaaggaaataggaaactgaaactctgtggaatataaactttttaaaaataatttcatcaggttttttgtatgttactgacccatatggattttagtaacatcttgcttagtcatgttgttataaaacattcaaattctgatatacattgcttgaaaatgagtgagtacctcagagaaatttgatagactcaaacagatagtatgagaaatatctttgaaagaaatatggaggaaggttaaaaggggattagtaaaattaatgcgataggtaacatgtttgtaaccatatagtatccttttagatacaaaagcttattttcattattattataataaacagttaatggttgaaacttagtaaaatgtcctatttctgattattaagactagtataaatgagaaaatccaagctattaagtaccattagctacagtgatcttagcttccttgcttacaattgttcagtgggtcatctaaattcttctatgtcctgagcatgatctacaaacatggtctagcttctgtctctccgtcttcccgccatcattgtgctgtagccatatggaactcctttcagttctctgaccatgccctttcctgcctcagatttcagcttaaattttgcctcctcagagagatgccttcccaaactccccatctgaagctggcctctgccttttactccctatcatgtcactctctgctcaccatccttatcacaatgtgtatttgatttgtttgctagtttactgtcttcacaacataatgtccgtttgtgcaagggtcttatttttcttattcatgtctgtatctcaagggtctagcacaatgcttgatgcatattgtgtgaataaatactttgttgccaaatccagtgaaaactctcagttcttgtttcactgcttggcagtattgacattgaatattctctgagatactttttttcttttggcttttcatatatcacactattattctcttatttctctggcctcttgctctcaacgtcctgtaagtgttggtgttccttaagttctacctagtgtcatcatttcttcattctgcatattctttccctagggtttcttcccaacaccaaaggacttaccatctgtctctctgaatctcagatctccagctttgatctgtttcctttactttagagctatatatttgcctgcctactggcctgtctctcacaatccatatattcaagaatgaacactatactttgcttcaaaccttcagaacattcaaaccgtttatgtttctcatctaatcaaatagagttactctctaagccagaagctgtaaactcatctcttttccctttattcaagctgtcaatttttgtctcctaaacatcttctagttatattctcatttctctgttcacattgcattaataatgatgataaacatttgcattcttattctgtgccaggcaacatgctaactgctgtatatatattattatatttgtactttggcaagaatcctgtgaagatttttatctttggactactagaagagaaagctgagttgtagagagagtatgtatttaagtccgtttgggctgctataacagaataccacagactgggtaacgtgatgaacaaaaatttatttggctcacagttctggaacctgggaaatccaaaggcatgatgctagcatctggtgagggcctttgtgctttgtcatcccatgccagaaggcagaagggtaagagagggcaagagtgagcaagagatggaagttgcaacctcaagctcttttataatgagcattaatccattcatgagggcttcaccctcatgacctaaacatctccattaggctccaccttccaatgcaacagttagcataagttttcaacacatgctttttgtagcattcaaaccatagcaggaagcaactttgcttaaaattgtatacctggtaagtggaaaaagagggatttgaatataggcaaatgacttcagaggatttactcttaatttctgttgtactgccttctaatcttggcctccatcatttcagattaccaaagctgtctcttaactggtttctttgtctccaaccttgtgcacttgctatctattctgtgtgctgcagcctgagtttttaaaaaacagaaaatgaggggccaggtgtggtggtggctcacgcctgtaatcccagcaagttgggaggctgaggcgggcagatcatctggggtcaggagttcgagaccagcctgaccaacgtggagaaacactatctctactaaaaatacaaaattagccaggcgtggtggtgcatgcctgtaatcctagctactcaggagcctgaggcaggagaattgcttgaacacgggaggcagaggttgcagtgagcagagattgcgccattgtactccagcctgggcaacaagagtgaaactccatctcaaaaaaaaaaaagaaagaaagaaaatgaatctgccacgccattgcttagaccctttaatgactcttgagtgttcttgggatgaggtccaaatttactaataaggcctgcaaagccctgtgtaattttgctcctagttatggctggcatctgcaccacaactacagccactgccacctccccctgccacacacacattttaaaagtaacaatagtagtgttttctgtgttttgcatatgcagtcttttctcatctcccagccttcttgagcttttcctctgcctgagatacgctcccactcacatagacattgggggcactaaataaaaatagctgtttaattgaattggaatcgttccacttggaacccaagtttggaaattttgctacttcttgttaagctaggccttttattcttgaagttgctatttctcatacaaactcattttatgcattagacacacagtcactattgttatggagaacatagttgtatcagaagaggtatagctttgggtgtggatgtgcgtgtgtcaggggaaagatattctgattatatgatgattttcataaaatatagtatgctgagtttccgaaaatcctaaatgacttagaaatggtgctatatgtggtttgtttgacccctgcaaatctcatgttgaaatttgatccccattgctggaggtgttttgagcatggagcggatccctcatgaatgtcttggcgttgtccttgcagtaatgagttcttgctctatttttcctcccctggaagctgattgtttaaaagagcctggtatcctccctccctttcttctttgcttcctctctcttgctgtgtgatctctgcacacaccagctcccctttgctttctgccatgagtggtctgaggctctcaccagaagccaagcagaggctggcaccatgcttctagtacagcctgcagaactgtaagccaaataaacttcttctttgttttttttttttgtttgttttgtttttttttcagtaaattacccagcctcaggtattccttaacaacacaaatgggctaagacacagggtcatagggatagcaggcacctgagccaagccagaacttagatctcaactgttaatgcaggatgatttgtattgaaccatgaattttacactgcctctcaatgttggtgtcagcatttaaggttatttaaaaaatacaacctgaaggttacataaagtttcatttaaaaaataagaccttataagtctacttttatttccagtggacagcaactacttaatcgtcttaaaactttcttcttacaatattactttacaatattacctgttggatttattatctgtgtacaaatcagttagttgaagggccaaagaataaaggcattttgtgaattatgaatagctattttgaaatggtcatggagactagctactctagaaaattgggagaatatactgtattaagttactatctggtataacttcaattaattgtgaaaattgtagcagagatctagatatagtttatgaacttctaaagagacattaaagggaattcaagtacttgtgtaaagatgaaccaaggtagagatgattgtgaattggtgatctgctgtatgttacagttatgtaatttgacttgtttcaaaattattaaagttttaagtgtatgcattctactggtcaataagtaaatatattcaggctctgaatgtagacagataaatatataaatatagaaagtacatttgttagaatacaaacaagaataaaaattgagtacagaat

SEQ ID NO: 24183 - DNA, 3955 bp, Homo sapiens
  source 1..3955: mol_type = unassigned DNA
aaaaaaagcgcggcgaaagctaaaggccggcgcacgctgggcggtggtggtccctaagccgggccgcggccggtgcaatggactccactgcctgcttgaagtccttgctcctgactgtcagtcagtacaaagccgtgaagtcagaggcgaacgccactcagcttttgcggcacttggaggtaatttctggacagaaactcacacgactatttacatcaaatcagatattaacaagtgaatgcttgagttgccttgtagagctacttgaagaccccaacataagtgcttcactgatcttaagtattatcggtttgctgtctcaactagcagtagacattgaaaccagagattgtcttcagaatacatataatctgaatagtgtgctggcgggagtggtttgtcggagcagccacactgattcggtgtttttgcagtgcattcaacttctacagaagttaacatataatgtcaaaattttctattctggtgccaatatagatgaattaattacgttcctgatagatcacattcaatcttctgaagatgagttaaaaatgccttgtctaggattattggcaaatctttgtcggcacaatctttctgttcaaacgcacataaagacattgagtaatgtgaaatctttttatcgaactcttatcaccttgttggcccatagtagtttaactgtggttgtgtttgcactttcaatattatccagtttgacattaaatgaagaggtgggggaaaagctattccatgctcgaaacattcatcagacttttcaactaatatttaatattctcataaacggtgatggcactctaactagaaagtattcagttgacctactgatggatctccttaagaatcctaaaattgctgattatctcaccagatatgagcacttttcttcatgtcttcaccaagtattaggtcttcttaatggaaaggatcctgattcctcttcaaaggttttagaattacttcttgccttctgttcagtgactcagctgcgccatatgctcactcagatgatgtttgaacagtctccacctggcagcgccactctgggaagccatactaaatgtttagaacctactgtggctctactgcgctggttaagccaacctttggacggatcagaaaactgttctgttttagcattggagttgttcaaggaaatatttgaggatgtcatagatgctgctaactgttcctcggctgatcgttttgtgacccttctgctgcctacaatccttgatcaacttcagttcacagaacaaaatctagatgaggctttaacaagaaaaaaatgtgaaaggattgccaaggccattgaagttttgttaactctctgtggagatgatacactaaaaatgcatattgcaaaaatcttgacaactgtcaagtgtaccactcttatagaacaacaatttacatatggcaagattgacctgggatttggaacaaaggttgcagattctgaattatgcaaacttgctgctgatgtaattttgaaaactcttgatttgattaacaaacttaaaccattggttcctggtatggaagtaagcttctacaaaatacttcaggacccacgtttgattactcctttggcttttgctttaacgtcagataatagagaacaagtacagtctggactgagaatattattggaggctgctccactgccagattttcctgctttagtacttggagaaagtatagcagcaaacaatgcctatagacaacaggaaacagaacatatacccagaaaaatgccctggcaatcatcaaatcacagttttccaacatcaataaagtgtttaactcctcatttgaaagatggtgttcctggattgaatattgaagaattaatagagaaacttcagtctggaatggtggtaaaggatcagatttgtgatgtgagaatatctgacataatggatgtatatgaaatgaaactatccacattagcttccaaagaaagcaggctacaagatcttttggaaacaaaagctctagcccttgcacaggctgatagactgattgctcagcatcgctgtcaaagaactcaagctgaaacagaggcacggacacttgctagtatgttgagagaagttgagagaaaaaatgaagagcttagtgtgttgctgaaggcgcagcaagttgaatcagaaagagcgcagagtgatattgagcatctctttcaacataataggaagttagagtctgtggctgaagaacatgaaatactgacaaaatcctacatggaacttcttcagagaaatgaaagtactgaaaagaagaataaagatttacagatcacatgtgattctctgaataaacaaattgagacagtgaaaaagttgaatgagtcactcaaggaacaaaatgaaaaaagtattgcccaattaatagagaaagaagaacagagaaaagaagtacagaatcagctagtagacagagaacataagctagcaaatttgcatcaaaaaacaaaagtacaagaagaaaagattaaaaccttacaaaaggaaagggaagataaggaagaaaccattgatatccttagaaaagaattaagcagaacagaacagataagaaaagagttgagcattaaggcttcctccctagaggttcaaaaggcacaattagaaggtcgtttggaagagaaagagtccttggtgaaacttcagcaagaggaattgaacaaacactcccacatgatagcaatgatccacagtttaagtggtggaaaaataaatccagaaactgtgaatctcagtatatagacattatggcattttggaatttgtaatctcatgatatttttgatgtatttatctattggagggggggtgggtaggggagttaatttgtgacttcgtaacaataagaagttattatctaatttagtaaagaccctgatctgttgcatgttttttatttgatagtttgaatagaaatttaattttctaagttttactttttgtttctggcttttatggcttaaggttttctttggttcttacattagaaaatcatttttaacctccattatcatttttctaaggttctttcctttttcttagttgctttctattctgttttgcctgtcttatttattctcatttgtgattatttagatcttaagaccaaactttcttggtataacagtcctaaagattacaaaataaaaatatagagagagtaaaagtaaaaagtaaagtaaaaagagagaaggtatgattttactgctagagaagtttgtctctgaagaagcacaaaagaaaatattagtgaatttaaaataatttttatactgctgtagcataatttctaaatttgaaaaaaatgcaatggtaataaaatgtataaaaattagaaaactgtcattgtgttaaactattacatttaaatgattacatttaacacaatagctgtctcataaaaaatctaagaacttgtagaattatttgtaaggtatatttagtgtttttttctcttttttcaaatgttgcatagtggtccagatcatctataattaattataagtttcttatgatttacataaggataatttggattctactcttgctgcatattcagaaaaatattatttactgttaattctgatatgaattgtatttaatttgttgtcctaatagtttttaattggttcatttaattttaaagcataggttaaatatctttattttttttaaaatacaagggtccttctgtacttttcatttgaatcatatcctctaactactctgtaagaaacgtttttacatcaatattttgattgattttattgctataccaatacagtcattaattttacttggtgttttcttcaccatatgtctgtttgatttaagtgaatttagatttgtacagttctggaaattttttaaaaaatattatgcagagtaaaacattttaaatt

SEQ ID NO: 24184 - DNA, 5932 bp, Homo sapiens
  source 1..5932: mol_type = unassigned DNA
atgcttgaaggcaattaccaggtaatgctgaaatcaggcacaaacatactctactggagaactacaggcatccttatgggttctaaggcggtcaagcctgtgctggtaaaaaatatcacaattgaaggggtggcgtacacatcagaatgttttccttgcaagccaggcacattcagcaacaaaccaggttcattcaactgccaggtgtgtcccagaaacacctattctgagaaaggagccaaagaatgtataaggtgtaaagacgactctcaattttcagaggaaggatccagtgagtgtacagagcgccctccctgtaccacaaaagactatttccagatccatactccatgtgatgaagaaggaaagacacagataatgtacaagtggatagagcccaaaatctgccgggaggatctcacagatgctattagattgcccccttctggagagaagaaggattgtccgccttgcaaccctggattttataacaatggatcatcttcttgccatccctgtcctcctggaacattttcagatggaaccaaagaatgtagaccatgtccagcaggaacggagcctgcacttggctttgaatataaatggtggaatgtccttcctggcaacatgaaaacttcctgcttcaatgttgggaattcaaagtgcgatggaatgaatggttgggaggtggctggagatcatatccagagtggggctggaggttctgacaatgattacctgatcttaaacttgcatatcccaggatttaaaccaccaacatctatgactggagccacgggttctgaactaggaagaataacatttgtctttgagaccctctgttcagctgactgtgttttgtacttcatggtggatattaatagaaaaagtacaaatgtggtagaatcgtggggtggaaccaaagaaaaacaagcttacacccatatcatcttcaagaatgcaacttttacatttacatgggcattccagagaactaatcagggtcaagataatagacggttcatcaatgacatggtgaagatttattctatcacagccactaatgcagttgatggggtggcgtcctcatgccgtgcctgtgccctcggttctgaacagtcgggttcatcgtgtgtcccctgccctccaggccactacattgagaaagaaaccaaccagtgcaaggaatgtccacctgacacctacctgtccatacatcaggtctatggcaaagaggcttgtattccatgcgggcctgggagtaaaaacaatcaggaccattcggtttgctatagtgactgctttttctaccatgaaaaagaaaatcagagtttgcactatgactttagcaacctcagcagtgtgggctcattaatgaatggccccagcttcacctccaaaggaacaaaatacttccatttcttcaatatcagtttatgtgggcatgaggggaagaagatggctctctgtaccaacaatataacagactttacagtaaaagaaatagtggcagggtcagatgattacacaaatttggtaggggcatttgtatgccagtcaacaattattccttctgaaagtaagggtttccgagcagccttatcatcacaatccatcattctggcagatacattcataggagtcacagttgaaaccacattgaaaaatattaatataaaagaagatatgttcccagttccaacaagccaaataccagatgtgcatttcttttataagtcttctacagcaacaacatcttgtattaatggccgatcaactgctgtgaaaatgaggtgtaatcctactaaatctggagcaggagtgatttcagtccccagcaagtgcccagcaggtacctgtgatgggtgtacgttctatttcctgtgggagagtgctgaagcttgccctctgtgtacggagcatgacttccatgagattgagggagcctgcaagagaggatttcaggaaaccttgtatgtgtggaatgaacctaaatggtgcattaaaggaatttctttgcctgagaaaaagttggcaacctgtgaaacggttgacttttggctgaaggtgggagccggtgtgggagcttttactgccgttttgctggtggctctgacctgctacttctggaaaaagaatcaaaaactggaatacaaatattccaagttagtaatgacgactaactcaaaagagtgtgaactcccggctgcagacagttgtgctatcatggaaggagaagataatgaagaggaagttgtatattccaataaacagtcactactaggaaaactcaaatctttggcaaccaaggaaaaagaagaccattttgaatctgttcaactgaaaacctcaagatccccaaatatatgaagagacagtgctgtagccttgagactaatgaacaaagaaacctgctctagttttacaggaccatattttagggtctgtcctcatacctgtcacattggtgatctcacagaggagggccatgccgctgaaaagggaaggagattgaaacatttgattgccttatcacatggtcaagtaccttgccaaataaaggaaagcaaatgatttgggtctcaactgaagatgaagctcaactcaggaagagatttatctgtatatacacataactgaaaaccaagtttaagcccaccaatgcactgctgatgcatgccatataattaatgggtaacttttattctttatgatgtctacataacaagtgtgatttggaaggcacatgtgagcatatgcattatgatccaatttatgttttttctttgtttatattttggggaaaattaaaatttttttaaggtatatttttcccattatttattttcctgaccttaaaacagcttttctactaaaaaatggtgagcaatgaagacaataaatttttcatttttccataggttatcttctcttgatttaaatttcaggaagagttagcatgtgcttgggttatctagatttataattgcctttgaaattccatcctcgttggagctggtaagaagggcttgactgaaagtttgaaggaatctaaaaaacaaaaaagtaagaaaggtaacgagaagccctaattctccattaatgcaaactagctgctagtatcatagaagtcaaatgacttaaaacagtttatgtagtgctagaagtataattaaagtaaataggaaagcttgtcaatcaaatcactggcaaaatcatgaagaagagagtgagaaggtttgtctataagtacagatgactgtatgaaatactggggtaatttcatggtctccagaaaatgtcagtgggacttttgttctttgtcaagcaccagaggttatatggttatttttctgctgcaagactttgaggatgttgactttctcagaaactttttaaaaaaataatccaataaggcaggaattcagttttgaaaaattacatataattgtattcataataagaatgtggttatttcataagcagttatgaaagaattattgttcttattcaaaagtgatccagataattgtgatattttctatggtgggctactggtattagcacgacttggatattatttgttgaaggaagtatgaatgaagttggatttgaccaatttcgtgtaaaccttaattgatttaaaactgggaaagaggggggtttcctggccattgctgatctaaggtgctcttatttgtttccaataaacagtaatctttatagaccttaatgcagatttaaaaaaatagttgtgattggctgagagaggcagggcatatatgtagggaaatgatttgccccaagcattccaatgaagtatgacttgtaacttttgtgtctgaaggtggtgtctttatttttgtggaaaatgggagaaaaatgaataattgtgtttatttggctgattggtaatacactagaccattctgttattattgaatgaatgttttgtgtatatctctgctgttgcacatatgagtataggtgaggttgtcattgtttgctctgggattcagggagggagtcactttgcataaacctttttttgcatttaatttcttgaatgttcttataaagaagacattatgttggcattcttcatttttatcctgccaacagagtgcttatgagcatgtctgcattttgatcaaaatttaaacagaagagtgaaaatacatttgaaatgaaccctttcagaggaaccctggcaaagctgtatagactggacagagtgagaaaacttccacagccacctgtcacctttctcctcatcttccactgtgttcaatatgtatgttccaagccatagagataattgggattttctcccaggtagcttctttcttctcctgtcactggactaaaatctctgacatgtcaaaaatgccttaaattttaatgaactctccgaaaatgtagttgatattggagaatttattttatttctaattttagatattaaatatattttgtcagcacagtcccatctttgggaaggaggtgattttttcccttggattccagtggtttgtcattttatttcaagcactgaagaagtatgacagaaagaatattatggggaaaatatttagaccaatcctggctataaaatttcctttagttttatgcctggcctttgcaaagctcagtgaaatgttgaaaggaataaattaatcatgtttctgtgacttttgattgacacttgttccttttcccccctaagtggtagaagaagttatttgttatttttctaaaaggcacaattttgaagccttaactacttcattaagtcaactgttgcctataacatctcttagcactcgtcaaaacgtatttaaatcaattttccaatggatgagaacatgtcttctgtggataaattatattatgtcatttaacaacattgagcattttgatatgtgttcactgaattaaaaaacctgaatttcattattgttgacttttcccctctttagttactagtaatcacatcctttctaggattaaaaatatttcatagtatttttgtgtagatgtctgtccttattttcttcccaaagaaaaaaggttgtttaaattgattatgtggaagaattacttgggtccagtctttagcatctggggtctccaggtccccaggtgggtcatgattgactgcttcttcaagacccatcttgccaactctcacttgatgtctgtcaatagaactacttcctgtggcacatggttatttctaatgggaggctaatgtgtacataatttctctcttcctcatagaaataaatttctctgggggttgctgtgagaggatgacttcattagccatgtttaaagtgagtgtactgctcacgtttatctttgtacactaagagtatgtagagttgatcttcagagaaactaaacctccctcatatctatttatagtaatcatgaatatgattgcagttgacaggcccaactcctaaactgagtttgcccaaagaaaatgtccttagaggagtaaacttttagaaatctcaacacccgactcattcgttggaagctaaaatggaattcatcttcatactaactggctacagattattctcttgctggattttacttttattttaacatttttacatgagttccttttagaatcataaatgaaagaagtaaaactttaagatgggaatgaataattgaaaagagaattatatttactattataattgatattattcgctattatgattacacttgtctagatcagagcccagcaaacattttttttgtaaagggtcagatagtacatagttttggctttgcagggcatgtgggctctattgcatttactcaactctgccattgtagtatgaaagcaaccacatacaaaatgtaaatggatgggcgtggctgcattccaataaaactttatttatggacactg

SEQ ID NO: 24185 - DNA, 1511 bp, Homo sapiens
  source 1..1511: mol_type = unassigned DNA
ggctcgggagagaccttggagcgcgcgggaaagagaccaatataaactgtggcgggatagttttcgggtccttgtccagtgaaacaccctcggctgggaagtcagttcgttctctcctctcctctcttcttgtttgaacatggtgcggactaaagcagacagtgttccaggcacttacagaaaagtggtggctgctcgagcccccagaaaggtgcttggttcttccacctctgccactaattcgacatcagtttcatcgaggaaagctgaaaataaatatgcaggagggaaccccgtttgcgtgcgcccaactcccaagtggcaaaaaggaattggagaattctttaggttgtcccctaaagattctgaaaaagagaatcagattcctgaagaggcaggaagcagtggcttaggaaaagcaaagagaaaagcatgtcctttgcaacctgatcacacaaatgatgaaaaagaatagaactttctcattcatctttgaataacgtctccttgtttaccctggtattctagaatgtaaatttacataaatgtgtttgttccaattagctttgttgaacaggcatttaattaaaaaatttaggtttaaatttagatgttcaaaagtagttgtgaaatttgagaatttgtaagactaattatggtaacttagcttagtattcaatataatgcattgtttggtttcttttaccaaattaagtgtctagttcttgctaaaatcaagtcattgcattgtgttctaattacaagtatgttgtatttgagatttgcttagattgttgtactgctgccatttttattggtgtttgattattggaatggtgccatattgtcactccttctacttgctttaaaaagcagagttagatttttgcacattaaaaaattcagtattaattaaacattacttattctaccctcttttttggcaaggaggacaaatacgcaatgttggaaaaccttggatggatatcttctctttaaaaaaatgtaaagataatttggtcttgagggtttaaacggttgataatgcctctacaacaacaagaaaaaagataaaatactaggatagaatcatggtgggcacagtggcttctcaggaggctgaggagggaggtttgcttgagtccaggagttggagaccagcccaggcaacatagcgtaaaccctatctctaaaacaatttttagccgggtgcggtggctcacgcctgtaatcccagcactctgggaggccgaggcgggtggatcatgaggtcaggagatcgagaccatcctgcctaacaaggtgaaaccccgtctctactaaaaatacaaaaaattagccgggcgcggtggcgggcgcctgtagtcccagctactcgggaggctgaggcaggagaatggcgtgaacccgggaagtggagcttgcagtgagccgagattgcgccactgcagtcggcagtccggcttgggcgacagagcgagactccgtctcaaaaaaaaaaaaaaaaaaaa

SEQ ID NO: 24186 - DNA, 4853 bp, Homo sapiens
  source 1..4853: mol_type = unassigned DNA
gcacttccgctccccagttgccgcgggatggcaagccggcgtgggggaagggagaggtcggcggagacgagggagggaccatatccgggagagcggcagcttccgaccagtggtcgcgcttccggagaggcgcttccggtggcggcggcagcagcggctgtggtggttccgggtgtctttgtccccccggtgtcgctgccctggcccgcagccttttccccacgactctgaaagaggacagcgttcccaatgtcccagtttaagcgccagcggatcaacccgcttccagggggacgcaacttctcaggcacagcttcaacatctcttctgggccctcctcctggtttgctcactcctcctgtggccacagaactgtcccagaatgccaggcaccttcagggtggggagaaacagcgggtcttcactggtattgttaccagcttgcatgactactttggggttgtggatgaagaggtcttttttcagctaagtgtggtgaagggccgtctgccccagctgggtgagaaggtgctggtgaaggctgcatacaacccaggccaggcagtgccctggaatgctgtcaaggtgcaaacgctctccaaccagcccctactgaagtccccagcacctcctcttctgcatgtagcagccctgggccagaagcaagggatcctgggagctcagcctcagttgatcttccagcctcaccggattcccccactctttcctcagaagcctctgagtctcttccaaacatcccacacacttcacctgagccacctgaacagatttcctgcccggggccctcatggacggttggatcagggccgaagtgatgactatgactccaagaaacgcaaacagcgggctggtggagagccctggggtgctaagaagccaaggcatgacctgcctccttaccgggtccacctcactccttacactgtggacagccccatctgtgacttcctagaactccagcgccgttaccgcagcctcctggtcccctcagattttctgtccgtgcatctgagttggctatcagccttccccctgagccagcccttttccctccatcatccaagccggatccaggtctcttctgaaaaggaggcagctccagacgctggtgctgagcccatcactgcagacagtgaccccgcttatagttcgaaggtactgctgctctcttccccggggttggaggaattgtatcgttgttgcatgctctttgtggatgacatggctgagccaagggagacgccagagcatcctctgaagcagattaagtttttgctgggcaggaaagaagaggaggcagtgctggttgggggtgaatggtctccttccctggatggcctcgacccccaggctgacccgcaggtgctggtgcgtaccgccatccgctgtgcgcaggcccagactggcattgatttgagcggctgtaccaagtggtggcgctttgccgagtttcagtacctgcagccgggacccccccggcggcttcagacagtggtggtgtacctgccggatgtctggaccatcatgcctactttggaggagtgggaggccctgtgccagcagaaagctgcagaggcagctcccccaacccaggaggcacaaggggaaacggagcctactgaacaggcacctgatgccttggagcaagcagcagacacttctagacggaacgcagaaactccagaggccaccacacagcaggaaacggacactgatctcccagaggcccctccaccccccctagaacctgctgtcatcgcacgccctggctgtgtaaacctgtccctccatgggattgtggaggatcggaggccaaaggaaaggatctcttttgaggtgatggtgctggccgagctgtttctggagatgctccagagggattttggctatagagtttataagatgctactgagccttcctgaaaaggtcgtgtccccacctgaacctgagaaggaggaggcggccaaggaagaagccaccaaggaggaagaagccatcaaagaggaggtggtcaaggagcccaaggatgaggcacagaatgagggcccggctacagagtcagaggccccgctgaaggaggatgggcttttgcccaaaccactctcttctgggggagaggaagaagaaaaaccccggggcgaggcttctgaggacctgtgtgagatggccctggacccagaactgttgcttctgagggatgatggagaggaggagtttgcaggagcaaagctggaggattcggaggtccggtccgttgcctcaaaccagtcagagatggagttctcttcacttcaggacatgcccaaggagctggatccctctgctgtgctccccttagactgtctgcttgcttttgtgttctttgatgccaactggtgtggctacttgcaccggcgagacttagagaggatcctccttacccttgggatccggctcagtgcagagcaggccaagcagctggtcagcagggtggtgacccagaacatctgccagtaccggagccttcagtacagccgccaggagggcctggatggtggccttcccgaggaggtgctcttcggaaacctggacctgctgccccctcctgggaaaagcacgaagccaggtgctgcccccacagaacacaaagccttggtgtcccacaatggcagcctgattaacgtggggagcctgctgcagcgcgcggagcagcaggacagcggccggctctacctagagaacaagatccacacactggagctgaagctggaggagagccataaccgtttctcagccactgaagtaaccaataagacgctggcggcagagatgcaggagctgcgagtccggctggcggaggccgaggagaccgcccggacggcggagcgacagaagagccagctccagcggctgctgcaggagctccgcaggcgtctgacccccctgcagctggagatccagcgggtggtggaaaaggctgacagctgggtggagaaggaggagccggcacctagcaactgacggcctcgcacggaactgccatcctgtgagggcagcggtggcgcccggcaaagttggagcccttgcggtaccagaaagcagcgagagcgagacctgggagccagggcaggggtggctgaccccatgctcagcctctaggggacggcaggccatcaggctgggggctgtgctatgtgggatggatgtgtgaggaaccccggttccacttaacaactaaatacaacatcttttgcacccctagaatgtcattttgccctcaaccttggtatttctcctggggcccttttagtcttgtgctgactttctcctgtcctcttccagtttagaataagacaggggagaaaaaggcttttcgagtgtgggacaaggtctgatgtcagtgaacggaactgaagagcaagacatggagcctggctggggctaagcagccccctcctccggatggcacaggctctgctaggttccggacacaggcttctgggggaagggtctcccttggccatcacgggaatggagtccatgctagaaagagctcagtgttgggctgggtttgccagtagaacactgcgttccagtcaccccggtcttgccagaagaaaccagcacctctttcccgtggctcctgtgttcagaatgtggtattggctctggcccagccttctcccctgttacccataattcttgcctctttccataatccgtggtttcagtttgactttgtatataaagttggggttttttttttttttttttggcttgttttttaaataaaccaaagtcaaaaacaaactgagagtgtgtcctccacagctcttcctactctcctaggcttgcccgcgtgccctcccacccagcgcctctgctggaccacggtgcagttcgctccagaaggtgggccagggccggggaggtgcgcacacacccctggcatgctgggctgcctgctggagggtgctgctgctccgtggagggcagcaggcccaggaaggggtttcctctgctcgcctaagttacagcacaatactatgtggacgtttcattgaaaattttacttgaaaaaataaaattccagatactcaggtgagacacaaacccactgttcctgctttgagacctgtgaattcttgtgggacagttccactgacagcttgcgttcccgaggtaccagtcctcagtgacctcgggaaccccaaccacttaggtcccaaagccacaagggtgccctttgtcttgctgggaagctggctgagggcctgccagggctggaggaccagctctcccgcacagggttcagggcctctcccagaaaaaagaggttttgaagtgaaaaggcaacgaggggccagagggctccccaggatgggtcttttggaggtagatttgatgcccacaacgcatgcaaggctaagacccccaacttagccaacgaagcccatggcctcagaagggctgcagcttgctcaggccgtgggccaggatgcatgctggacggttctccaaataaaaaagccccaagggtttgtctacactgcttacctgctggggctgtgagtggggagacggcggcctgcctagggctcctggtgccaggctcaggaagagtcattcattgcaaagggccggcaagtgaaccagggccacctctgtccccagcctgtgagaggagcagctagccctgagaagggcaaggatgaatgaggctgaccacgtcacaggagtcctccaagagtgacggggattcagtcatcggccacaatggagagggcccggagctcactgagtttggcctcgttctcccgctcccgctgctcatcggagtggcctggctggtc

SEQ ID NO: 24187 - DNA, 4187 bp, Homo sapiens
  source 1..4187: mol_type = unassigned DNA
agccgtcgccggcgagtggtcacatgatgcccctccctgctcccagccgcttcggtcatgtgaccgcctggggagtcaggggcggaagtcggggtctgacccgctccaggtccgggactgcggatagaagaggaccgccgccttgagggaggggtggaaactgggtgccggctccgcgcgcgacctccggccctgcgcgtgcgccgtggcgcggcccggctgacaggttctttaatggaggagccaatctctctgcacacctggtttcatctaataatatacagacaccagctctgaggccagttaatcatccccagtgtccaggcacagagtagtcggtccgcctcacaatgttggactttctagccgagaacaacctctgtggccaagcaatcctaaggattgtttcctgtggtaatgccatcattgctgaacttttgagactctctgagtttattcctgctgtgttcaggttaaaagacagagctgatcaacagaaatatggagatatcatatttgatttcagctattttaagggtccagaattatgggaaagcaaactggatgctaagccagagctacaggatttagatgaagaatttcgtgaaaacaacatagaaattgtgaccagattttatttagcatttcaaagtgtacataaatatattgtagacttaaacagatatctagatgatctcaatgaaggggtttatattcagcaaaccttagaaactgtgcttctcaatgaagatggaaaacaacttctatgtgaagcactgtacttatatggagttatgctactggtcattgaccaaaagattgaaggagaagtcagagagaggatgctggtttcttactaccgatacagtgctgctcgatcttctgctgattcaaatatggacgatatttgtaagctgcttcgaagtacaggttattctagccaaccaggtgccaaaagaccatccaactatcccgagagctatttccagagagtgcctatcaacgaatccttcatcagtatggtcattggtcgactgagatctgatgatatttacaaccaggtctcagcgtatcctttgccggagcatcgcagcacagccctggcaaaccaagctgccatgctgtacgtgattctctactttgagccttccatccttcacacccatcaagcaaaaatgagagagatagtggataaatactttccagataattgggtaattagtatttacatggggatcacagttaatctagtagatgcttgggaaccttacaaagctgcaaaaactgctttaaataataccctggacctttcaaatgtcagagaacaggcaagcagatatgctactgtcagtgaaagagtgcatgctcaagtgcagcaatttctaaaagaaggttatttaagggaggagatggttctggacaatatcccaaagcttctgaactgcctgagagactgcaatgttgccatccgatggctgatgcttcatacagcagactcagcctgtgacccaaacaacaaacgccttcgtcaaatcaaggaccagattctaacagactctcggtacaatcccaggatcctcttccagctgctgttagatactgcacaatttgagtttatactcaaagagatgttcaagcaaatgctttcagaaaagcaaaccaaatgggagcattacaagaaagagggttcggagcggatgactgagcttgctgatgtcttttcaggagtgaaacccctaaccagagtggagaaaaatgaaaaccttcaagcttggttcagagagatctcaaaacaaatattgtctttaaattatgatgattctactgctgcgggcagaaaaactgtacaactgatacaagctttggaagaggttcaagaattccaccagttggaatccaatctgcaagtatgtcagtttcttgccgatactcgaaagtttcttcatcaaatgatcagaaccattaacattaaagaggaggttctgatcacaatgcagatcgttggggacctttctttcgcttggcagttgattgacagtttcacatccatcatgcaagaaagcataagggtaaatccatccatggttactaaactcagagctaccttcctaaagcttgcctctgccctcgatctgccccttcttcgtattaatcaggcaaatagccccgacctgctcagcgtgtcacagtactattctggagagttggtatcctatgtgagaaaagttttgcagatcatcccagaaagcatgtttacatctcttctaaagatcataaagcttcagacccacgacattattgaagtgcctacccgcctggacaaagacaagctgagggactatgctcagctaggcccacgatacgaggttgccaagcttactcatgctatttccatttttactgaaggcatcttaatgatgaaaacgactttggttggcatcatcaaggtggatccaaagcagttgctggaagatggaataaggaaagagcttgtgaagcgcgttgcctttgccctgcataggggactgatattcaaccctcgagccaagccaagtgaattgatgcccaagctgaaagagttgggagcgaccatggatggattccatcgttcttttgaatacatacaggactatgtcaacatttatggtctgaagatttggcaggaagaagtatctcgtatcataaattacaacgtggagcaagagtgtaataactttctaagaacgaagattcaagattggcaaagcatgtaccagtccactcatattccaatacccaagtttacccctgtggatgagtctgtaacgtttattggtcgactctgcagagaaatcctgcggatcacagacccaaaaatgacatgtcacatagaccagctgaacacttggtatgatatgaaaactcatcaggaagtgaccagcagccgcctcttctcagaaatccagaccaccttgggaacctttggtctaaatggcttagacaggcttctgtgctttatgattgtaaaagagttacagaatttcctcagtatgtttcagaaaattatcctgagagacagaactgttcaggacactttaaaaaccctcatgaatgctgtcagtcccctaaaaagtattgtcgcaaattcaaataaaatttatttttccgccattgccaaaacacagaagatttggactgcgtatctcgaggctataatgaaggttgggcagatgcagattctgagacaacagattgccaatgaattaaattattcttgtcggtttgattctaaacatctggcagctgctctggagaatctcaataaggctctcctagcagacattgaagcccactatcaggacccttcacttccttaccccaaagaagataacacacttttatatgaaatcacagcctatctggaggcagctggcattcacaacccactgaataagatatacataacaacaaagcgcttaccctattttccaattgtaaactttctatttttgatcgctcagttgccaaaacttcaatacaacaaaaatctgggaatggtctgccgaaaaccgaccgacccggttgattggccaccacttgtcctgggactgctcactctgctgaagcagttccattcccggtacaccgagcagttcctggcgctgattggccagtttatctgctccacggtggagcagtgtacaagccagaagatacctgaaattcctgcagatgttgtgggtgcccttctgttcctggaggattatgttcggtacacaaagctacccaggagggttgctgaagcacatgtgcctaatttcatttttgatgagttcagaacagtgctgtaactgtttttcctacttcttcaatggaaggattgtccttagatcttcccaccatcacaaatgaatttgaagatgaaaagaaactcagttgctcatacaactgcattttttctgtctattatgggaaacatcagacgttctgagtaagatatatctcatggcattagttaatataactgatattgtttaaatcatggtattacatgcaatttatatcagataaaagcagaacacatttttgtactgcctctcttaaatgctgaatgtaactgttatgtataaatccatttagttttatgttctaaagaactatttgtgcaactccagattttcagtaaaatagtattactagtacccaaa

SEQ ID NO: 24188 - DNA, 2901 bp, Homo sapiens
  source 1..2901: mol_type = unassigned DNA
tgacgcggtcccggaagttgaccggggtgcggagctcctgggctgcagctcctggagtttccgaggttcgtgcgcgtctggtggcggcggcgtgatgttctcggcaggagcggagagtttgctccaccaggccagggagatccaggacgaggagctgaagaagttctgttcccggatctgtaaactgctgcaggcggaggacttggggccggacaccctcgactccctgcagaggctcttcctcatcatctcagccacgaagtacagccggaggctggagaagacatgcgtagacctgctgcaggccaccctcggcctgcctgcatgccccgagcagctccaggtgctttgcgccgccatcctgcgagagatgtccccctctgacagcctcagcctggcctgggaccacacgcagaacagccggcagctgagcctggtggcctccgttctcttggcccagggtgacagaaacgaggaggtcagagccgtgggccagggcgtgctacgagcgctggagagccggcagcctgagggacccagcctcagacacctcctccccgtcatggccaaggtcgtggtcctcagcccgggcaccctccaggaggaccaggccaccctgctcagcaagcggctggtcgactggctgcgctacgccagcctccagcaagggctcccacactccggcggcttcttctccacgcccagggcccggcagccgggccccgtcaccgaggtggacggggcggtagccacagacttcttcacggtgctctccagcggccaccgcttcacagacgaccagtggctgaacgtgcaggccttctctatgctgcgggcgtggctgctgcacagcggccccgagggcccgggcaccctggacacagatgacaggtcagagcaggagggctccactctgtcggtgatctccgccacctcctctgccggccgcctgctgccgccccgggagcggcttcgggaggtggccttcgagtactgccagcgcctcattgagcaaagtaaccgacgagccctgaggaagggggactccgacctgcagaaagcttgcctggtggaggccgtgctggtgctggacgtgctgtgccggcaggacccgtccttcctgtaccgaagtctctcctgcctgaaggccctgcacgggcgggtgcgcggggacccggcctctgtgcgggtgctgctgcccctcgcccacttcttcctgagccacggggaagcggctgcagtggactcggaagccgtctaccagcacctgttcaccaggatcccggtggagcagttccacagccccatgctggcctttgaattcatccagttctgcagggacaacctccacctgttcagcgggcacctcagcaccctcagattgagcttccccaacctctttaagttcctggcctggaacagcccacccctcacctccgagtttgtggcgctcctcccggccctggtggacgctggcacagccctggagatgctgcacgcgctgctggacctgccctgcttgacggcggtgctggacctgcagctcaggtcagcaccggctgcatccgagaggccactctgggacacctctctcagggcccccagctgcctggaggccttccgggacccgcagttccagggtcttttccaatacctgctgcgccccaaggccagtggcgccactgagaggttggcgccactccaccagctgctgcagcccatggccggctgtgcccgcgtggcccagtgtgcccaggccgtgcccacgctgctgcaggcattcttctcagcagtgacccaggtggctgacgggtccctgatcaaccagctggcgctgctgctcctgggcaggagcgactcgctctacccggccccagggtacgctgccggtgtgcacagtgtgctgagttctcagttcctggccctgtgtacgctgaaaccctccctggtggtggagctggcaagagacctgctggagttcctgggcagcgtgaatggtctctgcagcagggcgagcctcgtcaccagcgtggtgtgggccatcggcgagtacctgtcggtgacctacgatcggaggtgcaccgtggagcagatcaacaagttcttcgaagccctggaggctctgctattcgaggtcacccagtgccgcccctctgctgccctgcccaggtgtcccccccaggtggtcaccgtgctgatgaccacgctgacgaagctggcctcccggagccaagatctgatccccagggcctctttattgctgtcaaagatgaggaccctggctcacagtccagccaccagctccacgcacagcgaggagggcgcggaagccatccgtacccgggccacagagctgctgaccctgctgaagatgcctagcgtggcccagtttgtgctcacacccagcacggaggtgtgcagcccccgctatcaccgcgatgccaacacggccctgcccctggccctgcgcacggtcagccggctggtggagagggaggccggcctcatgccagggtgaagggacagtggccagggacttcggtgcagattaagagcctgggcagccagcttgctactgaggccaggctgataggagctcaggagggcgcgggagtcctgggagaggaggcaaggcccacggtgggcttggcaccctcacagacacgcggggctggcccccctgctcaccctctgggctttgtctccgagccttttgctcccaggcaacactgagctgagctgaggggtgccatggagcggctctgattggaggcttgaggccctgtggctgggtcgggtggaggctgctgggtctgtttcctagtcttttgtttttggacagttgatgggcaagaagagctgcagtaaaagtaaatctcctttaataagcgtctgtatgaa

SEQ ID NO: 24189 - DNA, 7297 bp, Homo sapiens
  source 1..7297: mol_type = unassigned DNA
gagctagcgctcaagcagagcccagcgcggtgctatcggacagagcctggcgagcgcaagcggcgcggggagccagcggggctgagcgcggccagggtctgaacccagatttcccagactagctaccactccgcttgcccacgccccgggagctcgcggcgcctggcggtcagcgaccagacgtccggggccgctgcgctcctggcccgcgaggcgtgacactgtctcggctacagacccagagagaaaagcttcattctggaggggaaggagttttgagtgccaaggatgaaattccacccatcactcggtctctgagctgcaggacacaggcaggacaacgggagcacactgccaggatgggagctgctgggaggcaggacttcctcttcaaggccatgctgaccatcagctggctcactctgacctgcttccctggggccacatccacagtggctgctgggtgccctgaccagagccctgagttgcaaccctggaaccctggccatgaccaagaccaccatgtgcatatcggccagggcaagacactgctgctcacctcttctgccacggtctattccatccacatctcagagggaggcaagctggtcattaaagaccacgacgagccgattgttttgcgaacccggcacatcctgattgacaacggaggagagctgcatgctgggagtgccctctgccctttccagggcaatttcaccatcattttgtatggaagggctgatgaaggtattcagccggatccttactatggtctgaagtacattggggttggtaaaggaggcgctcttgagttgcatggacagaaaaagctctcctggacatttctgaacaagacccttcacccaggtggcatggcagaaggaggctatttttttgaaaggagctggggccaccgtggagttattgttcatgtcatcgaccccaaatcaggcacagtcatccattctgaccggtttgacacctatagatccaagaaagagagtgaacgtctggtccagtatttgaacgcggtgcccgatggcaggatcctttctgttgcagtgaatgatgaaggttctcgaaatctggatgacatggccaggaaggcgatgaccaaattgggaagcaaacacttcctgcaccttggatttagacacccttggagttttctaactgtgaaaggaaatccatcatcttcagtggaagaccatattgaatatcatggacatcgaggctctgctgctgcccgggtattcaaattgttccagacagagcatggcgaatatttcaatgtttctttgtccagtgagtgggttcaagacgtggagtggacggagtggttcgatcatgataaagtatctcagactaaaggtggggagaaaatttcagacctctggaaagctcacccaggaaaaatatgcaatcgtcccattgatatacaggccactacaatggatggagttaacctcagcaccgaggttgtctacaaaaaaggccaggattataggtttgcttgctacgaccggggcagagcctgccggagctaccgtgtacggttcctctgtgggaagcctgtgaggcccaaactcacagtcaccattgacaccaatgtgaacagcaccattctgaacttggaggataatgtacagtcatggaaacctggagataccctggtcattgccagtactgattactccatgtaccaggcagaagagttccaggtgcttccctgcagatcctgcgcccccaaccaggtcaaagtggcagggaaaccaatgtacctgcacatcggggaggagatagacggcgtggacatgcgggcggaggttgggcttctgagccggaacatcatagtgatgggggagatggaggacaaatgctacccctacagaaaccacatctgcaatttctttgacttcgatacctttgggggccacatcaagtttgctctgggatttaaggcagcacacttggagggcacggagctgaagcatatgggacagcagctggtgggtcagtacccgattcacttccacctggccggtgatgtagacgaaaggggaggttatgacccacccacatacatcagggacctctccatccatcatacattctctcgctgcgtcacagtccatggctccaatggcttgttgatcaaggacgttgtgggctataactctttgggccactgcttcttcacggaagatgggccggaggaacgcaacacttttgaccactgtcttggcctccttgtcaagtctggaaccctcctcccctcggaccgtgacagcaagatgtgcaagatgatcacagaggactcctacccggggtacatccccaagcccaggcaagactgcaatgctgtgtccaccttctggatggccaatcccaacaacaacctcatcaactgtgccgctgcaggatctgaggaaactggattttggtttatttttcaccacgtaccaacgggcccctccgtgggaatgtactccccaggttattcagagcacattccactgggaaaattctataacaaccgagcacattccaactaccgggctggcatgatcatagacaacggagtcaaaaccaccgaggcctctgccaaggacaagcggccgttcctctcaatcatctctgccagatacagccctcaccaggacgccgacccgctgaagccccgggagccggccatcatcagacacttcattgcctacaagaaccaggaccacggggcctggctgcgcggcggggatgtgtggctggacagctgccggtttgctgacaatggcattggcctgaccctggccagtggtggaaccttcccgtatgacgacggctccaagcaagagataaagaacagcttgtttgttggcgagagtggcaacgtggggacggaaatgatggacaataggatctggggccctggcggcttggaccatagcggaaggaccctccctataggccagaattttccaattagaggaattcagttatatgatggccccatcaacatccaaaactgcactttccgaaagtttgtggccctggagggccggcacaccagcgccctggccttccgcctgaataatgcctggcagagctgcccccataacaacgtgaccggcattgcctttgaggacgttccgattacttccagagtgttcttcggagagcctgggccctggttcaaccagctggacatggatggggataagacatctgtgttccatgacgtcgacggctccgtgtccgagtaccctggctcctacctcacgaagaatgacaactggctggtccggcacccagactgcatcaatgttcccgactggagaggggccatttgcagtgggtgctatgcacagatgtacattcaagcctacaagaccagtaacctgcgaatgaagatcatcaagaatgacttccccagccaccctctttacctggagggggcgctcaccaggagcacccattaccagcaataccaaccggttgtcaccctgcagaagggctacaccatccactgggaccagacggcccccgccgaactcgccatctggctcatcaacttcaacaagggcgactggatccgagtggggctctgctacccgcgaggcaccacattctccatcctctcggatgttcacaatcgcctgctgaagcaaacgtccaagacgggcgtcttcgtgaggaccttgcagatggacaaagtggagcagagctaccctggcaggagccactactactgggacgaggactcagggctgttgttcctgaagctgaaagctcagaacgagagagagaagtttgctttctgctccatgaaaggctgtgagaggataaagattaaagctctgattccaaagaacgcaggcgtcagtgactgcacagccacagcttaccccaagttcaccgagagggctgtcgtagacgtgccgatgcccaagaagctctttggttctcagctgaaaacaaaggaccatttcttggaggtgaagatggagagttccaagcagcacttcttccacctctggaacgacttcgcttacattgaagtggatgggaagaagtaccccagttcggaggatggcatccaggtggtggtgattgacgggaaccaagggcgcgtggtgagccacacgagcttcaggaactccattctgcaaggcataccatggcagcttttcaactatgtggcgaccatccctgacaattccatagtgcttatggcatcaaagggaagatacgtctccagaggcccatggaccagagtgctggaaaagcttggggcagacaggggtctcaagttgaaagagcaaatggcattcgttggcttcaaaggcagcttccggcccatctgggtgacactggacactgaggatcacaaagccaaaatcttccaagttgtgcccatccctgtggtgaagaagaagaagttgtgaggacagctgccgcccggtgccacctcgtggtagactatgacggtgactcttggcagcagaccagtgggggatggctgggtcccccagcccctgccagcagctgcctgggaaggccgtgtttcagccctgatgggccaagggaaggctatcagagaccctggtgctgccacctgcccctactcaagtgtctacctggagcccctggggcggtgctggccaatgctggaaacattcactttcctgcagcctcttgggtgcttctctcctatctgtgcctcttcagtgggggtttggggaccatatcaggagacctgggttgtgctgacagcaaagatccactttggcaggagccctgacccagctaggaggtagtctggagggctggtcattcacagatccccatggtcttcagcagacaagtgagggtggtaaatgtaggagaaagagccttggccttaaggaaatctttactcctgtaagcaagagccaacctcacaggattaggagctggggtagaactggctatccttggggaagaggcaagccctgcctctggccgtgtccacctttcaggagactttgagtggcaggtttggacttggactagatgactctcaaaggcccttttagttctgagattccagaaatctgctgcatttcacatggtacctggaacccaacagttcatggatatccactgatatccatgatgctgggtgccccagcgcacacgggatggagaggtgagaactaatgcctagcttgaggggtctgcagtccagtagggcaggcagtcaggtccatgtgcactgcaatgccaggtggagaaatcacagagaggtaaaatggaggccagtgccatttcagaggggaggctcaggaaggcttcttgcttacaggaatgaaggctgggggcattttgctggggggagatgaggcagcctctggaatggctcagggattcagccctccctgccgctgcctgctgaagctggtgactacggggtcgccctttgctcacgtctctctggcccactcatgatggagaagtgtggtcagaggggagcaatgggctttgctgcttatgagcacagaggaattcagtccccaggcagccctgcctctgactccaagagggtgaagtccacagaagtgagctcctgccttagggcctcatttgctcttcatccagggaactgagcacagggggcctccaggagaccctagatgtgctcgtactccctcggcctgggatttcagagctggaaatatagaaaatatctagcccaaagccttcattttaacagatggggaaagtgagcccccaagatgggaaagaaccacacagctaagggagggcctggggagccccaccctagcccttgctgccacaccacattgcctcaacaaccggccccagagtgcccaggcactcctgaggtagcttctggaaatggggacaagtcccctcgaaggaaaggaaatgactagagtagaatgacagctagcagatctcttccctcctgctcccagcgcacacaaacccgccctccccttggtgttggcggtccctgtggccttcactttgttcactacctgtcagcccagcctgggtgcacagtagctgcaactccccattggtgctacctggctctcctgtctctgcagctctacaggtgaggcccagcagagggagtagggctcgccatgtttctggtgagccaatttggctgatcttgggtgtctgaacagctattgggtccaccccagtccctttcagctgctgcttaatgccctgctctctccctggcccaccttatagagagcccaaagagctcctgtaagagggagaactctatctgtggtttataatcttgcacgaggcaccagagtctccctgggtcttgtgatgaactacatttatcccctttcctgccccaaccacaaactctttccttcaaagagggcctgcctggctccctccacccaactgcacccatgagactcggtccaagagtccattccccaggtgggagccaactgtcagggaggtctttcccaccaaacatctttcagctgctgggaggtgaccatagggctctgcttttaaagatatggctgcttcaaaggccagagtcacaggaaggacttcttccagggagattagtggtgatggagaggagagttaaaatgacctcatgtccttcttgtccacggttttgttgagttttcactcttctaatgcaagggtctcacactgtgaaccacttaggatgtgatcactttcaggtggccaggaatgttgaatgtctttggctcagttcatttaaaaaagatatctatttgaaagttctcagagttgtacatatgtttcacagtacaggatctgtacataaaagtttctttcctaaaccattcaccaagagccaatatctaggcattttcttggtagcacaaattttcttattgcttagaaaattgtcctccttgttatttctgtttgtaagacttaagtgagttaggtctttaaggaaagcaacgctcctctgaaatgcttgtcttttttctgttgccgaaatagctggtcctttttcgggagttagatgtatagagtgtttgtatgtaaacatttcttgtaggcatcaccatgaacaaagatatattttctatttatttattatatgtgcacttcaagaagtcactgtcagagaaataaagaattgtcttaaatgtcatgattggagatgtcctttgcattgcttggaaggggtgtacctagagccaaggaaattggctctggtttggaaaaattttgctgttattatagtaaacatacaaaggatgtcatcatc

SEQ ID NO: 24190 - DNA, 2534 bp, Homo sapiens
  source 1..2534: mol_type = unassigned DNA
ggccgcaacgtgtcgagagccgtaagtaaagtgtcgcaaagcagaaggaaggcgggagtcccgactgcaaacattgaggaaagccaggcagtagaggccgctatggcgaacgttccgtgggcagaggtctgcgagaaattccaggcggcgctcgctctgtcgcgggtggaactgcataaaaatccggagaaggaaccatacaagtccaaatacagcgcccgggcgctactggaagaggtcaaggcgctgctcggccctgcgcctgaggacgaggatgagcggcctgaggccgaggacggcccgggtgccggtgaccacgccctggggctgccggctgaggtggtggagcccgaggggcccgtcgcccagcgagcggtgaggctggcagtcatcgagttccacctcggggtgaaccacatcgacacggaggagctgtcggcgggggaggagcacctggtgaaatgcctgcggctgctgcgcaggtaccggctctcgcacgactgcatctctctctgcatccaggcgcagaataacctgggtatcttgtggtctgaaagagaagaaattgaaactgcacaggcttacctagagtcatcagaagcactatataatcagtatatgaaagaggttgggagtcctcctcttgatcctactgagcgttttcttcctgaagaagagaaacttactgaacaagagagatcaaaaagatttgaaaaggtttatactcataacctatattacctagctcaagtctaccagcatctggaaatgtttgagaaggctgctcactattgccatagtacactaaaacgccagcttgagcacaatgcctaccatcctatagagtgggctatcaatgctgctaccttgtcacagttttacatcaataagctatgctttatggaggccaggcactgtttatcagctgctaatgtcatttttggtcaaactggaaagatctcagccacagaagacactcctgaagctgaaggagaagtgccagagctttatcatcaaagaaagggggaaatagcaaggtgctggatcaaatactgtttgactctcatgcagaatgcccaactctccatgcaggacaacataggagagcttgatcttgataaacagtctgaacttagagctttaaggaaaaaagaactagatgaggaggaaagcattcggaaaaaagctgtgcagtttggaaccggtgaactgtgtgatgccatctctgcagtagaagagaaagtgagctacttgagacctttagattttgaagaagccagagaacttttcttattgggtcagcactatgtctttgaggcaaaagagttctttcagattgatggttatgtcactgaccatattgaagttgtccaagaccacagtgctctgtttaaggtgcttgcattctttgaaactgacatggagagacggtgcaagatgcataaacgcagaatagccatgctagagcccctaactgtagacctgaatccacagtattatctgttggtcaacagacagatccagtttgaaattgcacatgcttactatgatatgatggatttgaaggttgccattgctgacaggctaagggatcctgattcacacattgtaaaaaaaataaataatcttaataagtcagcactgaagtactaccagctcttcttagactccctgagagacccaaataaagtattccctgagcatataggggaagatgttcttcgccctgccatgttagctaagtttcgagttgcccgtctctatggcaaaatcattactgcagatcccaagaaagagctggaaaatttggcaacatcattggaacattacaaatttattgttgattactgtgaaaagcatcctgaggccgcccaggaaatagaagttgagctagaacttagtaaagagatggttagtcttctcccaacaaaaatggagagattcagaaccaagatggccctgacttaatccttgtttttaaagaaaggaaatgtgcaatattgaagtgatctttttccctagtcagacaggcccaattccattgtgatgtttacctttatagccaggtgagtgcagtttgaacttgagatacagtcaactgagtgtttgctaggatcctaaggaacataaagttaattaaaaacttacacctaattatgtaaattgccttgttaaagacatgtgatttgtattttagatgcttgtttcctattaaaatacagacatttctaccctcagtttctaaatgtagactatttgttggctagtacttgatagattccttgtaagaaaaaatgctgggtaatgtacctggtaacaagcctgttaatatattaagattgaaaaagtaacttctatagttactccttctaaaatatttgacttcctaaattccccccacccaaaatctttcccttttgaaaatactaaaaactaagttatgttattataaagtgtaaaatggtttgtcttaattataggagaaaaaggccttgttagaaataaaataaactgacttatttcactaatgaaaa

SEQ ID NO: 24191 - DNA, 11759 bp, Homo sapiens
  source 1..11759: mol_type = unassigned DNA
ggggggacgaggcaggggaagaacctgggaaggaaaaccagtagcatcagcagcagcagcagcagccgccgccgccaccaccgccgccacagcagtagcattagcggcagtagcagcatttagcaatagctttaacagctatagcgacagtagcagccgccctcctctctccctctcgcggacggccgcagccaccgcacagagcgggctccaggcgccgagcgcgcagcccgctcgctaggtagctccagccggggcgagcgacagtgtaagcgaagcacggacccttggagcagccgggcagccgcggaggctctgagtttcagggccagagcccgacagctctgactccatctagcgcggcggcggcggagcctgagggagcgagcgaggagagaggcgcgtccacctggcgggcccagcgtatggagctgaggcagaggcggcggcggcggcggcagcagtagcagcggcggtggcggctaaggcagctcgaacagctgcggcgacggcgacagcccagccttgactgcgaccgcgctagctacagcgcctgctgcctgagcccgccagcgacgtgcgcctcgggagtcggcctgtgaggtgttggacagcatttggacttggaatgaaacaataagaggttatattcatggataaccaacaagataaggctattgttgcctcagccaacggagaaaacactctgattaatggggtcaaagaaaatgactcagaggaccaggatgtggcaatgaagtcatttgcagctctagaagctgctgcacctatccagcctacaccggtggcacaaaaagagaccctgatgtatcccagaggtctcctgcctctaccctctaagaagccctgtatgcagagcccgccctctcctttgggcctgattgaagcacccgaacatgctgctaatagtgcttctgtgaatgccatctccctcacatctggcattgcaaaaggcctgaacacatggtcacttcccaatgaatgtgagaaagctccatttgccataatggagcctgcaggcatgtcagctctgaatggggactgtctcatgcagccaagtcggacttgcttaggctgcttcatggaatccaaggatgcagtagatcctgagccagggatcagtctgaaagttggtgatctaaatagggattatgaaacgtgtgcagtctctgatatagggattcagtgtattaatgctggagaaaatatgaaatatggagagcagctgctctcagaccagctcctaggcttccccctgcataagtcaagggcaggagacagacgagaaactgagaaacctgacattgacttggaggatccggctcagaaaagctattatgaggcattactgttagacaagtgcaatacagaagaagctttgcttgcaaattccaatcaggattggggttacttcgagacttttattagtgaaagtaagattgaactgcttgacctctgttccaaaaatgagctgtctgtcaacctattctctgaagaagatgtggataactacatgtttgatgatgatgaatcaacactaggcagtgatgtctgctccctgaaaattcgatatgaatcctttcaggacaatgttcgagacaagactactcttttgatgcaggaagatgcccaattcaacttttttcccagcgtctttactacctgccccaagcgagagtctaagagtggggccctgaagcagagcagtgatttttcccaattcaaggtccctgatgtgagcatcatctggggggaggaagataaaaacttggacaagaagaaaggcaaagaggaaggacaggaagacaaaggtgtagagaagaaagatggaaaggataatggagaaaagcctgccttaaataaaccatgcagtgggactgaagtagagcaacttaagaatccaaagcagggccatcttgctaattccctggagacatcagggagtttcagtgatgatagttccttcattgagatctcatatgatgctatgggtgagatcaaggactgtagtcgctatatggctcgggacactaattctggcagctcctcctcccaacagaactatgggctgcgagccaagagaaaagtcagatacagtgaagattatctatatgatgttgactcactagagggtgaaaaagtaaatgagaggaaggaatggctgccagttggttccaaagaggaagatgatgatgaatggtgtcccaaaaagagaagaaaagtaacccgtaaggagccccctgttattatcaaatatatcatcattaatcgctttaaaggtgagaagaacatgctggtgaagttgggtaaggtggatgccagtgagacaacagtgaatttgagtgagaatcagctcaacaaatatgccaagctggcacccttgaaaggcttctggcaaaagaagaagaagcagagaaacaccaacacggactccatcaagacacctttttcccaaaagcaaagctttgaaccaggtagctttgaggtgtcatttctgccacctgctcgcaaacgaaaatctaaacttggcaacaggcacaggattcaaagaatcccatccattgaaatttcagcaagtagtaaacagatttcattatgtaatgatcagaggcacgctagtaatcataaagaagatggaggcctaaaaggtacactgaagtcagcacctctgggtgctcctagctgtgcaaatggatcacatttaaatgacatcacaggccctgactcagtgaaagtcaaagcccaagacacagagtttaaggggccagagaggaaagtgctcaataaaatcaaatttaaaagtgaagctaggttaaaatctaagaaagtcaaagctgctgggcaagaaagcaagccaattgttcaaatgagccctctcttggaaaaccaatcctcaaaggctaatttaaagaatgaagttattcctgggacatcaaacagttcccgtctatctgaatttcatgaggcaaaggctgctaagagttccacttttctaccaacgacatgctcttctgaaatgcctttatcatctgctaatgttaccactaatatacctgttatcccgggagggtatctgcagacattgttagatgcttctgacttgtcaaataacactagtatctcatacttcagccaccattctccagagcaaaatgaaggcagcctcactcaaaccgaaaaatcatttgtacccctccagcctacccaggactgtgtgctcacctcatcctctgactctgagctgcagcagtcatctcataacttcaaaatggaatcaagcaactatagaaatgtgtggcccaacaaggctacttctggcacccaggaattcatggctgaagtctcaagggagatagccccaacccaatccagtgaatttggagcctcccaagtagtctccatggaaaataacctcacacctacaacatacaatccaatctgtctcaatagtggtggcagtaattgcaacaaggtcctgtatgactccatgcaagatacccaactcccatctgatgactcttaccaattatgtcactttaataatggagagatctgctttcctttccagcaggggccagtcaatatggatgatggtcggctctttagctttgattcaatggccccactctctgtcagctcaagtaattattgctccttaagcttgaagtcctgtgaaaaggatggcgatgatgatatcactgatgacttcctggcccattgcagccctaagctggtgatccagcaaagcattgatgagatagcaccactaaaggagtccactgacctcctggatatatccaacttcacccctgacaaattccgccactcttccctttcagagatgtccccaccggacacccctagtctttcccctcaaattaccagatgtgagagtatgaagacactaggaacactaaaggggttccaagagggtgtcccaggaccattggacagtgtggaaaaaatcaagtgggactgcagtaccctttcacggcaggtccaaatggaggatggatttactttaaataatcaccagtttcagttccatatgttcaatgatgaggattctgtcagcctgctccaaaaaaacccttgcctgtcaacatttaatgatccatctggtcaaattagtaccaacaacaaagtgtcaaaatcaagaaagaaaagttcacccagcaagagtggggctatgaaccaaagctcttctcagaaaaacaccaggaaaaaatccctcaaaggtaacaacaaggggattgaaaaaccacctggcaaaaactcccgccaggtccctaagtccacaaagaaagggaaatacatggctgccatcaatggagagaaaatgcaaattggcattggccgtgggggaagccaaaccaacaccatatcctccactgggaagacattggctgaatgtatccaacatggtggccctatggcctctatgaagatgccaagtcaaaagggactttctggagattgggccttggggaaggagagcagcccaggctggagtgatatgagcatgggcaccaacaccaacagccttctggatgatgaccaacgggaatttcaggagccttcctatatcttgtccaacattgcctctggtatggcagatgtgcagagattcatgatggcctccatagagcccctttgggaacccatggagcaccatggggatcccaacatattctactcccctgagtccaatagtctaaaattaaaaaccctcaaaatattggctgggacaccacaggagtctaagaaaaagatcaacagtgggtcccaaggagccactaagaatcacaggtcaatcaagggtgtgagcaaaagcaatgggaaaacagcaataggtgatcctggtcgtgcaaacatgcctggttataacgaggactctcgctctaccttctttgataaaaagtatagtaacatgagcactttaggcaataacggaccgacacacaaaaagttgtatcgtcacaaatccagctccaaggccctgagagatgagaaatgtaagggaaagcacatggagcgagaacaggtccacaaggatgagtctgggacagcttcttttgaaaaactgagggattccgactacaatctcctaaaagcagaaacaaccttttgggttttacctgtgtttgaagaagagactcgcattttccagaaagacatttgatgtttgtgttttatttctttcaaaatatgccttgtggtatgtatgttgacatgtaagtgcttaaagaaaagaattttaaattgtgggaatacgtctttggagcaaactttaatctcatgttctatgtaaaagacttaaaaagtcatacagttgcacaagtagtttatgcactatttacccacaaggaaaaaattgaaaacattgtgccaaactacaaacaagtgactgtactgtatatatttttacttctatatcaacatttggttgtatttggggaagttgtccctgttaatttactagaaacattccagtgattcttgctattaaccacccccacttatgtggatagcacctgtagatcatggtggaaaaatatgttgtgttacacaatttaccaaaattaaaggatactgtttgaaatgtgccaaattttcttacctcatctcacagattcacccacagtttaaagctcattaattatttttaaatggatatatacacacccaaacatatatatgtatatgtttgtgtgtgtgtgtgtgtgtgtatatatatgtatatatatatatacacacacacacgttcttttaaagttttagactctactgtcctgtgtggaaacatgaacagctaaacaaggcaaaataaagattttcttgttccattgtgtaagggttaaaattttggaaaagtctgaaggccacaacagctaagtccatcagggacccaagtatatgcatttacagaacgttttacaaggaaacaaaacagctgctttcaaagtttgttttctaaaagcaaaatctgtagctgaaaattatttaaagtgcaaagttatattgctgatactttatatctcagttttatatattttataatagtctgggataaattataaaaatagctataaaatcaacactaatgataaatgaagtatatagaatgcttttatttaaatagtttcctaaatgttttattccagttttgtcaaaagtgcactcatatcatggctttagtgttctttcagtgtttaatcttgcaatgccaatgtcatttaaagaaaatgttaaggcatcccagttcaaccaaatttttcttcttatgagtaaagtacatttactatcagataagatgaacaatttgtggcaacaactgatttgggccatatacccttagtctgaggataaccaatatttgatgccacacactaaacttaaatctcaattttaagtacaaatttttaaatcacattttttattcagtactccccctactttttaaaaaaaatttcacagccccaacattcctcactactactttttcttcccttttattcaccacttgacttctaacatttgatctcttttctttgcacaattgaaggcctgtgcatctgatgactgatgcattatggcacagatgagataatggatgtgagagcgctttgtagatcataaagtgctatacagatataggggattaatattattaatattgttagttgttgtcgttgttactattcttattaatattgttactaacctattaacttgtgaatatataggctggggtgggagggtggagaataagtgggaagggaaaaaggggatttaacaaaaaaagggaagatgtttcaaaaggaaaattttaagcaaaatatgaacctacctagtcaatgccacctaaatgtattcacaaacagagaagcaacatttgaaagtagtcagagagaaatggaaggaagcctgtcatgtatataagtatatacacttcccggtccatgattcctttcaccagcctgctctattccttacagctgggtcgtaaaatgaacaagcctgtgttcttgatcatgtgtgttcccagcgtcagtctcttgtgtctgtggggatgagtgggtgaggagcattctgtgaggctggtacaggcccattcctaggctttaatgctctgtttgcagtgagccctggaaaattacttagtggaaaggcaccagatgaaacatgtctcctgccccatagctaccattcaaaagggaaaataaccaaactggaaaaccttcttctatttctctattctgatagctagctgtactaaatgctatggccagtccctagaaactggtctttgttttgtttttgtttttgtttttgatttttctgttttgcagctgaattttggcttggaatcaccaactctgcctgtattgtgatccccaagactccagacctcagagtcacctgctggcttagaggagtggagtgctttctatgtaatgaaaaggtggcaattaatgaaaaaataaagaaaatgttccattaatacaatgtgtttttataaaagtaaatatgggagcagttgtcccagttttttttcggtatcagttcagctttggagaatggggtgtgagtggggtaggacagcctgaaactgttggaaacaatttccttgtgagaacttgctatcataagtcctttggaatggatattctttcagttgctcctatggagcccattaagggccaattctagggcatagttcatccctttctccaaagagaattgttattttaaagtacctttttaattggcctgcagtgtattatatgtttttaatatataaattagtgacgcataaccagtcactttgtactgaaacataaaaagaaacagagtttgagaaatgagcaataggccgaggcagaagatgtttattctcttaattgcatttaatattcctctcagtacattgtgttctgagatgttcatcatttagcattttgttggtcctgtctctgctctcacagttctttttcttcctgtcataaccagctgccttagtagagtataaaaatagtgttttgccctatcactggtatctcaagtcagaaatatatattatccttggtctgaaattcctgattaccgctcccttctaaccttccccctctgagaagctgtttcctattaatgcctccctaacagagtcccatttaatctttactttcctggaaatggtaacctcccttattcttcttacttaatctcagaccttggtcttagaatttttcttttatggtctcatatcccacctgcccaaattgtcagggctcaacaatcttaggctgctttcttctggaagttcagaaggaaaccttcccattcttaattgcctttaattgctttggctattttcaaatctaattttttaattaaattttttttaatttttatagagtaggggtacaaggacagttgtgttacatggatatattgcttagtgttgaaatctgggcttttagtgtacccatcaccgaaatagtgtacattgtacccaataggtggtatttcatccctcaaatataattttaaacacacactcgtgcccacatggacaaattatatcacatgactgaggaaacttagaaattccttttccctgaagatctgttaagaataggtctcatctcctgccctggttaggtgctatattatatggagaagggtattgagactttgggggtcatgtttgggctgtgataactggcttgaaccagtgaccatcctttctgcctcgccaaggtctcttataccagcttcttcacatatgctgcttcctcccagctttcccttctgacttcttgttactctgcaactatgtgtcaaggccttaccttttcctgatgttttcaaacctcctgcattactttgatcatcacttcttcagccatctcactgaagtccttggtgctagctgggcttttgtgacaactttcaccttctctgaactttttccttgctgggaagcatctgcgtgtgtgagggggctacggagggaagtgtgtgtgtgtgtaagagagaggcaaaaggatgcttcaaaagctataaacaactctagcaagcatcctaagtcctatgtgaggttttgcagttctagtgaatttctgttttagtaggtttcaattagcatttactgcctaaaggagaaaaaccatatccaaggaccttttagccatgcttgctattaccaagctggaccagtgtgatgtagatccaacatgtcttcagcttacagatgctctcagaacagttccaagaattgaagagagctaagtttttatgctgaagaggagaatggagcactagctagtcctaactattgctagaaatagaaatgtttattttctcctttattattgagaaattatctaatttaaggagtaaccattttcatttagggatttttttaatgactgcccatcactacagaaatatgttctttttataaaataaaactaatgtgaggttggtttgttttctaatcataaaattcactaagcctatagttacatttagaagatttagtaccaaaatcaaacttttagtaacaaacaggaatcttgtcaacacaatgtaggccagggattttgtaaaggtttctcaaagacccaaataagggagaaaaaaattttagttgggctgtttaacttgggaaacactgtcatcagcttgagggtcctcagccagcatgtgattattttgatgacaggactcaggctaccctttaaggcacattttttactcagcattaaacactagctacagtcgtgaagcagagctcccattgcagctacatacttgagatgtactcttggtttcagaatcgtaactaagaggtaaggcattggagaaggacaatgtaaaagacagaggtttagaacaaagtttatggtgtgaatgaggctttcaaaatcagtatctgggtaaattgatactaaagacactgaagaaacactcatccacataagatggaaaggatgtctgtccatctaacaagctcaggggtttctgagtctcagaatgacatcccatttcaaaaagaagaaaagagatattgaaatcattctgcctgtttgagagatgactggttatttacagcacaaaaaaaggcttagaatgaaaactagaagaggccttttgtttttcactcccagtgaggagagtagaaatcttaagatgctctactgggctacctgtagcactgactggagtttgctgcctacagagttttgaatgtactagtccttagtttccatagaactgaatgcacctctttagtaagttgctgatttatggtgctaaagaaaatgattattcccatttttttcttcttccccaagccccttaagcatttaagaaaatttaaaataaaagcgttagaggccctttttatgaatgtaacctaagtttctgtttgacatatgacactgcaacttaaaaatgttaggaaattatttgcctttttttttcttttagagttaagctttataaataatctgtagaatcaattgaagtttaaagcttaaggatcactcttaagacgtctacaaaatcttgtatatttttaagtgtgccaatttgtaacatattttgtaagtgtatatttttcttagaaaagtgctgtgaagtgtctgtatgtgagagttttcctttttctgcaccactaggtgctaataaaaggatatttacttcaaagtttctggttttagaaaccacaatacaaagaaaaaaaatacacttttgttggaaattttgtaacacaaaacatgttgtgaaagagtgtagtgatcttgtgcaaaaaaaatgaacatttgtgagcttcttgctgttttatagattttcttgtaaattattcttgtaacacttctggttttgttgttcttgttgcgaaggtttcaaatatttgtgactgaatgtacggtgaaactgtcataatgttacctagctgagttttgttattgtttatgaaataaataaaaagaaaagtttaaaatactgctttagaatcatatgtattagaaatcaaaccatttctaattaaatctatgtcccaaataaaacgttctttatcatctagagcagtgtttctcaaactatctgtggtgagggaccaatagtttttgcaatccatcacagaccaatactattataaaacacaacaaaaatgaatttctaagaaagttaaatggaaaaaagatatgcaaaataaaagcccaaatgtattagatttaacatgtaaaattacatttcgagataaacataacataaggggaaagaaacgaattgcaaaaagttggtaccctgtttgagacaagtccactcatcaatgtcaaattgccatagaaggttctaatcatactttgaataatactttgactagaccagcagcattgccatcatctgggaacttgttaggaatgcgaaattccaagccctacaccaattctgctgaatgagaatctgaattttaacaagatccctaggtgttttgtgtgcatgttaaagtttgagaagcactgggctagagttttgtgtaggggattcttttgcccctcaaattgaggaatcatcttctagtgtgtccagtcttcaaagaccttaaaacaaattgtgtctttgttttgtgatccagatggaatctgcagagatgcagtcctctcaaagtgttaaagctgtttattgaaagtaataaatgctgatttgcctggtacccaaaa

SEQ ID NO: 24192 - DNA, 9265 bp, Homo sapiens
  source 1..9265: mol_type = unassigned DNA
gcggcggcggtggcggcgcgaggcggcatgagggagccgctcgtgctgggtcctgccaccaccatggttccagtggttgagctttgctgaagcccaggcatcatgtacagtgtagaagacctcctgatctctcatggatacaagctgtcaagagaccccccagcatcacgcgaggataaccccaaggggcgccaggcagcgaggactgggacacgagcaggccagggcctgcagaacgggcatgaggatggccctgcggccctcgcacatcgtaagacgtccgcggggaaaggacatgtgagtgactccgaaagccgccgcagcacaccgagaggccacggggagccccagagcacttctgcttccagaacctcggaggcggggttttgtaatcaacccccctcagcatggtcctctcatcccccgactggtaacgaccaagcctaccggagaagaggacggcaagaagccaggagccagaagccgagggagcacgaaaacctggaggccagaggaatggcccaagcccacagcctgcctgtccacgtgagggagggtccatgggaagttggaggaaggtcagagcatgtgatgaagaagccagtttgggaagaagaattgcgaatgtcaggtcctgccaagtggcagaacgtcagcctggaaagctggaaccagccaaggaaattagggaggcagatgtctgatggagatggggagagactgtttcaagacctgtacccattcattcaaggagaacatgtgttgaattctcaaaacaaagggaagtctcgctcactgcctagagttctttcccccgagagcctgagttgcacggaaattcccattccattaaatgaaagacattcacctaaaatgccaccgtatcctcccacttgcgcaccaaatttggactccacgaggaattctgagaagagtggctgctcagccccatttccccggcctaagtttgggaggcccctcaagcccccatcttacagctcgcaccagcagtctaggggaggagcggacagcagtgactctcaggacagccagcagatggacgcctatgtccccaggcatgagctctgcctgtcagaccctggattggaacctccagtgtacgtgcctccgccctcatacagatcgcccccgcagaacatcccaaacccctacttggaagacacggtgcccataaatgtgtgtggcggtcacagtcaacagcagtctccgaccgagaaggctggggccagcggtcagcctccttcaggcccccctggaactgggaatgagtatggtgtgagcccccgcttgcctcaggggctccccgcacatccccgacctgtcactgcctatgacggcttcgttcagtacattccctttgatgatccacggttacgacattttaaactagctcagccccagggtttctgtgaagacataaagcttgacgataaatcatataactccagtcctgtcactgctcaagagccggctcatggaggaatgcagcctgatggtgccatttggaatccacagagcttaatacccccgtcgggggatgagagaggcctggtcttggccgattccagcccccggtggctgtggggccagccccccggggatggggaaaacagtggcctccccaaccagagagaccgctgtgtggcaaggggacagtggcctgatgtgagaggcagccagcacgggcacactggaagacaagtttcctccccttactcacagggcgagagcacctgcgaaactcaaaccaagctcaaaaagttccaaactgggactcggaccaagaaaagttcaaagaaaaaaatgaacgagactatattttgcttggtttctatcccagtgaaatcagaatcacatctgccagatagagatatggacaacaatgacttaaagcccagtgctgatcaaaagaatgggtctgataagagcccggctctgcaagaacagagtctgctgagcatgtcttccaccgacctggagctgcaggccctcacaggaagcatgggtgggagaacggagttccaaaaacaagatctaggggaaccagaagaagacagacaaacaaatgacctcagtttcatccaccttacaaagcacagagaactcaagcattctggctcttggccagggcaccggtacagagatcagcaaacacaaaccagtttctccgaggagccccaaagttcgcagctgctccctggtgcaaagctgggagggccgagtcgtgcagcattgagtccaaaatgttcagaccctgctgcctccgaagctcagacgcacacagcattccctaccggtgatcacaaacagaggccaagtgcccgtaacctgaaaggtcacaggtccctcagcccatccagcaacagtgcgttctcaaggacttccttgtccgtggaccaggcaccgacgccaaaagcaggccgaagtcagccctgcgtggatgtccacgggcttggagcccaccctgggcctaagcgggaggtggtgaagggggagcccacgggcccttgcaacagtaaacaactctttgggcagtttctcctgaaaccggtcagccgtcgtccctgggatttgatcagtcagttagaaagttttaacaaggagctccaggaagaggaagaaagcagcagtagcagcagcagcagcagcagcagcagtgaggagagtgaggcggagccgcagcaggagaaccgtgctcactgcagacaggaggatgtgggcttccgcggaaacagcccggaaatgagggttgagccacagccgaggatgtgggtgccggagagccctgtgtgtaggtcgggaagaggtgagagtaagtctgagagctggagtgaggagctgcagcctggccacccacgtgcctggcctccatccccgggccgctttcgcgtggaagaaggtggcggtgcacctttctgctcagcagatggaagcacgagtgcagagaagagacacctggaggttagcaacggaatggacgagctggcaggtagcccatttcctgtgacgagaatgtcttcaagatcaagtgacgcaaaaccactgcccgcgtcctatccagctgaacctagggagccccaggaaagtccgaaaatcaccagtgctttcagctctgtgaaaccaagtgaagcggtccctcggaagtttgacagtggtggagagaggggggcagggctcccactgtccctgtctaacaagaaccgagggctctcagctccagacttacggtctgtggggctcacccctgggcaagaacagggtgccagtgagctagaggggtctttgggtgaagcaagcacaatagaaatccccccaggtgagtccttgcaagccagggctgcaaggatcctgggcattgaggtggcggtggagtccctcctgccgggcatccggagagcgggacagaaccagcctgctgagcccgatgcaagtgcctgcaccccagagtccccccaggaagagttgctatctcgcccagcaccggcagatgtccccagggtgtccactgatgccttttatggcaggaggaagtgcggctggaccaagagccctctctttgtaggggacagggacagtgccaggcgggctcctcaggcttttgagcactcagatgtggacggggttgtcaccagcacagaccctgtccctgagcctgagcccagccccttggagtccaagttcttcgaacaaaaggatgtggaaacaaaaccacccttcaggtccactttattccattttgtagaaagaaccccaagtgtggcaggctctgaaaagagacttagaagcccttccaaagtgattgaaagtttacaagagaaactggcctccccgcctaggagagcagaccctgaccgcctgatgagaatgaaagaggtgagctcagtgtcacggatgagagtcctgagcttcaggaatgccgactcccaggaggacgccgaggaattgaaggccaccacaaggggccaggccgggctcccgggaggccttgtgtctcctggcagtggggaccgtgcccagagattgggccactcactctctgtgtccaaggacagcatctccagggaagagaaggagcatccggcagcacaaaaggagaagagcatggatcaagacttctggtgcccagattcctatgaccctagcagagtggagagggtgtgatgaaatgccggtggagcttgcattccgttgcgaattgagtattctcaagtagctggtagatttagtctatcagccccacttccccatgtagaagctggaagctgctgagtttttagcatcctgataacattctttaccactgccactaggaaacttgccatcctctcagaattgctttgtggcgataaagcaatcgtccgttgaaaccatctgtttttatagcatgaagatttaatgcctataattaggaaggagttttcacagaaaccctccctcatgacagatttgactaagctggtaaatagtttggtgttgctctcattctgggtgaagatttcaatgtggaagatctagcaaatgctttggaaaggcctgtgaatggtgtgctcccctctgtgtctccatggcctgcagtccatgctcttgtgaaggagtttgggacactggctgttgcccggtgtttcagcactttcagtttaggggaaatgtgaatcaataggtatgatccatttctaatcaatttggccttctgctgctggaagtaactttacttataagtaacttgccatcagagaataaaagcaatatcttttaagttcctgaaaaattaaaacttgtactgtaatatactaagagtattatttatctggcagtgaaatattttgatcatttgcaaacacgccattgtctgctttgcactcagtattatctatttttattttctgtatgggtatttagaaattctttatatgaaaaataattgctggtttaaaatagaccattttaacaaagtgactatatttctttttacgaaaatgctatttttctatgatgtaaacaattgttaggcggcagatttttaaggaagtattattttatttaagagtctgtatccctttgtgtgagaggaacccaaagagggttcacttttgctttaaagctctgtcccttacccactgacaactctgctacttttattttatcttagaaaatgtcaatatagacatatcacagggttaataaaagaaacttttcacaaagatttttgtacaagtgtagctatcaggttatatttgaaaataaccctctgaaaaccagccaacattgtcatgacaatttttgctgccgtatcaactagaattaccaaaaaacatagttttatctttgtatgtgtgtggggatctaccctgagaccatgcttttcttcccaccctgccaccccacccctttaaagaaatacgtatttttatctagaatgatcttgaattagtctctgcatatttttagaaagtgcttggggacattatatatatgccattacaaaagcattatgaggcctatgtattctactgtgtttaatactgcattaacctgcacaaagtttatgcattttttcatgcatttttttccttctttctaagtaaggtattcctgacaactaacattccctaaatcatttcccctccctccctccctccctcccttcctttcttccttccttctgtcctccctcccttgctacctcttgccctccttccttcaccctgtcctccttttcccttttattttttccccttctctttcattttattttcttttagagaaaccaccttatctatttttagacatttcgaattcctaaaatgtgaaccgttgggtgatctgtcctttggccctaaaacggctggccgggctgtcccggcctgttctcatctgtaccgtatgattttatttcataataactttatgtatttggactgtaacaaacaaaacagaacctaagtcgccccgaaaaatctttccaagccttttcaaaacacttatctgcagtccagaattcagctcttatgaaaagtgagagtgcactccagttttcacagcagcaataagtgcgggaaacaaaaagatcctcttcccaggaaaagttgagtggggaagagttcagacactgttgtagctggtgaatcattgaagtcacctggtagtaccaaataagggctgaggcgcctggaggtctttgtggggtcttccctctttaaatgcaaacgtaagaaggtatatgtgtatatacatttatatacgtgcacatgtatactcgtacatgtatgcacacatacccatacatgtatatgaactccgttctgatttcctctgaaattttgttgataccatctaaatacctctttgaatcaaaataacttaattttagctcattcctcaagagaaagagaaggatccccaaggaagaaaaactgttgtaccttctgtgattctcaaaccaaaatgtgatgcgcttctgttttgttatcttaaattgttgtatcatatctttctgaaaccattctgaattaagttgaaattttcaacatttatactttaactgttctaaatttaagcctacatgtaaatcttttttggggggaaggtaacttgaaaagtttaacttgaaaatttgacctttaaactttcatattctaaggtaaataatagcctataaccaacaacagctttcccagaggtcttgaatttaacactaattgtttagttattgtttctatttctcatacatacataacttcgttttttgtggctggaagaaaaagtttctatattttgtatttgtctttgttcttctcatgcacacaatttactgttggtgtttaataatttggagctcataaaattaaaagttgtaattttgaccatttgggctaaaaattatatgagggattacatatgcaatggattagtatttcttgatttgcaaaagaagggaaaatgatggtaatttagctcaaattgcctttctttgaagaaaatttctgaatgactgaaaaccaaatatctatattatcactttcaacctcatgtttctgcaaagtacagaaaaactcctcactgacagtgcacccagcccctgactgggttttcaggattatgtccatgtgcataactgcttggatttcttcttttaaagtccctaaaacatgaatctgttctttgagatcctggtttccttagcagagttgtaggttgcgggtttcattcacgtggaaattctaagtagaacttttgctgccccattttactgttggtgaagggccgttgttaatggaagtttacgttttaaaactcagatgactcagaaaccagactgtgatcattttttgcagcagcaaaatgacttattctgacagcatctcggtttggggcttctgaagaaaaaggatgaagctgatctgttgaaacaactactttcccaactcggaggcaaaaggggctgatagaagataacattcacctaccatttcatcttgtgacccccagagatcacgtttgcgtgttctggctgagttttttattattgtttgttttaaatgattaaataatacacaattaaatgtcaggatagcatctcttgcaaagtgaccagtgcagcagaattgtctttctatccatatttgagcttagagaaacatttcccatgtcctaagttcttagaagcaattactttagcgttggggagcattgttctaccagacccatttatgcaggggagatgaagcttaaaagacgggatgtggggtgggagtgtgtttcttaagccgaagctgttgcaggctgggggatttttgcattttctttttgttttgtttttgactgcagattctgtacatctgtctgtgggaggagagttgctactcaggacaggatttaagagacacattccagtgacctttaagaatctgcatggcgggaggtccttctccaggagtgtgggttggtccactctgggacccaccacactaagaagggggagatgataaaataacattaaaggaagaatggcctccagcctgcaggttttgttggaaagaaataaaaagggagtcattaagaccataaattcagattgaggcctcttgaaaaggttgatgtgggctagcaacctgcctgtcgaaacagtccttggttcatcagcagtgtgggaaggcagccaaggctcctgcagattcctggcatcgaccttggaaagcctctgcgatacttgtgtgtacgaatacagcagaggacagggaggtccttgttctgtggtctctgtttagtgactgaaacttaaacccaaaggcaagcccagattgtctggccgttcatccccatgctttgataggggttaggaggaaccctttccgtatgaaagacaggccctactagggcttacaaccaagccaaaggaccatctcttctttcttccacctcccttcacccctgccccgcagcagagccgagatgtgagacattcattgtcacggagcaaggagacaaaggcaagttcaagttgagaagcatatggcagcaaacagaaatgaaaaccatatgtcccagcaaggggaaaagcagtcatttccagattataaaaatcaatgaagtactctccacctaggtcagctgaaattcgagccctcacagtcaggcctgtcagagaagttaagcagaaacatctcggggggacttctaaaatttagtgaagacaaggccttgcaactccaaagaaactttttttcccccccttgaaacagggtcttgctctgttgcccagcctggagtgcagtggtgcagtcacggctcactgcagcctcaagctcctgggctcaagcactatccccacctcaacctccttagtagctgggactacaggtgcacaccaccatgcccagctaaccacagaaactttcatctcttcattttttctttgggcaccattaatacctaagacaggtagaaagggtcccagaaagacaccattggtaatggccgattgccggctgcagtcatcgcccccagatcaggctggtacaggatgccttaaggtgatgagaggtgagggtgcatgaagaataatgagcacagggaagagagaagcaggacaaagtagcagataaaatgccggcaaagcacagatgaatgtcttcaagaagctcttgtatttctctgcacagtgtaaatatccttgctatttcaggatggcggctggcctgctcagtaacatacatgttccaaataaagattttgcatgaaagta

SEQ ID NO: 24193 - DNA, 6802 bp, Homo sapiens
  source 1..6802: mol_type = unassigned DNA
gctgccgcgggcggtgggcggggatcccccgggggtgcaaccttgctccacctgtgctgccctcggcgggcctggctggccccgcgcagagcggcggcggcgctcgctgtcactgccggaggtgagagcgcagcagtagcttcagcctgtcttgggcttggtccagattcgctcctctggggctacgtcccggggaagaggaagcgaggattttgctggggtggggctgtacctcttaacagcaggtgcgcgcgcgagggtgtgaacgtgtgtgtgtgtgtgtgtgtgtgtgtgtgtgtgtgtgtgtgtgtgtgtaagacctgcgatgacgacgaggaggaacaagtgggacggcgagtgatgctcagggccagcagcaacgcatggggcgagcttcagtgtcgccagcagtgaccacagttcttgaggccaaatctggctcctaaaaaacatcaaaggaagcttgcaccaaactctcttcagggccgcctcagaagcctgccatcacccactgtgtggtgcacaatggcgccccccacaggtgtgctctcttcattgctgctgctggtgacaattgcaggttgtgcccgtaagcagtgcagcgaggggaggacatattccaatgcagtcatttcacctaacttggaaaccaccagaatcatgcgggtgtctcacaccttccctgtcgtagactgcacggccgcttgctgtgacctgtccagctgtgacctggcctggtggttcgagggccgctgctacctggtgagctgcccccacaaagagaactgtgagcccaagaagatgggccccatcaggtcttatctcacttttgtgctccggcctgttcagaggcctgcacagctgctggactatggggacatgatgctgaacaggggctccccctcggggatctggggggactcacctgaggatatcagaaaggacttgacctttctaggcaaagattggggcctagaggagatgtctgagtactcagatgactaccgggagctggagaaggacctcttgcaacccagtggcaagcaggagcccagagggagtgccgagtacacggactggggcctactgccgggcagcgagggggccttcaactcctctgttggagacagtcctgcggtgccagcggagacgcagcaggaccctgagctccattacctgaatgagtcggcttcaacccctgccccaaaactccctgagagaagtgtgttgcttcccttgccgactactccatcttcaggagaggtgttggagaaagaaaaggcttctcagctccaggaacaatccagcaacagctctggaaaagaggttctaatgccttcccatagtcttcctccggcaagcctggagctcagctcagtcaccgtggagaaaagcccagtgctcacagtcaccccggggagtacagagcacagcatcccaacacctcccactagcgcagccccctctgagtccaccccatctgagctacccatatctcctaccactgctcccaggacagtgaaagaacttacggtatcggctggagataacctaattataactttacccgacaatgaagttgaactgaaggcctttgttgcgccagcgccacctgtagaaacaacctacaactatgaatggaatttaataagccaccccacagactaccaaggtgaaataaaacaaggacacaagcaaactcttaacctctctcaattgtccgtcggactttatgtcttcaaagtcactgtttctagtgaaaacgcctttggagaaggatttgtcaatgtcactgttaagcctgccagaagagtcaacctgccacctgtagcagttgtttctccccaactgcaagagctcactttgcctttgacgtcagccctcattgatggcagccaaagtacagatgatactgaaatagtgagttatcattgggaagaaataaacgggcccttcatagaagagaagacttcagttgactctcccgtcttacgcttgtctaaccttgatcctggtaactatagtttcaggttgactgttacagactcggacggagccactaactctacaactgcagccctaatagtgaacaatgctgtggactacccaccagttgctaatgcaggaccaaatcacaccataactttgccccaaaactccatcactttgaatggaaaccagagcagtgacgatcaccagattgtcctctatgagtggtccctgggtcctgggagtgagggcaaacatgtggtcatgcagggagtacagacgccataccttcatttatctgcaatgcaggaaggagattatacatttcagctgaaggtgacagattcttcaaggcaacagtctactgctgtggtgactgtgattgtccagcctgaaaacaatagacctccagtggctgtggccggccctgataaagagctgatcttcccagtggaaagtgctaccctggatgggagcagcagcagcgatgaccacggcattgtcttctaccactgggagcacgtcagaggccccagtgcagtggagatggaaaatattgacaaagcaatagccactgtgactggtctccaggtggggacctaccacttccgtttgacagtgaaagaccagcagggactgagcagcacgtccaccctcactgtggctgtgaagaaggaaaataatagtcctcccagagcccgggctggtggcagacatgttcttgtgcttcccaataattccattactttggatggttcaaggtctactgatgaccaaagaattgtgtcctatctgtggatccgggatggccagagtccagcagctggagatgtcatcgatggctctgaccacagtgtggctctgcagcttacgaatctggtggagggggtgtacactttccacttgcgagtcaccgacagtcagggggcctcggacacagacactgccactgtggaagtgcagccagaccctaggaagagtggcctggtggagctgaccctgcaggttggtgttgggcagctgacagagcagcggaaggacacccttgtgaggcagctggctgtgctgctgaacgtgctggactcggacattaaggtccagaagattcgggcccactcggatctcagcaccgtgattgtgttttatgtacagagcaggccgcctttcaaggttctcaaagctgctgaagtggcccgaaatctgcacatgcggctctcaaaggagaaggctgacttcttgcttttcaaggtcttgagggttgatacagcaggttgccttctgaagtgttctggccatggtcactgcgaccccctcacaaagcgctgcatttgctctcacttatggatggagaaccttatacagcgttatatctgggatggagagagcaactgtgagtggagtatattctatgtgacagtgttggcttttactcttattgtgctaacaggaggtttcacttggctttgcatctgctgctgcaaaagacaaaaaaggactaaaatcaggaaaaaaacaaagtacaccatcctggataacatggatgaacaggaaagaatggaactgaggcccaaatatggtatcaagcaccgaagcacagagcacaactccagcctgatggtatccgagtctgagtttgacagtgaccaggacacaatcttcagccgagaaaagatggagagagggaatccaaaggtttccatgaatggttccatcagaaatggagcttccttcagttattgctcaaaggacagataatggcgcagttcattgtaaagtggaaggaccccttgaatccaagaccagtcagtgggagttacagcacaaaacccactcttttagaatagttcattgaccttcttccccagtgggttagatgtgtatccccacgtactaaaagaccggtttttgaaggcacaaaacaaaaactttgctcttttaactgagatgcttgttaatagaaataaaggctgggtaaaactctaaggtatatacttaaaagagttttgagtttttgtagctggcacaatctcatattaaagatgaacaacgatttctatctgtagaaccttagagaaggtgaatgaaacaaggttttaaaaagggatgatttctgtcttagctgctgtgattgcctctaaggaacagcattctaaacacggtttctcttgtaggacctgcagtcagatggctgtgtatgttaaaatagcttgtctaagaggcacgggccatctgtggaggtacggagtcttgcatgtagcaagctttctgtgctgacggcaacactcgcacagtgccaagccctcctggtttttaattctgtgctatgtcaatggcagttttcatctctctcaagaaagcagctgttggccattcaagagctaaggaagaatcgtattctaaggactgaggcaatagaaaggggaggaggagcttaatgccgtgcaggttgaaggtagcattgtaacattatcttttctttctctaagaaaaactacactgactcctctcggtgttgtttagcagtatagttctctaatgtaaacggatccccagtttacattaaatgcaatagaagtgattaattcattaagcatttattatgttctgtaggctgtgcgtttggactgccatagatagggataacgactcagcaattgtgtatatattccaaaactctgaaatacagtcagtcttaacttggatggcgtggttatgatactctggtccccgacaggtactttccaaaataacttgacatagatgtattcacttcatatgtttaaaaatacatttaagtttttctaccgaataaatcttatttcaaacatgaaagacaattaaaacattcccacccacaaagcagtactcccgagcaattaactggagttaattgtagcctgctacgttgactggttcagggtagttccccatccacccttggtcctgaggctggtggccttggtggtgcccttggcattttttgtgggaagattagaatgagagatagaaccagtgttgtggtaccaagtgtgagcacacctaaacaatatcctgttgcacaatgcttttttaacacatgggaaaactaggaatgcattgctgatgaagaagcaaggtatttaaacaccagggcaggagtgccagagaaaatgtttccccatgggttcttaaaaaaaattcagcttttaggtgcttttgtcatctcccgcagtattcatcctcatgggaccatcttatttttacttattgtaatttactggggaaaggcagaactaaaaagtgtgtcattttatttttaaaataattgctttgcttatgcctacactttctgtataactagccaattcaatactgtctatagtgttagaaggaaaatgtgatttttttttttaaccagtattgagcttcataagcctagaatctgccttatcaggtgaccagggttatggttgtttgcatgcaaatgtgaatttctggcataggggacagcagcccaaatgtaaagtcatcgggcgtaatgaggaagaagggagtgaacatttaccgctttatgtacataacatatgcagtttacatactcatttgatccttataatcaaccttgaagaggagatactatcattcttatgttgcagatagccctctgaaggcccagagaggttaaataacttcccagaggtcatggccaagaagtagtggctccaagaactgaatgcaaattttttaaactgtagagttctgctttccactaaacaaagaactcctgccttgatggatggagggcaaattctggtggaacttttgggccacctgaaagttctattcccaggactaagaggaatttcttttaatggatccagagagccaaggtcagagggagagatggcctgcatagtctcctgtggatcacacccgggccacccctccctctaggtttacagtggacttcttctgcccctcctccttttctgtccttggccatctcagcctggcctctctgatccttccatcacagaaggatcttgaatctctgggaaatcaaacatcacagtagtgatcagaaagtgagtcctgtcttgtcaccccatttctcatcagaacaaagcacgagatggaatgaccaaccagcattcttcatggtggactgcttatcattgaggatctttgggagataaagcacgctaagagctctggacagagaaaaacaggccctagaatatgggagtgggtgtttgtagggctcacaggctaacaagcactttagttgctggtttacattcaatgaaggaggattcatacccatggcattacaaggctaagcatgtgtatgactaaggaactatctgaaaaacatgcagcaaggtaagaaaatgtaccactcaacaagccagtgatgccaccttttgtgcgcggggaggagagtgactaccattgttttttgtgtgacaaagctatcatggactattttaatcttggttttattgcttaaaatatattatttttccctatgtgttgacaaggtatttctaatatcacactattaaatatatgcactaatctaaataaaggtgtctgtattttctgtaatgcttatttttagggggaaatttgttttctttatgcttcagggtagagggatttcccttgagtataggtcagcaaactgtggcctacagcctgtgtgtgcacgccccatgagccgaaaagtgggtcttatgttttcaaatggttaaaaataaataaaaaaatttgaaacatgtgaactatatgacattcagatttgtgttcataaataaagttttattggaacata

SEQ ID NO: 24194 - DNA, 3239 bp, Homo sapiens
  source 1..3239: mol_type = unassigned DNA
gctggggctcggggctcggctctgggagagctcgggcgggagcccagagagagccgcacggggacctcaagccagaccccagcgttcagccgccacctcggcccgggcccgccccgccccggccccgcccctttcctgcccgccccaccccctctacgcccctccacccggaccccgccccctgggcagccccccgccctctccgcccgggctccgccccctccccctggccctcgccaccggtccagggaggggacggcgggacaggcgggaccagtgggaccggcgggagggctgacagggcggggacatggccgcggcgccgggagggtcagcgcagcccgctggccccggcccgcgcctgggtttcagcaccgcggacagcggcgtcggcatgagcgggctaaaccccggtcccgccgtacccatgaaggaccacgacgccatcaagctcttcgtggggcagatcccgcggggcttggacgagcaggacctcaagccgctgttcgaggagttcggccgcatctacgagctgacggtgctgaaggaccggctcaccggcctccacaaaggctgtgccttcctcacctactgcgcccgggactctgctctcaaggcccagagtgcactgcacgagcagaagaccctgccagggatgaatcgtccgatccaagtgaagccagctgccagtgagggccgaggagaggaccgaaagctgtttgtggggatgctgggcaagcagcagggtgaggaggacgtcagacgcctgttccagccctttggccacatcgaggagtgcacggtcctgcggagtcctgacggcaccagtaaagggcgcctcgtccagcctcgtggtcaagctggcggacaccgaccgggagcgcgcgctgcggcggatgcagcagatggccggccacctgggcgccttccaccccgcgccactgccgctaggggcctgcggcgcctacaccacggcgatcctgcagcaccaggcggccctgctggcggcggcacagggcccaggcctaggcccggtggcggcagtggcggcccagatgcaacacgtggcggcctttagcctggtagctgcgcctctgttgcccgcggcagcagccaactccccgcctggcagcggccctggcaccctcccaggtcttccggcgcccatcggggtcaatggattcggccctctgaccccccagaccaatggccagccgggctccgacacgctctacaataacgggctctccccttatccagcccagagccccggcgtggctgaccccctgcagcaggcctacgctgggatgcaccactacgcaggccccgaaggctgtaacctcttcatctatcacctgcctcaggagtttggtgatgcggaactcatacagacattcctgccctttggagccgttgtctctgctaaagtctttgtggatcgagccaccaaccagagcaagtgttttgggtttgttagttttgacaatccaactagtgcccagactgctattcaggcgatgaatggctttcaaattggcatgaagaggctcaaggtccagctaaagcggcccaaggatgccaaccggccttactgacctgctttcactgaccagccacagaaagaaacagaagagtgagaagaaaggagaggaaaagcacagaaacgcttgagcagcccttcccgaaggagcagctgcggacggaggtggatcggacccaaggctggtgcctggggctaaggccactctaaggattgtttttatcaagtgggttgttctgtgcctgcagcatagagcgcaggctggcagagcaaatagggctggtgaggagtgactgtccaggggaaccagcagagggcgttgggggtgccaagggcttctccgcaagggaagcccagatttacttctttcaaaatcatatcattccttagagtttagggaccaaaggactattgcttttttaagaatatatatatctatataaattaaaacaaagaaacaaacaaacaaaaaacaagacaaacaactacaaaaaaagacagtatagagtctcataaaagctgcctttaaatatccctaggagacagggtgaaggagacccttgacagccccagcctaggcagatgggggctgtggaaagattgttctgtgtctcattccctcttaagccactcccccaccctgcccttttaaaaataattaaggatttgaggtctaggctcacatgcaggtaatgagaacgttatggaagcagtgaacccacaatccacaatccccaaactcagagtgcatcccagaagaggccccaggcagagctcaggttggccctggcctttgccatcccgggaggccccctagccagcaagagtgggattgcctttcctgtggaaccactgcttccccaggcgggaagaaagagggagttctggccacctgagcctttcccttgccaatccaggtagacagaggccctgcctttggctgagctgagacacctcctgtttcccttccccttgaaccagtcccagtgtccccttgctccaggctaccttctgtctcttagtctaagtttgcccacctgtaaagtagattcaggatatctgtagagggctgtgacaacagacttggaaggtttgctactgtatatactgccattgagaaggggaaatttttcaatatgtagaagcttcagaattagaggtccctctttaccccagacctgggagggaagtagatgttttgccaaaatacttcttcattcctttaaaaactacatctttcctatgcaagagtgtctcacatgtgcttaaccgaggtgcttctagttggtgagcagtgttgagcttagaagtggtgtgtgctctgtctgtctgtctttgtctgtctgttgtatacagtgggtgccatataaagctgatcaatggtggtgcttcctgcctgcttctgtgagatgggcaaaagattcagcttagaacaccatgactcaccttgccttggtcagcctttcctgggcctgtagggccttgcacatatttttcccaggaggatttcccctccaccccacaggcatggatcagcttggtctgaggccccagctgtgtggggtccctctaatccccagatgttgctgaggctgaaggcctctgatctgataacatgtcagatagtaaaagatgtgggggtgggggtggagggctcctccttcataacagtttctaagaaaacttgttcccacctgtt

SEQ ID NO: 24195 - DNA, 911 bp, Homo sapiens
  source 1..911: mol_type = unassigned DNA
ggtccttgtccagtgaaacaccctcggctgggaagtcagttcgttctctcctctcctctcttcttgtttgaacatggtgcggactaaagcagacagtgttccaggcacttacagaaaagtggtggctgctcgagcccccagaaaggtgcttggttcttccacctctgccactaattcgacatcagtttcatcgaggaaagagcatgtcctttgcaacctgatcacacaaatgatgaaaaagaatagaactttctcattcatctttgaataacgtctccttgtttaccctggtattctagaatgtaaatttacataaatgtgtttgttccaattagctttgttgaacaggcatttaattaaaaaatttaggtttaaatttagatgttcaaaagtagttgtgaaatttgagaatttgtaagactaattatggtaacttagcttagtattcaatataatgcattgtttggtttcttttaccaaattaagtgtctagttcttgctaaaatcaagtcattgcattgtgttctaattacaagtatgttgtatttgagatttgcttagattgttgtactgctgccatttttattggtgtttgattattggaatggtgccatattgtcactccttctacttgctttaaaaagcagagttagatttttgcacattaaaaaattcagtattaattaaacattacttattctaccctcttttttggcaaggaggacaaatacgcaatgttggaaaaccttggatggatatcttctctttaaaaaaatgtaaagataatttggtcttgagggtttaaacggttgataatgcctctacaacaacaagaaaaaagataaaatactaggatagaatcatggtgggcacagtggcttctcaggaggctgaggagggaggtttgcttg

SEQ ID NO: 24196 - DNA, 15574 bp, Homo sapiens
  source 1..15574: mol_type = unassigned DNA
gaaatcttttaggcctttagatgttgttctggaaaaactttagtaatggatcaaaggaagaatgagagtattgttcctagtataactcaattagaagattttcttacagaacacaattccaatgttgtttggctccttgttgctaccattttgtcctgtggatggattatttacctcacatattataattcccggaatgttggtcttattttaacactagttcttaacagattatacaagcatggctatatccatattggttccttctctttctctgttctttctggaaaagtcatggttcgtgaaatctattacattacagaagacatgtctattaggattcaagatggattcatcatttttcggtggtggaaaatgtataacccaaaacagaagcaacatgatccaaaggcagaaaccaggttatacatcacagtcaatgactttgaatttcatgtctataatcgctcggatctttatggacgccttcaagagttgtttggtttggagccaacaataattccacctaagaaagatgatgataaaacacgggaaattggaagaacaagaacccaatcgaaaattgaaagagttaaagtaaaaacagaatcccaagaccccacatcttcatggagatcacttattccagtcataaaggtcaatgtgagcacaggacgtttggcctttggaaatcactaccagccgcaaactctgtgcatcaactttgatgatgctttcttaacttatactacaaaaccaccttcaagtcatcttgaccaattcatgcatattgtgaaaggaaagcttgaaaatgttcgagtcatgcttgttcctagtccaagatatgttggtcttcaaaatgatgaaccaccgagattaatgggagaaggttttgtggtgatgcagtcaaatgatgttgacatctactactacatggatgagccaggacttgttccggaagaaacagaagaaaatattgaaggagaaatgagcagtgaggattgcaaattacaagacttgcctccatgttggggactggatatagtttgtggtaaaggaacagattttaattatggaccatgggccgataggcagagagattgtttgtggaagtttttctttccacctgactatcaagttctgaaagtttctgaaattgcacagcctgggagaccaagacagatccttgcttttgaattacgaatgaatattattgcagatgctacaattgatttgctgtttaccaaaaatagggaaacaaatgctgtacatgtaaatgtaggagctggctcatatttagaaattaatattccaatgacagttgaagaaaatggttacactcctgctattaagggacaactcttacatgtggatgccactaccagcatgcaatatcggacccttttagaagcagaaatgttagcattccacatcaatgccagctacccccgaatatggaacatgccgcagacatggcagtgtgaattagaggtttataaagccacttaccacttcatctttgcacagaaaaacttctttacagatttaattcaagactggtctagtgacagtcctccagacattttttcatttgttccatatacgtggaattttaaaatcatgtttcatcagtttgaaatgatttgggctgctaatcaacacaattggatcgactgttctactaaacaacaggaaaatgtgtatctggcagcctgtggagaaacactaaacattgatttttctttgccttttacggactttgttccagctacatgtaataccaagttctctttaagaggagaagatgttgatcttcatttgtttctaccagactgccaccctagtaaatattctttatttatgctggtaaaaaattgccatccaaataagatgattcatgatactggtattcctgctgagtgtcaaagtggccagaaaacagttaaaccaaaatggcgcaacgttactcaggaaaagtctggttgggttgaatgctggactgtcccaagtgtcatgcttacaattgattatacatggcatccaatttatccacaaaaagcagatgaacagctgaaacaatcattatcagaaatggaagagacaatgctatctgtattaaggccatcccagaagacatcagacagagttgtttcttctccctctacttcttcacgcccacctattgatccctcagaacttccacctgataaacttcatgtagaaatggaactttctccagattctcagataactctctatggacctctactaaatgcctttttgtgtataaaggaaaactactttggggaagatgacatgtatatggattttgaagaggttatctcaagtcctgttttgtcactgtcaacatcatccagctctgggtggactgctgttggaatggaaaatgacaaaaaggaaaatgaaggttcagccaagtcaattcatccacttgccttgcgtccttgggatattactgtacttgttaatttgtacaaagttcatgggcgtcttcctgttcatggaactactgatggtcctgaatgccctacagctttcttggaaagactatgttttgaaatgaaaaaaggatttagggagaccatgctgcaacttatcctgtcacccctgaatgtgtttgtcagtgataactatcagcagcgaccccctgtggatgaagtactcagggaaggtcacatcaatttgtcaggtctccagctgagagcacacgctatgttctcagcagaaggtcttcctttgggaagcgattccttagaatacgcatggttaattgatgtgcaggctggaagtcttacagctaaggtcacagcaccacagctggcatgcctcttggagtggggacagacatttgtttttcatgtggtatgtcgggagtatgaactggaaagaccgaaatcagttataatatgtcagcatggaattgatcgtcggttctgtgaatccaagttgagttgtattcctgggccttgtccaacttcagatgatttgaaatatactatgattcgtttagcagtagatggagccgatatttacattgttgagcatggttgtgctacaaatataaagatgggtgcaattcgagttgcaaactgtaatctccacaatcaatcggttggggaaggaatcagtgctgcaattcaggattttcaagtgagacagtacattgagcaattaaataattgcagaattggacttcagcctgcagtgctacggagggcctattggcttgaagctgggtcagccaatttaggacttattactgttgatattgctttagctgctgaccatcattctaaacatgaggcacaaagacatttcttagaaactcatgatgccagaactaagaggttgtggtttttatggccagatgatatcctgaagaataagaggtgtagaaacaaatgtggttgtctcggtggctgcagattctttggtggcacagtaactggcctagatttcttcaaacttgaagagttgacaccttccagtagctctgcattttcaagcacaagtgcagagtctgatatgtattatggacagtctctgctacagcctggagaatggataattactaaagaaattcccaaaattatagatggtaatgtgaatggcatgaagaggaaagaatgggaaaacaaatcagtgggaatagaagtagagagaaaaactcagcaccttagtcttcaagtaccattacgatctcatagttcatcctcttcctcagaagagaacagtagttctagtgctgcacagcctttgttggctggtgaaaaggaaagtccttcatctgttgctgatgaccatttggttcaaaaagagttcttgcatgggacaaaaagagatgatggccaagcaagtatccctacagaaatttcaggaaacagccctgtgtctcctaatactcaggataagtcagtaggtcaatctcctcttagatctcccttgaaacgacaagcctctgtctgttccacccgtcttggaagtactaagagtcttactgctgctttctatggggacaagcagcctgtaacagttggagtccagtttagtagtgatgtctctcgaagtgatgagaatgtactagactcaccaaagcagaggagaagttttggttcattcccatatacaccatcagcagactctaattcatttcatcagtatcgatcaatggattccagcatgtcaatggctgatagtgaagcctacttttctgctgctgaggaatttgagcccattagcagtgatgaaggccctggaacttatccgggtagaaaaaagaagaaaaagcaaacccagcagattgactacagtaggggttccatatatcacagtgtagaagggccacttactggacatggagaaagcattcaggattccagaactctgccattcaaaactcatccttctcaggcttcatttgtttctgcgttaggtggagaagatgatgttatagaacatctatatattgtagaaggtgagaaaacagtggagagtgaacagattactccgcaacaacccgtgatgaattgttatcagacttaccttactcagttccaggtaattaattggtcagttaagcacccaaccaacaaaagaacctctaaatcctcattgcatcgtccccttgatctggatacaccaaccagtgaagaaagttcatcgtcatttgaacagctttctgttccaacttttaaggttatcaagcaggggctcacagctaattctttgctagacagaggcatgcaactttcaggatcaacttcaaatacgccgtatactccattggaaaaaaaactcgctgataacacagatgatgaaacattaacagaagagtggaccctggatcaaccagtgtcccagaccaggacaacagccatagttgaagtaaaaggaactgttgatattgttttgactcccctggtggctgaagctttagacagatatattgaagcaatggttcattgtgctagtacccgacatccagctgcaattgtagatgatcttcatgctaaagtcctcagggaagctgtccaaaatagcaagactaccttttcagaaaatttatcttccaaacaagacattagaggaacaaaaactgagcagtctacaataggaacgactaaccaaggacaagcacagacaaatcttacaatgaagcaagataatgtaacaattaaaggtcttcagactaatgttagcataccaaaggtaaacttatgtttgttacaagcctcagtggaagaatctccaactacggctcctagtaggagtgtgactcatgtttccctagtggcattgtgttttgacagaattgctacacaggttcgcatgaacagaggtgtggttgaagagacttcaaacaatgcagaacctggtagaacatcaaattttgataggtatgttcatgccacaaagatgcagcctcagtcatctggatctctcagatcaaatgctggagcagaaaaaggcaaagaaattgcagctaagttaaacattcatcgagttcatgggcaacttaggggtcttgatacaacagacattgggacctgtgcaatcactgctattccttttgagaagtccaaagttttatttactcttgaagagttggatgaatttacttttgtggatgaaactgatcagcaagctgttccagatgtaactcgaataggtcccagccaagaaaaatggggatggataatgtttgaatgtggacttgaaaatttaaccataaaaggaggaagacagtctggtgctgttttatataacagttttggaattatgggtaaagctagtgacacagaaaggggtggagtgctgacatccaataattcttctgattctccaaccggcagtggctataatactgatgtctctgatgataatcttccatgtgaccggacaagcccttcctcagacttaaatggaaattctgtttcagatgaacaggatgaaggagtcgaatctgatgatttgaaaaaagatctacctctgatgcctcctcctccagattcatgtagcatgaagttgaccattaaagaaatttggtttagttttgcagctcccaccaatgtgagatctcacacacatgcattttctaggcagctgaaccttttaagcactgcaacaccagctgttggtgcatggcttgttcccattgaccaactcaagtcatctttaaacaaattggaaactgagggaaccttgagaatttgtgctgttatgggatgcataatgacagaagcattagagaataaaagtgtacattttcccctaagaagtaaatacaacaggcttacaaaagttgctcgctttctccaagaaaatccttcatgtttactatgtaatatactacaccactatctgcaccaggcaaattactccatcattgatgatgctacaatgagcgatggacttcctgctttggtaactttgaagaaaggtttagttgcactggcaaggcagtggatgaagtttattgtggtgacaccagcctttaaaggagttagcttacatagaccagctcagcctctgaaacctcaaatagctatggaccatgaacatgaagatggacttggattggacaatgggggtggtcttcaaagtgataccagtgctgatggagcagaatttgagttcgatgcagccacagtcagtgaacacacaatgctattagaaggaacagctaaccggcctccacctggtagctctggacctgtaactggagctgagataatgaggaaactttctaaaactcatacccatagtgactctgcattaaaaataaagggcattcacccatatcattctctgagctataccagtggagacactgccactgattctccagtgcatgttggacgtgctgggatgccagtaaaggacagtccaaggaaggagagcctactcagctacctgactggaagcttcccaagcctgcacaacctcctggaaggtactcctcagagaagcagtgctgctgtgaaaagtagctccctaacgagaacaggaaatacagtagccactgatatgttatctgaacatcccttgctatctgagccatcatctgtgagtttctataattggatgtcaaatgctgtgggtaatcgaggaagtgtgttacaagaatctcctgttacaaaatcaggacacaatagtcttcccacaggtgttgcacccaatcttccaacaataccctcagcctcagatttcaacactgtcttgtctagtgaccaaaatactttggatgggacacattctcagcatagcaccagtcaggatgatgtggcaggtgtagaagaagcaaaccaagggtttcctgctgttcagcttgctgatgcacaggttgttttcaagcctcttctgagtcatacagggatccagtcacaggatacaatgccattctgctaccgaatgtactttggagaacacctttcattttcagggactttggactgcctcagagcagatattgtggattcagacacagccaaagagagaaaaggcaaaagagcaagaaggcaaggccatgtgaatcttcctccacttgagttcaaaccagcattaatgttgggaacctttagcatcagtgctgttgtaatggaaaagtccgtgtgcacccctcagaactctaccagtgccctttcttttcatgatctcagcaagcggtattataacacctttcactgcaactttactatttcctgtcagtcaataagccagcatgtagatatggctttggttcgtcttattcatcagtttagcacaatgatagatgacatcaaagcaactcagactgatattaaacttagcagatatacagccggatctgcttccccaacacctaccttcaaaaccagaaaacatcgggactttcgttcatctgactttagccgcagttctagaggaagtcttaatggtggcaatagagtaaataatgcaaagaacaaacggaccaacaatgagaataacaaaaaggaatctcgaaacaagaattcattaggaagatctgaaagaagaacatcaaaagtgtctaggaaaggttcaaaagatgtggtggatcacatgactattcatatggatgactctgattcaattacagtgtcagaacaaagtgagccttcagctgagtgctggcagaatatgtataaattgcttaacttctattcacttatctccgatccaacaggaatattggaaaagtcttcagaaacatttggaccagcaggagttcggagccctacagagccaacatgtaaagttgtgtttgagaatgaacaagacaacagcagtttgactaagactcagaggaaacgtagcttggtaacttctgaacctcagcatgttactctaatagtgtttgggattggcatggtgaaccgcacacacctagaggcagatattggtggactaacaatggaatcagaactgaagaggatccatggcagttttactcttaaggaaaaaatgaaagatgttttacatcaaaagatgactgagacttgtgctactgctcatattggtggggttaatattgtgctgcttgaagggattacaccaaatatacaactggaggattttcctacatctcctacaagtacagccaaacaagagtttctaactgtagtgaaatgtagtattgccaagtcccaagccctctacagtgcccaaagagggctgaagacaaacaatgctgctgtgttcaaagtaggagctatcagtatcaacattcctcagcaccctgccaccttacatagcatgatggttcgaagttctcaccaactatctaaacaaatctcagacctaatcagacagccttctacagccccacagcctgtaaaagaagatattgcaaccccactaccttctgaaaaaaccccaacaagtgttaatcaaactcctgttgaaacaaatgaatttcctcagctaccagaaggcttagaaaagaagcctattgttcttaaattcagtgccatgttagatggtatagccattggagcagcacttttaccatctctgaaagcagaatacaagatgggaagaatgagaagtcatggaatgacaggtgcacagacaagatttacatttgagctgccaaatcacagattgcgttttacttcaaaagtttctgccacagatatgtcaaccattcctccttctgccagtcttaaccttccccctgttaccatgtcagggaaatatataatggaagaacatgatagttattcggatcaggtgtggagtatagatgaactgccttctaaacaaggttactatttacagggaaattatctgcgttgtgtggcagaagttggttcctttgaacataatcttacaactgatcttctaaaccacttggtatttgtacagaaagtgttcatgaaggaagttaatgaagtaatacaaaaagtttctggtggggagcagcctattcctctctggaacgaacatgatggaacagcagatggagataaacctaaaattctcctctattccctaaacttgcagttcaagggtattcaagtaacggccactactccatcaatgagagctgtaagatttgaaactggattgattgaactggaactttctaaccgacttcaaaccaaagcttcaccaggaagtagcagctatctgaaactgtttggcaaatgccaggtggatttaaatctggcattaggacaaattgtcaaacatcaggtttatgaggaagctggttctgattttcatcaagttgcctattttaaaaccagaattggattaagaaatgccctccgagaagaaatcagtggttcttcagatagggaagctgtgcttattactttgaatagaccaattgtttatgcacagcctgtggcctttgatagagctgtgctgttttggctgaattataaggccgcctatgacaactggaatgaacaacgaatggctttacataaggatattcatatggctacaaaggaagtagtagatatgctacctggtatccagcaaacatcagcccaggcctttgggactctttttctccagctcactgtcaatgatctgggaatttgcctacctatcacaaatactgcacagtctaatcatactggagaccttgacactggttctgctttggtattaaccattgaaagtactctcatcactgcatgctcttcagagtctctggttagcaaagggcatttcaaaaacttttgtatccgttttgctgatggatttgagacatcatgggatgactggaaaccagaaattcatggggatttagtgatgaatgcctgtgtagttccagatggcacctatgaagtatgttcaagaactacaggacaagcagcagctgaaagcagtagtgctggaacctggacactcaacgtattgtggaaaatgtgtgggattgatgttcacatggatcctaacattggcaaaaggcttaatgctctgggcaatactcttacaacactgacaggagaggaagacatagatgacattgctgacttaaattcagtgaacatagctgacctgtcagatgaggatgaagttgatactatgtctcccactatccatactgaagccacagattatcgaagacaggcagcatctgctagccagccgggagaacttagaggaagaaaaattatgaagcgtatagtggatatcagagaactgaatgaacaggccaaagtaatagatgatctgaaaaaattaggtgcaagtgaaggaaccataaaccaggaaattcaacgttaccaacagttagaatctgtggctgtgaatgacattagaagagatgttcgtaaaaaattacggaggtccagtatgcgggctgcttccctaaaggataagtggggtttgagttacaaaccaagttacagccgatcaaaaagcatttctgcttctggaagaccacctcttaagcgaatggaaagggcaagttctcgagtaggagaaactgaagagctcccagaaatccgtgtggatgcagcatctcctggacctagagtaacttttaatatccaggatacatttccagaggagacagaactggaccttttgtcagtaaccattgaaggtccatcccattattcatcaaatagtgaaggatcatgttctgtgttcagttctcccaaaactccaggaggcttttcaccaggcattcctttccaaactgaagagggccgacgggatgacagtttgtcttctaccagtgaagattccgagaaggatgaaaaagatgaagaccatgagagggaaaggttttatatttacaggaaaccctcacatacgtctcgtaaaaaagcaacaggctttgctgctgttcatcagctatttacagaacgctggccaacaacaccagtcaatagaagtcttagtggcacagctacagagagaaatattgactttgaacttgatatacgggttgaaattgatagtggaaaatgtgtactccacccaaccacccttctacaagaacatgatgatataagtttgagaaggagttatgatcgaagttccaggagcttagatcaagattcaccttcaaaaaagaagaagtttcaaactaattatgcttctaccacccatttaatgaccggcaagaaagtgccatcatctctacagacaaagcctagtgacttagaaacaacagtattttacattcccggagttgatgtaaagttgcattacaattccaagacgctaaagactgaatcacctaatgcctccaggggatcttccttgccaagaacactgtccaaagagtccaagctgtatggtatgaaagatagtgcaacatctcctccttctcctcctttaccttccactgtccagagcaagactaacaccttacttcctccccagcccccacctattcctgcagccaaaggaaaaggaagtggaggagtaaaaacagccaagttatatgcctgggtagcacttcagtcattgccagaagaaatggttattagtccctgcctattagactttctggaaaaagctctggaaactatcccaattacaccagttgaaaggaattatacagctgtcagctcacaagatgaagatatgggacattttgaaataccagatcctatggaagaatcaacaacatcactagtgtcgtcttcaacatctgcttactcttccttccctgtagatgttgtggtttatgtacgagttcagccctcacagatcaaatttagctgtttaccagtatcaagagtagaatgcatgttaaagctgccatccctggatttggtgttttcttcaaaccgaggagaactggagactttagggactacatatcctgcagagactttatcccctggaggtaatgctactcagagtggaacaaagacttctgctagcaaaactggaataccaggttcatcgggattaggcagccctcttggccgaagtcgacatagtagtagtcagtcagacctgaccagttccagcagtagttcatctggcttgagcttcactgcatgcatgtctgacttttccctttatgtatttcatccatatggagcagggaaacaaaaaactgctgtttctggcctcacacctggatcaggaggattagggaatgtggatgaggagcccacttcagtcactggtcgaaaagattcactcagtataaaccttgagtttgtaaaagtgagtttgtcacggatcaggcgttcaggaggtgcctcattttttgaaagtcagtctgtaagcaagtctgcaagcaaaatggatactacgttaataaatatatctgctgtttgtgatatagggtctgcctcctttaaatatgatatgcgccgactcagtgaaattctggcatttccaagagcatggtatagaagaagtattgcaagacgtctattccttggagaccaaactataaatttgccaacatctggcccagggacacctgattccattgaaggggtaagccaacacctttcccctgaatcatcaagaaaagcttactgcaagacctgggagcagccaagtcagtcagcctccttcacccacatgcctcagtcacctaatgtgttcaatgagcatatgacaaacagcaccatgtcaccagggacagtaggacagagcctaaaatccccagcttccataagatcaaggagtgtatctgattcttcagttcctcgaagagattcactttcaaaaacatcaactccttttaacaaatcaaacaaagcagcaagccaacaagggaccccatgggaaacacttgtcgtgtttgctatcaacttgaagcaattaaacgttcaaatgaatatgagtaatgtaatgggaaatacaacttggacaactagtggtttgaagagccagggccgtctgtcagtaggaagtaatcgtgatcgagagatcagcatgtctgttggtctgggaagatcacaattagattctaaaggaggagtagttggagggaccatagatgtcaatgctttggagatggttgctcatatttctgaacatccaaatcagcaacccagtcacaaaattcagattactatgggttctactgaagctcgtgttgattacatgggctcaagtatcctcatgggcatcttcagtaatgctgatcttaagcttcaggatgaatggaaagtaaacttgtataatacattggattcaagcataactgataaaagtgagattttcgtccatggagatttgaagtgggatattttccaagtaatgatatcaaggtcaaccacaccagatctgataaaaataggaatgaagctccaggaatttttcacacaacaatttgataccagcaaacgagctctgtctacctggggaccagttccttaccttccgccaaagacaatgactagcaacctagaaaaaagttcacaagaacaattacttgatgcagcacatcatcgacactggcctggagtattgaaggtggtatcaggatgccacatatccttatttcagattccattaccagaagatggaatgcaatttggaggatcaatgagcttacatggaaatcatatgacactggcatgttttcatggtccaaattttcgttcaaaatcttgggccctttttcatttagaagaaccaaatattgctttttggactgaagctcagaaaatctgggaagatggctccagtgatcattctacatatattgtacaaacactagattttcacctgggtcataatactatggttaccaaaccatgtggtgctttggaaagtcctatggcaacaataaccaagataacaaggcgtcgccatgaaaatccaccccatggagtagcaagtgtgaaagaatggttcaattatgttacagctacaaggaatgaagagctaaatctgcttcgtaatgttgatgctaacaacactgagaatagcactactgtgaagaattctagtttgttgagtggattcagaggaggttctagctacaaccatgaaacagagactatctttgcattaccaaggatgcagcttgactttaaatccattcatgttcaagaaccacaggagccttcattacaggatgccagcctgaagccaaaagtagaatgtagtgtggtgacagagttcactgaccacatttgtgtgactatggatgctgagctcatcatgtttcttcatgatttagtatcagcttatcttaaagaaaaagaaaaagccatctttccacctcggattttatctactcgaccaggacaaaaaagtccaattattatacatgacgacaattcctctgataaagatagagaagatagcatcacttatactactgtggactggagagattttatgtgcaatacatggcatctagaacctactcttagattaatttcttggactggaagaaagattgatccagtaggtgttgattatattcttcaaaaattgggctttcatcatgctaggactactattcctaaatggcttcaaagaggagtcatggatccactggacaaggttctgtcagttcttatcaaaaagctcggtactgcactacaggatgaaaaggaaaagaaaggcaaagacaaagaagaacactaaaaaagtaatttgatctgtgaacaaattatgattgtgtctgttttattacactggagtgtttttttagtataataatttgaaatataactttaaaataattctaaatttgtggctataattaaaagtttgtaagttaacctgttctagttccatcattctgtgtacagtgaagtattgcatgataatgtaaattttgtgaaaaactagattaaaatatataactgcttgttatggtttataattatataatgtgcaatacaattcctgcatctttaaaatgtctgcagaataactgtgaatttttttgttattggattggccgtaacttttagaaaaaaatcttgttgatgataatgtgattttggggaggtcattaattgctttttcttttttaaatgtagacttatataaatacctgtttgtatatagcttgagtaattgtgatatgattgtataccactaaaatattgttaactattataataaagtcacagtaatggtttaagtctgt

SEQ ID NO: 24197 - DNA, 3980 bp, Homo sapiens
  source 1..3980: mol_type = unassigned DNA
cctcagtcctcccttggtggcctcgccgcggctctgctgggagacccggcgctggcggctgctgaggccggagcggagggcccgggagcgtgggagcaggagggtggcgcgcagccggtttcgcgtttggtcggccagggagctgccttcccaccagccggtcgaggaaacaacgggtcgggcttccggggagagggcccacacagtctcctcgccggcaccggcctcctccatttttccgggccttgcgtggagggttttggcggatgtttttgaacgaaggaatgtcatcggggctctctcgagcccctcaccccgccagctactctgggggtggcgtggcatagtgagaggagcgctaagttgttgggaggcctgggtccttttccccacgactctgaaagaggacagcgttcccaatgtcccagtttaagcgccagcggatcaacccgcttccagggggacgcaacttctcaggcacagcttcaacatctcttctgggccctcctcctggtttgctcactcctcctgtggccacagaactgtcccagaatgccaggcaccttcagggtggggagaaacagcgggtcttcactggtattgttaccagcttgcatgactactttggggttgtggatgaagaggtcttttttcagctaagtgtggtgaagggccgtctgccccagctgggtgagaaggtgctggtgaaggctgcatacaacccaggccaggcagtgccctggaatgctgtcaaggtgcaaacgctctccaaccagcccctactgaagtccccagcacctcctcttctgcatgtagcagccctgggccagaagcaagggatcctgggagctcagcctcagttgatcttccagcctcaccggattcccccactctttcctcagaagcctctgagtctcttccaaacatcccacacacttcacctgagccacctgaacagatttcctgcccggggccctcatggacggttggatcagggccgaagtgatgactatgactccaagaaacgcaaacagcgggctggtggagagccctggggtgctaagaagccaaggcatgacctgcctccttaccgggtccacctcactccttacactgtggacagccccatctgtgacttcctagaactccagcgccgttaccgcagcctcctggtcccctcagattttctgtccgtgcatctgagttggctatcagccttccccctgagccagcccttttccctccatcatccaagccggatccaggtctcttctgaaaaggaggcagctccagacgctggtgctgagcccatcactgcagacagtgaccccgcttatagttcgaaggtactgctgctctcttccccggggttggaggaattgtatcgttgttgcatgctctttgtggatgacatggctgagccaagggagacgccagagcatcctctgaagcagattaagtttttgctgggcaggaaagaagaggaggcagtgctggttgggggtgaatggtctccttccctggatggcctcgacccccaggctgacccgcaggtgctggtgcgtaccgccatccgctgtgcgcaggcccagactggcattgatttgagcggctgtaccaagtggtggcgctttgccgagtttcagtacctgcagccgggacccccccggcggcttcagacagtggtggtgtacctgccggatgtctggaccatcatgcctactttggaggagtgggaggccctgtgccagcagaaagctgcagaggcagctcccccaacccaggaggcacaaggggaaacggagcctactgaacaggcacctgatgccttggagcaagcagcagacacttctagacggaacgcagaaactccagaggccaccacacagcaggaaacggacactgatctcccagaggcccctccaccccccctagaacctgctgtcatcgcacgccctggctgtgtaaacctgtccctccatgggattgtggaggatcggaggccaaaggaaaggatctcttttgaggtgatggtgctggccgagctgtttctggagatgctccagagggattttggctatagagtttataagatgctactgagccttcctgaaaaggtcgtgtccccacctgaacctgagaaggaggaggcggccaaggaagaagccaccaaggaggaagaagccatcaaagaggaggtggtcaaggagcccaaggatgaggcacagaatgagggcccggctacagagtcagaggccccgctgaaggaggatgggcttttgcccaaaccactctcttctgggggagaggaagaagaaaaaccccggggcgaggcttctgaggacctgtgtgagatggccctggacccagaactgttgcttctgagggatgatggagaggaggagtttgcaggagcaaagctggaggattcggaggtccggtccgttgcctcaaaccagtcagagatggagttctcttcacttcaggacatgcccaaggagctggatccctctgctgtgctccccttagactgtctgcttgcttttgtgttctttgatgccaactggtgtggctacttgcaccggcgagacttagagaggatcctccttacccttgggatccggctcagtgcagagcaggccaagcagctggtcagcagggtggtgacccagaacatctgccagtaccggagccttcagtacagccgccaggagggcctggatggtggccttcccgaggaggtgctcttcggaaacctggacctgctgccccctcctgggaaaagcacgaagccaggtgctgcccccacagaacacaaagccttggtgtcccacaatggcagcctgattaacgtggggagcctgctgcagcgcgcggagcagcaggacagcggccggctctacctagagaacaagatccacacactggagctgaagctggaggagagccataaccgtttctcagccactgaagtaaccaataagacgctggcggcagagatgcaggagctgcgagtccggctggcggaggccgaggagaccgcccggacggcggagcgacagaagagccagctccagcggctgctgcaggagctccgcaggcgtctgacccccctgcagctggagatccagcgggtggtggaaaaggctgacagctgggtggagaaggaggagccggcacctagcaactgacggcctcgcacggaactgccatcctgtgagggcagcggtggcgcccggcaaagttggagcccttgcggtaccagaaagcagcgagagcgagacctgggagccagggcaggggtggctgaccccatgctcagcctctaggggacggcaggccatcaggctgggggctgtgctatgtgggatggatgtgtgaggaaccccggttccacttaacaactaaatacaacatcttttgcacccctagaatgtcattttgccctcaaccttggtatttctcctggggcccttttagtcttgtgctgactttctcctgtcctcttccagtttagaataagacaggggagaaaaaggcttttcgagtgtgggacaaggtctgatgtcagtgaacggaactgaagagcaagacatggagcctggctggggctaagcagccccctcctccggatggcacaggctctgctaggttccggacacaggcttctgggggaagggtctcccttggccatcacgggaatggagtccatgctagaaagagctcagtgttgggctgggtttgccagtagaacactgcgttccagtcaccccggtcttgccagaagaaaccagcacctctttcccgtggctcctgtgttcagaatgtggtattggctctggcccagccttctcccctgttacccataattcttgcctctttccataatccgtggtttcagtttgactttgtatataaagttggggttttttttttttttttttggcttgttttttaaataaaccaaagtcaaaaacaaa

SEQ ID NO: 24198 - DNA, 3242 bp, Homo sapiens
  source 1..3242: mol_type = unassigned DNA
gagctagcgctcaagcagagcccagcgcggtgctatcggacagagcctggcgagcgcaagcggcgcggggagccagcggggctgagcgcggccagggtctgaacccagatttcccagactagctaccactccgcttgcccacgccccgggagctcgcggcgcctggcggtcagcgaccagacgtccggggccgctgcgctcctggcccgcgaggcgtgacactgtctcggctacagacccagagggagcacactgccaggatgggagctgctgggaggcaggacttcctcttcaaggccatgctgaccatcagctggctcactctgacctgcttccctggggccacatccacagtggctgctgggtgccctgaccagagccctgagttgcaaccctggaaccctggccatgaccaagaccaccatgtgcatatcggccagggcaagacactgctgctcacctcttctgccacggtctattccatccacatctcagagggaggcaagctggtcattaaagaccacgacgagccgattgttttgcgaacccggcacatcctgattgacaacggaggagagctgcatgctgggagtgccctctgccctttccagggcaatttcaccatcattttgtatggaagggctgatgaaggtattcagccggatccttactatggtctgaagtacattggggttggtaaaggaggcgctcttgagttgcatggacagaaaaagctctcctggacatttctgaacaagacccttcacccaggtggcatggcagaaggaggctatttttttgaaaggagctggggccaccgtggagttattgttcatgtcatcgaccccaaatcaggcacagtcatccattctgaccggtttgacacctatagatccaagaaagagagtgaacgtctggtccagtatttgaacgcggtgcccgatggcaggatcctttctgttgcagtgaatgatgaaggttctcgaaatctggatgacatggccaggaaggcgatgaccaaattgggaagcaaacacttcctgcaccttggatttagacacccttggagttttctaactgtgaaaggaaatccatcatcttcagtggaagaccatattgaatatcatggacatcgaggctctgctgctgcccgggtattcaaattgttccagacagagcatggcgaatatttcaatgtttctttgtccagtgagtgggttcaagacgtggagtggacggagtggttcgatcatgataaagtatctcagactaaaggtggggagaaaatttcagacctctggaaagctcacccaggaaaaatatgcaatcgtcccattgatatacaggccactacaatggatggagttaacctcagcaccgaggttgtctacaaaaaaggccaggattataggtttgcttgctacgaccggggcagagcctgccggagctaccgtgtacggttcctctgtgggaagcctgtgaggcccaaactcacagtcaccattgacaccaatgtgaacagcaccattctgaacttggaggataatgtacagtcatggaaacctggagataccctggtcattgccagtactgattactccatgtaccaggcagaagagttccaggtgcttccctgcagatcctgcgcccccaaccaggtcaaagtggcagggaaaccaatgtacctgcacatcggggaggagatagacggcgtggacatgcgggcggaggttgggcttctgagccggaacatcatagtgatgggggagatggaggacaaatgctacccctacagaaaccacatctgcaatttctttgacttcgatacctttgggggccacatcaagtttgctctgggatttaaggcagcacacttggagggcacggagctgaagcatatgggacagcagctggtgggtcagtacccgattcacttccacctggccggtgatgtagacgaaaggggaggttatgacccacccacatacatcagggacctctccatccatcatacattctctcgctgcgtcacagtccatggctccaatggcttgttgatcaaggacgttgtgggctataactctttgggccactgcttcttcacggaagatgggccggaggaacgcaacacttttgaccactgtcttggcctccttgtcaagtctggaaccctcctcccctcggaccgtgacagcaagatgtgcaagatgatcacagaggactcctacccggggtacatccccaagcccaggcaagactgcaatgctgtgtccaccttctggatggccaatcccaacaacaacctcatcaactgtgccgctgcaggatctgaggaaactggattttggtttatttttcaccacgtaccaacgggcccctccgtgggaatgtactccccaggttattcagagcacattccactgggaaaattctataacaaccgagcacattccaactaccgggctggcatgatcatagacaacggagtcaaaaccaccgaggcctctgccaaggacaagcggccgttcctctcaatcatctctgccagatacagccctcaccaggacgccgacccgctgaagccccgggagccggccatcatcagacacttcattgcctacaagaaccaggaccacggggcctggctgcgcggcggggatgtgtggctggacagctgccggtttgctgacaatggcattggcctgaccctggccagtggtggaaccttcccgtatgacgacggctccaagcaagagataaagaacagcttgtttgttggcgagagtggcaacgtggggacggaaatgatggacaataggatctggggccctggcggcttggaccatagcggaaggaccctccctataggccagaattttccaattagaggaattcagttatatgatggccccatcaacatccaaaactgcactttccgaaagtttgtggccctggagggccggcacaccagcgccctggccttccgcctgaataatgcctggcagagctgcccccataacaacgtgaccggcattgcctttgaggacgttccgattacttccagagtgttcttcggagagcctgggccctggttcaaccagctggacatggatggggataagacatctgtgttccatgacgtcgacggctccgtgtccgagtaccctggctcctacctcacgaagaatgacaacaaatggcattcgttggcttcaaaggcagcttccggcccatctgggtga

SEQ ID NO: 24199 - DNA, 7357 bp, Homo sapiens
  source 1..7357: mol_type = unassigned DNA
gagctagcgctcaagcagagcccagcgcggtgctatcggacagagcctggcgagcgcaagcggcgcggggagccagcggggctgagcgcggccagggtctgaacccagatttcccagactagctaccactccgcttgcccacgccccgggagctcgcggcgcctggcggtcagcgaccagacgtccggggccgctgcgctcctggcccgcgaggcgtgacactgtctcggctacagacccagagagaaaagcttcattctggaggggaaggagttttgagtgccaaggatgaaattccacccatcactcggtctctgagctgcaggacacaggcaggacaacggtaggattttcatgccccgatctgcctggccttgagttgtggcagctggggaagccactgggagcacactgccaggatgggagctgctgggaggcaggacttcctcttcaaggccatgctgaccatcagctggctcactctgacctgcttccctggggccacatccacagtggctgctgggtgccctgaccagagccctgagttgcaaccctggaaccctggccatgaccaagaccaccatgtgcatatcggccagggcaagacactgctgctcacctcttctgccacggtctattccatccacatctcagagggaggcaagctggtcattaaagaccacgacgagccgattgttttgcgaacccggcacatcctgattgacaacggaggagagctgcatgctgggagtgccctctgccctttccagggcaatttcaccatcattttgtatggaagggctgatgaaggtattcagccggatccttactatggtctgaagtacattggggttggtaaaggaggcgctcttgagttgcatggacagaaaaagctctcctggacatttctgaacaagacccttcacccaggtggcatggcagaaggaggctatttttttgaaaggagctggggccaccgtggagttattgttcatgtcatcgaccccaaatcaggcacagtcatccattctgaccggtttgacacctatagatccaagaaagagagtgaacgtctggtccagtatttgaacgcggtgcccgatggcaggatcctttctgttgcagtgaatgatgaaggttctcgaaatctggatgacatggccaggaaggcgatgaccaaattgggaagcaaacacttcctgcaccttggatttagacacccttggagttttctaactgtgaaaggaaatccatcatcttcagtggaagaccatattgaatatcatggacatcgaggctctgctgctgcccgggtattcaaattgttccagacagagcatggcgaatatttcaatgtttctttgtccagtgagtgggttcaagacgtggagtggacggagtggttcgatcatgataaagtatctcagactaaaggtggggagaaaatttcagacctctggaaagctcacccaggaaaaatatgcaatcgtcccattgatatacaggccactacaatggatggagttaacctcagcaccgaggttgtctacaaaaaaggccaggattataggtttgcttgctacgaccggggcagagcctgccggagctaccgtgtacggttcctctgtgggaagcctgtgaggcccaaactcacagtcaccattgacaccaatgtgaacagcaccattctgaacttggaggataatgtacagtcatggaaacctggagataccctggtcattgccagtactgattactccatgtaccaggcagaagagttccaggtgcttccctgcagatcctgcgcccccaaccaggtcaaagtggcagggaaaccaatgtacctgcacatcggggaggagatagacggcgtggacatgcgggcggaggttgggcttctgagccggaacatcatagtgatgggggagatggaggacaaatgctacccctacagaaaccacatctgcaatttctttgacttcgatacctttgggggccacatcaagtttgctctgggatttaaggcagcacacttggagggcacggagctgaagcatatgggacagcagctggtgggtcagtacccgattcacttccacctggccggtgatgtagacgaaaggggaggttatgacccacccacatacatcagggacctctccatccatcatacattctctcgctgcgtcacagtccatggctccaatggcttgttgatcaaggacgttgtgggctataactctttgggccactgcttcttcacggaagatgggccggaggaacgcaacacttttgaccactgtcttggcctccttgtcaagtctggaaccctcctcccctcggaccgtgacagcaagatgtgcaagatgatcacagaggactcctacccggggtacatccccaagcccaggcaagactgcaatgctgtgtccaccttctggatggccaatcccaacaacaacctcatcaactgtgccgctgcaggatctgaggaaactggattttggtttatttttcaccacgtaccaacgggcccctccgtgggaatgtactccccaggttattcagagcacattccactgggaaaattctataacaaccgagcacattccaactaccgggctggcatgatcatagacaacggagtcaaaaccaccgaggcctctgccaaggacaagcggccgttcctctcaatcatctctgccagatacagccctcaccaggacgccgacccgctgaagccccgggagccggccatcatcagacacttcattgcctacaagaaccaggaccacggggcctggctgcgcggcggggatgtgtggctggacagctgccggtttgctgacaatggcattggcctgaccctggccagtggtggaaccttcccgtatgacgacggctccaagcaagagataaagaacagcttgtttgttggcgagagtggcaacgtggggacggaaatgatggacaataggatctggggccctggcggcttggaccatagcggaaggaccctccctataggccagaattttccaattagaggaattcagttatatgatggccccatcaacatccaaaactgcactttccgaaagtttgtggccctggagggccggcacaccagcgccctggccttccgcctgaataatgcctggcagagctgcccccataacaacgtgaccggcattgcctttgaggacgttccgattacttccagagtgttcttcggagagcctgggccctggttcaaccagctggacatggatggggataagacatctgtgttccatgacgtcgacggctccgtgtccgagtaccctggctcctacctcacgaagaatgacaactggctggtccggcacccagactgcatcaatgttcccgactggagaggggccatttgcagtgggtgctatgcacagatgtacattcaagcctacaagaccagtaacctgcgaatgaagatcatcaagaatgacttccccagccaccctctttacctggagggggcgctcaccaggagcacccattaccagcaataccaaccggttgtcaccctgcagaagggctacaccatccactgggaccagacggcccccgccgaactcgccatctggctcatcaacttcaacaagggcgactggatccgagtggggctctgctacccgcgaggcaccacattctccatcctctcggatgttcacaatcgcctgctgaagcaaacgtccaagacgggcgtcttcgtgaggaccttgcagatggacaaagtggagcagagctaccctggcaggagccactactactgggacgaggactcagggctgttgttcctgaagctgaaagctcagaacgagagagagaagtttgctttctgctccatgaaaggctgtgagaggataaagattaaagctctgattccaaagaacgcaggcgtcagtgactgcacagccacagcttaccccaagttcaccgagagggctgtcgtagacgtgccgatgcccaagaagctctttggttctcagctgaaaacaaaggaccatttcttggaggtgaagatggagagttccaagcagcacttcttccacctctggaacgacttcgcttacattgaagtggatgggaagaagtaccccagttcggaggatggcatccaggtggtggtgattgacgggaaccaagggcgcgtggtgagccacacgagcttcaggaactccattctgcaaggcataccatggcagcttttcaactatgtggcgaccatccctgacaattccatagtgcttatggcatcaaagggaagatacgtctccagaggcccatggaccagagtgctggaaaagcttggggcagacaggggtctcaagttgaaagagcaaatggcattcgttggcttcaaaggcagcttccggcccatctgggtgacactggacactgaggatcacaaagccaaaatcttccaagttgtgcccatccctgtggtgaagaagaagaagttgtgaggacagctgccgcccggtgccacctcgtggtagactatgacggtgactcttggcagcagaccagtgggggatggctgggtcccccagcccctgccagcagctgcctgggaaggccgtgtttcagccctgatgggccaagggaaggctatcagagaccctggtgctgccacctgcccctactcaagtgtctacctggagcccctggggcggtgctggccaatgctggaaacattcactttcctgcagcctcttgggtgcttctctcctatctgtgcctcttcagtgggggtttggggaccatatcaggagacctgggttgtgctgacagcaaagatccactttggcaggagccctgacccagctaggaggtagtctggagggctggtcattcacagatccccatggtcttcagcagacaagtgagggtggtaaatgtaggagaaagagccttggccttaaggaaatctttactcctgtaagcaagagccaacctcacaggattaggagctggggtagaactggctatccttggggaagaggcaagccctgcctctggccgtgtccacctttcaggagactttgagtggcaggtttggacttggactagatgactctcaaaggcccttttagttctgagattccagaaatctgctgcatttcacatggtacctggaacccaacagttcatggatatccactgatatccatgatgctgggtgccccagcgcacacgggatggagaggtgagaactaatgcctagcttgaggggtctgcagtccagtagggcaggcagtcaggtccatgtgcactgcaatgccaggtggagaaatcacagagaggtaaaatggaggccagtgccatttcagaggggaggctcaggaaggcttcttgcttacaggaatgaaggctgggggcattttgctggggggagatgaggcagcctctggaatggctcagggattcagccctccctgccgctgcctgctgaagctggtgactacggggtcgccctttgctcacgtctctctggcccactcatgatggagaagtgtggtcagaggggagcaatgggctttgctgcttatgagcacagaggaattcagtccccaggcagccctgcctctgactccaagagggtgaagtccacagaagtgagctcctgccttagggcctcatttgctcttcatccagggaactgagcacagggggcctccaggagaccctagatgtgctcgtactccctcggcctgggatttcagagctggaaatatagaaaatatctagcccaaagccttcattttaacagatggggaaagtgagcccccaagatgggaaagaaccacacagctaagggagggcctggggagccccaccctagcccttgctgccacaccacattgcctcaacaaccggccccagagtgcccaggcactcctgaggtagcttctggaaatggggacaagtcccctcgaaggaaaggaaatgactagagtagaatgacagctagcagatctcttccctcctgctcccagcgcacacaaacccgccctccccttggtgttggcggtccctgtggccttcactttgttcactacctgtcagcccagcctgggtgcacagtagctgcaactccccattggtgctacctggctctcctgtctctgcagctctacaggtgaggcccagcagagggagtagggctcgccatgtttctggtgagccaatttggctgatcttgggtgtctgaacagctattgggtccaccccagtccctttcagctgctgcttaatgccctgctctctccctggcccaccttatagagagcccaaagagctcctgtaagagggagaactctatctgtggtttataatcttgcacgaggcaccagagtctccctgggtcttgtgatgaactacatttatcccctttcctgccccaaccacaaactctttccttcaaagagggcctgcctggctccctccacccaactgcacccatgagactcggtccaagagtccattccccaggtgggagccaactgtcagggaggtctttcccaccaaacatctttcagctgctgggaggtgaccatagggctctgcttttaaagatatggctgcttcaaaggccagagtcacaggaaggacttcttccagggagattagtggtgatggagaggagagttaaaatgacctcatgtccttcttgtccacggttttgttgagttttcactcttctaatgcaagggtctcacactgtgaaccacttaggatgtgatcactttcaggtggccaggaatgttgaatgtctttggctcagttcatttaaaaaagatatctatttgaaagttctcagagttgtacatatgtttcacagtacaggatctgtacataaaagtttctttcctaaaccattcaccaagagccaatatctaggcattttcttggtagcacaaattttcttattgcttagaaaattgtcctccttgttatttctgtttgtaagacttaagtgagttaggtctttaaggaaagcaacgctcctctgaaatgcttgtcttttttctgttgccgaaatagctggtcctttttcgggagttagatgtatagagtgtttgtatgtaaacatttcttgtaggcatcaccatgaacaaagatatattttctatttatttattatatgtgcacttcaagaagtcactgtcagagaaataaagaattgtcttaaatgtcatgattggagatgtcctttgcattgcttggaaggggtgtacctagagccaaggaaattggctctggtttggaaaaattttgctgttattatagtaaacatacaaaggatgtcatcatc

SEQ ID NO: 24200 - DNA, 2321 bp, Homo sapiens
  source 1..2321: mol_type = unassigned DNA
gcctcaagaggaggcataacagcagcggaccaatagaaattccgaatttttgtattctctgggaagctccacctcttagtccctgatccgccgcggaagatgaaaaaaagcggcccgggggcggagcaaggcaaggaagcggaagcggagaggcggtcgggatccgctgcgcgagctgtctcggtcccacgtgtgcgagttgctacgatggaagttaaagggaaaaagcaattcacaggaaagagtacaaagacagcacaagaaaaaaacagatttcataaaaatagtgattctggttcttcaaagacatttccaacaaggaaagttgctaaagaaggtggacctaaagtcacatctaggaactttgagaaaagtatcacaaaacttgggaaaaagggtgtaaagcagttcaagaataagcagcaaggggacaaatcaccaaagaacaaattccagccggcaaataaattcaacaagaagagaaaattccagccagatggtagaagcgatgaatcagcagccaagaagcccaaatgggatgacttcaaaaagaagaagaaagaactgaagcaaagcagacaactcagtgataaaaccaactatgacattgttgttcgggcaaagcagatgtgggagattttaagaagaaaagactgtgacaaagaaaaaagagtaaagttaatgagtgatttgcagaagttgattcaagggaaaattaaaactattgcatttgcacacgattcaactcgtgtgatccagtgttacattcagtatggtaatgaagaacagagaaaacaggcttttgaagaattgcgagatgatttggttgagttaagtaaagccaaatattcgagaaatattgttaagaaatttctcatgtatggaagtaaaccacagattgcagagataatcagaagttttaaaggccacgtgaggaagatgctgcggcatgcggaagcatcagccatcgtggagtacgcatacaatgacaaagccattttggagcagaggaacatgctgacggaagagctctatgggaacacatttcagctttacaagtcagcagatcaccgaactctggacaaagtgttagaggtacagccagaaaaattagaacttattatggatgaaatgaaacagattctaactccaatggcccaaaaggaagctgtgattaagcactcattggtgcataaagtattcttggacttttttacctatgcaccccccaaactcagatcagaaatgattgaagccatccgcgaagcggtggtctacctggcacacacacacgatggcgccagagtggccatgcactgcctgtggcatggcacgcccaaggacaggaaagtgattgtgaaaacaatgaagacttatgttgaaaaggtggctaatggccaatactcccatttggttttactggcggcatttgattgtattgatgatactaagcttgtgaagcagataatcatatcagaaattatcagttcattgcctagcatagtaaatgacaaatatggaaggaaggtcctattgtacttactaagccccagagatcctgcacatacagtacgagaaatcattgaagttctgcaaaaaggagatggaaatgcacacagtaagaaagatacagaggtccgcagacgggagctcctagaatccatttctccagctttgttaagctacctgcaagaacacgcccaagaagtggtgctagataagtctgcgtgtgtgttggtgtctgacattctgggatctgccactggagacgttcagcctaccatgaatgccatcgccagcttggcagcaacaggactgcatcctggtggcaaggacggagagcttcacattgcagaacatcctgcaggacatctagttctgaagtggttaatagagcaagataaaaagatgaaagaaaatgggagagaaggttgttttgcaaaaacacttgtagagcatgttggtatgaagaacctgaagtcctgggctagtgtaaatcgaggtgccattattctttctagcctcctccagagttgtgacctggaagttgcaaacaaagtcaaagctgcactgaaaagcttgattcctacattggaaaaaaccaaaagcaccagcaaaggaatagaaattctacttgaaaaactgagcacataggtggaaagagttaagagcaagatggaatgattttttctgttctctgttctgtttcccaatgcagaaaagaaggggtagggtccaccatactggtaattggggtactctgtatatgtgtttcttctttgtatacgaatctatttatataaattgtttttttaaatggt

SEQ ID NO: 24201 - DNA, 563 bp, Homo sapiens
  source 1..563: mol_type = unassigned DNA
acacagtgagggaggcaaaacagtgtggatgcagcagaataaccacaaccaggattttgaactgaataagtaagaaagattatcactttgaatatacggaatgtgatagcagtggctccaggtggagagttgccattccaaattctgcagtggactgctctggcctgcctgacccagtgagaggcaaagaatgcactttctcctgtgcttctggagagtatctagaaatgaagaaccaggtatgcagtaagtgtggtgaaggcacctattccttgggcagtggcatcaaatttgatgaatgggatgaattgccggcaggattttctaacatcgcaacattcatggacactgtggtgggcccttctgacagcaggccagacggctgtaacaactcttcttggatccctcgtggaaactacatagaatctaatcgtgatgactgcacggtgtctttgatctatgctgtgcaccttaagaagtcaggctatgtcttctttgagtaccagtatgtcgacaacaacatcttctttgagttctttattcaaaatgatcagtgccaggag

SEQ ID NO: 24202 - DNA, 1925 bp, Homo sapiens
  source 1..1925: mol_type = unassigned DNA
cggaagttgaccggggtgcggagctcctgggctgcagctcctggagtttccgaggttcgtgcgcgtctggtggcggcggcgtgatgttctcggcaggagcggagagtttgctccaccaggccagggagatccaggacgaggagctgaagaagttctgttcccggatctgtaaactgctgcaggcggaggacttggggccggacaccctcgactccctgcagaggctcttcctcatcatctcagccacgaagtacagccggaggctggagaagacatgcgtagacctgctgcaggccaccctcggcctgcctgcatgccccgagcagctccaggtgctttgcgccgccatcctgcgagagatgtccccctctgacagcctcagcctggcctgggaccacacgcagaacagccggcagctgagcctggtggcctccgttctcttggcccagggtgacagaaacgaggaggtcagagccgtgggccagggcgtgctacgagcgctggagagccggcagcctgagggacccagcctcagacacctcctccccgtcatggccaaggtcgtggtcctcagcccgggcaccctccaggaggaccaggccaccctgctcagcaagcggctggtcgactggctgcgctacgccagcctccagcaagggctcccacactccggcggcttcttctccacgcccagggcccggcagccgggccccgtcaccgaggtggacggggcggtagccacagacttcttcacggtgctctccagcggccaccgcttcacagacgaccagtggctgaacgtgcaggccttctctatgctgcgggcgtggctgctgcacagcggccccgagggcccgggcaccctggacacagatgacaggtcagagcaggagggctccactctgtcggtgatctccgccacctcctctgccggccgcctgctgccgccccgggagcggcttcgggaggtggccttcgagtactgccagcgcctcattgagcaaagtaaccgacgagccctgaggaagggggactccgacctgcagaaagcttgcctggtggaggccgtgctggtgctggacgtgctgtgccggcaggacccgtccttcctgtaccgaagtctctcctgcctgaaggccctgcacgggcgggtgcgcggggacccggcctctgtgcgggtgctgctgcccctcgcccacttcttcctgagccacggggaagcggctgcagtggactcggaagccgtctaccagcacctgttcaccaggatcccggtggagcagttccacagccccatgctggcctttgaattcatccagttctgcagggacaacctccacctgttcagcgggcacctcagcaccctcagattgagcttccccaacctctttaagttcctggcctggaacagcccacccctcacctccgagtttgtggcgctcctcccggccctggtggacgctggcacagccctggagatgctgcacgcgctgctggacctgccctgcttgacggcggtgctggacctgcagctcaggtcagcaccggctgcatccgagaggccactctgggacacctctctcagggcccccagctgcctggaggccttccgggacccgcagttccagggtcttttccaatacctgctgcgccccaaggccagtggcgccactgagaggttggcgccactccaccagctgctgcagcccatggccggctgtgcccgcgtggcccagtgtgcccaggccgtgcccacgctgctgcaggcattcttctcagcagtgacccaggtggctgacgggtccctgatcaaccagctggcgctgctgctcctgggcaggagcgactcgctctacccggccccagggtacgctgccggtgtgcacaggcctgatgcatgcaggcccatcctggttccactctga

SEQ ID NO: 24203 - DNA, 2028 bp, Homo sapiens
  source 1..2028: mol_type = unassigned DNA
ccggcttgtctctctgtcagtggcggctgctgcctgctctggaggcaggctgggcggtggcggccgagactggcgggggtggacgcccgggccgggctgcgcccgcttcttgcagctgtgaattcctttggacaattgatgatatttatcattgtgcccagtttctacaaataaaagatgggtggattattttctcgatggaggcatctggagcataagaacagtaattattttcttcttttccaagagaacagaaagaaataatgaagcattggatgatttaaaatcccagaggaaaaaaatacttgaagaagtcatggaaaaagaaacttacaagacggctaaattaattcttgaaaggtttgatccggactcaaagaaagcaaaggagtgtgagccgccatctgctggagcagctgtaactgcaagacctggacaagagattcgtcagcgaactgcagctcaaagaaacctttctccaacaccagcaagccctaaccagggccctcctccacaagttccagtatctcctggaccaccaaaggacagttctgcccctggtggacccccagaaaggactgttactccagccctatcatcaaatgtgttaccaagacatcttggatcccctgctacttcagtgcctggaatgggtcttcatcctccaggtccacctttagcaagacctattctcccccgagaacgaggtgctttggatagaattgttgaatatttggttggtgatggtccacaaaacaggtatgcacttatatgtcagcagtgtttttctcataatggcatggctttgaaggaagaatttgaatacattgcttttcgatgtgcctactgttttttcttgaaccctgcaagaaaaaccagacctcaggctccaagacttcctgagtttagttttgagaagaggcaggtggtggaaggttcaagttcagttggtcccttgccatcaggaagtgtgctttcatcagacaaccagtttaatgaagaatctttagaacacgatgttcttgatgataatacagagcagacagatgacaaaataccagctacagaacagacaaaccaagtgattgaaaaagcatctgactcagaggaaccagaggagaaacaagagactgagaatgaggaagcctcagtgattgaaaccaactccacagttcctggagctgattctattcctgatcctgaactaagtggagaatctttgacggcagagtagtaaatgcttccacgtgccttcaactggatatttatagtcttactgatgtcagttattgctttttcggtggcacttactttttttgcccctctaagggtatgcttgtgtatcatttgaattcagattgcctagctatttgaacatctcaaagttatatatactgggtattaaaattaaaagcaagttatatcagtgaagtaagatccttttgaatgtacaaagacccacactattgagacagcttttagatacttttttgtccattctaaaagtaagcaaacatgattgccttcttgttttctgtatgtataacccgtaaatatccattttgacataggaagaactttggttaagagtaagttctctaattgtgtttgttttaaggaatgaaacttggttaagattttgactacttcattattaaaaattgatagaattttagctcctgagatatttacaactgggagaaatgtctatttaggtgtttacattaagcggtatgaaagttgttaccacataggcactggtacgaattctcaataagaatgcagtggaacagttaagtagaactgtaactacgttggcactggtacgaattctcagtgagaatgcaatgaaacagtcaactgcagtgtttctttttgatgtcttttattttacaactgggccaaaggcacattatgtatataattagtttatatttacacactagcatataggaaatatttctgcacttgaccctatttgaattctgagcattatttataagtataaaatgatgatatataagtgaa

SEQ ID NO: 24204 - DNA, 3179 bp, Homo sapiens
  source 1..3179: mol_type = unassigned DNA
tcattgacacagtgagggaggcaaaacagtgtggatgcagcagaataaccacaaccaggattttgaactgaataagtaagaaagattatcactttgaatatacggaatgtgatagcagtggctccaggtggagagttgccattccaaattctgcagtggactgctctggcctgcctgacccagtgagaggcaaagaatgcactcttcttggatccctcgtggaaactacatagaatctaatcgtgatgactgcacggtgtctttgatctatgctgtgcaccttaagaagtcaggctatgtcttctttgagtaccagtatgtcgacaacaacatcttctttgagttctttattcaaaatgatcagtgccaggagatggacaccaccactgacaagtgggtaaaacttacagacaatggagaatggggctctcattctgtaatgctgaaatcaggcacaaacatactctactggagaactacaggcatccttatgggttctaaggcggtcaagcctgtgctggtaaaaaatatcacaattgaaggggtggcgtacacatcagaatgttttccttgcaagccaggcacattcagcaacaaaccaggttcattcaactgccaggtgtgtcccagaaacacctattctgagaaaggagccaaagaatgtataaggtgtaaagacgactctcaattttcagaggaaggatccagtgagtgtacagagcgccctccctgtaccacaaaagactatttccagatccatactccatgtgatgaagaaggaaagacacagataatgtacaagtggatagagcccaaaatctgccgggaggatctcacagatgctattagattgcccccttctggagagaagaaggattgtccgccttgcaaccctggattttataacaatggatcatcttcttgccatccctgtcctcctggaacattttcagatggaaccaaagaatgtagaccatgtccagcaggaacggagcctgcacttggctttgaatataaatggtggaatgtccttcctggcaacatgaaaacttcctgcttcaatgttgggaattcaaagtgcgatggaatgaatggttgggaggtggctggagatcatatccagagtggggctggaggttctgacaatgattacctgatcttaaacttgcatatcccaggatttaaaccaccaacatctatgactggagccacgggttctgaactaggaagaataacatttgtctttgagaccctctgttcagctgactgtgttttgtacttcatggtggatattaatagaaaaagtacaaatgtggtagaatcgtggggtggaaccaaagaaaaacaagcttacacccatatcatcttcaagaatgcaacttttacatttacatgggcattccagagaactaatcagggtcaagataatagacggttcatcaatgacatggtgaagatttattctatcacagccactaatgcagttgatggggtggcgtcctcatgccgtgcctgtgccctcggttctgaacagtcgggttcatcgtgtgtcccctgccctccaggccactacattgagaaagaaaccaaccagtgcaaggaatgtccacctgacacctacctgtccatacatcaggtctatggcaaagaggcttgtattccatgcgggcctgggagtaaaaacaatcaggaccattcggtttgctatagtgactgctttttctaccatgaaaaagaaaatcagagtttgcactatgactttagcaacctcagcagtgtgggctcattaatgaatggccccagcttcacctccaaaggaacaaaatacttccatttcttcaatatcagtttatgtgggcatgaggggaagaagatggctctctgtaccaacaatataacagactttacagtaaaagaaatagtggcagggtcagatgattacacaaatttggtaggggcatttgtatgccagtcaacaattattccttctgaaagtaagggtttccgagcagccttatcatcacaatccatcattctggcagatacattcataggagtcacagttgaaaccacattgaaaaatattaatataaaagaagatatgttcccagttccaacaagccaaataccagatgtgcatttcttttataagtcttctacagcaacaacatcttgtattaatggccgatcaactgctgtgaaaatgaggtgtaatcctactaaatctggagcaggagtgatttcagtccccagcaagtgcccagcaggtacctgtgatgggtgtacgttctatttcctgtgggagagtgctgaagcttgccctctgtgtacggagcatgacttccatgagattgagggagcctgcaagagaggatttcaggaaaccttgtatgtgtggaatgaacctaaatggtgcattaaaggaatttctttgcctgagaaaaagttggcaacctgtgaaacggttgacttttggctgaaggtgggagccggtgtgggagcttttactgccgttttgctggtggctctgacctgctacttctggaaaaagaatcaaaaactggaatacaaatattccaagttagtaatgacgactaactcaaaagagtgtgaactcccggctgcagacagttgtgctatcatggaaggagaagataatgaagaggaagttgtatattccaataaacagtcactactaggaaaactcaaatctttggcaaccaaggaaaaagaagaccattttgaatctgttcaactgaaaacctcaagatccccaaatatatgaagagacagtgctgtagccttgagactaatgaacaaagaaacctgctctagttttacaggaccatattttagggtctgtcctcatacctgtcacattggtgatctcacagaggagggccatgccgctgaaaagggaaggagattgaaacatttgattgccttatcacatggtcaagtaccttgccaaataaaggaaagcaaatgatttgggtctcaactgaagatgaagctcaactcaggaagagatttatctgtatatacacataactgaaaaccaagtttaagcccaccaatgcactgctgatgcatgccatataattaatgggtaacttttattctttatgatgtctacataacaagtgtgatttggaaggcacatgtgagcatatgcatta

SEQ ID NO: 24205 - DNA, 6283 bp, Homo sapiens
  source 1..6283: mol_type = unassigned DNA
gacccgagagccgctgagccgcgaggccgggccggggcgccggccgggaatgccgggggcgcggcgccgacgccgaggcgcggccatggaggggaagccccgcgccggggtcgcgctggccccggggccgagcggccgacggccttccgcccgctgcgcccgccgccgccgcccggggctgctgcttcctggcctctggctgctgctgctggcccggccggcctcgtgcgccccagatgagctctctccggaacagcacaacctttctttatactccatggagctcgtgctgaagaaaagcactgggcacagcgctgcacaagtggccttaacagaaactgctcccggctcccagcacagcagtcctctccatgtcacagccccgccgtctgccactacttttgatacagccttttttaaccaaggaaaacagaccaaaagtacagcagatcccagcatctttgtggcaacttacgtgtcagtgacgagtaaagaggtggccgtcaatgacgatgagatggataactttctgccagatactcactggaccactccacggatggtttctccaatacagtatatcacagtcagcccaccagggctgcccagggaagcattagaacctatgctcactccatcattacccatggtttctttacaagatgaagaagtgacatcgggctggcagaacacaacgcgacaaccagcggcatatgctgagtccgccagtcatttccacacctttcggtcagcttttcgcacctctgagggcatcgttccaactcctggcaggaatttggtgctttatcctactgatgcttacagtcatttatcaagcaggactctgccagagattgtggcttccctaacagagggtgtggaaaccaccctttttttaagctcccggtctttaatgccacagccgttaggcgacggcattactataccgttgccctccttgggggaggtctcacagcctccagaggaggtttgggccacaagtgcagacagatacactgatgtgaccactgtgttgagtcaaagcctagaagaaaccatctctccaagaacataccccactgtgactgcatcgcacgcagcccttgcattcagcaggacacattctccattgctttcaactcctcttgcatttgcgtcctctgcttcaccaactgatgtttcatctaacccctttctccctagcgactccagcaaaacatccgaattgcatagcaattcagccctccccggtcctgtggacaacactcatatcctgagcccggtgtcctcattcagaccatacacttggtgtgcggcctgcactgtgccttcacctcagcaagttctggccacgagcctcatggagaaagacgtgggatcaggggatggtgccgagactctgtgcatgaccgtgctggaagaaagcagcatctctctaatgagtagcgtcgtagcagacttctctgaatttgaggaagatcctcaagtatttaatacgcttttcccctccagacctatcgtcccactttcttctagatccatggaaatctcagagacgagtgttggcatttctgccgaggtggatatgagtagtgttacaaccacacaggttccccctgcccacggccgcctctctgtgccggcgtcacttgatcctactgctggctccttgtctgttgctgaaacccaagtgacgccatccagcgtgaccactgcatttttctcggtcatcaccagcattctccttgactcatctttctctgtcatagcaaacaaaaacacaccgtcgcttgccgtcagagacccgagtgtttttacgccttatagtctggttccttcagtggagtcttcacttttctctgaccaagaacgttccagtttttctgagcataaacccagaggtgctttggattttgcatccagctttttctcaacacccccgctggaactcagcggctccatctcttcgccttcggaagcacctgcgtctctgtctctgatgccgagtgacttgtcccccttcacatctcagtctttttctcccttggttgagacatttacattgtttgactctagtgatctgcagtcatctcagctgtctcttcccagttccacaaatcttgagttttcgcagctccagccaagttccgagctgcctttaaacaccatcatgttgctacctagccgttctgaggtgtcaccatggtcaagcttcccttctgattctctcgagtttgttgaagcgtctacggtttcactgacggattcagaagctcattttacctcagctttcattgaaactacctcctatcttgagtcttcactcatttcccatgaatccgcagtcactgcactggtgccccccggctctgagtcttttgacattttgactgccgggattcaagcaacatcaccattgaccactgtccacacaacgcccattttaactgagtcttctttgttctcaactctgacacctcctgacgaccaaatcagtgctctagacggtcacgtgtctgtcctggcctctttctccaaagccattcccactggtacggtgttgatcactgacgcgtacctgccatcaggatcctcgtttgtttctgaagcaacccccttccctctgcccacagagctgaccgtcgtgggcccatcactcacacccacagaggtgccactgaacacctccacggaagtgagcacaaccagcaccggtgctgccactggtggtcccctcgactccaccctgatgggtgacgccgcaagtcagagccccccagagagtagtgctgctcctcccctgccatccctgcgtcccgtgactgccttcactctcgaagcaacagtcgacacaccaacactggctactgccaagccgccatatgtttgtgatatcacagtccccgatgcctatctgatcacaactgtgctggccagaagagctgtgcaggagtacatcattacagcaatcaaagaagtactgaggattcacttcaaccgtgcagtggaactgaaggtttacgaactatttactgacttcacttttctggtaacatccggtcctttcgtttacacggcaatatccgtcataaatgtgcttataaacagtaagcttgtccgtgaccagactcctttaatcctgtctgtgaaaccttctttccttgtgccagagtccaggttccaagttcaaacagtacttcagtttgtgcctccgagtgtggatactggcttctgcaacttcacccagcgcattgagaaaggcctaatgacagctctctttgaagtgagaaaacaccaccagggaacgtataacctcacggtgcagatcttgaatatcaccatcagttcctcaagggtgactcctcggcggggcccggtgaatatcatctttgcggttaaaagcacacagggatttttgaatgggtcggaagtgagcgagctgctcagaaacttgagtgtggtggagttcagtttctatctgggatacccagtgctgcagatcgcagagcccttccagtatccacagctcaacttatctcagttgctgaagtcctcttgggtcagaacagttctcctgggcgtcatggagaagcaactccagaatgaagtgtttcaagccgagatggaacgcaagctggcccagctgctcagcgaggtttccaccagaaggcggatgtggagaagggccactgtagctgcagggaacagtgtggtgcaggtggtaaatgtgtcgaggctggagggagatgacaatccggtacagctcatctactttgtggaggatcaagatggagaaagactcagtgcagtcaagtcttcggacctgattaacaaaatggacctccagagagcagccatcatcttgggttaccgaattcaaggtgtcattgcccagcctgtcgacagggtgaagaggccgtctccggaatcccagagcaacaacttgtgggtcattgttggcgtggtcatcccagtgctggtggtgatggtgattgttgtcatcctctactggaaactatgccgcacagacaagctagactttcagcctgacactgtggccaacattcagcagcgtcagaagctgcagatccctagtgtgaagggcttcgattttgctaagcagcatctgggtcagcacaataaagacgacatattgattattcatgagccagcgccactgccaggacctctgaaggaccacaccacgccctcggaaaatggagacgtgccaagccccaagtcaaagatcccttccaagaatgttcgtcacagaggaagagtttctccctcagatgctgactctacggtcagtgaagagtccagcgagagggacgcaggagataagacgccgggagccgtcaacgatggcaggtcccacagagctccgcagagcgggccaccactgcccagttcgggaaatgagcagcactcatcagcctccatcttcgagcacgtggacaggatctcccgccccccggaggctagccggcgggtccccagtaagatccagcttatcgccatgcagccgatcccggcacctcccgtccagcgcccctccccagccgaccgagtggcggaaagcaataaaatcaacaaagagattcagaccgcgctgcggcacaagtctgagatcgagcaccatcgcaacaagatccgcctgcgcgccaagcgccgcgggcactacgagttcccggtggtagacgacctgtcctcgggcgacactaaggagcgacaccgggtgtaccgcagggcacagatgcagatcgacaagatcctggaccccacggccagcgtgccctccgtgttcatagagcccaggaagagctcacggataaaacgttctcccaagcctcgccggaaacaccaggtcaacggctgtcctgccgacgctgagaaggaccggctcatcaccacagacagcgatggcacctacaggaggccccccggcgtccacaactcagcctacatcggatgcccatcggatcctgacctcccagccgatgtgcagacaccatcctcggtggaactggggaggtatccagcccttcccttcccggcctcccagtacatcccaccccagccgtccatcgaggaggcacgccagaccatgcactccctcctggacgacgcctttgccctcgtggcccccagcagccagcctgccagcaccgcaggtgtaggccccggagtcccacccggcctgcccgcaaacagcaccccttcccaggaagagaggcgagccacccagtgggggtccttctacagcccagcccagacggccaacaatccctgcagtagatacgaagactatggaatgactcccccgacgggtccattgccaagaccaggttttggccccggtttgctgcagtctacagagctggtgccccctgaccctcagcagccacaggcctccgccgaagccccatttgctgccagagggatctactcggaggagatgccgtcggtggcccggcctcggcctgtcgggggtaccacaggctcccagatccagcacctgacacaggtggggattgccagcagaattggagctcagccagtggaaatcccgccaagcagaggcagccagtatggggggccaggctggccttcgtacggggaggacgaagcggggcgaagagaggccacacacatgctcggacatcaagagtattcttcttcaccgctatttcaggtgccaaggacttcaggcagggagccctcagctccttccgggaacctcccccaccggggactgcagggccctgggctgggttaccccaccagctccacggaagacctccagcctggccactcctcggcctctctcatcaaagcaatccgcgaggagctcctccggctctcccagaaacagagcaccgtgcagaacttccacagctgatcggcctcgcctcgcagatttgccaagtatccgcttcctgtggaagcaagaccaaaaggaaatcaactgagtgggtgtttggaagaggaaggagcaactctcgggcagcctgcccaagggagggagcaagttgcaatttagaagatgccatacgtcgtgtgacagctcatgagcctttcactgggctggcaattgtctgaacacttgggttcagttgaaatatatgtattttggccaaaagccagcagcacttcacaaaaacaaaacacaaacctaagctaacaaaatgactgcattcgtctcttttttaaaggtagagattaaactgtatagacagcatagggatgaaaggaaccaagcgtttctgtgggattgagactg

SEQ ID NO: 24206 - DNA, 508 bp, Homo sapiens
  source 1..508: mol_type = unassigned DNA
caaaagcaatgggaaaacagcaataggtgatcctggtcgtgcaaacatgcctggttataacgaggactctcgctctaccttctttgataaaaagtatagtaacatgagcactttaggcaataacggaccgacacacaaaaagttgtatcgtcacaaatccagctccaaggccctgagagatgagaaatgtaagggaaagcacatggagcgagaacaggtccacaaggatgagtctgggacagcttcttttgaaaaactgagggattccgactacaatctcctaaaagcagaaacaaccttttgggttttacctgtgtttgaagaagagactcgcattttccagaaagacatttgatgtttgtgttttatttctttcaaaatatgccttgtgctgaattttggcttggaatcaccaactctgcctgtattgtgatccccaagactccagacctcagagtcacctgctggcttagaggagtggagtgctttctatgtaatgaaaaggtgg

SEQ ID NO: 24207 - DNA, 6620 bp, Homo sapiens
  source 1..6620: mol_type = unassigned DNA
agtagcttcagcctgtcttgggcttggtccagattcgctcctctggggctacgtcccggggaagaggaagcgaggattttgctggggtggggctgtacctcttaacagcaggtgcgcgcgcgagggtgtgaacgtgtgtgtgtgtgtgtgtgtgtgtgtgtgtgtgtgtgtgtgtgtgtgtaagacctgcgatgacgacgaggaggaacaagtgggacggcgagtgatgctcagggccagcagcaacgcatggggcgagcttcagtgtcgccagcagtgaccacaggtacggtatctacttcccagagcgcctggccgagaaataggaaagagggcagccagtaggcaggccaatacccaacaaaagtagaatcgagacgccctgagttcagaaggttgtgcccgtaagcagtgcagcgaggggaggacatattccaatgcagtcatttcacctaacttggaaaccaccagaatcatgcgggtgtctcacaccttccctgtcgtagactgcacggccgcttgctgtgacctgtccagctgtgacctggcctggtggttcgagggccgctgctacctggtgagctgcccccacaaagagaactgtgagcccaagaagatgggccccatcaggtcttatctcacttttgtgctccggcctgttcagaggcctgcacagctgctggactatggggacatgatgctgaacaggggctccccctcggggatctggggggactcacctgaggatatcagaaaggacttgacctttctaggcaaagattggggcctagaggagatgtctgagtactcagatgactaccgggagctggagaaggacctcttgcaacccagtggcaagcaggagcccagagggagtgccgagtacacggactggggcctactgccgggcagcgagggggccttcaactcctctgttggagacagtcctgcggtgccagcggagacgcagcaggaccctgagctccattacctgaatgagtcggcttcaacccctgccccaaaactccctgagagaagtgtgttgcttcccttgccgactactccatcttcaggagaggtgttggagaaagaaaaggcttctcagctccaggaacaatccagcaacagctctggaaaagaggttctaatgccttcccatagtcttcctccggcaagcctggagctcagctcagtcaccgtggagaaaagcccagtgctcacagtcaccccggggagtacagagcacagcatcccaacacctcccactagcgcagccccctctgagtccaccccatctgagctacccatatctcctaccactgctcccaggacagtgaaagaacttacggtatcggctggagataacctaattataactttacccgacaatgaagttgaactgaaggcctttgttgcgccagcgccacctgtagaaacaacctacaactatgaatggaatttaataagccaccccacagactaccaaggtgaaataaaacaaggacacaagcaaactcttaacctctctcaattgtccgtcggactttatgtcttcaaagtcactgtttctagtgaaaacgcctttggagaaggatttgtcaatgtcactgttaagcctgccagaagagtcaacctgccacctgtagcagttgtttctccccaactgcaagagctcactttgcctttgacgtcagccctcattgatggcagccaaagtacagatgatactgaaatagtgagttatcattgggaagaaataaacgggcccttcatagaagagaagacttcagttgactctcccgtcttacgcttgtctaaccttgatcctggtaactatagtttcaggttgactgttacagactcggacggagccactaactctacaactgcagccctaatagtgaacaatgctgtggactacccaccagttgctaatgcaggaccaaatcacaccataactttgccccaaaactccatcactttgaatggaaaccagagcagtgacgatcaccagattgtcctctatgagtggtccctgggtcctgggagtgagggcaaacatgtggtcatgcagggagtacagacgccataccttcatttatctgcaatgcaggaaggagattatacatttcagctgaaggtgacagattcttcaaggcaacagtctactgctgtggtgactgtgattgtccagcctgaaaacaatagacctccagtggctgtggccggccctgataaagagctgatcttcccagtggaaagtgctaccctggatgggagcagcagcagcgatgaccacggcattgtcttctaccactgggagcacgtcagaggccccagtgcagtggagatggaaaatattgacaaagcaatagccactgtgactggtctccaggtggggacctaccacttccgtttgacagtgaaagaccagcagggactgagcagcacgtccaccctcactgtggctgtgaagaaggaaaataatagtcctcccagagcccgggctggtggcagacatgttcttgtgcttcccaataattccattactttggatggttcaaggtctactgatgaccaaagaattgtgtcctatctgtggatccgggatggccagagtccagcagctggagatgtcatcgatggctctgaccacagtgtggctctgcagcttacgaatctggtggagggggtgtacactttccacttgcgagtcaccgacagtcagggggcctcggacacagacactgccactgtggaagtgcagccagaccctaggaagagtggcctggtggagctgaccctgcaggttggtgttgggcagctgacagagcagcggaaggacacccttgtgaggcagctggctgtgctgctgaacgtgctggactcggacattaaggtccagaagattcgggcccactcggatctcagcaccgtgattgtgttttatgtacagagcaggccgcctttcaaggttctcaaagctgctgaagtggcccgaaatctgcacatgcggctctcaaaggagaaggctgacttcttgcttttcaaggtcttgagggttgatacagcaggttgccttctgaagtgttctggccatggtcactgcgaccccctcacaaagcgctgcatttgctctcacttatggatggagaaccttatacagcgttatatctgggatggagagagcaactgtgagtggagtatattctatgtgacagtgttggcttttactcttattgtgctaacaggaggtttcacttggctttgcatctgctgctgcaaaagacaaaaaaggactaaaatcaggaaaaaaacaaagtacaccatcctggataacatggatgaacaggaaagaatggaactgaggcccaaatatggtatcaagcaccgaagcacagagcacaactccagcctgatggtatccgagtctgagtttgacagtgaccaggacacaatcttcagccgagaaaagatggagagagggaatccaaaggtttccatgaatggttccatcagaaatggagcttccttcagttattgctcaaaggacagataatggcgcagttcattgtaaagtggaaggaccccttgaatccaagaccagtcagtgggagttacagcacaaaacccactcttttagaatagttcattgaccttcttccccagtgggttagatgtgtatccccacgtactaaaagaccggtttttgaaggcacaaaacaaaaactttgctcttttaactgagatgcttgttaatagaaataaaggctgggtaaaactctaaggtatatacttaaaagagttttgagtttttgtagctggcacaatctcatattaaagatgaacaacgatttctatctgtagaaccttagagaaggtgaatgaaacaaggttttaaaaagggatgatttctgtcttagctgctgtgattgcctctaaggaacagcattctaaacacggtttctcttgtaggacctgcagtcagatggctgtgtatgttaaaatagcttgtctaagaggcacgggccatctgtggaggtacggagtcttgcatgtagcaagctttctgtgctgacggcaacactcgcacagtgccaagccctcctggtttttaattctgtgctatgtcaatggcagttttcatctctctcaagaaagcagctgttggccattcaagagctaaggaagaatcgtattctaaggactgaggcaatagaaaggggaggaggagcttaatgccgtgcaggttgaaggtagcattgtaacattatcttttctttctctaagaaaaactacactgactcctctcggtgttgtttagcagtatagttctctaatgtaaacggatccccagtttacattaaatgcaatagaagtgattaattcattaagcatttattatgttctgtaggctgtgcgtttggactgccatagatagggataacgactcagcaattgtgtatatattccaaaactctgaaatacagtcagtcttaacttggatggcgtggttatgatactctggtccccgacaggtactttccaaaataacttgacatagatgtattcacttcatatgtttaaaaatacatttaagtttttctaccgaataaatcttatttcaaacatgaaagacaattaaaacattcccacccacaaagcagtactcccgagcaattaactggagttaattgtagcctgctacgttgactggttcagggtagttccccatccacccttggtcctgaggctggtggccttggtggtgcccttggcattttttgtgggaagattagaatgagagatagaaccagtgttgtggtaccaagtgtgagcacacctaaacaatatcctgttgcacaatgcttttttaacacatgggaaaactaggaatgcattgctgatgaagaagcaaggtatttaaacaccagggcaggagtgccagagaaaatgtttccccatgggttcttaaaaaaaattcagcttttaggtgcttttgtcatctcccgcagtattcatcctcatgggaccatcttatttttacttattgtaatttactggggaaaggcagaactaaaaagtgtgtcattttatttttaaaataattgctttgcttatgcctacactttctgtataactagccaattcaatactgtctatagtgttagaaggaaaatgtgatttttttttttaaccagtattgagcttcataagcctagaatctgccttatcaggtgaccagggttatggttgtttgcatgcaaatgtgaatttctggcataggggacagcagcccaaatgtaaagtcatcgggcgtaatgaggaagaagggagtgaacatttaccgctttatgtacataacatatgcagtttacatactcatttgatccttataatcaaccttgaagaggagatactatcattcttatgttgcagatagccctctgaaggcccagagaggttaaataacttcccagaggtcatggccaagaagtagtggctccaagaactgaatgcaaattttttaaactgtagagttctgctttccactaaacaaagaactcctgccttgatggatggagggcaaattctggtggaacttttgggccacctgaaagttctattcccaggactaagaggaatttcttttaatggatccagagagccaaggtcagagggagagatggcctgcatagtctcctgtggatcacacccgggccacccctccctctaggtttacagtggacttcttctgcccctcctccttttctgtccttggccatctcagcctggcctctctgatccttccatcacagaaggatcttgaatctctgggaaatcaaacatcacagtagtgatcagaaagtgagtcctgtcttgtcaccccatttctcatcagaacaaagcacgagatggaatgaccaaccagcattcttcatggtggactgcttatcattgaggatctttgggagataaagcacgctaagagctctggacagagaaaaacaggccctagaatatgggagtgggtgtttgtagggctcacaggctaacaagcactttagttgctggtttacattcaatgaaggaggattcatacccatggcattacaaggctaagcatgtgtatgactaaggaactatctgaaaaacatgcagcaaggtaagaaaatgtaccactcaacaagccagtgatgccaccttttgtgcgcggggaggagagtgactaccattgttttttgtgtgacaaagctatcatggactattttaatcttggttttattgcttaaaatatattatttttccctatgtgttgacaaggtatttctaatatcacactattaaatatatgcactaatctaaataaaggtgtctgtattttctgtaatgcttatttttagggggaaatttgttttctttatgcttcagggtagagggatttcccttgagtataggtcagcaaactgtggcctacagcctgtgtgtgcacgccccatgagccgaaaagtgggtcttatgttttcaaatggttaaaaataaataaaaaaatttgaaacatgtgaactatatgacattcagatttgtgttcataaataaagttttattggaacatatcc

SEQ ID NO: 24208 - DNA, 3346 bp, Homo sapiens
  source 1..3346: mol_type = unassigned DNA
ttaccagtatcaagagtagaatgcatgttaaagctgccatccctggatttggtgttttcttcaaaccgaggagaactggagactttagggactacatatcctgcagagactttatcccctggaggtaatgctactcagagtggaacaaagacttctgctagcaaaactggaataccaggttcatcgggattaggcagccctcttggccgaagtcgacatagtagtagtcagtcagacctgaccagttccagcagtagttcatctggcttgagcttcactgcatgcatgtctgacttttccctttatgtatttcatccatatggagcagggaaacaaaaaactgctgtttctggcctcacacctggatcaggaggattagggaatgtggatgaggagcccacttcagtcactggtcgaaaagattcactcagtataaaccttgagtttgtaaaagtgagtttgtcacggatcaggcgttcaggaggtgcctcattttttgaaagtcagtctgtaagcaagtctgcaagcaaaatggatactacgttaataaatatatctgctgtttgtgatatagggtctgcctcctttaaatatgatatgcgccgactcagtgaaattctggcatttccaagagcatggtatagaagaagtattgcaagacgtctattccttggagaccaaactataaatttgccaacatctggcccagggacacctgattccattgaaggggtaagccaacacctttcccctgaatcatcaagaaaagcttactgcaagacctgggagcagccaagtcagtcagcctccttcacccacatgcctcagtcacctaatgtgttcaatgagcatatgacaaacagcaccatgtcaccagggacagtaggacagagcctaaaatccccagcttccataagatcaaggagtgtatctgattcttcagttcctcgaagagattcactttcaaaaacatcaactccttttaacaaatcaaacaaagcagcaagccaacaagggaccccatgggaaacacttgtcgtgtttgctatcaacttgaagcaattaaacgttcaaatgaaatgagtaatgtaatgggaaatacaacttggacaactagtggtttgaagagccagggccgtctgtcagtaggaagtaatcgtgatcgagagatcagcatgtctgttggtctgggaagatcacaattagattctaaaggaggagtagttggagggaccatagatgtcaatgctttggagatggttgctcatatttctgaacatccaaatcagcaacccagtcacaaaattcagattactatgggttctactgaagctcgtgttgattacatgggctcaagtatcctcatgggcatcttcagtaatgctgatcttaagcttcaggatgaatggaaagtaaacttgtataatacattggattcaagcataactgataaaagtgagattttcgtccatggagatttgaagtgggatattttccaagtaatgatatcaaggtcaaccacaccagatctgataaaaataggaatgaagctccaggaatttttcacacaacaatttgataccagcaaacgagctctgtctacctggggaccagttccttaccttccgccaaagacaatgactagcaacctagaaaaaagttcacaagaacaattacttgatgcagcacatcatcgacactggcctggagtattgaaggtggtatcaggatgccacatatccttatttcagattccattaccagaagatggaatgcaatttggaggatcaatgagcttacatggaaatcatatgacactggcatgttttcatggtccaaattttcgttcaaaatcttgggccctttttcatttagaagaaccaaatattgctttttggactgaagctcagaaaatctgggaagatggctccagtgatcattctacatatattgtacaaacactagattttcacctgggtcataatactatggttaccaaaccatgtggtgctttggaaagtcctatggcaacaataaccaagataacaaggcgtcgccatgaaaatccaccccatggagtagcaagtgtgaaagaatggttcaattatgttacagctacaaggaatgaagagctaaatctgcttcgtaatgttgatgctaacaacactgagaatagcactactgtgaagaattctagtttgttgagtggattcagaggaggttctagctacaaccatgaaacagagactatctttgcattaccaaggatgcagcttgactttaaatccattcatgttcaagaaccacaggagccttcattacaggatgccagcctgaagccaaaagtagaatgtagtgtggtgacagagttcactgaccacatttgtgtgactatggatgctgagctcatcatgtttcttcatgatttagtatcagcttatcttaaagaaaaagaaaaagccatctttccacctcggattttatctactcgaccaggacaaaaaagtccaattattatacatgacgacaattcctctgataaagatagagaagatagcatcacttatactactgtggactggagagattttatgtgcaatacatggcatctagaacctactcttagattaatttcttggactggaagaaagattgatccagtaggtgttgattatattcttcaaaaattgggctttcatcatgctaggactactattcctaaatggcttcaaagaggagtcatggatccactggacaaggttctgtcagttcttatcaaaaagctcggtactgcactacaggatgaaaaggaaaagaaaggcaaagacaaagaagaacactaaaaaagtaatttgatctgtgaacaaattatgattgtgtctgttttattacactggagtgtttttttagtataataatttgaaatataactttaaaataattctaaatttgtggctataattaaaagtttgtaagttaacctgttctagttccatcattctgtgtacagtgaagtattgcatgataatgtaaattttgtgaaaaactagattaaaatatataactgcttgttatggtttataattatataatgtgcaatacaattcctgcatctttaaaatgtctgcagaataactgtgaatttttttgttattggattggccgtaacttttagaaaaaaatcttgttgatgataatgtgattttggggaggtcattaattgctttttcttttttaaatgtagacttatataaatacctgtttgtatatagcttgagtaattgtgatatgattgtataccactaaaatattgttaactattataataaagtcacagtaatggttt

SEQ ID NO: 24209 - DNA, 12379 bp, Homo sapiens
  source 1..12379: mol_type = unassigned DNA
gacccgagagccgctgagccgcgaggccgggccggggcgccggccgggaatgccgggggcgcggcgccgacgccgaggcgcggccatggaggggaagccccgcgccggggtcgcgctggccccggggccgagcggccgacggccttccgcccgctgcgcccgccgccgccgcccggggctgctgcttcctggcctctggctgctgctgctggcccggccggcctcgtgcgccccagatgagctctctccggaacagcacaacctttctttatactccatggagctcgtgctgaagaaaagcactgggcacagcgctgcacaagtggccttaacagaaactgctcccggctcccagcacagcagtcctctccatgtcacagccccgccgtctgccactacttttgatacagccttttttaaccaaggaaaacagaccaaaagtacagcagatcccagcatctttgtggcaacttacgtgtcagtgacgagtaaagaggtggccgtcaatgacgatgagatggataactttctgccagatactcactggaccactccacggatggtttctccaatacagtatatcacagtcagcccaccagggctgcccagggaagcattagaacctatgctcactccatcattacccatggtttctttacaagatgaagaagtgacatcgggctggcagaacacaacgcgacaaccagcggcatatgctgagtccgccagtcatttccacacctttcggtcagcttttcgcacctctgagggcatcgttccaactcctggcaggaatttggtgctttatcctactgatgcttacagtcatttatcaagcaggactctgccagagattgtggcttccctaacagagggtgtggaaaccaccctttttttaagctcccggtctttaatgccacagccgttaggcgacggcattactataccgttgccctccttgggggaggtctcacagcctccagaggaggtttgggccacaagtgcagacagatacactgatgtgaccactgtgttgagtcaaagcctagaagaaaccatctctccaagaacataccccactgtgactgcatcgcacgcagcccttgcattcagcaggacacattctccattgctttcaactcctcttgcatttgcgtcctctgcttcaccaactgatgtttcatctaacccctttctccctagcgactccagcaaaacatccgaattgcatagcaattcagccctccccggtcctgtggacaacactcatatcctgagcccggtgtcctcattcagaccatacacttggtgtgcggcctgcactgtgccttcacctcagcaagttctggccacgagcctcatggagaaagacgtgggatcaggggatggtgccgagactctgtgcatgaccgtgctggaagaaagcagcatctctctaatgagtagcgtcgtagcagacttctctgaatttgaggaagatcctcaagtatttaatacgcttttcccctccagacctatcgtcccactttcttctagatccatggaaatctcagagacgagtgttggcatttctgccgaggtggatatgagtagtgttacaaccacacaggttccccctgcccacggccgcctctctgtgccggcgtcacttgatcctactgctggctccttgtctgttgctgaaacccaagtgacgccatccagcgtgaccactgcatttttctcggtcatcaccagcattctccttgactcatctttctctgtcatagcaaacaaaaacacaccgtcgcttgccgtcagagacccgagtgtttttacgccttatagtctggttccttcagtggagtcttcacttttctctgaccaagaacgttccagtttttctgagcataaacccagaggtgctttggattttgcatccagctttttctcaacacccccgctggaactcagcggctccatctcttcgccttcggaagcacctgcgtctctgtctctgatgccgagtgacttgtcccccttcacatctcagtctttttctcccttggttgagacatttacattgtttgactctagtgatctgcagtcatctcagctgtctcttcccagttccacaaatcttgagttttcgcagctccagccaagttccgagctgcctttaaacaccatcatgttgctacctagccgttctgaggtgtcaccatggtcaagcttcccttctgattctctcgagtttgttgaagcgtctacggtttcactgacggattcagaagctcattttacctcagctttcattgaaactacctcctatcttgagtcttcactcatttcccatgaatccgcagtcactgcactggtgccccccggctctgagtcttttgacattttgactgccgggattcaagcaacatcaccattgaccactgtccacacaacgcccattttaactgagtcttctttgttctcaactctgacacctcctgacgaccaaatcagtgctctagacggtcacgtgtctgtcctggcctctttctccaaagccattcccactggtacggtgttgatcactgacgcgtacctgccatcaggatcctcgtttgtttctgaagcaacccccttccctctgcccacagagctgaccgtcgtgggcccatcactcacacccacagaggtgccactgaacacctccacggaagtgagcacaaccagcaccggtgctgccactggtggtcccctcgactccaccctgatgggtgacgccgcaagtcagagccccccagagagtagtgctgctcctcccctgccatccctgcgtcccgtgactgccttcactctcgaagcaacagtcgacacaccaacactggctactgccaagccgccatatgtttgtgatatcacagtccccgatgcctatctgatcacaactgtgctggccagaagagctgtgcaggagtacatcattacagcaatcaaagaagtactgaggattcacttcaaccgtgcagtggaactgaaggtttacgaactatttactgacttcacttttctggtaacatccggtcctttcgtttacacggcaatatccgtcataaatgtgcttataaacagtaagcttgtccgtgaccagactcctttaatcctgtctgtgaaaccttctttccttgtgccagagtccaggttccaagttcaaacagtacttcagtttgtgcctccgagtgtggatactggcttctgcaacttcacccagcgcattgagaaaggcctaatgacagctctctttgaagtgagaaaacaccaccagggaacgtataacctcacggtgcagatcttgaatatcaccatcagttcctcaagggtgactcctcggcggggcccggtgaatatcatctttgcggttaaaagcacacagggatttttgaatgggtcggaagtgagcgagctgctcagaaacttgagtgtggtggagttcagtttctatctgggatacccagtgctgcagatcgcagagcccttccagtatccacagctcaacttatctcagttgctgaagtcctcttgggtcagaacagttctcctgggcgtcatggagaagcaactccagaatgaagtgtttcaagccgagatggaacgcaagctggcccagctgctcagcgaggtttccaccagaaggcggatgtggagaagggccactgtagctgcagggaacagtgtggtgcaggtggtaaatgtgtcgaggctggagggagatgacaatccggtacagctcatctactttgtggaggatcaagatggagaaagactcagtgcagtcaagtcttcggacctgattaacaaaatggacctccagagagcagccatcatcttgggttaccgaattcaaggtgtcattgcccagcctgtcgacagggtgaagaggccgtctccggaatcccagagcaacaacttgtgggtcattgttggcgtggtcatcccagtgctggtggtgatggtgattgttgtcatcctctactggaaactatgccgcacagacaagctagactttcagcctgacactgtggccaacattcagcagcgtcagaagctgcagatccctagtgtgaagggcttcgattttgctaagcagcatctgggtcagcacaataaagacgacatattgattattcatgagccagcgccactgccaggacctctgaaggaccacaccacgccctcggaaaatggagacgtgccaagccccaagtcaaagatcccttccaagaatgttcgtcacagaggaagagtttctccctcagatgctgactctacggtcagtgaagagtccagcgagagggacgcaggagataagacgccgggagccgtcaacgatggcaggtcccacagagctccgcagagcgggccaccactgcccagttcgggaaatgagcagcactcatcagcctccatcttcgagcacgtggacaggatctcccgccccccggaggctagccggcgggtccccagtaagatccagcttatcgccatgcagccgatcccggcacctcccgtccagcgcccctccccagccgaccgagtggcggaaagcaataaaatcaacaaagagattcagaccgcgctgcggcacaagtctgagatcgagcaccatcgcaacaagatccgcctgcgcgccaagcgccgcgggcactacgagttcccggtggtagacgacctgtcctcgggcgacactaaggagcgacaccgggtgtaccgcagggcacagatgcagatcgacaagatcctggaccccacggccagcgtgccctccgtgttcatagagcccaggaagagctcacggataaaacgttctcccaagcctcgccggaaacaccaggtcaacggctgtcctgccgacgctgagaaggaccggctcatcaccacagacagcgatggcacctacaggaggccccccggcgtccacaactcagcctacatcggatgcccatcggatcctgacctcccagccgatgtgcagacaccatcctcggtggaactggggaggtatccagcccttcccttcccggcctcccagtacatcccaccccagccgtccatcgaggaggcacgccagaccatgcactccctcctggacgacgcctttgccctcgtggcccccagcagccagcctgccagcaccgcaggtgtaggccccggagtcccacccggcctgcccgcaaacagcaccccttcccaggaagagaggcgagccacccagtgggggtccttctacagcccagcccagacggccaacaatccctgcagtagatacgaagactatggaatgactcccccgacgggtccattgccaagaccaggttttggccccggtttgctgcagtctacagagctggtgccccctgaccctcagcagccacaggcctccgccgaagccccatttgctgccagagggatctactcggaggagatgccgtcggtggcccggcctcggcctgtcgggggtaccacaggctcccagatccagcacctgacacaggtggggattgccagcagaattggagctcagccagtggaaatcccgccaagcagaggcagccagtatggggggccaggctggccttcgtacggggaggacgaagcggggcgaagagaggccgtgccaaggacttcaggcagggagccctcagctccttccgggaacctcccccaccggggactgcagggccctgggctgggttaccccaccagctccacggaagacctccagcctggccactcctcggcctctctcatcaaagcaatccgcgaggagctcctccggctctcccagaaacagagcaccgtgcagaacttccacagctgatcggcctcgcctcgcagatttgccaagtatccgcttcctgtggaagcaagaccaaaaggaaatcaactgagtgggtgtttggaagaggaaggagcaactctcgggcagcctgcccaagggagggagcaagttgcaatttagaagatgccatacgtcgtgtgacagctcatgagcctttcactgggctggcaattgtctgaacacttgggttcagttgaaatatatgtattttggccaaaagccagcagcacttcacaaaaacaaaacacaaacctaagctaacaaaatgactgcattcgtctcttttttaaaggtagagattaaactgtatagacagcatagggatgaaaggaaccaagcgtttctgtgggattgagactggtacgtgtacgatgaacctgctgctttgttttctgagaagaggtttgaagacattttattaacagcttaatttttctcttttactccataggaacttattttaatagtaacattaacaacaagaatactaagactgtttgggaattttaaaaagctactagtgagaaaccaaatgataggttgtagagcctgatgactccaaacaaagccatcacccgcattcttcctccttcttctggtgctacagctccaagggcccttcaccttcatgtctgaaatggaactttggctttttcagtggaagaatatgttgaaggtttcattttgttctagaaaaaaaaaatccctcccaaagtggggcaaaaagctttatatttatttgattatccaaaatacagatcaaagtttagatctacattcttcattgtatttgctgtttcttaattgggcacacacaactcctggtcatgtcccagttcagcaccgatcgctaaggccgatcctgtagaatgcggctttcaagaggtcctaactgatcctttcttccactttgctgttgatttgttcacaaattatgtctgaatgagaaatcttctgtaagcagaagttatttaataattcccagcaccacgaaattgttatacatacatccctaccagtcacattccctgtgttcagagcctggaaatgaaattgagttcagttcagcctctctgtaatgaatcaagaaatgtaaaagagctttgagaccccaagggaaaggagagagttgcttctcatttctgattttattgtgctgttactctgtcgagtggctattaaaattgtcttatgctctttgggctaagaggggatcatctcgcttaagatgtactcctgatgtaaacatttcccccactttccaaataatggtaaagaaaacagtggcaagggctgttctgttttctggtacctgagtgaaactcagaagaaaagcaggcttagctaagagattttcactattaacctgtttttattagatcagcgaagacagtcatgcatcgcttaatgatggggatgcattctgagaaatgtgtcattaggctgttttgttgctgtgccaacatcctagattgtacttacacaacctacatggtatagcctactacacacctgggctgtgtggcatggcctattcctcttaggctacaaacctgtacagcatgttactgtactgaacacaatggtaagtatttgtgtatctaaacatagctaaacatagaaaaggtatggtaaaaatacaattttataatcttatgggactaccatcaatatgtagaccgtcattgaccaaaacatcctgatgtgtgcatgactgtacttttcattaaataacagataaggggctatagaatttggggctctgactgatcaaaacctgtgtatctgtgtcaagttttaagacccctgaaacagctaaaacaggtttccaaagtgtaatcactggatttcaaaaccatgttttagcccttcattaatgaagcctgttgtacagatttagagtcttacaatatgagggaagttggttctgggaaggtaagatgtagccagttttcatctgggcacctctgaaagagaaggagtgcaggagagtaagtctctcaaggacgttcaacaaaggaccagcagcatcttatcaggcgatcctcagaggctccaaggagcattggagagaatgcccctttctgggcttgatgtcttggttttggtttaataccaaatttctcttggtcttggtttaatacccgactcctcccaaattgaacgattatctttgtatgtcactcaaaaataccaggtttcctgaatatgttattaagaatttcagatatccaagcagaattttattatggacaccttgtaatgaattcaaatcgtgtgacagcaaacgggataaatggccccttctcacccagttccgctcagggccatacaggcttgcacatagagtgtgctaaaaatggtaacctcctttgagcattgcagaaagagggttctgtttcaaattgggctgaccgtaaaagcaattttgatgtctttcaaactaccataaagggattttaactgtatttttattcttagaaacaatacacctttaaacagatgtcaagaccaaagatgatgtataataaacagccggtggttatggtgtggtgtgagcaggcccccggatcaccagccctctgctggtggtcataaagcacacacagtttgtacttgcttcctctcgacgcctgccacaacagttttgccagtcaccaaactcagaaaaaactagctgtgtgagcagcaccgtaccctagcggtcttcagacattaagttcacgtcatccactgaaaggaagggtccttgcgttgacagcgtgtggctttggagtccgtttatggaagcactctacaatgaacagttgaattttatgtctattcttttttcctattttaaaagttctagtggtaacacaaactgtaaatttgagtcagaatgtttggagaaatgttgtttttttttttttcagagactactttgtcactcactgaccatgtctggttccttctctgaacttcattctccccataagccaaacaagaacagacctcccccgccacctcccaggcaccgtagttgtgagaatcagatgtgatcatgtgtgcagatgtcctgtgaggagggagcataaagcactgtgaaaatgtagcatgctgtctatgtggacgccctaggatgagtgatgtgaaacgctgcactactgcggtgaatgggttcacacatgggtaatgagcaaaaccgaaagctcggtgtgactcagtttcctcactcccattttgctttaatttcacttccttcaccaattttccgattgcatttattaagcatctttctgctcccgactttctggtgtctctggcaccaaataacccagcagacatgagccttgccttctgagattttagaatctaagatagcacgagtgggtatagaagatggaagataccgataaataacatggtttaagtgtcaataaaattcattcgaagagatcaggcgcggtggctcacgcctgtaatcccagcattttgggaggctgaggcaggtggatcacttgagatcaagagcttaaaaccagcccaggcaacatggcaaaaccccgtctctacaaaaaaatacaaaaactagctgggtgtggtggcgcatgcctgtagtcccagctgaggcacgataattgcttgaacccggggggtggaggttgcagtgagctgagattgcaccactgtactccaacctgggcgacagagcaagactgtgtctcaaaaagaaaaaaatttgttcaaaagacataaatgaattaggcacccagaagaagttgcatgtttggaaatgcaatatcttggggagacgtcaacttctgaagtgactttgaaggcagggcagctacccaggcaaatggcgtggaaggaagagctgagagtgggcctgggaaaggctgtagggaaggagtgaagctgtcactgaaatgaacttgatcttgatctgctttgatatggggacagaatccccgactgcactattgagggagtttcagaagagaaggaagaggtgctggaaggatgcttttgcagtcatgcagcaaggaaacgaccagggctgtgaagatctacagaggaagtactccagtgtgggggaggcaagggaagaggacgaaaatgatgagaatgacactgaggtcattgtttagagcagatctcaagcagccgtttggccacgccatatcctttgtggagcatagtgggttatctatctgtctgtctgtctatgtatctgtctatctatctatatatatattcagcttctttactgctacctacacatttttctccaaattttattaatttcatagtgttttgatttgggtggcagatgacttttaagcagtgggtgtttgccggccagatctttcctggcatgcggactgtgaggcaaagcacgggtgaaggtaggcgctaaaggctttgggctaaagccagcacgcggttctgtgctataggagtctcccgtttcccgtggacaggttcagcgttccttctttcgcacaacttttttctaagtgttccagtgaccaagccagtcattcggacactgatttgcagtgcattggcagtaattcacaaattagttgttatataagtctctctcatccctttcacactagattctcagacatgaatgaatttgtcgtttggaaggaaagctgggtaacgttttgggcacaggggaaggaggactccggtcttaactcccacgctaactttagctcaagtggagttttcaccgtggtcatttctacctccggagcaaggtgccagcgccagtactagagcctgcttatccacatttgccctggacaggagcaggaggaagtccacttctgtaccggcagacagagcatgtgaacacaaaacacatttctatggcatagtcaactgaacttcatttttacatttaatctaacatgttaacacgttctaacagggtttctatgagcagctgctgtaacatactcatcaactatgatagacttaacacttgttacctaatgaacaaggaggatgtgcatttcgggtttcttttgatattcgtggaggtgattgtcagtgtttaaacaggactactttctccactatgaagatgacttggaaatcgcaacatcatggtacattgctaagtccatgcttgtgtgtgtgacagtaggcttgataatttatcttaaaacacagcagcattgaaatttaggaaaagaatattaaatgcctttggaaacatgaaacaaagttaggagccagtaagaaagtgacagaagcaatgaatgtcttaatgcagtatagttaaaatggcttcccacagggtagataattatccaggatccttccttttccttcttcctccaggtttttcaggggtcacttcacatttctaaagaaagagtgaataggctgggcatggtggctcaagcctctaatctcaacgctttgggaggctgaggcaggaggatcgcttgaggccaggagtttgagaccaccttgggcaacataacgagaccccgtctctacaaaaaaaatttaaaaattagctgagcatggtggcatgtgccagtagtcccagctactcgaaaggctaagactggaggatcgcttgagccaatgagttggaggctgcagtgagctataatcacgccactgcactccagcctgggctgcagggtgaggtcctgtctctggaaaaaaaaaaaaaaaaaaaaggaataggtaaaagggacagaggtgaaattttgagtgacttgagtctcttgcagtccctgattacacagaacctttctgggctacttggagcatcacgaatagtctttcctgtacttaccagatttcaagtattcataacttgactccctaagtgtacaagttgggaatagtacagggccaagttcaagtcgcatatgctgtactgttcctcctgcaaatgtggggaaagaagagggagatactagaggaactgaggctccacccattcattcagttgctctaagcaccagaggacttgtttcagaaaaggggagtgggaacgccctcgactttgccctcctccggagcatctctgggacgcagggagtctggctagcgttaataggaaaggttgctcggcagagctgccctggagtactgacttgtctctccctcctttgtcaaggtccatgtttttctggctcttcctgcacactcatccctagattatgagcgttaatgtacgaaatgtgcagagcaaattgaggccaactgtggcatcaatactgcaacttaaacttgacaatcatggtttgctggtcctcaaacaggcactgaaatctcagtatgggtatacgatttaataatcggcccctcccttctatttgtcggttttatgtttctatccttcaatagctgcactgttttctaatgtgctgtagagtttttgaaataatttatgcaagtatttggtttccatgtttacaatttatacagctttcctagcattttaaatggaaatgtcaataaatgctatgaattggtgtcaaa

SEQ ID NO: 24210 - DNA, 639 bp, Homo sapiens
  source 1..639: mol_type = unassigned DNA
ctttttgacgtccaagagtgacagagcctcaagcactcctggggaccgggctgacttttctccactggcttggttgggaactggcttcttcggagctgtgtagtcttaatttgctttgctgctggctggctgacagctgatgggggactcctcaggacggactcccttccagatgcacccatctccatccttctcaactccccaacctttgtcctccccactcttcgctcgcgcggcggtctgagaccaccaggaccagtttcaggggtttccttctccagcgagacttggcagaacaggctttaaaagcaaaggaggcagcggaagactgtgaattcctttggacaattgatgatatttatcattgtgcccagtttctacaaataaaagatgggtggattattttctcgatggaggacaaaaccttcaactgtagaagttctagaaagtatagataaggaaattcaagcattggaagaatttagggaaaaaaatcagagattacaaaaattatgggttggaagattaattctgtattcctcagttctctatctgtttacatgcttaattgtatatttgtggtatcttcctgatgaatttacagcaagacttgccatgacactcccattttttgctttt

SEQ ID NO: 24211 - DNA, 6841 bp, Homo sapiens
  source 1..6841: mol_type = unassigned DNA
cgtgacgggagcatcggcgctggctgcccgggccgcgagcgcagcagagctgtcagcgggcggacgggcagcgggtgacggagcggcgagacgagcgcacagcagtcgcggcccgggagccggagctgccgccgcaccccgggaaggctgccttgccgccggcccgccgaccgcggccggacgaagatgctgttccgcgcccgggggccggtacggggcaggggctgggggcggccggcggaggctccccgccgcgggcgctcgccgccctggagccccgcctggatttgctgctgggcgctcgccggctgccaggcggcctgggctggggacctgccctcctcctccagccgcccgcttcctccttgccaggagaaagattatcactttgaatatacggaatgtgatagcagtggctccaggtggagagttgccattccaaattctgcagtggactgctctggcctgcctgacccagtgagaggcaaagaatgcactttctcctgtgcttctggagagtatctagaaatgaagaaccaggtatgcagtaagtgtggtgaaggcacctattccttgggcagtggcatcaaatttgatgaatgggatgaattgccggcaggattttctaacatcgcaacattcatggacactgtggtgggcccttctgacagcaggccagacggctgtaacaactcttcttggatccctcgtggaaactacatagaatctaatcgtgatgactgcacggtgtctttgatctatgctgtgcaccttaagaagtcaggctatgtcttctttgagtaccagtatgtcgacaacaacatcttctttgagttctttattcaaaatgatcagtgccaggagatggacaccaccactgacaagtgggtaaaacttacagacaatggagaatggggctctcattctgtaatgctgaaatcaggcacaaacatactctactggagaactacaggcatccttatgggttctaaggcggtcaagcctgtgctggtaaaaaatatcacaattgaaggggtggcgtacacatcagaatgttttccttgcaagccaggcacattcagcaacaaaccaggttcattcaactgccaggtgtgtcccagaaacacctattctgagaaaggagccaaagaatgtataaggtgtaaagacgactctcaattttcagaggaaggatccagtgagtgtacagagcgccctccctgtaccacaaaagactatttccagatccatactccatgtgatgaagaaggaaagacacagataatgtacaagtggatagagcccaaaatctgccgggaggatctcacagatgctattagattgcccccttctggagagaagaaggattgtccgccttgcaaccctggattttataacaatggatcatcttcttgccatccctgtcctcctggaacattttcagatggaaccaaagaatgtagaccatgtccagcaggaacggagcctgcacttggctttgaatataaatggtggaatgtccttcctggcaacatgaaaacttcctgcttcaatgttgggaattcaaagtgcgatggaatgaatggttgggaggtggctggagatcatatccagagtggggctggaggttctgacaatgattacctgatcttaaacttgcatatcccaggatttaaaccaccaacatctatgactggagccacgggttctgaactaggaagaataacatttgtctttgagaccctctgttcagctgactgtgttttgtacttcatggtggatattaatagaaaaagtacaaatgtggtagaatcgtggggtggaaccaaagaaaaacaagcttacacccatatcatcttcaagaatgcaacttttacatttacatgggcattccagagaactaatcagggtcaagataatagacggttcatcaatgacatggtgaagatttattctatcacagccactaatgcagttgatggggtggcgtcctcatgccgtgcctgtgccctcggttctgaacagtcgggttcatcgtgtgtcccctgccctccaggccactacattgagaaagaaaccaaccagtgcaaggaatgtccacctgacacctacctgtccatacatcaggtctatggcaaagaggcttgtattccatgcgggcctgggagtaaaaacaatcaggaccattcggtttgctatagtgactgctttttctaccatgaaaaagaaaatcagagtttgcactatgactttagcaacctcagcagtgtgggctcattaatgaatggccccagcttcacctccaaaggaacaaaatacttccatttcttcaatatcagtttatgtgggcatgaggggaagaagatggctctctgtaccaacaatataacagactttacagtaaaagaaatagtggcagggtcagatgattacacaaatttggtaggggcatttgtatgccagtcaacaattattccttctgaaagtaagggtttccgagcagccttatcatcacaatccatcattctggcagatacattcataggagtcacagttgaaaccacattgaaaaatattaatataaaagaagatatgttcccagttccaacaagccaaataccagatgtgcatttcttttataagtcttctacagcaacaacatcttgtattaatggccgatcaactgctgtgaaaatgaggtgtaatcctactaaatctggagcaggagtgatttcagtccccagcaagtgcccagcaggtacctgtgatgggtgtacgttctatttcctgtgggagagtgctgaagcttgccctctgtgtacggagcatgacttccatgagattgagggagcctgcaagagaggatttcaggaaaccttgtatgtgtggaatgaacctaaatggtgcattaaaggaatttctttgcctgagaaaaagttggcaacctgtgaaacggttgacttttggctgaaggtgggagccggtgtgggagcttttactgccgttttgctggtggctctgacctgctacttctggaaaaagaatcaaaaactggaatacaaatattccaagttagtaatgacgactaactcaaaagagtgtgaactcccggctgcagacagttgtgctatcatggaaggagaagataatgaagaggaagttgtatattccaataaacagtcactactaggaaaactcaaatctttggcaaccaaggaaaaagaagaccattttgaatctgttcaactgaaaacctcaagatccccaaatatatgaagagacagtgctgtagccttgagactaatgaacaaagaaacctgctctagttttacaggaccatattttagggtctgtcctcatacctgtcacattggtgatctcacagaggagggccatgccgctgaaaagggaaggagattgaaacatttgattgccttatcacatggtcaagtaccttgccaaataaaggaaagcaaatgatttgggtctcaactgaagatgaagctcaactcaggaagagatttatctgtatatacacataactgaaaaccaagtttaagcccaccaatgcactgctgatgcatgccatataattaatgggtaacttttattctttatgatgtctacataacaagtgtgatttggaaggcacatgtgagcatatgcattatgatccaatttatgttttttctttgtttatattttggggaaaattaaaatttttttaaggtatatttttcccattatttattttcctgaccttaaaacagcttttctactaaaaaatggtgagcaatgaagacaataaatttttcatttttccataggttatcttctcttgatttaaatttcaggaagagttagcatgtgcttgggttatctagatttataattgcctttgaaattccatcctcgttggagctggtaagaagggcttgactgaaagtttgaaggaatctaaaaaacaaaaaagtaagaaaggtaacgagaagccctaattctccattaatgcaaactagctgctagtatcatagaagtcaaatgacttaaaacagtttatgtagtgctagaagtataattaaagtaaataggaaagcttgtcaatcaaatcactggcaaaatcatgaagaagagagtgagaaggtttgtctataagtacagatgactgtatgaaatactggggtaatttcatggtctccagaaaatgtcagtgggacttttgttctttgtcaagcaccagaggttatatggttatttttctgctgcaagactttgaggatgttgactttctcagaaactttttaaaaaaataatccaataaggcaggaattcagttttgaaaaattacatataattgtattcataataagaatgtggttatttcataagcagttatgaaagaattattgttcttattcaaaagtgatccagataattgtgatattttctatggtgggctactggtattagcacgacttggatattatttgttgaaggaagtatgaatgaagttggatttgaccaatttcgtgtaaaccttaattgatttaaaactgggaaagaggggggtttcctggccattgctgatctaaggtgctcttatttgtttccaataaacagtaatctttatagaccttaatgcagatttaaaaaaatagttgtgattggctgagagaggcagggcatatatgtagggaaatgatttgccccaagcattccaatgaagtatgacttgtaacttttgtgtctgaaggtggtgtctttatttttgtggaaaatgggagaaaaatgaataattgtgtttatttggctgattggtaatacactagaccattctgttattattgaatgaatgttttgtgtatatctctgctgttgcacatatgagtataggtgaggttgtcattgtttgctctgggattcagggagggagtcactttgcataaacctttttttgcatttaatttcttgaatgttcttataaagaagacattatgttggcattcttcatttttatcctgccaacagagtgcttatgagcatgtctgcattttgatcaaaatttaaacagaagagtgaaaatacatttgaaatgaaccctttcagaggaaccctggcaaagctgtatagactggacagagtgagaaaacttccacagccacctgtcacctttctcctcatcttccactgtgttcaatatgtatgttccaagccatagagataattgggattttctcccaggtagcttctttcttctcctgtcactggactaaaatctctgacatgtcaaaaatgccttaaattttaatgaactctccgaaaatgtagttgatattggagaatttattttatttctaattttagatattaaatatattttgtcagcacagtcccatctttgggaaggaggtgattttttcccttggattccagtggtttgtcattttatttcaagcactgaagaagtatgacagaaagaatattatggggaaaatatttagaccaatcctggctataaaatttcctttagttttatgcctggcctttgcaaagctcagtgaaatgttgaaaggaataaattaatcatgtttctgtgacttttgattgacacttgttccttttcccccctaagtggtagaagaagttatttgttatttttctaaaaggcacaattttgaagccttaactacttcattaagtcaactgttgcctataacatctcttagcactcgtcaaaacgtatttaaatcaattttccaatggatgagaacatgtcttctgtggataaattatattatgtcatttaacaacattgagcattttgatatgtgttcactgaattaaaaaacctgaatttcattattgttgacttttcccctctttagttactagtaatcacatcctttctaggattaaaaatatttcatagtatttttgtgtagatgtctgtccttattttcttcccaaagaaaaaaggttgtttaaattgattatgtggaagaattacttgggtccagtctttagcatctggggtctccaggtccccaggtgggtcatgattgactgcttcttcaagacccatcttgccaactctcacttgatgtctgtcaatagaactacttcctgtggcacatggttatttctaatgggaggctaatgtgtacataatttctctcttcctcatagaaataaatttctctgggggttgctgtgagaggatgacttcattagccatgtttaaagtgagtgtactgctcacgtttatctttgtacactaagagtatgtagagttgatcttcagagaaactaaacctccctcatatctatttatagtaatcatgaatatgattgcagttgacaggcccaactcctaaactgagtttgcccaaagaaaatgtccttagaggagtaaacttttagaaatctcaacacccgactcattcgttggaagctaaaatggaattcatcttcatactaactggctacagattattctcttgctggattttacttttattttaacatttttacatgagttccttttagaatcataaatgaaagaagtaaaactttaagatgggaatgaataattgaaaagagaattatatttactattataattgatattattcgctattatgattacacttgtctagatcagagcccagcaaacattttttttgtaaagggtcagatagtacatagttttggctttgcagggcatgtgggctctattgcatttactcaactctgccattgtagtatgaaagcaaccacatacaaaatgtaaatggatgggcgtggctgcattccaataaaactttatttatggacactgaaa

SEQ ID NO: 24212 - DNA, 11088 bp, Homo sapiens
  source 1..11088: mol_type = unassigned DNA
gaaatcttttaggcctttagatgttgttctggaaaaactttagtaatggatcaaaggaagaatgagagtattgttcctagtataactcaattagaagattttcttacagaacacaattccaatgttgtttggctccttgttgctaccattttgtcctgtggatggattatttacctcacatattataattcccggaatgttggtcttattttaacactagttcttaacagattatacaagcatggctatatccatattggttccttctctttctctgttctttctggaaaagtcatggttcgtgaaatctattacattacagaagacatgtctattaggattcaagatggattcatcatttttcggtggtggaaaatgtataacccaaaacagaagcaacatgatccaaaggcagaaaccaggttatacatcacagtcaatgactttgaatttcatgtctataatcgctcggatctttatggacgccttcaagagttgtttggtttggagccaacaataattccacctaagaaagatgatgataaaacacgggaaattggaagaacaagaacccaatcgaaaattgaaagagttaaagtaaaaacagaatcccaagaccccacatcttcatggagatcacttattccagtcataaaggtcaatgtgagcacaggacgtttggcctttggaaatcactaccagccgcaaactctgtgcatcaactttgatgatgctttcttaacttatactacaaaaccaccttcaagtcatcttgaccaattcatgcatattgtgaaaggaaagcttgaaaatgttcgagtcatgcttgttcctagtccaagatatgttggtcttcaaaatgatgaaccaccgagattaatgggagaaggttttgtggtgatgcagtcaaatgatgttgacatctactactacatggatgagccaggacttgttccggaagaaacagaagaaaatattgaaggagaaatgagcagtgaggattgcaaattacaagacttgcctccatgttggggactggatatagtttgtggtaaaggaacagattttaattatggaccatgggccgataggcagagagattgtttgtggaagtttttctttccacctgactatcaagttctgaaagtttctgaaattgcacagcctgggagaccaagacagatccttgcttttgaattacgaatgaatattattgcagatgctacaattgatttgctgtttaccaaaaatagggaaacaaatgctgtacatgtaaatgtaggagctggctcatatttagaaattaatattccaatgacagttgaagaaaatggttacactcctgctattaagggacaactcttacatgtggatgccactaccagcatgcaatatcggacccttttagaagcagaaatgttagcattccacatcaatgccagctacccccgaatatggaacatgccgcagacatggcagtgtgaattagaggtttataaagccacttaccacttcatctttgcacagaaaaacttctttacagatttaattcaagactggtctagtgacagtcctccagacattttttcatttgttccatatacgtggaattttaaaatcatgtttcatcagtttgaaatgatttgggctgctaatcaacacaattggatcgactgttctactaaacaacaggaaaatgtgtatctggcagcctgtggagaaacactaaacattgatttttctttgccttttacggactttgttccagctacatgtaataccaagttctctttaagaggagaagatgttgatcttcatttgtttctaccagactgccaccctagtaaatattctttatttatgctggtaaaaaattgccatccaaataagatgattcatgatactggtattcctgctgagtgtcaaagtggccagaaaacagttaaaccaaaatggcgcaacgttactcaggaaaagtctggttgggttgaatgctggactgtcccaagtgtcatgcttacaattgattatacatggcatccaatttatccacaaaaagcagatgaacagctgaaacaatcattatcagaaatggaagagacaatgctatctgtattaaggccatcccagaagacatcagacagagttgtttcttctccctctacttcttcacgcccacctattgatccctcagaacttccacctgataaacttcatgtagaaatggaactttctccagattctcagataactctctatggacctctactaaatgcctttttgtgtataaaggaaaactactttggggaagatgacatgtatatggattttgaagaggttatctcaagtcctgttttgtcactgtcaacatcatccagctctgggtggactgctgttggaatggaaaatgacaaaaaggaaaatgaaggttcagccaagtcaattcatccacttgccttgcgtccttgggatattactgtacttgttaatttgtacaaagttcatgggcgtcttcctgttcatggaactactgatggtcctgaatgccctacagctttcttggaaagactatgttttgaaatgaaaaaaggatttagggagaccatgctgcaacttatcctgtcacccctgaatgtgtttgtcagtgataactatcagcagcgaccccctgtggatgaagtactcagggaaggtcacatcaatttgtcaggtctccagctgagagcacacgctatgttctcagcagaaggtcttcctttgggaagcgattccttagaatacgcatggttaattgatgtgcaggctggaagtcttacagctaaggtcacagcaccacagctggcatgcctcttggagtggggacagacatttgtttttcatgtggtatgtcgggagtatgaactggaaagaccgaaatcagttataatatgtcagcatggaattgatcgtcggttctgtgaatccaagttgagttgtattcctgggccttgtccaacttcagatgatttgaaatatactatgattcgtttagcagtagatggagccgatatttacattgttgagcatggttgtgctacaaatataaagatgggtgcaattcgagttgcaaactgtaatctccacaatcaatcggttggggaaggaatcagtgctgcaattcaggattttcaagtgagacagtacattgagcaattaaataattgcagaattggacttcagcctgcagtgctacggagggcctattggcttgaagctgggtcagccaatttaggacttattactgttgatattgctttagctgctgaccatcattctaaacatgaggcacaaagacatttcttagaaactcatgatgccagaactaagaggttgtggtttttatggccagatgatatcctgaagaataagaggtgtagaaacaaatgtggttgtctcggtggctgcagattctttggtggcacagtaactggcctagatttcttcaaacttgaagagttgacaccttccagtagctctgcattttcaagcacaagtgcagagtctgatatgtattatggacagtctctgctacagcctggagaatggataattactaaagaaattcccaaaattatagatggtaatgtgaatggcatgaagaggaaagaatgggaaaacaaatcagtgggaatagaagtagagagaaaaactcagcaccttagtcttcaagtaccattacgatctcatagttcatcctcttcctcagaagagaacagtagttctagtgctgcacagcctttgttggctggtgaaaaggaaagtccttcatctgttgctgatgaccatttggttcaaaaagagttcttgcatgggacaaaaagagatgatggccaagcaagtatccctacagaaatttcaggaaacagccctgtgtctcctaatactcaggataagtcagtaggtcaatctcctcttagatctcccttgaaacgacaagcctctgtctgttccacccgtcttggaagtactaagagtcttactgctgctttctatggggacaagcagcctgtaacagttggagtccagtttagtagtgatgtctctcgaagtgatgagaatgtactagactcaccaaagcagaggagaagttttggttcattcccatatacaccatcagcagactctaattcatttcatcagtatcgatcaatggattccagcatgtcaatggctgatagtgaagcctacttttctgctgctgaggaatttgagcccattagcagtgatgaaggccctggaacttatccgggtagaaaaaagaagaaaaagcaaacccagcagattgactacagtaggggttccatatatcacagtgtagaagggccacttactggacatggagaaagcattcaggattccagaactctgccattcaaaactcatccttctcaggcttcatttgtttctgcgttaggtggagaagatgatgttatagaacatctatatattgtagaaggtgagaaaacagtggagagtgaacagattactccgcaacaacccgtgatgaattgttatcagacttaccttactcagttccaggtaattaattggtcagttaagcacccaaccaacaaaagaacctctaaatcctcattgcatcgtccccttgatctggatacaccaaccagtgaagaaagttcatcgtcatttgaacagctttctgttccaacttttaaggttatcaagcaggggctcacagctaattctttgctagacagaggcatgcaactttcaggatcaacttcaaatacgccgtatactccattggaaaaaaaactcgctgataacacagatgatgaaacattaacagaagagtggaccctggatcaaccagtgtcccagaccaggacaacagccatagttgaagtaaaaggaactgttgatattgttttgactcccctggtggctgaagctttagacagatatattgaagcaatggttcattgtgctagtacccgacatccagctgcaattgtagatgatcttcatgctaaagtcctcagggaagctgtccaaaatagcaagactaccttttcagaaaatttatcttccaaacaagacattagaggaacaaaaactgagcagtctacaataggaacgactaaccaaggacaagcacagacaaatcttacaatgaagcaagataatgtaacaattaaaggtcttcagactaatgttagcataccaaaggtaaacttatgtttgttacaagcctcagtggaagaatctccaactacggctcctagtaggagtgtgactcatgtttccctagtggcattgtgttttgacagaattgctacacaggttcgcatgaacagaggtgtggttgaagagacttcaaacaatgcagaacctggtagaacatcaaattttgataggtatgttcatgccacaaagatgcagcctcagtcatctggatctctcagatcaaatgctggagcagaaaaaggcaaagaaattgcagctaagttaaacattcatcgagttcatgggcaacttaggggtcttgatacaacagacattgggacctgtgcaatcactgctattccttttgagaagtccaaagttttatttactcttgaagagttggatgaatttacttttgtggatgaaactgatcagcaagctgttccagatgtaactcgaataggtcccagccaagaaaaatggggatggataatgtttgaatgtggacttgaaaatttaaccataaaaggaggaagacagtctggtgctgttttatataacagttttggaattatgggtaaagctagtgacacagaaaggggtggagtgctgacatccaataattcttctgattctccaaccggcagtggctataatactgatgtctctgatgataatcttccatgtgaccggacaagcccttcctcagacttaaatggaaattctgtttcagatgaacaggatgaaggagtcgaatctgatgatttgaaaaaagatctacctctgatgcctcctcctccagattcatgtagcatgaagttgaccattaaagaaatttggtttagttttgcagctcccaccaatgtgagatctcacacacatgcattttctaggcagctgaaccttttaagcactgcaacaccagctgttggtgcatggcttgttcccattgaccaactcaagtcatctttaaacaaattggaaactgagggaaccttgagaatttgtgctgttatgggatgcataatgacagaagcattagagaataaaagtgtacattttcccctaagaagtaaatacaacaggcttacaaaagttgctcgctttctccaagaaaatccttcatgtttactatgtaatatactacaccactatctgcaccaggcaaattactccatcattgatgatgctacaatgagcgatggacttcctgctttggtaactttgaagaaaggtttagttgcactggcaaggcagtggatgaagtttattgtggtgacaccagcctttaaaggagttagcttacatagaccagctcagcctctgaaacctcaaatagctatggaccatgaacatgaagatggacttggattggacaatgggggtggtcttcaaagtgataccagtgctgatggagcagaatttgagttcgatgcagccacagtcagtgaacacacaatgctattagaaggaacagctaaccggcctccacctggtagctctggacctgtaactggagctgagataatgaggaaactttctaaaactcatacccatagtgactctgcattaaaaataaagggcattcacccatatcattctctgagctataccagtggagacactgccactgattctccagtgcatgttggacgtgctgggatgccagtaaaggacagtccaaggaaggagagcctactcagctacctgactggaagcttcccaagcctgcacaacctcctggaaggtactcctcagagaagcagtgctgctgtgaaaagtagctccctaacgagaacaggaaatacagtagccactgatatgttatctgaacatcccttgctatctgagccatcatctgtgagtttctataattggatgtcaaatgctgtgggtaatcgaggaagtgtgttacaagaatctcctgttacaaaatcaggacacaatagtcttcccacaggtgttgcacccaatcttccaacaataccctcagcctcagatttcaacactgtcttgtctagtgaccaaaatactttggatgggacacattctcagcatagcaccagtcaggatgatgtggcaggtgtagaagaagcaaaccaagggtttcctgctgttcagcttgctgatgcacaggttgttttcaagcctcttctgagtcatacagggatccagtcacaggatacaatgccattctgctaccgaatgtactttggagaacacctttcattttcagggactttggactgcctcagagcagatattgtggattcagacacagccaaagagagaaaaggcaaaagagcaagaaggcaaggccatgtgaatcttcctccacttgagttcaaaccagcattaatgttgggaacctttagcatcagtgctgttgtaatggaaaagtccgtgtgcacccctcagaactctaccagtgccctttcttttcatgatctcagcaagcggtattataacacctttcactgcaactttactatttcctgtcagtcaataagccagcatgtagatatggctttggttcgtcttattcatcagtttagcacaatgatagatgacatcaaagcaactcagactgatattaaacttagcagatatacagccggatctgcttccccaacacctaccttcaaaaccagaaaacatcgggactttcgttcatctgactttagccgcagttctagaggaagtcttaatggtggcaatagagtaaataatgcaaagaacaaacggaccaacaatgagaataacaaaaaggaatctcgaaacaagaattcattaggaagatctgaaagaagaacatcaaaagtgtctaggaaaggttcaaaagatgtggtggatcacatgactattcatatggatgactctgattcaattacagtgtcagaacaaagtgagccttcagctgagtgctggcagaatatgtataaattgcttaacttctattcacttatctccgatccaacaggaatattggaaaagtcttcagaaacatttggaccagcaggagttcggagccctacagagccaacatgtaaagttgtgtttgagaatgaacaagacaacagcagtttgactaagactcagaggaaacgtagcttggtaacttctgaacctcagcatgttactctaatagtgtttgggattggcatggtgaaccgcacacacctagaggcagatattggtggactaacaatggaatcagaactgaagaggatccatggcagttttactcttaaggaaaaaatgaaagatgttttacatcaaaagatgactgagacttgtgctactgctcatattggtggggttaatattgtgctgcttgaagggattacaccaaatatacaactggaggattttcctacatctcctacaagtacagccaaacaagagtttctaactgtagtgaaatgtagtattgccaagtcccaagccctctacagtgcccaaagagggctgaagacaaacaatgctgctgtgttcaaagtaggagctatcagtatcaacattcctcagcaccctgccaccttacatagcatgatggttcgaagttctcaccaactatctaaacaaatctcagacctaatcagacagccttctacagccccacagcctgtaaaagaagatattgcaaccccactaccttctgaaaaaaccccaacaagtgttaatcaaactcctgttgaaacaaatgaatttcctcagctaccagaaggcttagaaaagaagcctattgttcttaaattcagtgccatgttagatggtatagccattggagcagcacttttaccatctctgaaagcagaatacaagatgggaagaatgagaagtcatggaatgacaggtgcacagacaagatttacatttgagctgccaaatcacagattgcgttttacttcaaaagtttctgccacagatatgtcaaccattcctccttctgccagtcttaaccttccccctgttaccatgtcagggaaatatataatggaagaacatgatagttattcggatcaggtgtggagtatagatgaactgccttctaaacaaggttactatttacagggaaattatctgcgttgtgtggcagaagttggttcctttgaacataatcttacaactgatcttctaaaccacttggtatttgtacagaaagtgttcatgaaggaagttaatgaagtaatacaaaaagtttctggtggggagcagcctattcctctctggaacgaacatgatggaacagcagatggagataaacctaaaattctcctctattccctaaacttgcagttcaagggtattcaagtaacggccactactccatcaatgagagctgtaagatttgaaactggattgattgaactggaactttctaaccgacttcaaaccaaagcttcaccaggaagtagcagctatctgaaactgtttggcaaatgccaggtggatttaaatctggcattaggacaaattgtcaaacatcaggtttatgaggaagctggttctgattttcatcaagttgcctattttaaaaccagaattggattaagaaatgccctccgagaagaaatcagtggttcttcagatagggaagctgtgcttattactttgaatagaccaattgtttatgcacagcctgtggcctttgatagagctgtgctgttttggctgaattataaggccgcctatgacaactggaatgaacaacgaatggctttacataaggatattcatatggctacaaaggaagtagtagatatgctacctggtatccagcaaacatcagcccaggcctttgggactctttttctccagctcactgtcaatgatctgggaatttgcctacctatcacaaatactgcacagtctaatcatactggagaccttgacactggttctgctttggtattaaccattgaaagtactctcatcactgcatgctcttcagagtctctggttagcaaagggcatttcaaaaacttttgtatccgttttgctgatggatttgagacatcatgggatgactggaaaccagaaattcatggggatttagtgatgaatgcctgtgtagttccagatggcacctatgaagtatgttcaagaactacaggacaagcagcagctgaaagcagtagtgctggaacctggacactcaacgtattgtggaaaatgtgtgggattgatgttcacatggatcctaacattggcaaaaggcttaatgctctgggcaatactcttacaacactgacaggagaggaagacatagatgacattgctgacttaaattcagtgaacatagctgacctgtcagatgaggatgaagttgatactatgtctcccactatccatactgaagccacagattatcgaagacaggcagcatctgctagccagccgggagaacttagaggaagaaaaattatgaagcgtatagtggatatcagagaactgaatgaacaggccaaagtaatagatgatctgaaaaaattaggtgcaagtgaaggaaccataaaccaggaaattcaacgttaccaacagttagaatctgtggctgtgaatgacattagaagagatgttcgtaaaaaattacggaggtccagtatgcgggctgcttccctaaaggataagtggggtttgagttacaaaccaagttacagccgatcaaaaagcatttctgcttctggaagaccacctcttaagcgaatggaaagggcaagttctcgagtaggagaaactgaagagctcccagaaatccgtgtggatgcagcatctcctggacctagagtaacttttaatatccaggatacaatagcagaaattagaaggaagaagatcagcttcaaagttgtattctaa

SEQ ID NO: 24213 - DNA, 3877 bp, Homo sapiens
  source 1..3877: mol_type = unassigned DNA
ccttaacttctgagctcacctattgtctttgggaagaagcagaaggaataatcccataactaccctctgggcttcatttttcattctcctccctcaaagtaatttctggacagaaactcacacgactatttacatcaaatcagatattaacaagtgaatgcttgagttgccttgtagagctacttgaagaccccaacataagtgcttcactgatcttaagtattatcggtttgctgtctcaactagcagtagacattgaaaccagagattgtcttcagaatacatataatctgaatagtgtgctggcgggagtggtttgtcggagcagccacactgattcggtgtttttgcagtgcattcaacttctacagaagttaacatataatgtcaaaattttctattctggtgccaatatagatgaattaattacgttcctgatagatcacattcaatcttctgaagatgagttaaaaatgccttgtctaggattattggcaaatctttgtcggcacaatctttctgttcaaacgcacataaagacattgagtaatgtgaaatctttttatcgaactcttatcaccttgttggcccatagtagtttaactgtggttgtgtttgcactttcaatattatccagtttgacattaaatgaagaggtgggggaaaagctattccatgctcgaaacattcatcagacttttcaactaatatttaatattctcataaacggtgatggcactctaactagaaagtattcagttgacctactgatggatctccttaagaatcctaaaattgctgattatctcaccagatatgagcacttttcttcatgtcttcaccaagtattaggtcttcttaatggaaaggatcctgattcctcttcaaaggttttagaattacttcttgccttctgttcagtgactcagctgcgccatatgctcactcagatgatgtttgaacagtctccacctggcagcgccactctgggaagccatactaaatgtttagaacctactgtggctctactgcgctggttaagccaacctttggacggatcagaaaactgttctgttttagcattggagttgttcaaggaaatatttgaggatgtcatagatgctgctaactgttcctcggctgatcgttttgtgacccttctgctgcctacaatccttgatcaacttcagttcacagaacaaaatctagatgaggctttaacaagaaaaaaatgtgaaaggattgccaaggccattgaagttttgttaactctctgtggagatgatacactaaaaatgcatattgcaaaaatcttgacaactgtcaagtgtaccactcttatagaacaacaatttacatatggcaagattgacctgggatttggaacaaaggttgcagattctgaattatgcaaacttgctgctgatgtaattttgaaaactcttgatttgattaacaaacttaaaccattggttcctggtatggaagtaagcttctacaaaatacttcaggacccacgtttgattactcctttggcttttgctttaacgtcagataatagagaacaagtacagtctggactgagaatattattggaggctgctccactgccagattttcctgctttagtacttggagaaagtatagcagcaaacaatgcctatagacaacaggaaacagaacatatacccagaaaaatgccctggcaatcatcaaatcacagttttccaacatcaataaagtgtttaactcctcatttgaaagatggtgttcctggattgaatattgaagaattaatagagaaacttcagtctggaatggtggtaaaggatcagatttgtgatgtgagaatatctgacataatggatgtatatgaaatgaaactatccacattagcttccaaagaaagcaggctacaagatcttttggaaacaaaagctctagcccttgcacaggctgatagactgattgctcagcatcgctgtcaaagaactcaagctgaaacagaggcacggacacttgctagtatgttgagagaagttgagagaaaaaatgaagagcttagtgtgttgctgaaggcgcagcaagttgaatcagaaagagcgcagagtgatattgagcatctctttcaacataataggaagttagagtctgtggctgaagaacatgaaatactgacaaaatcctacatggaacttcttcagagaaatgaaagtactgaaaagaagaataaagatttacagatcacatgtgattctctgaataaacaaattgagacagtgaaaaagttgaatgagtcactcaaggaacaaaatgaaaaaagtattgcccaattaatagagaaagaagaacagagaaaagaagtacagaatcagctagtagacagagaacataagctagcaaatttgcatcaaaaaacaaaagtacaagaagaaaagattaaaaccttacaaaaggaaagggaagataaggaagaaaccattgatatccttagaaaagaattaagcagaacagaacagataagaaaagagttgagcattaaggcttcctccctagaggttcaaaaggcacaattagaaggtcgtttggaagagaaagagtccttggtgaaacttcagcaagaggaattgaacaaacactcccacatgatagcaatgatccacagtttaagtggtggaaaaataaatccagaaactgtgaatctcagtatatagacattatggcattttggaatttgtaatctcatgatatttttgatgtatttatctattggagggggggtgggtaggggagttaatttgtgacttcgtaacaataagaagttattatctaatttagtaaagaccctgatctgttgcatgttttttatttgatagtttgaatagaaatttaattttctaagttttactttttgtttctggcttttatggcttaaggttttctttggttcttacattagaaaatcatttttaacctccattatcatttttctaaggttctttcctttttcttagttgctttctattctgttttgcctgtcttatttattctcatttgtgattatttagatcttaagaccaaactttcttggtataacagtcctaaagattacaaaataaaaatatagagagagtaaaagtaaaaagtaaagtaaaaagagagaaggtatgattttactgctagagaagtttgtctctgaagaagcacaaaagaaaatattagtgaatttaaaataatttttatactgctgtagcataatttctaaatttgaaaaaaatgcaatggtaataaaatgtataaaaattagaaaactgtcattgtgttaaactattacatttaaatgattacatttaacacaatagctgtctcataaaaaatctaagaacttgtagaattatttgtaaggtatatttagtgtttttttctcttttttcaaatgttgcatagtggtccagatcatctataattaattataagtttcttatgatttacataaggataatttggattctactcttgctgcatattcagaaaaatattatttactgttaattctgatatgaattgtatttaatttgttgtcctaatagtttttaattggttcatttaattttaaagcataggttaaatatctttattttttttaaaatacaagggtccttctgtacttttcatttgaatcatatcctctaactactctgtaagaaacgtttttacatcaatattttgattgattttattgctataccaatacagtcattaattttacttggtgttttcttcaccatatgtctgtttgatttaagtgaatttagatttgtacagttctggaaattttttaaaaaatattatgcagagtaaaacattttaaattact

SEQ ID NO: 24214 - DNA, 1830 bp, Homo sapiens
  source 1..1830: mol_type = unassigned DNA
acttttctccactggcttggttgggaactggcttcttcggagctgtgtagtcttaatttgctttgctgctggctggctgacagctgatgggggactcctcaggacggactcccttccagatgcacccatctccatccttctcaactccccaacctttgtcctccccactcttcgctcgcgcggcggtctgagaccaccaggaccagtttcaggggtttccttctccagcgagacttggcagaacaggctttaaaagcaaaggaggcagcggaagactgtgaattcctttggacaattgatgatatttatcattgtgcccagtttctacaaataaaagatgggtggattattttctcgatggagggttgaaccatatgaaattgccagtattcaactgcttggacttagcaaaatgtcagtttcatatggttaaccctaatgttaacaactcttatggaaactacaatgaactgatattcattaccctcttggattgttgagtatgtaattgacaaaaccttcaactgtagaagttctagaaagtatagataaggaaattcaagcattggaagaatttagggaaaaaaatcagagattacaaaaattatgggttggaagattaattctgtattcctcagttctctatctgtttacatgcttaattgtatatttgtggtatcttcctgatgaatttacagcaagacttgccatgacactcccattttttgcttttccattgatcatctggagcataagaacagtaattattttcttcttttccaagagaacagaaagaaataatgaagcattggatgatttaaaatcccagaggaaaaaaatacttgaagaagtcatggaaaaagaaacttacaagacggctaaattaattcttgaaaggtttgatccggactcaaagaaagcaaaggagtgtgagccgccatctgctggagcagctgtaactgcaagacctggacaagagattcgtcagcgaactgcagctcaaagaaacctttctccaacaccagcaagccctaaccagggccctcctccacaagttccagtatctcctggaccaccaaaggacagttctgcccctggtggacccccagaaaggactgttactccagccctatcatcaaatgtgttaccaagacatcttggatcccctgctacttcagtgcctggaatgggtcttcatcctccaggtccacctttagcaagacctattctcccccgagaacgaggtgctttggatagaattgttgaatatttggttggtgatggtccacaaaacaggtatgcacttatatgtcagcagtgtttttctcataatggcatggctttgaaggaagaatttgaatacattgcttttcgatgtgcctactgttttttcttgaaccctgcaagaaaaaccagacctcaggctccaagacttcctgagtttagttttgagaagaggcaggtggtggaaggttcaagttcagttggtcccttgccatcaggaagtgtgctttcatcagacaaccagtttaatgaagtacagtattgaggcagtctgtcagacagaatatgacaaactatgtgggcctgttttcacttaaacatgtttattgaatctttagaacacgatgttcttgatgataatacagagcagacagatgacaaaataccagctacagaacagacaaaccaagtgattgaaaaagcatctgactcagaggaaccagaggagaaacaagagactgagaatgaggaagcctcagtgattgaaaccaactccacagttcctggagctgattctattcctgatcctgaactaagtggagaatc

SEQ ID NO: 24215 - DNA, 6896 bp, Homo sapiens
  source 1..6896: mol_type = unassigned DNA
gctgccgcgggcggtgggcggggatcccccgggggtgcaaccttgctccacctgtgctgccctcggcgggcctggctggccccgcgcagagcggcggcggcgctcgctgtcactgccggaggtgagagcgcagcagtagcttcagcctgtcttgggcttggtccagattcgctcctctggggctacgtcccggggaagaggaagcgaggattttgctggggtggggctgtacctcttaacagcaggtgcgcgcgcgagggtgtgaacgtgtgtgtgtgtgtgtgtgtgtgtgtgtgtgtgtgtgtgtgtgtgtgtaagacctgcgatgacgacgaggaggaacaagtgggacggcgagtgatgctcagggccagcagcaacgcatggggcgagcttcagtgtcgccagcagtgaccacagttcttgaggccaaatctggctcctaaaaaacatcaaaggaagcttgcaccaaactctcttcagggccgcctcagaagcctgccatcacccactgtgtggtgcacaatggcgccccccacaggtgtgctctcttcattgctgctgctggtgacaattgcagtttgcttatggtggatgcactcatggcaaaaaaatcactggtgagcatcatttaagaagacccatgactagactgggctggccgagcccatgttgtgcccgtaagcagtgcagcgaggggaggacatattccaatgcagtcatttcacctaacttggaaaccaccagaatcatgcgggtgtctcacaccttccctgtcgtagactgcacggccgcttgctgtgacctgtccagctgtgacctggcctggtggttcgagggccgctgctacctggtgagctgcccccacaaagagaactgtgagcccaagaagatgggccccatcaggtcttatctcacttttgtgctccggcctgttcagaggcctgcacagctgctggactatggggacatgatgctgaacaggggctccccctcggggatctggggggactcacctgaggatatcagaaaggacttgacctttctaggcaaagattggggcctagaggagatgtctgagtactcagatgactaccgggagctggagaaggacctcttgcaacccagtggcaagcaggagcccagagggagtgccgagtacacggactggggcctactgccgggcagcgagggggccttcaactcctctgttggagacagtcctgcggtgccagcggagacgcagcaggaccctgagctccattacctgaatgagtcggcttcaacccctgccccaaaactccctgagagaagtgtgttgcttcccttgccgactactccatcttcaggagaggtgttggagaaagaaaaggcttctcagctccaggaacaatccagcaacagctctggaaaagaggttctaatgccttcccatagtcttcctccggcaagcctggagctcagctcagtcaccgtggagaaaagcccagtgctcacagtcaccccggggagtacagagcacagcatcccaacacctcccactagcgcagccccctctgagtccaccccatctgagctacccatatctcctaccactgctcccaggacagtgaaagaacttacggtatcggctggagataacctaattataactttacccgacaatgaagttgaactgaaggcctttgttgcgccagcgccacctgtagaaacaacctacaactatgaatggaatttaataagccaccccacagactaccaaggtgaaataaaacaaggacacaagcaaactcttaacctctctcaattgtccgtcggactttatgtcttcaaagtcactgtttctagtgaaaacgcctttggagaaggatttgtcaatgtcactgttaagcctgccagaagagtcaacctgccacctgtagcagttgtttctccccaactgcaagagctcactttgcctttgacgtcagccctcattgatggcagccaaagtacagatgatactgaaatagtgagttatcattgggaagaaataaacgggcccttcatagaagagaagacttcagttgactctcccgtcttacgcttgtctaaccttgatcctggtaactatagtttcaggttgactgttacagactcggacggagccactaactctacaactgcagccctaatagtgaacaatgctgtggactacccaccagttgctaatgcaggaccaaatcacaccataactttgccccaaaactccatcactttgaatggaaaccagagcagtgacgatcaccagattgtcctctatgagtggtccctgggtcctgggagtgagggcaaacatgtggtcatgcagggagtacagacgccataccttcatttatctgcaatgcaggaaggagattatacatttcagctgaaggtgacagattcttcaaggcaacagtctactgctgtggtgactgtgattgtccagcctgaaaacaatagacctccagtggctgtggccggccctgataaagagctgatcttcccagtggaaagtgctaccctggatgggagcagcagcagcgatgaccacggcattgtcttctaccactgggagcacgtcagaggccccagtgcagtggagatggaaaatattgacaaagcaatagccactgtgactggtctccaggtggggacctaccacttccgtttgacagtgaaagaccagcagggactgagcagcacgtccaccctcactgtggctgtgaagaaggaaaataatagtcctcccagagcccgggctggtggcagacatgttcttgtgcttcccaataattccattactttggatggttcaaggtctactgatgaccaaagaattgtgtcctatctgtggatccgggatggccagagtccagcagctggagatgtcatcgatggctctgaccacagtgtggctctgcagcttacgaatctggtggagggggtgtacactttccacttgcgagtcaccgacagtcagggggcctcggacacagacactgccactgtggaagtgcagccagaccctaggaagagtggcctggtggagctgaccctgcaggttggtgttgggcagctgacagagcagcggaaggacacccttgtgaggcagctggctgtgctgctgaacgtgctggactcggacattaaggtccagaagattcgggcccactcggatctcagcaccgtgattgtgttttatgtacagagcaggccgcctttcaaggttctcaaagctgctgaagtggcccgaaatctgcacatgcggctctcaaaggagaaggctgacttcttgcttttcaaggtcttgagggttgatacagcaggttgccttctgaagtgttctggccatggtcactgcgaccccctcacaaagcgctgcatttgctctcacttatggatggagaaccttatacagcgttatatctgggatggagagagcaactgtgagtggagtatattctatgtgacagtgttggcttttactcttattgtgctaacaggaggtttcacttggctttgcatctgctgctgcaaaagacaaaaaaggactaaaatcaggaaaaaaacaaagtacaccatcctggataacatggatgaacaggaaagaatggaactgaggcccaaatatggtatcaagcaccgaagcacagagcacaactccagcctgatggtatccgagtctgagtttgacagtgaccaggacacaatcttcagccgagaaaagatggagagagggaatccaaaggtttccatgaatggttccatcagaaatggagcttccttcagttattgctcaaaggacagataatggcgcagttcattgtaaagtggaaggaccccttgaatccaagaccagtcagtgggagttacagcacaaaacccactcttttagaatagttcattgaccttcttccccagtgggttagatgtgtatccccacgtactaaaagaccggtttttgaaggcacaaaacaaaaactttgctcttttaactgagatgcttgttaatagaaataaaggctgggtaaaactctaaggtatatacttaaaagagttttgagtttttgtagctggcacaatctcatattaaagatgaacaacgatttctatctgtagaaccttagagaaggtgaatgaaacaaggttttaaaaagggatgatttctgtcttagctgctgtgattgcctctaaggaacagcattctaaacacggtttctcttgtaggacctgcagtcagatggctgtgtatgttaaaatagcttgtctaagaggcacgggccatctgtggaggtacggagtcttgcatgtagcaagctttctgtgctgacggcaacactcgcacagtgccaagccctcctggtttttaattctgtgctatgtcaatggcagttttcatctctctcaagaaagcagctgttggccattcaagagctaaggaagaatcgtattctaaggactgaggcaatagaaaggggaggaggagcttaatgccgtgcaggttgaaggtagcattgtaacattatcttttctttctctaagaaaaactacactgactcctctcggtgttgtttagcagtatagttctctaatgtaaacggatccccagtttacattaaatgcaatagaagtgattaattcattaagcatttattatgttctgtaggctgtgcgtttggactgccatagatagggataacgactcagcaattgtgtatatattccaaaactctgaaatacagtcagtcttaacttggatggcgtggttatgatactctggtccccgacaggtactttccaaaataacttgacatagatgtattcacttcatatgtttaaaaatacatttaagtttttctaccgaataaatcttatttcaaacatgaaagacaattaaaacattcccacccacaaagcagtactcccgagcaattaactggagttaattgtagcctgctacgttgactggttcagggtagttccccatccacccttggtcctgaggctggtggccttggtggtgcccttggcattttttgtgggaagattagaatgagagatagaaccagtgttgtggtaccaagtgtgagcacacctaaacaatatcctgttgcacaatgcttttttaacacatgggaaaactaggaatgcattgctgatgaagaagcaaggtatttaaacaccagggcaggagtgccagagaaaatgtttccccatgggttcttaaaaaaaattcagcttttaggtgcttttgtcatctcccgcagtattcatcctcatgggaccatcttatttttacttattgtaatttactggggaaaggcagaactaaaaagtgtgtcattttatttttaaaataattgctttgcttatgcctacactttctgtataactagccaattcaatactgtctatagtgttagaaggaaaatgtgatttttttttttaaccagtattgagcttcataagcctagaatctgccttatcaggtgaccagggttatggttgtttgcatgcaaatgtgaatttctggcataggggacagcagcccaaatgtaaagtcatcgggcgtaatgaggaagaagggagtgaacatttaccgctttatgtacataacatatgcagtttacatactcatttgatccttataatcaaccttgaagaggagatactatcattcttatgttgcagatagccctctgaaggcccagagaggttaaataacttcccagaggtcatggccaagaagtagtggctccaagaactgaatgcaaattttttaaactgtagagttctgctttccactaaacaaagaactcctgccttgatggatggagggcaaattctggtggaacttttgggccacctgaaagttctattcccaggactaagaggaatttcttttaatggatccagagagccaaggtcagagggagagatggcctgcatagtctcctgtggatcacacccgggccacccctccctctaggtttacagtggacttcttctgcccctcctccttttctgtccttggccatctcagcctggcctctctgatccttccatcacagaaggatcttgaatctctgggaaatcaaacatcacagtagtgatcagaaagtgagtcctgtcttgtcaccccatttctcatcagaacaaagcacgagatggaatgaccaaccagcattcttcatggtggactgcttatcattgaggatctttgggagataaagcacgctaagagctctggacagagaaaaacaggccctagaatatgggagtgggtgtttgtagggctcacaggctaacaagcactttagttgctggtttacattcaatgaaggaggattcatacccatggcattacaaggctaagcatgtgtatgactaaggaactatctgaaaaacatgcagcaaggtaagaaaatgtaccactcaacaagccagtgatgccaccttttgtgcgcggggaggagagtgactaccattgttttttgtgtgacaaagctatcatggactattttaatcttggttttattgcttaaaatatattatttttccctatgtgttgacaaggtatttctaatatcacactattaaatatatgcactaatctaaataaaggtgtctgtattttctgtaatgcttatttttagggggaaatttgttttctttatgcttcagggtagagggatttcccttgagtataggtcagcaaactgtggcctacagcctgtgtgtgcacgccccatgagccgaaaagtgggtcttatgttttcaaatggttaaaaataaataaaaaaatttgaaacatgtgaactatatgacattcagatttgtgttcataaataaagttttattggaacatatcc

SEQ ID NO: 24216 - DNA, 7342 bp, Homo sapiens
  source 1..7342: mol_type = unassigned DNA
tttcatgggaaggagttggcccggcttgtctctctgtcagtggcggctgctgcctgctctggaggcaggctgggcggtggcggccgagactggcgggggtggacgcccgggccgggctgcgcccgcttcttgcagctgtgaattcctttggacaattgatgatatttatcattgtgcccagtttctacaaataaaagatgggtggattattttctcgatggaggcaagacttgccatgacactcccattttttgcttttccattgatcatctggagcataagaacagtaattattttcttcttttccaagagaacagaaagaaataatgaagcattggatgatttaaaatcccagaggaaaaaaatacttgaagaagtcatggaaaaagaaacttacaagacggctaaattaattcttgaaaggtttgatccggactcaaagaaagcaaaggagtgtgagccgccatctgctggagcagctgtaactgcaagacctggacaagagattcgtcagcgaactgcagctcaaagaaacctttctccaacaccagcaagccctaaccagggccctcctccacaagttccagtatctcctggaccaccaaaggacagttctgcccctggtggacccccagaaaggactgttactccagccctatcatcaaatgtgttaccaagacatcttggatcccctgctacttcagtgcctggaatgggtcttcatcctccaggtccacctttagcaagacctattctcccccgagaacgaggtgctttggatagaattgttgaatatttggttggtgatggtccacaaaacaggtatgcacttatatgtcagcagtgtttttctcataatggcatggctttgaaggaagaatttgaatacattgcttttcgatgtgcctactgttttttcttgaaccctgcaagaaaaaccagacctcaggctccaagacttcctgagtttagttttgagaagaggcaggtggtggaaggttcaagttcagttggtcccttgccatcaggaagtgtgctttcatcagacaaccagtttaatgaagaatctttagaacacgatgttcttgatgataatacagagcagacagatgacaaaataccagctacagaacagacaaaccaagtgattgaaaaagcatctgactcagaggaaccagaggagaaacaagagactgagaatgaggaagcctcagtgattgaaaccaactccacagttcctggagctgattctattcctgatcctgaactaagtggagaatctttgacggcagagtagtaaatgcttccacgtgccttcaactggatatttatagtcttactgatgtcagttattgctttttcggtggcacttactttttttgcccctctaagggtatgcttgtgtatcatttgaattcagattgcctagctatttgaacatctcaaagttatatatactgggtattaaaattaaaagcaagttatatcagtgaagtaagatccttttgaatgtacaaagacccacactattgagacagcttttagatacttttttgtccattctaaaagtaagcaaacatgattgccttcttgttttctgtatgtataacccgtaaatatccattttgacataggaagaactttggttaagagtaagttctctaattgtgtttgttttaaggaatgaaacttggttaagattttgactacttcattattaaaaattgatagaattttagctcctgagatatttacaactgggagaaatgtctatttaggtgtttacattaagcggtatgaaagttgttaccacataggcactggtacgaattctcaataagaatgcagtggaacagttaagtagaactgtaactacgttggcactggtacgaattctcagtgagaatgcaatgaaacagtcaactgcagtgtttctttttgatgtcttttattttacaactgggccaaaggcacattatgtatataattagtttatatttacacactagcatataggaaatatttctgcacttgaccctatttgaattctgagcattatttataagtataaaatgatgatatataagtgaattttgtgctcttgtttgtattttattaaggaaaatgaaaataatctggcatcagtttcattttgctaaatatctagtcttcttcaaacagtatcttggtgggtgacttggctacctgaaaaatcttaggaggaatagctcacaatacaataaatctgtagattctgcttagagcaaattatggtacttttattcagacttgtttcctttctagttaacagaaatagtgacatttagaggttttaatcagaagttaggtttttctgattcaggaacatcgtaggccagccatttgtaatttttaactttgagaaacaaattttgtgagaataggtagtgggttgctggtagttaattggatttaatatttgtattaaggattaactggaaaaaatgtgtctcagtgctaattcttggacctttaatacagtgtgcttatctgttacggcctccttttatctctcttctccaatattaaaaaaaatggaaatcaaattattatgctgaagggaaaaatatacctgtataagaatggtgtgtttggctaatgtttctaagttgcacacagtttattaacaactgaacaaaacatttttatcatttaaaaatctatttttatgatttaatatctcatatgtgacagtttttttttttttttttttttggaactcaatctgttaacagtctgggacatccggtatagtaaccagagtttttgagcctgccgtattgggcttaaatttcaggtctgtagtcttgggcaagtcacctataaactcactgagattattttttcatctgtaaaatgggaagagttatgtttatttttgaagggtattaggataattaaaaataatgtaatgtgcctagcacactacctgaaaacgatggcatttgttcttattaatgtctttaaaatatgcaaggaccataagtttttcctcttgcagatgaggaaagtaaaaaataatacgaacatgtaattcagcttctcagattcaagccaatgttttttgcatcaacttttctatattgtatgtatgtatataaatacatagattaaggaaataggaaactgaaactctgtggaatataaactttttaaaaataatttcatcaggttttttgtatgttactgacccatatggattttagtaacatcttgcttagtcatgttgttataaaacattcaaattctgatatacattgcttgaaaatgagtgagtacctcagagaaatttgatagactcaaacagatagtatgagaaatatctttgaaagaaatatggaggaaggttaaaaggggattagtaaaattaatgcgataggtaacatgtttgtaaccatatagtatccttttagatacaaaagcttattttcattattattataataaacagttaatggttgaaacttagtaaaatgtcctatttctgattattaagactagtataaatgagaaaatccaagctattaagtaccattagctacagtgatcttagcttccttgcttacaattgttcagtgggtcatctaaattcttctatgtcctgagcatgatctacaaacatggtctagcttctgtctctccgtcttcccgccatcattgtgctgtagccatatggaactcctttcagttctctgaccatgccctttcctgcctcagatttcagcttaaattttgcctcctcagagagatgccttcccaaactccccatctgaagctggcctctgccttttactccctatcatgtcactctctgctcaccatccttatcacaatgtgtatttgatttgtttgctagtttactgtcttcacaacataatgtccgtttgtgcaagggtcttatttttcttattcatgtctgtatctcaagggtctagcacaatgcttgatgcatattgtgtgaataaatactttgttgccaaatccagtgaaaactctcagttcttgtttcactgcttggcagtattgacattgaatattctctgagatactttttttcttttggcttttcatatatcacactattattctcttatttctctggcctcttgctctcaacgtcctgtaagtgttggtgttccttaagttctacctagtgtcatcatttcttcattctgcatattctttccctagggtttcttcccaacaccaaaggacttaccatctgtctctctgaatctcagatctccagctttgatctgtttcctttactttagagctatatatttgcctgcctactggcctgtctctcacaatccatatattcaagaatgaacactatactttgcttcaaaccttcagaacattcaaaccgtttatgtttctcatctaatcaaatagagttactctctaagccagaagctgtaaactcatctcttttccctttattcaagctgtcaatttttgtctcctaaacatcttctagttatattctcatttctctgttcacattgcattaataatgatgataaacatttgcattcttattctgtgccaggcaacatgctaactgctgtatatatattattatatttgtactttggcaagaatcctgtgaagatttttatctttggactactagaagagaaagctgagttgtagagagagtatgtatttaagtccgtttgggctgctataacagaataccacagactgggtaacgtgatgaacaaaaatttatttggctcacagttctggaacctgggaaatccaaaggcatgatgctagcatctggtgagggcctttgtgctttgtcatcccatgccagaaggcagaagggtaagagagggcaagagtgagcaagagatggaagttgcaacctcaagctcttttataatgagcattaatccattcatgagggcttcaccctcatgacctaaacatctccattaggctccaccttccaatgcaacagttagcataagttttcaacacatgctttttgtagcattcaaaccatagcaggaagcaactttgcttaaaattgtatacctggtaagtggaaaaagagggatttgaatataggcaaatgacttcagaggatttactcttaatttctgttgtactgccttctaatcttggcctccatcatttcagattaccaaagctgtctcttaactggtttctttgtctccaaccttgtgcacttgctatctattctgtgtgctgcagcctgagtttttaaaaaacagaaaatgaggggccaggtgtggtggtggctcacgcctgtaatcccagcaagttgggaggctgaggcgggcagatcatctggggtcaggagttcgagaccagcctgaccaacgtggagaaacactatctctactaaaaatacaaaattagccaggcgtggtggtgcatgcctgtaatcctagctactcaggagcctgaggcaggagaattgcttgaacacgggaggcagaggttgcagtgagcagagattgcgccattgtactccagcctgggcaacaagagtgaaactccatctcaaaaaaaaaaaagaaagaaagaaaatgaatctgccacgccattgcttagaccctttaatgactcttgagtgttcttgggatgaggtccaaatttactaataaggcctgcaaagccctgtgtaattttgctcctagttatggctggcatctgcaccacaactacagccactgccacctccccctgccacacacacattttaaaagtaacaatagtagtgttttctgtgttttgcatatgcagtcttttctcatctcccagccttcttgagcttttcctctgcctgagatacgctcccactcacatagacattgggggcactaaataaaaatagctgtttaattgaattggaatcgttccacttggaacccaagtttggaaattttgctacttcttgttaagctaggccttttattcttgaagttgctatttctcatacaaactcattttatgcattagacacacagtcactattgttatggagaacatagttgtatcagaagaggtatagctttgggtgtggatgtgcgtgtgtcaggggaaagatattctgattatatgatgattttcataaaatatagtatgctgagtttccgaaaatcctaaatgacttagaaatggtgctatatgtggtttgtttgacccctgcaaatctcatgttgaaatttgatccccattgctggaggtgttttgagcatggagcggatccctcatgaatgtcttggcgttgtccttgcagtaatgagttcttgctctatttttcctcccctggaagctgattgtttaaaagagcctggtatcctccctccctttcttctttgcttcctctctcttgctgtgtgatctctgcacacaccagctcccctttgctttctgccatgagtggtctgaggctctcaccagaagccaagcagaggctggcaccatgcttctagtacagcctgcagaactgtaagccaaataaacttcttctttgttttttttttttgtttgttttgtttttttttcagtaaattacccagcctcaggtattccttaacaacacaaatgggctaagacacagggtcatagggatagcaggcacctgagccaagccagaacttagatctcaactgttaatgcaggatgatttgtattgaaccatgaattttacactgcctctcaatgttggtgtcagcatttaaggttatttaaaaaatacaacctgaaggttacataaagtttcatttaaaaaataagaccttataagtctacttttatttccagtggacagcaactacttaatcgtcttaaaactttcttcttacaatattactttacaatattacctgttggatttattatctgtgtacaaatcagttagttgaagggccaaagaataaaggcattttgtgaattatgaatagctattttgaaatggtcatggagactagctactctagaaaattgggagaatatactgtattaagttactatctggtataacttcaattaattgtgaaaattgtagcagagatctagatatagtttatgaacttctaaagagacattaaagggaattcaagtacttgtgtaaagatgaaccaaggtagagatgattgtgaattggtgatctgctgtatgttacagttatgtaatttgacttgtttcaaaattattaaagttttaagtgtatgcattctactggtcaataagtaaatatattcaggctctgaatgtagacagataaatatataaatatagaaagtacatttgttagaat

SEQ ID NO: 24217 - DNA, 6622 bp, Homo sapiens
  source 1..6622: mol_type = unassigned DNA
gctgccgcgggcggtgggcggggatcccccgggggtgcaaccttgctccacctgtgctgccctcggcgggcctggctggccccgcgcagagcggcggcggcgctcgctgtcactgccggaggtgagagcgcagcagtagcttcagcctgtcttgggcttggtccagattcgctcctctggggctacgtcccggggaagaggaagcgaggattttgctggggtggggctgtacctcttaacagcaggtgcgcgcgcgagggtgtgaacgtgtgtgtgtgtgtgtgtgtgtgtgtgtgtgtgtgtgtgtgtgtgtgtaagacctgcgatgacgacgaggaggaacaagtgggacggcgagtgatgctcagggccagcagcaacgcatggggcgagcttcagtgtcgccagcagtgaccacagttcttgaggccaaatctggctcctaaaaaacatcaaaggaagcttgcaccaaactctcttcagggccgcctcagaagcctgccatcacccactgtgtggtgcacaatggcgccccccacaggtgtgctctcttcattgctgctgctggtgacaattgcaggttgtgcccgtaagcagtgcagcgaggggaggacatattccaatgcagtcatttcacctaacttggaaaccaccagaatcatgcgggtgtctcacaccttccctgtcgtagactgcacggccgcttgctgtgacctgtccagctgtgacctggcctggtggttcgagggccgctgctacctggtgagctgcccccacaaagagaactgtgagcccaagaagatgggccccatcaggtcttatctcacttttgtgctccggcctgttcagaggcctgcacagctgctggactatggggacatgatgctgaacaggggctccccctcggggatctggggggactcacctgaggatatcagaaaggacttgacctttctaggcaaagattggggcctagaggagatgtctgagtactcagatgactaccgggagctggagaaggacctcttgcaacccagtggcaagcaggagcccagagggagtgccgagtacacggactggggcctactgccgggcagcgagggggccttcaactcctctgttggagacagtcctgcggtgccagcggagacgcagcaggaccctgagctccattacctgaatgagtcggcttcaacccctgccccaaaactccctgagagaagtgtgttgcttcccttgccgactactccatcttcaggagaggtgttggagaaagaaaaggcttctcagctccaggaacaatccagcaacagctctggaaaagaggttctaatgccttcccatagtcttcctccggcaagcctggagctcagctcagtcaccgtggagaaaagcccagtgctcacagtcaccccggggagtacagagcacagcatcccaacacctcccactagcgcagccccctctgagtccaccccatctgagctacccatatctcctaccactgctcccaggacagtgaaagaacttacggtatcggctggagataacctaattataactttacccgacaatgaagttgaactgaaggcctttgttgcgccagcgccacctgtagaaacaacctacaactatgaatggaatttaataagccaccccacagactaccaaggtgaaataaaacaaggacacaagcaaactcttaacctctctcaattgtccgtcggactttatgtcttcaaagtcactgtttctagtgaaaacgcctttggagaaggatttgtcaatgtcactgttaagcctgccagaagagtcaacctgccacctgtagcagttgtttctccccaactgcaagagctcactttgcctttgacgtcagccctcattgatggcagccaaagtacagatgatactgaaatagtgagttatcattgggaagaaataaacgggcccttcatagaagagaagacttcagttgactctcccgtcttacgcttgtctaaccttgatcctggtaactatagtttcaggttgactgttacagactcggacggagccactaactctacaactgcagccctaatagtgaacaatgctgtggactacccaccagttgctaatgcaggaccaaatcacaccataactttgccccaaaactccatcactttgaatggaaaccagagcagtgacgatcaccagattgtcctctatgagtggtccctgggtcctgggagtgagggcaaacatgtggtcatgcagggagtacagacgccataccttcatttatctgcaatgcaggaaggagattatacatttcagctgaaggtgacagattcttcaaggcaacagtctactgctgtggtgactgtgattgtccagcctgaaaacaatagacctccagtggctgtggccggccctgataaagagctgatcttcccagtggaaagtgctaccctggatgggagcagcagcagcgatgaccacggcattgtcttctaccactgggagcacgtcagaggccccagtgcagtggagatggaaaatattgacaaagcaatagccactgtgactggtctccaggtggggacctaccacttccgtttgacagtgaaagaccagcagggactgagcagcacgtccaccctcactgtggctgtgaagaaggaaaataatagtcctcccagagcccgggctggtggcagacatgttcttgtgcttcccaataattccattactttggatggttcaaggtctactgatgaccaaagaattgtgtcctatctgtggatccgggatggccagagtccagcagctggagatgtcatcgatggctctgaccacagtgtggctctgcagcttacgaatctggtggagggggtgtacactttccacttgcgagtcaccgacagtcagggggcctcggacacagacactgccactgtggaagtgcagccagaccctaggaagagtggcctggtggagctgaccctgcaggttggtgttgggcagctgacagagcagcggaaggacacccttgtgaggcagctggctgtgctgctgaacgtgctggactcggacattaaggtccagaagattcgggcccactcggatctcagcaccgtgattgtgttttatgtacagagcaggccgcctttcaaggttctcaaagctgctgaagtggcccgaaatctgcacatgcggctctcaaaggagaaggctgacttcttgcttttcaaggtcttgagggttgatacagcaggttgccttctgaagtgttctggccatggtcactgcgaccccctcacaaagcgctgcatttgctctcacttatggatggagaaccttatacagcgttatatctgggatggagagagcaactgtggtatcaagcaccgaagcacagagcacaactccagcctgatggtatccgagtctgagtttgacagtgaccaggacacaatcttcagccgagaaaagatggagagagggaatccaaaggtttccatgaatggttccatcagaaatggagcttccttcagttattgctcaaaggacagataatggcgcagttcattgtaaagtggaaggaccccttgaatccaagaccagtcagtgggagttacagcacaaaacccactcttttagaatagttcattgaccttcttccccagtgggttagatgtgtatccccacgtactaaaagaccggtttttgaaggcacaaaacaaaaactttgctcttttaactgagatgcttgttaatagaaataaaggctgggtaaaactctaaggtatatacttaaaagagttttgagtttttgtagctggcacaatctcatattaaagatgaacaacgatttctatctgtagaaccttagagaaggtgaatgaaacaaggttttaaaaagggatgatttctgtcttagctgctgtgattgcctctaaggaacagcattctaaacacggtttctcttgtaggacctgcagtcagatggctgtgtatgttaaaatagcttgtctaagaggcacgggccatctgtggaggtacggagtcttgcatgtagcaagctttctgtgctgacggcaacactcgcacagtgccaagccctcctggtttttaattctgtgctatgtcaatggcagttttcatctctctcaagaaagcagctgttggccattcaagagctaaggaagaatcgtattctaaggactgaggcaatagaaaggggaggaggagcttaatgccgtgcaggttgaaggtagcattgtaacattatcttttctttctctaagaaaaactacactgactcctctcggtgttgtttagcagtatagttctctaatgtaaacggatccccagtttacattaaatgcaatagaagtgattaattcattaagcatttattatgttctgtaggctgtgcgtttggactgccatagatagggataacgactcagcaattgtgtatatattccaaaactctgaaatacagtcagtcttaacttggatggcgtggttatgatactctggtccccgacaggtactttccaaaataacttgacatagatgtattcacttcatatgtttaaaaatacatttaagtttttctaccgaataaatcttatttcaaacatgaaagacaattaaaacattcccacccacaaagcagtactcccgagcaattaactggagttaattgtagcctgctacgttgactggttcagggtagttccccatccacccttggtcctgaggctggtggccttggtggtgcccttggcattttttgtgggaagattagaatgagagatagaaccagtgttgtggtaccaagtgtgagcacacctaaacaatatcctgttgcacaatgcttttttaacacatgggaaaactaggaatgcattgctgatgaagaagcaaggtatttaaacaccagggcaggagtgccagagaaaatgtttccccatgggttcttaaaaaaaattcagcttttaggtgcttttgtcatctcccgcagtattcatcctcatgggaccatcttatttttacttattgtaatttactggggaaaggcagaactaaaaagtgtgtcattttatttttaaaataattgctttgcttatgcctacactttctgtataactagccaattcaatactgtctatagtgttagaaggaaaatgtgatttttttttttaaccagtattgagcttcataagcctagaatctgccttatcaggtgaccagggttatggttgtttgcatgcaaatgtgaatttctggcataggggacagcagcccaaatgtaaagtcatcgggcgtaatgaggaagaagggagtgaacatttaccgctttatgtacataacatatgcagtttacatactcatttgatccttataatcaaccttgaagaggagatactatcattcttatgttgcagatagccctctgaaggcccagagaggttaaataacttcccagaggtcatggccaagaagtagtggctccaagaactgaatgcaaattttttaaactgtagagttctgctttccactaaacaaagaactcctgccttgatggatggagggcaaattctggtggaacttttgggccacctgaaagttctattcccaggactaagaggaatttcttttaatggatccagagagccaaggtcagagggagagatggcctgcatagtctcctgtggatcacacccgggccacccctccctctaggtttacagtggacttcttctgcccctcctccttttctgtccttggccatctcagcctggcctctctgatccttccatcacagaaggatcttgaatctctgggaaatcaaacatcacagtagtgatcagaaagtgagtcctgtcttgtcaccccatttctcatcagaacaaagcacgagatggaatgaccaaccagcattcttcatggtggactgcttatcattgaggatctttgggagataaagcacgctaagagctctggacagagaaaaacaggccctagaatatgggagtgggtgtttgtagggctcacaggctaacaagcactttagttgctggtttacattcaatgaaggaggattcatacccatggcattacaaggctaagcatgtgtatgactaaggaactatctgaaaaacatgcagcaaggtaagaaaatgtaccactcaacaagccagtgatgccaccttttgtgcgcggggaggagagtgactaccattgttttttgtgtgacaaagctatcatggactattttaatcttggttttattgcttaaaatatattatttttccctatgtgttgacaaggtatttctaatatcacactattaaatatatgcactaatctaaataaaggtgtctgtattttctgtaatgcttatttttagggggaaatttgttttctttatgcttcagggtagagggatttcccttgagtataggtcagcaaactgtggcctacagcctgtgtgtgcacgccccatgagccgaaaagtgggtcttatgttttcaaatggttaaaaataaataaaaaaatttgaaacatgtgaactatatgacattcagatttgtgttcataaataaagttttattggaacatatcc

SEQ ID NO: 24218 - DNA, 1592 bp, Homo sapiens
  source 1..1592: mol_type = unassigned DNA
aaaggacccggctgctcgcgggcggcgcagtcgccgcagcagccgagtctgacggcgccggttcgctgcccggtccgcccgcggtgagagatgccgtagggccaggtgagctgctgtgaaggactcattcttggtagccggcagttactggcaacttgtgagcttggtgggctcctactaacgcacctgggacaccaggctgctgggctcccctctaggcagcctcccctccaggcagcctcaccagcagctcccctgagccatggagaccccagaggtccccgtgggctcgctaatcgactttgggcctgaggcacccacctcttctcccctggaggcaccaccccctgtgctgcaggacggcgatggctccctgggggacggtgcatcagagagtgagaccactgagtctgcggacagtgagaatgacatgggcgagtcgccctcgcacccgtcctgggaccaagaccgccgttcctcctccaacgagtccttctcctccaaccagagcaccgagtctacccaggatgaagagaccctggcactcagggacttcatgcgtggctacgtggagaagatcttctctggaggggaggacttggatcaggaggagaaagccaagtttggagagtactgcagcagtgaaaatggaaaaggccgggagtggtttgctcgatacgtgagtgcccagcgctgcaactccaagtgtgtctcagaggcaaccttctaccgcctggtgcagtcttttgcagtggtgctgttcgagtgtcatcagatggatgactttgggcctgccaagaacctcatgaccatgtgcttcacctactaccacatcggaaaaccacagctgctgcccccggagtcccgggagaagcccgcgggcagcatcgactcctacctgaaatccgcaaacagctggctggccgaaaagaaggacatcgccgagcggctgctgaagaacacctcggccaggactgagaatgtcaagggcttcttcggggggctggagaccaagctgaaggggcccctggccaggaggaacgaggaagacgagaacaaaccccaggagaagcggcccagggctgtgaccgcgtacagccccgaggacgaaaagaagggggagaagatctacctgtacacgcacctgaagcaacagcccatctggcacactctgaggttctggaatgcagccttttttgacgctgtccattgtgagaggacaaagcgatctcccactaccagggagaagtggtgccacatgacccaggaggagcgcgacgacagcctccggttcaacgagaacatcaccttcgggcagctgggcacattcacgcacaacatgctggcctttggactgaacaagaagctgtgcaatgacttcctgaagaagcaggctgtgattggcaacctggatgaagagcaatacaagctgcttagtgaccacattgagcaaatggccactgagtaggccccagaggtcgcactccgcaggaggactgaggccatgtgccattctcccgggcccagcgcccggccgtcaccccacccgatgacctgcatgaagccagcagcacccagagccactcctgctg

SEQ ID NO: 24219 - DNA, 3563 bp, Homo sapiens
  source 1..3563: mol_type = unassigned DNA
atctacttcccagagcgcctggccgagaaataggaaagagggcagccagtaggcaggccaatacccaacaaaagtagaatcgagacgccctgagttcagaagttcttgaggccaaatctggctcctaaaaaacatcaaaggaagcttgcaccaaactctcttcagggccgcctcagaagcctgccatcacccactgtgtggtgcacaatggcgccccccacaggtgtgctctcttcattgctgctgctggtgacaattgcaggttgtgcccgtaagcagtgcagcgaggggaggacatattccaatgcagtcatttcacctaacttggaaaccaccagaatcatgcgggtgtctcacaccttccctgtcgtagactgcacggccgcttgctgtgacctgtccagctgtgacctggcctggtggttcgagggccgctgctacctggtgagctgcccccacaaagagaactgtgagcccaagaagatgggccccatcaggtcttatctcacttttgtgctccggcctgttcagaggcctgcacagctgctggactatggggacatgatgctgaacaggggctccccctcggggatctggggggactcacctgaggatatcagaaaggacttgacctttctaggcaaagattggggcctagaggagatgtctgagtactcagatgactaccgggagctggagaaggacctcttgcaacccagtggcaagcaggagcccagagggagtgccgagtacacggactggggcctactgccgggcagcgagggggccttcaactcctctgttggagacagtcctgcggtgccagcggagacgcagcaggaccctgagctccattacctgaatgagtcggcttcaacccctgccccaaaactccctgagagaagtgtgttgcttcccttgccgactactccatcttcaggagaggtgttggagaaagaaaaggcttctcagctccaggaacaatccagcaacagctctggaaaagaggttctaatgccttcccatagtcttcctccggcaagcctggagctcagctcagtcaccgtggagaaaagcccagtgctcacagtcaccccggggagtacagagcacagcatcccaacacctcccactagcgcagccccctctgagtccaccccatctgagctacccatatctcctaccactgctcccaggacagtgaaagaacttacggtatcggctggagataacctaattataactttacccgacaatgaagttgaactgaaggcctttgttgcgccagcgccacctgtagaaacaacctacaactatgaatggaatttaataagccaccccacagactaccaaggtgaaataaaacaaggacacaagcaaactcttaacctctctcaattgtccgtcggactttatgtcttcaaagtcactgtttctagtgaaaacgcctttggagaaggatttgtcaatgtcactgttaagcctgccagaagagtcaacctgccacctgtagcagttgtttctccccaactgcaagagctcactttgcctttgacgtcagccctcattgatggcagccaaagtacagatgatactgaaatagtgagttatcattgggaagaaataaacgggcccttcatagaagagaagacttcagttgactctcccgtcttacgcttgtctaaccttgatcctggtaactatagtttcaggttgactgttacagactcggacggagccactaactctacaactgcagccctaatagtgaacaatgctgtggactacccaccagttgctaatgcaggaccaaatcacaccataactttgccccaaaactccatcactttgaatggaaaccagagcagtgacgatcaccagattgtcctctatgagtggtccctgggtcctgggagtgagggcaaacatgtggtcatgcagggagtacagacgccataccttcatttatctgcaatgcaggaaggagattatacatttcagctgaaggtgacagattcttcaaggcaacagtctactgctgtggtgactgtgattgtccagcctgaaaacaatagacctccagtggctgtggccggccctgataaagagctgatcttcccagtggaaagtgctaccctggatgggagcagcagcagcgatgaccacggcattgtcttctaccactgggagcacgtcagaggccccagtgcagtggagatggaaaatattgacaaagcaatagccactgtgactggtctccaggtggggacctaccacttccgtttgacagtgaaagaccagcagggactgagcagcacgtccaccctcactgtggctgtgaagaaggaaaataatagtcctcccagagcccgggctggtggcagacatgttcttgtgcttcccaataattccattactttggatggttcaaggtctactgatgaccaaagaattgtgtcctatctgtggatccgggatggccagagtccagcagctggagatgtcatcgatggctctgaccacagtgtggctctgcagcttacgaatctggtggagggggtgtacactttccacttgcgagtcaccgacagtcagggggcctcggacacagacactgccactgtggaagtgcagccagaccctaggaagagtggcctggtggagctgaccctgcaggttggtgttgggcagctgacagagcagcggaaggacacccttgtgaggcagctggctgtgctgctgaacgtgctggactcggacattaaggtccagaagattcgggcccactcggatctcagcaccgtgattgtgttttatgtacagagcaggccgcctttcaaggttctcaaagctgctgaagtggcccgaaatctgcacatgcggctctcaaaggagaaggctgacttcttgcttttcaaggtcttgagggttgatacagcaggttgccttctgaagtgttctggccatggtcactgcgaccccctcacaaagcgctgcatttgctctcacttatggatggagaaccttatacagcgttatatctgggatggagagagcaactgtgagtggagtatattctatgtgacagtgttggcttttactcttattgtgctaacaggaggtttcacttggctttgcatctgctgctgcaaaagacaaaaaaggactaaaatcaggaaaaaaacaaagtacaccatcctggataacatggatgaacaggaaagaatggaactgaggcccaaatatggtatcaagcaccgaagcacagagcacaactccagcctgatggtatccgagtctgagtttgacagtgaccaggacacaatcttcagccgagaaaagatggagagagggaatccaaaggtttccatgaatggttccatcagaaatggagcttccttcagttattgctcaaaggacagataatggcgcagttcattgtaaagtggaaggaccccttgaatccaagaccagtcagtgggagttacagcacaaaacccactcttttagaatagttcattgaccttcttccccagtgggttagatgtgtatccccacgtact

SEQ ID NO: 24220 - DNA, 1580 bp, Homo sapiens
  source 1..1580: mol_type = unassigned DNA
cccggcttgtctctctgtcagtggcggctgctgcctgctctggaggcaggctgggcggtggcggccgagactggcgggggtggacgcccgggccgggctgcgcccgcttcttgcagctgtgaattcctttggacaattgatgatatttatcattgtgcccagtttctacaaataaaagatgggtggattattttctcgatggaggacaaaaccttcaactgtagaagttctagaaagtatagataaggaaattcaagcattggaagaatttagggaaaaaaatcagagattacaaaaattatgggttggaagattaattctgtattcctcagttctctatctgtttacatgcttaattgtatatttgtggtatcttcctgatgaatttacagcaagacttgccatgacactcccattttttgcttttccattgatcatctggagcataagaacagtaattattttcttcttttccaagagaacagaaagaaataatgaagcattggatgatttaaaatcccagaggaaaaaaatacttgaagaagtcatggaaaaagaaacttacaagacggctaaattaattcttgaaaggtttgatccggactcaaagaaagcaaaggagtgtgagccgccatctgctggagcagctgtaactgcaagacctggacaagagattcgtcagcgaactgcagctcaaagaaacctttctccaacaccagcaagccctaaccagggccctcctccacaagttccagtatctcctggaccaccaaaggacagttctgcccctggtggacccccagaaaggactgttactccagccctatcatcaaatgtgttaccaagacatcttggatcccctgctacttcagtgcctggaatggagatggggcttcctcatattgcccaggctggtcttgaacacctgagctcaagtgatctgtctacctcgacctctcaaagtgctgggattacaggtcttcatcctccaggtccacctttagcaagacctattctcccccgagaacgaggtgctttggatagaattgttgaatatttggttggtgatggtccacaaaacaggtatgcacttatatgtcagcagtgtttttctcataatggcatggctttgaaggaagaatttgaatacattgcttttcgatgtgcctactgttttttcttgaaccctgcaagaaaaaccagacctcaggctccaagacttcctgagtttagttttgagaagaggcaggtggtggaaggttcaagttcagttggtcccttgccatcaggaagtgtgctttcatcagacaaccagtttaatgaagaatctttagaacacgatgttcttgatgataatacagagcagacagatgacaaaataccagctacagaacagacaaaccaagtgattgaaaaagcatctgactcagaggaaccagaggagaaacaagagactgagaatgaggaagcctcagtgattgaaaccaactccacagttcctggagctgattctattcctgatcctgaactaagtggagaatctttgacggcagagtagtaaatgcttccacgtgccttca

SEQ ID NO: 24221 - DNA, 1698 bp, Homo sapiens
  source 1..1698: mol_type = unassigned DNA
acgcgccctggcagcaccatgagccgccagcttctgcctgtactgctgctgctgctgctcagggcttcgtgcccatggggtcaggaacagggagcgaggagcccctcggaggagcctccagaggaggaaatccccaaggaggatgggatcttggtgctgagccgccacaccctgggcctggccctgcgggagcaccctgccctgctggtggaattctatgccccgtggtgtgggcactgccaggccctggcccccgagtacagcaaggcagctgccgtgctcgcggccgagtcaatggtggtcacgctggccaaggtggatgggcccgcgcagcgcgagctggctgaggagtttggtgtgacggagtaccctacgctcaagttcttccgcaatgggaaccgcacgcacccggaggagtacacaggaccacgggacgctgagggcattgccgagtggctgcgacggcgggtggggcccagtgccatgcggctggaggacgaggcggccgcccaggcgctgatcggtggccgggacctagtggtcattggcttcttccaggacctgcaggacgaggacgtggccaccttcttggccttggcccaggacgccctggacatgacctttggcctcacagaccggccgcggctctttcagcagtttggcctcaccaaggacactgtggttctcttcaagaagtttgatgaggggcgggcagacttccccgtggacgaggagcttggcctggacctgggggatctgtcgcgcttcctggtcacacacagcatgcgcctggtcacggagttcaacagccagacgtctgccaagatcttcgcggccaggatcctcaaccacctgctgctgtttgtcaaccagacgctggctgcgcaccgggagctcctagcgggctttggggaggcagctccccgcttccgggggcaggtgctgttcgtggtggtggacgtggcggccgacaatgagcacgtgctgcagtactttggactcaaggctgaggcagcccccactctgcgcttggtcaaccttgaaaccactaagaagtatgcgcctgtggatgggggccctgtcaccgcagcgtccatcactgctttctgccatgcagtcctcaacggccaagtcaagccctatctcctgagccaggagataccccctgattgggatcagcggccagttaagaccctcgtgggcaagaattttgagcaggtggcttttgacgaaaccaagaatgtgtttgtcaagttctatgccccgtggtgcacccactgcaaggagatggcccctgcctgggaggcattggctgagaagtaccaagaccacgaggacatcatcattgctgagctggatgccacggccaacgagctggatgccttcgctgtgcacggcttccctactctcaagtacttcccagcagggccaggtcggaaggtgattgaatacaaaagcaccagggacctggagactttctccaagttcctggacaacgggggcgtgctgcccacggaggagcccccggaggagccagcagccccgttcccggagccaccggccaactccactatggggtccaaggaggaactgtagctgcccccgtgtcacccccgccatcactgctggacaggagccacccccttgggtaccagagggagctgtgcattgtgaataaagagtgagcttggttctgga

SEQ ID NO: 24222 - DNA, 1575 bp, Homo sapiens
  source 1..1575: mol_type = unassigned DNA
gcaccatgagccgccagcttctgcctgtactgctgctgctgctgctcagggcttcgtgcccatggggtcaggaacagggagcgaggagcccctcggaggagcctccagaggaggaaatccccaaggaggatgggatcttggtgctgagccgccacaccctgggcctggccctgcgggagcaccctgccctgctggtggaattctatgccccgtggtgtgggcactgccaggccctggcccccgagtacagcaaggcagctgccgtgctcgcggccgagtcaatggtggtcacgctggccaaggtggatgggcccgcgcagcgcgagctggctgaggagtttggtgtgacggagtaccctacgctcaagttcttccgcaatgggaaccgcacgcacccggaggagtacacaggaccacgggacgctgagggcattgccgagtggctgcgacggcgggtggggcccagtgccatgcggctggaggacgaggcggccgcccaggcgctgatcggtggccgggacctagtggtcattggcttcttccaggacgaggacgtggccaccttcttggccttggcccaggacgccctggacatgacctttggcctcacagaccggccgcggctctttcagcagtttggcctcaccaaggacactgtggttctcttcaagaagtttgatgaggggcgggcagacttccccgtggacgaggagcttggcctggacctgggggatctgtcgcgcttcctggtcacacacagcatgcgcctggtcacggagttcaacagccagacgtctgccaagatcttcgcggccaggatcctcaaccacctgctgctgtttgtcaaccagacgctggctgcgcaccgggagctcctagcgggctttggggaggcagctccccgcttccgggggcaggtgctgttcgtggtggtggacgtggcggccgacaatgagcacgtgctgcagtactttggactcaaggctgaggcagcccccactctgcgcttggtcaaccttgaaaccactaagaagtatgcgcctgtggatgggggccctgtcaccgcagcgtccatcactgctttctgccatgcagtcctcaacggccaagtcaagccctatctcctgagccaggagataccccctgattgggatcagcggccagttaagaccctcgtgggcaagaattttgagcaggtggcttttgacgaaaccaagaatgtgtttgtcaagttctatgccccgtggtgcacccactgcaaggagatggcccctgcctgggaggcattggctgagaagtaccaagaccacgaggacatcatcattgctgagctggatgccacggccaacgagctggatgccttcgctgtgcacggcttccctactctcaagtacttcccagcagggccaggtcggaaggtgattgaatacaaaagcaccagggacctggagactttctccaagttcctggacaacgggggcgtgctgcccacggaggagcccccggaggagccagcagccccgttcccggagccaccggccaactccactatggggtccaaggaggaactgtagc

SEQ ID NO: 24223 - DNA, 1648 bp, Homo sapiens
  source 1..1648: mol_type = unassigned DNA
agcaccatgagccgccagcttctgcctgtactgctgctgctgctgctcagggcttcgtgcccatggggtcaggaacagggagcgaggagcccctcggaggagcctccagaggaggaaatccccaaggaggatgggatcttggtgctgagccgccacaccctgggcctggccctgcgggagcaccctgccctgctggtggaattctatgccccgtggtgtgggcactgccaggccctggcccccgagtacagcaaggcagctgccgtgctcgcggccgagtcaatggtggtcacgctgaggagtttggtgtgacggagtaccctacgctcaagttcttccgcaatgggaaccgcacgcacccggaggagtacacaggaccacgggacgctgagggcattgccgagtggctgcgacggcgggtggggcccagtgccatgcggctggaggacgaggcggccgcccaggcgctgatcggtggccgggacctagtggtcattggcttcttccaggacctgcaggacgaggacgtggccaccttcttggccttggcccaggacgccctggacatgacctttggcctcacagaccggccgcggctctttcagcagtttggcctcaccaaggacactgtggttctcttcaagaagtttgatgaggggcgggcagacttccccgtggacgaggagcttggcctggacctgggggatctgtcgcgcttcctggtcacacacagcatgcgcctggtcacggagttcaacagccagacgtctgccaagatcttcgcggccaggatcctcaaccacctgctgctgtttgtcaaccagacgctggctgcgcaccgggagctcctagcgggctttggggaggcagctccccgcttccgggggcaggtgctgttcgtggtggtggacgtggcggccgacaatgagcacgtgctgcagtactttggactcaaggctgaggcagcccccactctgcgcttggtcaaccttgaaaccactaagaagtatgcgcctgtggatgggggccctgtcaccgcagcgtccatcactgctttctgccatgcagtcctcaacggccaagtcaagccctatctcctgagccaggagataccccctgattgggatcagcggccagttaagaccctcgtgggcaagaattttgagcaggtggcttttgacgaaaccaagaatgtgtttgtcaagttctatgccccgtggtgcacccactgcaaggagatggcccctgcctgggaggcattggctgagaagtaccaagaccacgaggacatcatcattgctgagctggatgccacggccaacgagctggatgccttcgctgtgcacggcttccctactctcaagtacttcccagcagggccaggtcggaaggtgattgaatacaaaagcaccagggacctggagactttctccaagttcctggacaacgggggcgtgctgcccacggaggagcccccggaggagccagcagccccgttcccggagccaccggccaactccactatggggtccaaggaggaactgtagctgcccccgtgtcacccccgccatcactgctggacaggagccacccccttgggtaccagagggagctgtgcattgtgaataaagagtgagcttggttctgg

SEQ ID NO: 24224 - DNA, 2338 bp, Homo sapiens
  source 1..2338: mol_type = unassigned DNA
agcgccttccggcccgcccccgcgcggccgcccctcggaccaccggactggcctggggcgggacgtgggcgcgggggcgcggcgtgcggcacgctgcagggctgaagcggcggcggcggtggggactgcacgtagcccggcgctcggcatggctctcctggtgctcggtctggtgagctgtaccttctttctggcagtgaatggtctgtattcctctagtgatgatgtgatcgaattaactccatcgaatttcaaccgagaagttattcagagtgatagtttgtggcttgtagaattctatgctccatggtgtggtcactgtcaaagattaacaccagaatggaagaaagcagcaactgcattaaaagatgttgtcaaagttggtgcagttgatgcagataagcatcattccctaggaggtcagtatggtgttcagggatttcctaccattaagatttttggatccaacaaaaacagaccagaagattaccaaggtggcagaactggtgaagccattgtagatgctgcgctgagtgctctgcgccagctcgtgaaggatcgcctcgggggacggagcggaggatacagttctggaaaacaaggcagaagtgatagttcaagtaagaaggatgtgattgagctgacagacgacagctttgataagaatgttctggacagtgaagatgtttggatggttgagttctatgctccttggtgtggacactgcaaaaacctagagccagagtgggctgccgcagcttcagaagtaaaagagcagacgaaaggaaaagtgaaactggcagctgtggatgctacagtcaatcaggttctggcctcccgatacgggattagaggatttcctacaatcaagatatttcagaaaggcgagtctcctgtggattatgacggtgggcggacaagatccgacatcgtgtcccgggcccttgatttgttttctgataacgccccacctcctgagctgcttgagattatcaacgaggacattgccaagaggacgtgtgaggagcaccagctctgtgttgtggctgtgctgccccatatccttgatactggagctgcaggcagaaattcttatctggaagttcttctgaagttggcagacaaatacaaaaagaaaatgtgggggtggctgtggacagaagctggagcccagtctgaacttgagaccgcgttggggattggagggtttgggtaccccgccatggccgccatcaatgcacgcaagatgaaatttgctctgctaaaaggctccttcagtgagcaaggcatcaacgagtttctcagggagctctcttttgggcgtggctccacggcacctgtaggaggcggggctttccctaccatcgttgagagagagccttgggacggcagggatggcgagcttcccgtggaggatgacattgacctcagtgatgtggagcttgatgacttagggaaagatgagttgtgagagccacaacagaggcttcagaccattttcttttcttgggagccagtggatttttccagcagtgaagggacattctctacactcagatgactctaccagtggccttttaaccaagaagtagtacttgattggtcatttgaaaacactgcaacagtgaacttttgcatctcaagaaaacattgaaaaattctatgaattgttgtagccggtgaattgagtcgtattctgtcacataatattttgaagaaaacttggctgtcgaaacatttttctctctgactgctgcttgaatgttcttggaggctgtttcttatgtatgggttttttttaatgtgatcccttcatttgaatattaatggctttttccattaaagaataaaatattttggacaatgccgataaatgtatgaagttagtatccacatcataaattcagagtgatgtttagcagtaaatcaatattttgaagtgatacacagatgtctttcctccccacaaacttttttaaacaaaaaacaagacctcttttctttagatggtgccacctatgcccaccacaacagagattttacatggaaaccgggctcagtgagaactgatttcctgcccaatatttgtctttgggctgtctctagtgactaattattaaggaatctagctggttatacagttcaaggctttctatgttgttaatgaacctcaaaatagccgttaagacatgaaatacagcagcaggttaccaatgcgaacaggtagttcgcatttatgtaaaacattcagaaaatgaagttttgaatttgttggaacattcaaaggacttgagagcattttattgtaacttaaaaaaataaatacaactgtcactaa

SEQ ID NO: 24225 - DNA, 1851 bp, Homo sapiens
  source 1..1851: mol_type = unassigned DNA
gtgcttcaaacaggaattaatagaatcccaccaggtggtgtttgtgaggcgtagatggcgaggatatctgcagctgcagtttgctcattctcacggctgcactgcattgcactgtgtgagcagaacacaatttatccttccactgctgatgggcatttgggcggtttgcagtttgggatctggccagttctgctgttgtgagcattcttaagcctgcctttcggtgaattcacacgcccgtggggctcaccaacttctcctgcccactccctatcaaggaaaagtcccataatgtatccatcaaccaccatggctaatgcacccggtctggtgagctgtaccttctttctggcagtgaatggtctgtattcctctagtgatgatgtgatcgaattaactccatcgaatttcaaccgagaagttattcagagtgatagtttgtggcttgtagaattctatgctccatggtgtggtcactgtcaaagattaacaccagaatggaagaaagcagcaactgcattaaaagatgttgtcaaagttggtgcagttgatgcagataagcatcattccctaggaggtcagtatggtgttcagggatttcctaccattaagatttttggatccaacaaaaacagaccagaagattaccaaggtggcagaactggtgaagccattgtagatgctgcgctgagtgctctgcgccagctcgtgaaggatcgcctcgggggacggagcggaggatacagttctggaaaacaaggcagaagtgatagttcaagtaagaaggatgtgattgagctgacagacgacagctttgataagaatgttctggacagtgaagatgtttggatggttgagttctatgctccttggtgtggacactgcaaaaacctagagccagagtgggctgccgcagcttcagaagtaaaagagcagacgaaaggaaaagtgaaactggcagctgtggatgctacagtcaatcaggttctggcctcccgatacgggattagaggatttcctacaatcaagatatttcagaaaggcgagtctcctgtggattatgacggtgggcggacaagatccgacatcgtgtcccgggcccttgatttgttttctgataacgccccacctcctgagctgcttgagattatcaacgaggacattgccaagaggacgtgtgaggagcaccagctctgtgttgtggctgtgctgccccatatccttgatactggagctgcaggcagaaattcttatctggaagttcttctgaagttggcagacaaatacaaaaagaaaatgtgggggtggctgtggacagaagctggagcccagtctgaacttgagaccgcgttggggattggagggtttgggtaccccgccatggccgccatcaatgcacgcaagatgaaatttgctctgctaaaaggctccttcagtgagcaaggcatcaacgagtttctcagggagctctcttttgggcgtggctccacggcacctgtaggaggcggggctttccctaccatcgttgagagagagccttgggacggcagggatggcgagcttcccgtggaggatgacattgacctcagtgatgtggagcttgatgacttagggaaagatgagttgtgagagccacaacagaggcttcagaccattttcttttcttgggagccagtggatttttccagcagtgaagggacattctctacactcagatgactctaccagtggccttttaaccaagaagtagtacttgattggtcatttgaaaacactgcaacagtgaacttttgcatctcaagaaaacattgaaaaattctatgaattgttgtagccggtgaattgagtcgt

SEQ ID NO: 24226 - DNA, 986 bp, Homo sapiens
  source 1..986: mol_type = unassigned DNA
attgcactgtgtgagcagaacacaatttatccttccactgctgatgggcatttgggcggtttgcagtttgggatctggccagttctgctgttgtgagcattcttaagcctgcctttcggtgaattcacacgcccgtgggaagttcatatgagccataacaaggattggaagaagttttagaagtaacctcctgggagtccatgaattagcagcagtgagaggctagaggcctgacaaagaattgagaagcagctgctatatcccaagtggcaaatgccagtgtggatggagaagagagagcttcattctgtggcaggaaagcttggctgctgacaatgagactgcacccttgggatttgtcccttggattctttagcatctgagctctaacctctgaaacacaagaaaaaatgagcaagatgtttgctcagcatcaattcagataccgctgaatagaaggcaacacccaaccacacagccagaggcctcctgggtaaatcggggactgctctcctctgacccctctttctcctgcctctaccccttggcttcacagcaattattcattttttaacactcaaatgctgggtacctgttgcctatgtcggggcacgctgttactccctacacacaggtaaaattgattaaccgaatcttgccctccactggcttactgtgcaacggtagagactggaagcaacagacgagggtgagctttggaagagctgatgaggccatgattaatttcaactgagaggacgctcactctcagagcacagcttccagaggagagaagatacccccagcatccatgagaagagacctccgggagaagcttgtgtgggtgtgccgaccactggccccagttgaggtcccagccaacatcagctccgacttccagccatgctcaccaacttctcctgcccactccctatcaaggaaaagtcccataatgtatccatcaaccaccatggctaatgcacccg

SEQ ID NO: 24227 - DNA, 1805 bp, Homo sapiens
  source 1..1805: mol_type = unassigned DNA
acgctgcagggctgaagcggcggcggcggtggggactgcacgtagcccggcgctcggcatggctctcctggtgctcgcctgcttgtaacagcatgaagaggagaggactgacgttattgctgtccttgattggcaaagagaagtgaaagtacctaattctgccacagtctacctaatgatgctctgtggattatacccctgcattctccagcccttcggttagaaatttgggtctatctaattatatgatcttaggtctggtgagctgtaccttctttctggcagtgaatggtctgtattcctctagtgatgatgtgatcgaattaactccatcgaatttcaaccgagaagttattcagagtgatagtttgtggcttgtagaattctatgctccatggtgtggtcactgtcaaagattaacaccagaatggaagaaagcagcaactgcattaaaagatgttgtcaaagttggtgcagttgatgcagataagcatcattccctaggaggtcagtatggtgttcagggatttcctaccattaagatttttggatccaacaaaaacagaccagaagattaccaaggtggcagaactggtgaagccattgtagatgctgcgctgagtgctctgcgccagctcgtgaaggatcgcctcgggggacggagcggaggatacagttctggaaaacaaggcagaagtgatagttcaagtaagaaggatgtgattgagctgacagacgacagctttgataagaatgttctggacagtgaagatgtttggatggttgagttctatgctccttggtgtggacactgcaaaaacctagagccagagtgggctgccgcagcttcagaagtaaaagagcagacgaaaggaaaagtgaaactggcagctgtggatgctacagtcaatcaggttctggcctcccgatacgggattagaggatttcctacaatcaagatatttcagaaaggcgagtctcctgtggattatgacggtgggcggacaagatccgacatcgtgtcccgggcccttgatttgttttctgataacgccccacctcctgagctgcttgagattatcaacgaggacattgccaagaggacgtgtgaggagcaccagctctgtgttgtggctgtgctgccccatatccttgatactggagctgcaggcagaaattcttatctggaagttcttctgaagttggcagacaaatacaaaaagaaaatgtgggggtggctgtggacagaagctggagcccagtctgaacttgagaccgcgttggggattggagggtttgggtaccccgccatggccgccatcaatgcacgcaagatgaaatttgctctgctaaaaggctccttcagtgagcaaggcatcaacgagtttctcagggagctctcttttgggcgtggctccacggcacctgtaggaggcggggctttccctaccatcgttgagagagagccttgggacggcagggatggcgagcttcccgtggaggatgacattgacctcagtgatgtggagcttgatgacttagggaaagatgagttgtgagagccacaacagaggcttcagaccattttcttttcttgggagccagtggatttttccagcagtgaagggacattctctacactcagatgactctaccagtggccttttaaccaagaagtagtacttgattggtcatttgaaaacactgcaacagtgaacttttgcatctcaagaaaacattgaaaaattctatgaattgttgtagccggtgaattgagtcgtattctgtcacataatattttgaag

SEQ ID NO: 24228 - DNA, 2278 bp, Homo sapiens
  source 1..2278: mol_type = unassigned DNA
ggggcgggccggggcggggccaggccggctagaggggcgggtctagcggcggcccccggcgaagttcactgcgcttgcgctgacagacgcaagatggcggacagtgcggaactaaagcaaatggttatgagccttagagtttctgaactccaagtactgttgggctacgccgggagaaacaagcacggacgcaaacacgaacttctcacaaaagccctgcatttgctaaaggctggctgtagtcctgctgtgcaaatgaaaattaaggaactctataggcggcggttcccacagaaaatcatgacgcctgcagacttgtccatccccaacgtacattcaagtcctatgccagcaactttgtctccatctaccattccacaactcacttacgatggtcaccctgcatcatcgccattactccctgtttctcttctgggacctaaacatgaactggaactcccacatcttacatcagctcttcacccagtccatccggatataaaacttcaaaaattaccattttatgatttactggatgaactgataaaacccaccagtctagcatcagacaacagtcagcgctttcgagaaacctgttttgcatttgccttgacaccacaacaagtgcagcaaatcagtagttccatggatatttctgggaccaaatgtgacttcacagtacaggtccagttaaggttttgtttatcagaaaccagttgtccacaagaagatcacttcccacccaatctttgtgtgaaagtgaatacaaaaccttgcagccttccaggttaccttccacctacaaaaaatggcgtggaaccaaagcgacccagccgaccaattaatatcacctcacttgtccgactgtccacaacagtaccaaacacgattgttgtttcttggactgcagaaattggaagaaactattccatggcagtatatcttgtaaaacagttgtcctcaacagttcttcttcagaggttacgagcaaagggaataaggaatccggatcattctagagctttaattaaagagaagttgactgcggatccagacagtgaaatagctacaaccagcctaagggtttctctactatgtccacttggtaaaatgcggctgacaattccgtgtcgggcccttacatgttctcatctacaatgttttgacgcaactctttacattcagatgaatgagaaaaaaccaacctgggtttgtcctgtctgtgataagaaggctccatatgaacaccttattattgatggcttgtttatggaaatcctaaagtactgtacagactgtgatgaaatacaatttaaggaggatggcacttgggcaccgatgagatcaaaaaaggaagtacaggaagtttctgcctcttacaatggagtcgatggatgcttgagctccacattggagcatcaggtagcgtctcaccaccagtcctcaaataaaaacaagaaagtagaagtgattgacctaaccatagacagttcatctgatgaagaggaagaagagccatctgccaagaggacctgtccttccctatctcccacatcaccactaaataataaaggcattttaagtcttccacatcaagcatctccagtatcccgcaccccaagccttcctgctgtagacacaagctacattaatacctccctcatccaagactataggcatcctttccacatgacacccatgccttacgacttacaaggattagatttctttcctttcttatcaggagacaatcagcattacaacacctccttgcttgccgctgcagcagcagcagtttcagatgatcaagacctcctacactcgtctcggtttttcccgtatacctcctcacagatgtttcttgatcagttaagtgcaggaggcagtacttctctgccaaccaccaatggaagcagtagtggcagtaacagcagcctggtttcttccaacagcctaagggaaagccatagccacaccgtcacaaacaggagcagcacggacacggcatccatctttggcatcataccagacattatttcattggactgattcccaggccctgctgctcccatccccaccccagatcgaatgaacttggcagaaagaagagaactttgtgctctgttttaccttactctgtttagaaaagtatacaagcgtgttttttttcctttttttagggaaaaaattaaaagaaatgtacagagaacaaaactatattttcagttttacttttgtatataaatctaagactgcctgtgtgataaaacacttgttt

SEQ ID NO: 24229 - DNA, 2932 bp, Homo sapiens
  source 1..2932: mol_type = unassigned DNA
ttgttgtgggcgcctctggcgggggtggcgggggaagagatagggagtccggaggtaggggctgcagctgtctcatgggctcggctttttcaccttccagttagcctccctgccccccatggggagctggggctgggggcagggtgctctcgtaggggggattgggaaagctccccgtggccgcttcctcttcctcctttgcagtcccgggctcctgtcaggcgctcttctcagacccccgggaacttggcttcggccgccccgcccctccgtggatcccagtagcccccgccccggactcggctttccccggctgctcgcttgtcaggaagcgcctggggtgccccgcttgtgggaagcgcgatcccggggcgatagggtggggatctgggggagaagctctggtaaagtttagcgagccccgggccggcgttggggttcggctgagaggtagtgagcgggacgttactctttctctctgattccgggcagccgaggggagaaaccccctcgaagagtgtgtctttggaagcagtgttgggagggggggatgcagctacctctctcccttcttttgccttagctggtgtggagggtgagaggagcctttgggggtctctgcacacaccatgatggcgatgctgtagctgatggagaacaaccaaatgccagatttgattctgtagagtttttcctgtggaatatcctcaccgaaagagcttttctcctaataacttcacaatgtttacactccaagattcgtatgttaagcaaatggttatgagccttagagtttctgaactccaagtactgttgggctacgccgggagaaacaagcacggacgcaaacacgaacttctcacaaaagccctgcatttgctaaaggctggctgtagtcctgctgtgcaaatgaaaattaaggaactctataggcggcggttcccacagaaaatcatgacgcctgcagacttgtccatccccaacgtacattcaagtcctatgccagcaactttgtctccatctaccattccacaactcacttacgatggtcaccctgcatcatcgccattactccctgtttctcttctgggacctaaacatgaactggaactcccacatcttacatcagctcttcacccagtccatccggatataaaacttcaaaaattaccattttatgatttactggatgaactgataaaacccaccagtctagcatcagacaacagtcagcgctttcgagaaacctgttttgcatttgccttgacaccacaacaagtgcagcaaatcagtagttccatggatatttctgggaccaaatgtgacttcacagtacaggtccagttaaggttttgtttatcagaaaccagttgtccacaagaagatcacttcccacccaatctttgtgtgaaagtgaatacaaaaccttgcagccttccaggttaccttccacctacaaaaaatggcgtggaaccaaagcgacccagccgaccaattaatatcacctcacttgtccgactgtccacaacagtaccaaacacgattgttgtttcttggactgcagaaattggaagaaactattccatggcagtatatcttgtaaaacagttgtcctcaacagttcttcttcagaggttacgagcaaagggaataaggaatccggatcattctagagctttaattaaagagaagttgactgcggatccagacagtgaaatagctacaaccagcctaagggtttctctactatgtccacttggtaaaatgcggctgacaattccgtgtcgggcccttacatgttctcatctacaatgttttgacgcaactctttacattcagatgaatgagaaaaaaccaacctgggtttgtcctgtctgtgataagaaggctccatatgaacaccttattattgatggcttgtttatggaaatcctaaagtactgtacagactgtgatgaaatacaatttaaggaggatggcacttgggcaccgatgagatcaaaaaaggaagtacaggaagtttctgcctcttacaatggagtcgatggatgcttgagctccacattggagcatcaggtagcgtctcaccaccagtcctcaaataaaaacaagaaagtagaagtgattgacctaaccatagacagttcatctgatgaagaggaagaagagccatctgccaagaggacctgtccttccctatctcccacatcaccactaaataataaaggcattttaagtcttccacatcaagcatctccagtatcccgcaccccaagccttcctgctgtagacacaagctacattaatacctccctcatccaagactataggcatcctttccacatgacacccatgccttacgacttacaaggattagatttctttcctttcttatcaggagacaatcagcattacaacacctccttgcttgccgctgcagcagcagcagtttcagatgatcaagacctcctacactcgtctcggtttttcccgtatacctcctcacagatgtttcttgatcagttaagtgcaggaggcagtacttctctgccaaccaccaatggaagcagtagtggcagtaacagcagcctggtttcttccaacagcctaagggaaagccatagccacaccgtcacaaacaggagcagcacggacacggcatccatctttggcatcataccagacattatttcattggactgattcccaggccctgctgctcccatccccaccccagatcgaatgaacttggcagaaagaagagaactttgtgctctgttttaccttactctgtttagaaaagtatacaagcgtgttttttttcctttttttagggaaaaaattaaaagaaatgtacagagaacaaaactatattttcagttttacttttgtatataaatctaagactgcctgtgtgataaaacacttgttt

SEQ ID NO: 24230 - DNA, 2761 bp, Homo sapiens
  source 1..2761: mol_type = unassigned DNA
gccggtccctgggcctgagctccggctccggctggggcgcctgcgatgtctcaagatggcggagctgggcgaattaaagcacatggtgatgagtttccgggtgtctgagctccaggtgcttcttggctttgctggccggaacaagagtggacggaagcacgagctcctggccaaggctctgcacctcctgaagtccagctgtgcccctagtgtccagatgaagatcaaagagctttaccgacgacgctttccccggaagaccctggggccctctgatctctcccttctctctttgccccctggcacctctcctcctgtgcaccctgatgtcaccatgaaaccattgcccttctatgaagtctatggggagctcatccggcccaccacccttgcatccacttctagccagcggtttgaggaagcgcactttacctttgccctcacaccccagcaagtgcagcagattcttacatccagagaggttctgccaggagccaaatgtgattataccatacaggtgcagctaaggttctgtctctgtgagaccagctgcccccaggaagattattttccccccaacctctttgtcaaggtcaatgggaaactgtgccccctgccgggttaccttcccccaaccaagaatggggccgagcccaagaggcccagccgccccatcaacatcacacccctggctcgactctcagccactgttcccaacaccattgtggtcaattggtcatctgagttcggacggaattactccttgtctgtgtacctggtgaggcagttgactgcaggaacccttctacaaaaactcagagcaaagggtatccggaacccagaccactcgcgggcactgatcaaggagaaattgactgctgaccctgacagtgaggtggccactacaagtctccgggtgtcactcatgtgcccgctagggaagatgcgcctgactgtcccttgtcgtgccctcacctgcgcccacctgcagagcttcgatgctgccctttatctacagatgaatgagaagaagcctacatggacatgtcctgtgtgtgacaagaaggctccctatgaatctcttatcattgatggtttatttatggagattcttagttcctgttcagattgtgatgagatccaattcatggaagatggatcctggtgcccaatgaaacccaagaaggaggcatctgaggtttgccccccgccagggtatgggctggatggcctccagtacagcccagtccaggggggagatccatcagagaataagaagaaggtcgaagttattgacttgacaatagaaagctcatcagatgaggaggatctgccccctaccaagaagcactgttctgtcacctcagctgccatcccggccctacctggaagcaaaggagtcctgacatctggccaccagccatcctcggtgctaaggagccctgctatgggcacgttgggtggggatttcctgtccagtctcccactacatgagtacccacctgccttcccactgggagccgacatccaaggtttagatttattttcatttcttcagacagagagtcagcactatggcccctctgtcatcacctcactagatgaacaggatgcccttggccacttcttccagtaccgagggaccccttctcactttctgggcccactggcccccacgctggggagctcccactgcagcgccactccggcgccccctcctggccgtgtcagcagcattgtggcccctgggggggccttgagggaggggcatggaggacccctgccctcaggtccctctttgactggctgtcggtcagacatcatttccctggactgagttccctggattatggaaacttcgctgtcccccaacactgagcaagtatgctgtggagtcccaaccccagctactctgatccctctgggggctctggccaagggccagacagaccttcacagatgcctacttttggcctcatctctgcctgacaaggccagcacccaaagggttaatatttaacctctttttaaggacactggggtctgtttctggaaatgttctttagatggtggcacattcctttgggtatgttaacctaggcagtgggaggcaaatgggatggtatgtgagctaggagaagggctgaaccctcagccttgactatgtctagagcctcttggggaaggggcacctctcttgaaccccaaatgctctctcttcttattacccaaacccatggctctatttcttcttcacatccattgtctcttcatgtctattccattcccttcggccaaacagacaggtggaaaaactgagacaggcagtttcagagatggacagagaactttattttggattgtggatgtggacttttttgtacataaataagaaaaaccaaaatactccaaagatgacttcccctgcctcctactccagtatgacagaggaggatgtaaggccttagccatgatctgcaggggtctgggagtcaggcccggcctattgcttgggtctctctccatttatatatctaagttcacagtgtttcttattcccccctaagcttctagaggctcatggccctgtagttaggcctggctcattctgcaccttgccagggaggtggaaggaccctgtgccctccttcccaatcttctttttcaggctcgccaaggcctaggacctatgttgtaattttactttttatttctaaagttgtagtgaagctctcacccataataaaggttgtgaatgttc

SEQ ID NO: 24231 - DNA, 1235 bp, Homo sapiens
  source 1..1235: mol_type = unassigned DNA
ggaccgaacttctgccgtgcggacagcaggagcagcgccgagccccattcccccacctctccagctcgccctctgagcctcccgagccctctctccatttcccacaattgtgctgcacatggtgatgagtttccgggtgtctgagctccaggtgcttcttggctttgctggccggaacaagagtggacggaagcacgagctcctggccaaggctctgcacctcctgaagtccagctgtgcccctagtgtccagatgaagatcaaagagctttaccgacgacgctttccccggaagaccctggggccctctgatctctcccttctctctttgccccctggcacctctcctgtaggctcccctggtcctctagctcccattcccccaacgctgttggcccctggcaccctgctgggccccaagcgtgaggtggacatgcacccccctctgccccagcctgtgcaccctgatgtcaccatgaaaccattgcccttctatgaagtctatggggagctcatccggcccaccacccttgcatccacttctagccagcggtttgaggaagcgcactttacctttgccctcacaccccagcaagtgcagcagattcttacatccagagaggttctgccaggagccaaatgtgattataccatacaggtgcagctaaggttctgtctctgtgagaccagctgcccccaggaagattattttccccccaacctctttgtcaaggtcaatgggaaactgtgccccctgccgggttaccttcccccaaccaagaatggggccgagcccaagaggcccagccgccccatcaacatcacacccctggctcgactctcagccactgttcccaacaccattgtggtcaattggtcatctgagttcggacgggtgagcacagctaaagcaggtgcctggaaaagcctgctgagggtgaaggggaaccatccagtgtcctgggttggggaagcattttcctctttatgagtctgtctctggtcctcatggaacaaaagtgggcagtggtggtatgagaagcagaggctaattgtctaccccctgcctccaagtagaattactccttgtctgtgtacctggtgaggcagttgactgcaggaacccttctacaaaaactcagagcaaagggtatccggaacccagaccactcgcgggcactgagtgagtaacatctttcctctcttccccacctgatctggattcaagtcttcct

SEQ ID NO: 24232 - DNA, 2901 bp, Homo sapiens
  source 1..2901: mol_type = unassigned DNA
gcatttgcggccggcgccagggtggagagttgtgcgccggtccctgggcctgagctccggctccggctggggcgcctgcgatgtctcaagatggcggagctgggcgaattaaagcacatggtgatgagtttccgggtgtctgagctccaggtgcttcttggctttgctggccggaacaagagtggacggaagcacgagctcctggccaaggctctgcacctcctgaagtccagctgtgcccctagtgtccagatgaagatcaaagagctttaccgacgacgctttccccggaagaccctggggccctctgatctctcccttctctctttgccccctggcacctctcctgtaggctcccctggtcctctagctcccattcccccaacgctgttggcccctggcaccctgctgggccccaagcgtgaggtggacatgcacccccctctgccccagcctgtgcaccctgatgtcaccatgaaaccattgcccttctatgaagtctatggggagctcatccggcccaccacccttgcatccacttctagccagcggtttgaggaagcgcactttacctttgccctcacaccccagcaagtgcagcagattcttacatccagagaggttctgccaggagccaaatgtgattataccatacaggtgcagctaaggttctgtctctgtgagaccagctgcccccaggaagattattttccccccaacctctttgtcaaggtcaatgggaaactgtgccccctgccgggttaccttcccccaaccaagaatggggccgagcccaagaggcccagccgccccatcaacatcacacccctggctcgactctcagccactgttcccaacaccattgtggtcaattggtcatctgagttcggacggaattactccttgtctgtgtacctggtgaggcagttgactgcaggaacccttctacaaaaactcagagcaaagggtatccggaacccagaccactcgcgggcactgatcaaggagaaattgactgctgaccctgacagtgaggtggccactacaagtctccgggtgtcactcatgtgcccgctagggaagatgcgcctgactgtcccttgtcgtgccctcacctgcgcccacctgcagagcttcgatgctgccctttatctacagatgaatgagaagaagcctacatggacatgtcctgtgtgtgacaagaaggctccctatgaatctcttatcattgatggtttatttatggagattcttagttcctgttcagattgtgatgagatccaattcatggaagatggatcctggtgcccaatgaaacccaagaaggaggcatctgaggtttgccccccgccagggtatgggctggatggcctccagtacagcccagtccaggggggagatccatcagagaataagaagaaggtcgaagttattgacttgacaatagaaagctcatcagatgaggaggatctgccccctaccaagaagcactgttctgtcacctcagctgccatcccggccctacctggaagcaaaggagtcctgacatctggccaccagccatcctcggtgctaaggagccctgctatgggcacgttgggtggggatttcctgtccagtctcccactacatgagtacccacctgccttcccactgggagccgacatccaaggtttagatttattttcatttcttcagacagagagtcagcactatggcccctctgtcatcacctcactagatgaacaggatgcccttggccacttcttccagtaccgagggaccccttctcactttctgggcccactggcccccacgctggggagctcccactgcagcgccactccggcgccccctcctggccgtgtcagcagcattgtggcccctgggggggccttgagggaggggcatggaggacccctgccctcaggtccctctttgactggctgtcggtcagacatcatttccctggactgagttccctggattatggaaacttcgctgtcccccaacactgagcaagtatgctgtggagtcccaaccccagctactctgatccctctgggggctctggccaagggccagacagaccttcacagatgcctacttttggcctcatctctgcctgacaaggccagcacccaaagggttaatatttaacctctttttaaggacactggggtctgtttctggaaatgttctttagatggtggcacattcctttgggtatgttaacctaggcagtgggaggcaaatgggatggtatgtgagctaggagaagggctgaaccctcagccttgactatgtctagagcctcttggggaaggggcacctctcttgaaccccaaatgctctctcttcttattacccaaacccatggctctatttcttcttcacatccattgtctcttcatgtctattccattcccttcggccaaacagacaggtggaaaaactgagacaggcagtttcagagatggacagagaactttattttggattgtggatgtggacttttttgtacataaataagaaaaaccaaaatactccaaagatgacttcccctgcctcctactccagtatgacagaggaggatgtaaggccttagccatgatctgcaggggtctgggagtcaggcccggcctattgcttgggtctctctccatttatatatctaagttcacagtgtttcttattcccccctaagcttctagaggctcatggccctgtagttaggcctggctcattctgcaccttgccagggaggtggaaggaccctgtgccctccttcccaatcttctttttcaggctcgccaaggcctaggacctatgttgtaattttactttttatttctaaagttgtagtgaagctctcacccataataaaggttgtgaatgttc

SEQ ID NO: 24233 - DNA, 952 bp, Homo sapiens
  source 1..952: mol_type = unassigned DNA
gctaggcggggcggagctccggcccgggcggagccgcggccgccgcgtccggctgctggaccgaacttctgccgtgcggacagcaggagcagcgccgagccccattcccccacctctccagctcgccctctgagcctcccgagccctctctccatttcccacaattgtgctgcacatggtgatgagtttccgggtgtctgagctccaggtgcttcttggctttgctggccggaacaagagtggacggaagcacgagctcctggccaaggctctgcacctcctgaagtccagctgtgcccctagtgtccagatgaagatcaaagagctttaccgacgacgctttccccggaagaccctggggccctctgatctctcccttctctctttgccccctggcacctctcctgtaggctcccctggtcctctagctcccattcccccaacgctgttggcccctggcaccctgctgggccccaagcgtgaggtggacatgcacccccctctgccccagcctgtgcaccctgatgtcaccatgaaaccattgcccttctatgaagtctatggggagctcatccggcccaccacccttgcatccacttctagccagcggtttgaggaagcgcactttacctttgccctcacaccccagcaagtgcagcagattcttacatccagagaggttctgccaggagccaaatgtgattataccatacaggtgcagctaaggttctgtctctgtgagaccagctgcccccaggaagattattttccccccaacctctttgtcaaggtcaatgggaaactgtgccccctgccgggttaccttcccccaaccaagaatggggccgagcccaagaggcccagccgccccatcaacatcacacccctggctcgactctcagccactgttcccaacaccattgtggtcaattggtcatctgagttcggacgg

SEQ ID NO: 24234 - DNA, 2055 bp, Homo sapiens
  source 1..2055: mol_type = unassigned DNA
aatcgcggccaccgccaggtggaacggcaggtgggttcaggtaccagcctggccgggacccggctgtgggaccaacgcttccggtgagcgacagaggcagctccccagggcctggagacccgtggggcggactctgggatctgagcctatcgccctggcctggagcccccctttgtacctattccccattcccctaccgagctgggcagttagccagcccactccaactctcggaaccatgtttgcagacttggattatgacatcgaagaggataaactcggaatcccgactgtgcctgggaaggtgaccctgcagaaggatgctcagaacctgatcgggatcagcattggaggaggggcccagtactgtccctgcctctatatcgtccaggtatttgacaacaccccagcagccttggacggcacagtggcagctggcgatgagatcaccggtgtcaatggcaggtcaatcaaagggaaaactaaggtggaggtggcgaagatgattcaggaggtgaagggggaggtgaccatccactacaacaagctgcaggcggaccccaagcagggcatgtccctggacattgtgttgaagaaagtcaagcaccggctggtggagaacatgagttcagggaccgcagatgctctgggcctgagccgggccatcctgtgcaatgatgggcttgtcaagaggctagaggagctggagcggaccgctgagctatacaaagggatgacggaacacaccaagaacctcctacgggccttttatgagctgtcgcagactcaccgggcctttggggacgtgttctccgtgatcggggtgcgggagccccagccagctgcgagcgaggcttttgtgaagttcgccgatgcccaccgcagcatcgagaagttcggcattcggcttctgaaaaccatcaagccgatgctgacggatctgaacacgtacctcaacaaagccatcccggacactcgcctcaccatcaagaagtacctggacgtgaagtttgagtacctgtcgtactgcctgaaggtgaaggagatggatgacgaggaatacagctgcattgccctaggcgagcccctttaccgggtgagcaccggcaactatgagtaccgcctgatcctgcgctgccgccaggaggcgcgcgcccgcttctcccagatgcgcaaggatgtgctggagaagatggagctgctggaccagaagcacgtccaggacatcgtgttccagctgcagcgcctcgtgtccaccatgtccaagtactacaacgactgctacgcagtgctgcgggatgccgacgtcttccccatcgaggtagacctggcgcacaccacattggcctatggcctcaaccaggaggagttcacagatggggaggaggaggaggaggaggaagacacggcagctggggagccgtccagggatacacgaggggctgctgggcccttggacaagggtggaagctggtgtgactcctgagtgccccgcggctgtggtgccgggggcagggtgcgtgggaggacggagcctgggagcggggcggggccgccgcgcaagggggcgacgcataaaggcctgctggcttggggcgcctgcctccctgctcctctgtcctcgcacagcgaacctgggctcctgcccaggacaggcaccagggtcatggcctgggacctggacactggcccctccaccctccctcccctcccggctccccggccagagggagagcttggtctctggacctgccttaggaaggagagggagggcaggaaggaaaagaaaggacttggaggtggcaggagtccgagccctgctccttgtgggcgctcacactgcccccggagcctgctgggagtggggccagccgtggacagctgaggttggggtcaatgcctcctgggcacccttgcctcgccccagaccggcccgtccagtccccatcacacctcggcggcctttatttattctgttcccccagctcggccacttctctgaaggagggctgggttctgggcctgtatcgaataaacacaaacctggatggcgca

SEQ ID NO: 24235 - DNA, 2164 bp, Homo sapiens
  source 1..2164: mol_type = unassigned DNA
ggcggggttagacgctgtcagcctgtccagaccgttcctctgttttcgcttgttcctactaacagcgagcttccgccaatacttgttctcgttcttggttccgagcgtcccgggagccgggaagggaaggattgtctgcagggattggagcaaatatccagtggggggaaagccgggacttccgcgtcttgccggaagtgacgtgacaatcgcggccaccgccaggtggaacggcaggtgggttcaggtaccagcctggccgggacccggctgtgggaccaacgcttccgttccccattcccctaccgagctgggcagttagccagcccactccaactctcggaaccatgtttgcagacttggattatgacatcgaagaggataaactcggaatcccgactgtgcctgggaaggtgaccctgcagaaggatgctcagaacctgatcgggatcagcattggaggaggggcccagtactgtccctgcctctatatcgtccaggtatttgacaacaccccagcagccttggacggcacagtggcagctggcgatgagatcaccggtgtcaatggcaggtcaatcaaagggaaaactaaggtggaggtggcgaagatgattcaggaggtgaagggggaggtgaccatccactacaacaagctgcaggcggaccccaagcagggcatgtccctggacattgtgttgaagaaagtcaagcaccggctggtggagaacatgagttcagggaccgcagatgctctgggcctgagccgggccatcctgtgcaatgatgggcttgtcaagaggctagaggagctggagcggaccgctgagctatacaaagggatgacggaacacaccaagaacctcctacgggccttttatgagctgtcgcagactcaccgggcctttggggacgtgttctccgtgatcggggtgcgggagccccagccagctgcgagcgaggcttttgtgaagttcgccgatgcccaccgcagcatcgagaagttcggcattcggcttctgaaaaccatcaagccgatgctgacggatctgaacacgtacctcaacaaagccatcccggacactcgcctcaccatcaagaagtacctggacgtgaagtttgagtacctgtcgtactgcctgaaggtgaaggagatggatgacgaggaatacagctgcattgccctaggcgagcccctttaccgggtgagcaccggcaactatgagtaccgcctgatcctgcgctgccgccaggaggcgcgcgcccgcttctcccagatgcgcaaggatgtgctggagaagatggagctgctggaccagaagcacgtccaggacatcgtgttccagctgcagcgcctcgtgtccaccatgtccaagtactacaacgactgctacgcagtgctgcgggatgccgacgtcttccccatcgaggtagacctggcgcacaccacattggcctatggcctcaaccaggaggagttcacagatggggaggaggaggaggaggaggaagacacggcagctggggagccgtccagggatacacgaggggctgctgggcccttggacaagggtggaagctggtgtgactcctgagtgccccgcggctgtggtgccgggggcagggtgcgtgggaggacggagcctgggagcggggcggggccgccgcgcaagggggcgacgcataaaggcctgctggcttggggcgcctgcctccctgctcctctgtcctcgcacagcgaacctgggctcctgcccaggacaggcaccagggtcatggcctgggacctggacactggcccctccaccctccctcccctcccggctccccggccagagggagagcttggtctctggacctgccttaggaaggagagggagggcaggaaggaaaagaaaggacttggaggtggcaggagtccgagccctgctccttgtgggcgctcacactgcccccggagcctgctgggagtggggccagccgtggacagctgaggttggggtcaatgcctcctgggcacccttgcctcgccccagaccggcccgtccagtccccatcacacctcggcggcctttatttattctgttcccccagctcggccacttctctgaaggagggctgggttctgggcctgtatcgaataaacacaaacctggatggcgca

SEQ ID NO: 24236 - DNA, 954 bp, Homo sapiens
  source 1..954: mol_type = unassigned DNA
agaccgttcctctgttttcgcttgttcctactaacagcgagcttccgccaatacttgttctcgttcttggttccgagcgtcccgggagccgggaagggaaggattgtctgcagggattggagcaaatatccagtggggggaaagccgggacttccgcgtcttgccggaagtgacgtgacaatcgcggccaccgccaggtggaacggcagttccccattcccctaccgagctgggcagttagccagcccactccaactctcggaaccatgtttgcagacttggattatgacatcgaagaggataaactcggaatcccgactgtgcctgggaaggtgaccctgcagaaggatgctcagaacctgatcgggatcagcattggaggaggggcccagtactgtccctgcctctatatcgtccaggtatttgacaacaccccagcagccttggacggcacagtggcagctggcgatgagatcaccggtgtcaatggcaggtcaatcaaagggaaaactaaggtggaggtggcgaagatgattcaggaggtgaagggggaggtgaccatccactacaacaagctgcaggcggaccccaagcagggcatgtccctggacattgtgttgaagaaagtcaagcaccggctggtggagaacatgagttcagggaccgcagatgctctgggcctgagccgggccatcctgtgcaatgatgggcttgtcaagaggctagaggagctggagcggaccgctgagctatacaaagggatgacggaacacaccaagaacctcctacgggccttttatgagctgtcgcagactcaccgggcctttggggacgtgttctccgtgatcggggtgcgggagccccagccagctgcgagcgaggcttttgtgaagttcgccgatgcccaccgcagcatcgagaagttcggcattcggcttctgaaaaccatcaagc

SEQ ID NO: 24237 - DNA, 559 bp, Homo sapiens
  source 1..559: mol_type = unassigned DNA
ggcactgctgtcccgtatgaggtggtggagggaggggtggcgttggcatttaggcacttgggttccttaaatcctatgctcctttctctcccggatccagttccccattcccctaccgagctgggcagttagccagcccactccaactctcggaaccatgtttgcagacttggattatgacatcgaagaggataaactcggaatcccgactgtgcctgggaaggtgaccctgcagaaggatgctcagaacctgatcgggatcagcattggaggaggggcccagtactgtccctgcctctatatcgtccaggtatttgacaacaccccagcagccttggacggcacagtggcagctggcgatgagatcaccggtgtcaatggcaggtcaatcaaagggaaaactaaggtggaggtggcgaagatgattcaggaggtgaagggggaggtgaccatccactacaacaagctgcaggcggaccccaagcagggcatgtccctggacattgtgttgaagaaagtcaagcaccggctggtggagaacatgagttcagggaccgca

SEQ ID NO: 24238 - DNA, 544 bp, Homo sapiens
  source 1..544: mol_type = unassigned DNA
aagtgacgtgacaatcgcggccaccgccaggtggaacggcaggtgggttcaggtaccagcctggccgggacccggctgtgggaccaacgcttccgttccccattcccctaccgagctgggcagttagccagcccactccaactctcggaaccatgtttgcagacttggattatgacatcgaagaggataaactcggaatcccgactgtgcctgggaaggtgaccctgcagaaggatgctcagaacctgatcgggatcagcattggaggaggggcccagtactgtccctgcctctatatcgtccaggtatttgacaacaccccagcagccttggacggcacagtggcagctggcgatgagatcaccggtgtcaatggcaggtcaatcaaagggaaaactaaggtggaggtggcgaagatgattcaggaggtgaagggggaggtgaccatccactacaacaagctgcaggcggaccccaagcagggcatgtccctggacattggccagcgcctcggcttccatggcccagggcctcactcttcata

SEQ ID NO: 24239 - DNA, 631 bp, Homo sapiens
  source 1..631: mol_type = unassigned DNA
actcaattagccacctaaggagagagtagggcggggcttccaccggccgtgggatatgtggataatcatccttctgtatctttcttccatggctcctggggcagctggggaagcaagctggatgggcctggccccatgctgccggatgaggtggatgcctggctgtggctctgggagagccaacctcccccagggaacccactttacacaatagcagtggcagcagaggctggcgaggagacaagattcggactctggggagcactgatagcatttcccgagcctcagcgagcttccgccaatacttgttctcgttcttggttccgagcgtcccgggagccgggaagggaaggattgtctgcagggattggagcaaatatccagtggggggaaagccgggacttccgcgtcttgccggaagtgacgtgacaatcgcggccaccgccaggtggaacggcagttccccattcccctaccgagctgggcagttagccagcccactccaactctcggaaccatgtttgcagacttggattatgacatcgaagaggataaactcggaatcccgactgtgcctgggaaggtgaccctgcagaaggatgctcagaacctgatcgggatcagcattgga

SEQ ID NO: 24240 - DNA, 1736 bp, Homo sapiens
  source 1..1736: mol_type = unassigned DNA
tgctggcaggtggggcgcgggccggcgcgagctgaccgagcactcggcgggcgcggcgggactgcggcccgtggcggcgtgcgcggggacctgcgctgactaggtccggggaagtccctgctatgtggatatttggtagcaatgactgatgtggaaactacatatgcagattttattgcttcaggaagaacaggtagaagaaatgcaatacatgatatcctggtttcctctgcaagtggcaacagcaatgaattagccttgaaattagcaggtcttgatatcaacaagacagaaggtgaagaagatgcacaacgaagttctacagaacaaagtggggaagcccagggagaagcagcaaaatctgaaagctaacaccccactttgaccctcgaccacacctgaaaatgtctcaaatctccaggagtatctggaatgcatttgtttccatgagtgaaaagaggaaaaagaaaatggctgtgctgcattgcaggaacctgctcattatcatgttaaaaatgagggcagaggctgtggctgcaggcagacttttccctacctctgtcattagcaatggttgaaatcatgtggcttgtgtttgggcgtcatttttgtatggatcctttcacttgatcatatgacgaaatgcttatagagagtagctccgacctagatgatgattcttcctgtagcatctggcccctcacaatgtcagaggatttaattgtgtctaattgcgaagggttgattgaaccccagagtttaaatatctctggctcaagtgttcacccagtaaaagaaagatccagaaagcactgtttttagcattacgtatctgtgtgttactgctgtgttatttacactgttttgtattgtacaatatatatgctcagcactgcccccttctctgattgcttatgaaaaacaaaatgatgtacattactgtgaatttttataccactcatttttaaaagggctgtcttttcattttagttttccatactgtggtggtgtacacaggatagaacacccttttttaaaacacagtctttccccttgctcattgtatgttgatgagttgattaagtctaacagattcatcaagactccattgctttattatagagacatttgaaaatatccattaatgtgaatatcacctgaattcagtctgtttggtgtctgcacagactggaattcaatctgtcaaatttgttttattctcaagtggagaacttctcccacataatatatatatatatatatattttaatttatgagaattttggacaattggaaaggtagaaaagaaaagccaagatcatactaaggactggaaatattttgttctatggaatcaaatttctcacaatgctgtatgatactatttaaatttggaggacaacttatcttcactaagctgaatcaggtggagaaagtaatctccttgcaatcatgtggacaccaatcacaaaagtaaagccctggtgttgtgttttcatgtcttttttcagccctctcagatccaaatgttattatgcactttttaatgtttgtaaacttttactaataattagtgtgaattgcattctgatacaataatgattatcattagaagctaacaaaattctcattaatactgtgtttgatggcctctgctgtgttttaacatcgtgcttcttatatggaaagtttttgtgagctgtgtaatccctctggtcagtattatgaaatcattt

SEQ ID NO: 24241 - DNA, 4163 bp, Homo sapiens
  source 1..4163: mol_type = unassigned DNA
atccataatccagcgatgctgcagctgtaaaagcattaatagaaaatcaatccacaacctcgcggggcagcgatcgtcgagcgccgtttccaggctgccttccctggggtcgggagcggccccgctccccccgtggctggcgcggaatgtggtgatccgtcccggggcggggatgacttcatgcagccggagctccgcggcgggagcggaggctgctgctggcaggtggggcgcgggccggcgcgagctgaccgagcactcggcgggcgcggcgggactgcggcccgtggcggcgtgcgcggggacctgcgctgactaggtccggggaagtttcctgactttctgagaagccctggtttccccaaagaagtgatttctgatagaaatctgaaggtcatctccaagaaaaaagagatctagtatagtcaatgaattaaagacaagaaggtttccaatcagtccctgctatgtggatatttggtagcaatgactgatgtggaaactacatatgcagattttattgcttcaggaagaacaggtagaagaaatgcaatacatgatatcctggtttcctctgcaagtggcaacagcaatgaattagccttgaaattagcaggtcttgatatcaacaagacagaaggtgaagaagatgcacaacgaagttctacagaacaaagtggggaagcccagggagaagcagcaaaatctgaaagctaacaccccactttgaccctcgaccacacctgaaaatgtctcaaatctccaggagtatctggaatgcatttgtttccatgagtgaaaagaggaaaaagaaaatggctgtgctgcattgcaggaacctgctcattatcatgttaaaaatgagggcagaggctgtggctgcaggcagacttttccctacctctgtcattagcaatggttgaaatcatgtggcttgtgtttgggcgtcatttttgtatggatcctttcacttgatcatatgacgaaatgcttatagagagtagctccgacctagatgatgattcttcctgtagcatctggcccctcacaatgtcagaggatttaattgtgtctaattgcgaagggttgattgaaccccagagtttaaatatctctggctcaagtgttcacccagtaaaagaaagatccagaaagcactgtttttagcattacgtatctgtgtgttactgctgtgttatttacactgttttgtattgtacaatatatatgctcagcactgcccccttctctgattgcttatgaaaaacaaaatgatgtacattactgtgaatttttataccactcatttttaaaagggctgtcttttcattttagttttccatactgtggtggtgtacacaggatagaacacccttttttaaaacacagtctttccccttgctcattgtatgttgatgagttgattaagtctaacagattcatcaagactccattgctttattatagagacatttgaaaatatccattaatgtgaatatcacctgaattcagtctgtttggtgtctgcacagactggaattcaatctgtcaaatttgttttattctcaagtggagaacttctcccacataatatatatatatatatatattttaatttatgagaattttggacaattggaaaggtagaaaagaaaagccaagatcatactaaggactggaaatattttgttctatggaatcaaatttctcacaatgctgtatgatactatttaaatttggaggacaacttatcttcactaagctgaatcaggtggagaaagtaatctccttgcaatcatgtggacaccaatcacaaaagtaaagccctggtgttgtgttttcatgtcttttttcagccctctcagatccaaatgttattatgcactttttaatgtttgtaaacttttactaataattagtgtgaattgcattctgatacaataatgattatcattagaagctaacaaaattctcattaatactgtgtttgatggcctctgctgtgttttaacatcgtgcttcttatatggaaagtttttgtgagctgtgtaatccctctggtcagtattatgaaatcatttgtcagtggtaataaataaggaaccagtaatatgccaatggttcatgaattactggacaaatagcagacaatgggagtccctttacaataacgagcccacttagctgtccttgagggcttagataccttgccacgtgaagtaggtagagcagcatttcaataggtaatttgtgtggttgtgccagaaactcagcccttctatgtaattacatacaggataaaaggtaagtctgctcacttctccttctacagggcatttcaactgactggaataagggcatggttgcatttagtactcaatcagatattactagaaaaaaaattaataatgtgagcctttccgagagcagaacgaggaaagattaaattttagaatgcttccttctgtctaatccatcaggggccaaaatgcccagtaaaattcaaacacatcacctattaatagacttacaagtgagaaaagaggttcctagggttattttaggcaatccctggtaaactgtttaaaccatcaaacccctacagtcagttttcagtatcctcatttaatattttaataggtttcttgtgaatttaaacttctcttctttcttaaggttgtgaaattccaaactgattttatgtgattttgaaaagtttagaaccagtgctgagtctatgtggagggtttatattcctatgtgatatactgttattaatgcatgtggtgccatgcttgtctttaaatatataaatagtgctaaattgcaaagtcatatggagctttggatttagtttgacttcttactactgctttgtctgctatattcaaacccaaaggcattcccaagctagggagataaaaattaattttctaaaatgtccacatcctatacattttgcttattcatggcatctttcaaattttattttagtttcctttatttgccaagaatacatatggatttgaatttttaaggagagaaggaaagggtaggaaaccagggccttgggtttagtaacaggcattggatgtctattaaccaactattcttacgctaatggctttgcagctcctattctcccatttgatcctcaaacaattctattagagtggtatttttatccaatttcacagattaaaatataagcactcaataaaatataacctttagaagcttaaaaagctagtaagtgatgaactgaggatttgaacccatgtttgtcaccaaggagctttccagggcacatgtcataaaattagagccaactgcagagctgtaagggaacttttagagatgaacttcttcagcctccatattttacagaaggaaactgaatcccagaaggagaaattgccgttctcaaggctccctggatgggtaataacacagatatgagtaggtcacataaagtatatcttttttaaaaaaaagaaattcaattatgtcttatttggggggtatatttcccagaagatatttttctggcatgtggtctgtaaacacagcatgattcatattttttatgtttcatgctactcattttgtttaattaccaacaaacatggggactttggctttttgacttatttgcaacaagcatgaaattgttaaatttaccttttatcaattgtaatcatcctatgccaacatattatcataaattcatagaaatatttttaaaaataaataacagacattgaaatccaattcttagataatactcccagaacagccaatggtaaatgccctatacttgagtcttacttagatgctgtggtaatgcaccattttagaagatgaatgatactgctatttctcttcagggaaacaataatggataaagaaatgtaactgccgggcagcaaagcttctaagtgaaacctgtagtagcagtagtagtagggagaaaatgtgtagtcatcaagtgaaaataggaaaggatctatgatttatgatgtcttaatagaccctaaattgttctttaattacaagagtggcagtctctgaagtcatttgtgagcttgtatgacttttgtatttagcaatgttgcatgctcacataattgaaaattaaaagtaacacatttttctgaaatgta

SEQ ID NO: 24242 - DNA, 588 bp, Homo sapiens
  source 1..588: mol_type = unassigned DNA
aacttctagaatccatcgatgtggaacacttcagtttgtttaacgtaggagactccctgctatgtggatatttggtagcaatgactgatgtggaaactacatatgcagattttattgcttcaggaagaacaggtagaagaaatgcaatacatgatatcctggtttcctctgcaagtggcaacagcaatgaattagccttgaaattagcaggtcttgatatcaacaagacagaaggtgaagaagatgcacaacgaagttctacagaacaaagtggggaagcccagggagaagcagcaaaatctgaaagctaacaccccactttgaccctcgaccacacctgaaaatgtctcaaatctccaggagtatctggaatgcatttgtttccatgagtgaaaagaggaaaaagaaaatggctgtgctgcattgcaggaacctgctcattatcatgttaaaaatgagggcagaggctgtggctgcaggcagacttttccctacctctgtcattagcaatggttgaaatcatgtggcttgtgtttgggcgtcatttttgtatggatcctttcacttgatcatatgacgaaatgctta

SEQ ID NO: 24243 - DNA, 1595 bp, Homo sapiens
  source 1..1595: mol_type = unassigned DNA
tatccgcacaggctctagaacttggtttcttgaagaagttgtaggaaagaaagtttatcagaattttttaaacctgtctcagaaataacaacatattttaatcagagatttgctgaagcttcagagatcacctgccaaacacaggctgaacctgacagcatgtcacaccaggatgttgctatgaggacagattcatcaaaaatgactgacgtggagtctggggtcgccaattttgcatcttcagcaagggcaggccgccggaatgccttaccagacatccagagttcagctgccacagacggaacctcagatttgcccctcaaactggaggctctctccgtgaaggaagatgcaaaagagaaagatgaaaaaacaacacaagaccaattggaaaagcctcaaaatgaagaaaaatgaaggctcataatctatcaagagtgctgaatttctgcatgttgaaagacttagtggttctgttttcttgagacatttaatctggtggtaactgtggtaacattgcagccctaagcagcatgtgtatattagataattgtgttgtgatgctactcactttgattgcaatgatgatgtccaaggtaagctattaaaaggcaggttacttccaaatcgcactgaaggaaaaggttaagaataatacatgatcacagaaatgcataccactgtctgtaaacccaacaaaattcactgttctcttttggatttatttagcctgatgtatttttaattcaatttttatggtgatgggcaaatcattcttggtaaatgtaaatcaaacatgattgatttaaaacttcatggaatttgtagaaaattatggacatttttggtgagaaagaacaatagtcaaaactcacatggatagagtgtgtttgttttttgccaaaaatgccccagactttttcccaaacctcaaaaacgtcttggaaaaattgtaaaagtttgataacagaaacatctttaggatatttttgtctgacatattttgcttctagtatgtgcctactgtgatttttttcatgtggaaaatgcaaaatttgtaacaaaatggttatatggaacatgcctattaaatgaattttactatcttccctaactttggtctgtgtatgtgtgtgtgttttactttaatatgaattatacaaaatactagttgttttacactctcttttcttattcttagggcttttgtgtatgtctgacttgtttttaaataacttcctcagcaatgcagaccttaatttttatatttttttaaagtagctaacatagcagtaggcacttaagcatttagtcaatgatattggtagaaatagtaaaatacatcctttaaatatatatctaagcatatattttaaaaggagcaaaaataaaaccaaagtgttagtaaattttgatttattagatattttagaaaaataatagaattctgaagttttaaaaatgtcagtaattaatttattttcattttcagaaatatatgcatgcagttatgttttatttgattgttgacttaggctatgtctgtatacagtaaccaaataaactctttcactattaaagagatttcttactga

SEQ ID NO: 24244 - DNA, 1043 bp, Homo sapiens
  source 1..1043: mol_type = unassigned DNA
gggttatttttagcaatctggctcacactgagggcttcctgctctattcagcaaatgtgcaaatggatgctgcaggaccgtaacagtagacattgatgaagatgttgctatgaggacagattcatcaaaaatgactgacgtggagtctggggtcgccaattttgcatcttcagcaagggcaggccgccggaatgccttaccagacatccagagttcagctgccacagacggaacctcagatttgcccctcaaactggaggctctctccgtgaaggaagatgcaaaagagaaagatgaaaaaacaacacaagaccaattggaaaagcctcaaaatgaagaaaaatgaaggctcataatctatcaagagtgctgaatttctgcatgttgaaagacttagtggttctgttttcttgagacatttaatctggtggtaactgtggtaacattgcagccctaagcagcatgtgtatattagataattgtgttgtgatgctactcactttgattgcaatgatgatgtccaaggtaagctattaaaaggcaggttacttccaaatcgcactgaaggaaaaggttaagaataatacatgatcacagaaatgcataccactgtctgtaaacccaacaaaattcactgttctcttttggatttatttagcctgatgtatttttaattcaatttttatggtgatgggcaaatcattcttggtaaatgtaaatcaaacatgattgatttaaaacttcatggaatttgtagaaaattatggacatttttggtgagaaagaacaatagtcaaaactcacatggatagagtgtgtttgttttttgccaaaaatgccccagactttttcccaaacctcaaaaacgtcttggaaaaattgtaaaagtttgataacagaaacatctttaggatatttttgtctgacatattttgcttctagtatgtgcctactgtgatttttttcatgtggaaaatgcaaaatttgtaacaaaatggttatatggaacatgcctattaaatgaattttactatcttccctaa

SEQ ID NO: 24245 - DNA, 556 bp, Homo sapiens
  source 1..556: mol_type = unassigned DNA
ggttatttttagcaatctggctcacactgagggcttcctgctctattcagcaaatgtgcaaatggatgctgcaggaccgtaacagtagacattgatgaaggttgtgatcaatgattagactctcaagcctgttgtgtttttgatctagccatgcctttcaaccactgtggtgaacatttacttctgaataggctcatcttcttcatatgcacattctatttgtagatgttgctatgaggacagattcatcaaaaatgactgacgtggagtctggggtcgccaattttgcatcttcagcaagggcaggccgccggaatgccttaccagacatccagagttcagctgccacagacggaacctcagatttgcccctcaaactggaggctctctccgtgaaggaagatgcaaaagagaaagatgaaaaaacaacacaagaccaattggaaaagcctcaaaatgaagaaaaatgaaggctcataatctatcaagagtgctgaatttctgcatgttgaaagacttagtggttctgttttcttgagacatttaatctggtggt

SEQ ID NO: 24246 - DNA, 1561 bp, Homo sapiens
  source 1..1561: mol_type = unassigned DNA
gaaaaaagctaccgtggcacgtgccccggggagtgatgcggtggcccggtttgcacggagagcgggacaccgcctggggagccgcgctcgtagcctgggggcgggacgcggcggccgctccctccgcccccgagtagctgccaccgcctggctgcgccccagcccagtagctcagacgcggccgcatcccggtggactgtagaggcggcagcgagctagagcccgagtcgcagctccgggccgcagagcgctgggcgagcgcgagcgccagggcaccggcagggcaggcagctgcgcgcggctggagtcatgctatactgaaaagacacttcatcaagataactctgggagaagcagaaaaccctgtgccagggacaggaaagataggagaaagaaagtttatcagaattttttaaacctgtctcagaaataacaacatattttaatcagagatttcacctgtgccacaggccaccatggatctgcacctcgatgcccttcggagtcatgagagtgcaagcaatagcagctcaggaagcagcagcagaggagaccagaaaggtcactacctttgcatgaacaacaatggcaaccaggataccatgcttggttctccatgatgttgctatgaggacagattcatcaaaaatgactgacgtggagtctggggtcgccaattttgcatcttcagcaagggcaggccgccggaatgccttaccagacatccagagttcagctgccacagacggaacctcagatttgcccctcaaactggaggctctctccgtgaaggaagatgcaaaagagaaagatgaaaaaacaacacaagaccaattggaaaagcctcaaaatgaagaaaaatgaaggctcataatctatcaagagtgctgaatttctgcatgttgaaagacttagtggttctgttttcttgagacatttaatctggtggtaactgtggtaacattgcagccctaagcagcatgtgtatattagataattgtgttgtgatgctactcactttgattgcaatgatgatgtccaaggtaagctattaaaaggcaggttacttccaaatcgcactgaaggaaaaggttaagaataatacatgatcacagaaatgcataccactgtctgtaaacccaacaaaattcactgttctcttttggatttatttagcctgatgtatttttaattcaatttttatggtgatgggcaaatcattcttggtaaatgtaaatcaaacatgattgatttaaaacttcatggaatttgtagaaaattatggacatttttggtgagaaagaacaatagtcaaaactcacatggatagagtgtgtttgttttttgccaaaaatgccccagactttttcccaaacctcaaaaacgtcttggaaaaattgtaaaagtttgataacagaaacatctttaggatatttttgtctgacatattttgcttctagtatgtgcctactgtgatttttttcatgtggaaaatgcaaaatttgtaacaaaatggttatatggaacatgcctattaaatgaattttactatcttccctaa

SEQ ID NO: 24247 - DNA, 1398 bp, Homo sapiens
  source 1..1398: mol_type = unassigned DNA
gaaaaaagctaccgtggcacgtgccccggggagtgatgcggtggcccggtttgcacggagagcgggacaccgcctggggagccgcgctcgtagcctgggggcgggacgcggcggccgctccctccgcccccgagtagctgccaccgcctggctgcgccccagcccagtagctcagacgcggccgcatcccggtggactgtagaggcggcagcgagctagagcccgagtcgcagctccgggccgcagagcgctgggcgagcgcgagcgccagggcaccggcagggcaggcagctgcgcgcggctggagtcatgctatactgaaaagacacttcatcaagataactctgggagaagcagaaaaccctgtgccagggacaggaaagataggagaaagaaagtttatcagaattttttaaacctgtctcagaaataacaacatattttaatcagagatttatgttgctatgaggacagattcatcaaaaatgactgacgtggagtctggggtcgccaattttgcatcttcagcaagggcaggccgccggaatgccttaccagacatccagagttcagctgccacagacggaacctcagatttgcccctcaaactggaggctctctccgtgaaggaagatgcaaaagagaaagatgaaaaaacaacacaagaccaattggaaaagcctcaaaatgaagaaaaatgaaggctcataatctatcaagagtgctgaatttctgcatgttgaaagacttagtggttctgttttcttgagacatttaatctggtggtaactgtggtaacattgcagccctaagcagcatgtgtatattagataattgtgttgtgatgctactcactttgattgcaatgatgatgtccaaggtaagctattaaaaggcaggttacttccaaatcgcactgaaggaaaaggttaagaataatacatgatcacagaaatgcataccactgtctgtaaacccaacaaaattcactgttctcttttggatttatttagcctgatgtatttttaattcaatttttatggtgatgggcaaatcattcttggtaaatgtaaatcaaacatgattgatttaaaacttcatggaatttgtagaaaattatggacatttttggtgagaaagaacaatagtcaaaactcacatggatagagtgtgtttgttttttgccaaaaatgccccagactttttcccaaacctcaaaaacgtcttggaaaaattgtaaaagtttgataacagaaacatctttaggatatttttgtctgacatattttgcttctagtatgtgcctactgtgatttttttcatgtggaaaatgcaaaatttgtaacaaaatggttatatggaacatgcctattaaatgaattttactatcttccctaa

SEQ ID NO: 24248 - DNA, 1811 bp, Homo sapiens
  source 1..1811: mol_type = unassigned DNA
gaaaaaagctaccgtggcacgtgccccggggagtgatgcggtggcccggtttgcacggagagcgggacaccgcctggggagccgcgctcgtagcctgggggcgggacgcggcggccgctccctccgcccccgagtagctgccaccgcctggctgcgccccagcccagtagctcagacgcggccgcatcccggtggactgtagaggcggcagcgagctagagcccgagtcgcagctccgggccgcagagcgctgggcgagcgcgagcgccagggcaccggcagggcaggcagctgcgcgcggctggagtcatgctatactgaaaagacacttcatcaagataactctgggagaagcagaaaaccctgtgccagggacaggaaagataggaatgttgctatgaggacagattcatcaaaaatgactgacgtggagtctggggtcgccaattttgcatcttcagcaagggcaggccgccggaatgccttaccagacatccagagttcagctgccacagacggaacctcagatttgcccctcaaactggaggctctctccgtgaaggaagatgcaaaagagaaagatgaaaaaacaacacaagaccaattggaaaagcctcaaaatgaagaaaaatgaaggctcataatctatcaagagtgctgaatttctgcatgttgaaagacttagtggttctgttttcttgagacatttaatctggtggtaactgtggtaacattgcagccctaagcagcatgtgtatattagataattgtgttgtgatgctactcactttgattgcaatgatgatgtccaaggtaagctattaaaaggcaggttacttccaaatcgcactgaaggaaaaggttaagaataatacatgatcacagaaatgcataccactgtctgtaaacccaacaaaattcactgttctcttttggatttatttagcctgatgtatttttaattcaatttttatggtgatgggcaaatcattcttggtaaatgtaaatcaaacatgattgatttaaaacttcatggaatttgtagaaaattatggacatttttggtgagaaagaacaatagtcaaaactcacatggatagagtgtgtttgttttttgccaaaaatgccccagactttttcccaaacctcaaaaacgtcttggaaaaattgtaaaagtttgataacagaaacatctttaggatatttttgtctgacatattttgcttctagtatgtgcctactgtgatttttttcatgtggaaaatgcaaaatttgtaacaaaatggttatatggaacatgcctattaaatgaattttactatcttccctaactttggtctgtgtatgtgtgtgtgttttactttaatatgaattatacaaaatactagttgttttacactctcttttcttattcttagggcttttgtgtatgtctgacttgtttttaaataacttcctcagcaatgcagaccttaatttttatatttttttaaagtagctaacatagcagtaggcacttaagcatttagtcaatgatattggtagaaatagtaaaatacatcctttaaatatatatctaagcatatattttaaaaggagcaaaaataaaaccaaagtgttagtaaattttgatttattagatattttagaaaaataatagaattctgaagttttaaaaatgtcagtaattaatttattttcattttcagaaatatatgcatgcagttatgttttatttgattgttgacttaggctatgtctgtatacagtaaccaaataaactctttcactattaaagagatttcttactg

SEQ ID NO: 24249 - DNA, 1875 bp, Homo sapiens
  source 1..1875: mol_type = unassigned DNA
gactgcgcatgcgcgtcactagacgacacggctgtcttctttcctggagaatttctcaaggactgctggctggaaacttaacggctaatgtggatctgaccgtagtttgccaaattaagaaaacgtttttaccctgttgaagatttgctttaacttcaaaagtgatgacaagaaagtatggacaccccttcaggaccaacctgataagtcactggtttttctttcgtttaaagatgacacactctgaaattaatttgattttgagatttgagaacttggacatacatacttcctatggaaggagtcatgctatactgaaaagacacttcatcaagataactctgggagaagcagaaaaccctgtgccagggacaggaaagataggagaaagaaagtttatcagaattttttaaacctgtctcagaaataacaacatattttaatcagagatttatgttgctatgaggacagattcatcaaaaatgactgacgtggagtctggggtcgccaattttgcatcttcagcaagggcaggccgccggaatgccttaccagacatccagagttcagctgccacagacggaacctcagatttgcccctcaaactggaggctctctccgtgaaggaagatgcaaaagagaaagatgaaaaaacaacacaagaccaattggaaaagcctcaaaatgaagaaaaatgaaggctcataatctatcaagagtgctgaatttctgcatgttgaaagacttagtggttctgttttcttgagacatttaatctggtggtaactgtggtaacattgcagccctaagcagcatgtgtatattagataattgtgttgtgatgctactcactttgattgcaatgatgatgtccaaggtaagctattaaaaggcaggttacttccaaatcgcactgaaggaaaaggttaagaataatacatgatcacagaaatgcataccactgtctgtaaacccaacaaaattcactgttctcttttggatttatttagcctgatgtatttttaattcaatttttatggtgatgggcaaatcattcttggtaaatgtaaatcaaacatgattgatttaaaacttcatggaatttgtagaaaattatggacatttttggtgagaaagaacaatagtcaaaactcacatggatagagtgtgtttgttttttgccaaaaatgccccagactttttcccaaacctcaaaaacgtcttggaaaaattgtaaaagtttgataacagaaacatctttaggatatttttgtctgacatattttgcttctagtatgtgcctactgtgatttttttcatgtggaaaatgcaaaatttgtaacaaaatggttatatggaacatgcctattaaatgaattttactatcttccctaactttggtctgtgtatgtgtgtgtgttttactttaatatgaattatacaaaatactagttgttttacactctcttttcttattcttagggcttttgtgtatgtctgacttgtttttaaataacttcctcagcaatgcagaccttaatttttatatttttttaaagtagctaacatagcagtaggcacttaagcatttagtcaatgatattggtagaaatagtaaaatacatcctttaaatatatatctaagcatatattttaaaaggagcaaaaataaaaccaaagtgttagtaaattttgatttattagatattttagaaaaataatagaattctgaagttttaaaaatgtcagtaattaatttattttcattttcagaaatatatgcatgcagttatgttttatttgattgttgacttaggctatgtctgtatacagtaaccaaataaactctttcactattaaagagatttcttactg

SEQ ID NO: 24250 - DNA, 1153 bp, Homo sapiens
  source 1..1153: mol_type = unassigned DNA
aaaagtctgagcccatgttctttaaaatgttgatggtggttgtctgggtgtggaattatgagtgacttgttttgttctttgtacttttctgtgctttttgctttgttttcaataagaggcaataactgtcattttgacagaagccactgtgctggggaactggagctgtcctctctgcagaatgcatctggacttacctctgcccccttgccttctgtccccacaggcctgaggagcgatgcgacaggcatgatggaggtcgagtcctcctactcggacttcatctcctgtgaccggacaggccgtcggaatgcggtccctgacatccagggagactcagaggctgtgagcgtgaggaagctggctggagacatgggcgagctggcactcgagggggcagaaggacaggtggagggaagcgccccagacaaggaagctggcaaccagccccagagcagcgatgggaccacctcgtcttgaatctgaccttgtccaagaaggctggacgagagaccttctgtcccctcccagagggggaaccctggcactggcccagcagcctcttctctgagctccatgtcccagataaaccaggccagactgagaaggctccccagaggcctctgtggcctccactccgggaaagccctctgcccacacccacaggcttcacattcccaccaccttcgcaccgtgcccaggtacactttcaagacactgtaaccacaagatgttatttattgagctggcgccgggacttgggcggggcctgccctacagtgagcagcccacacaggaacgctcctctcgcgagcggcccgggcagggaccctgtcccaacaccaacacctcctctccagcccaatcttctgggtccagacctgcttgtcccttttttagaaaacacttttaaactttttaaaaattttaaaccttttttcagcagatatggagagagctgacaatcaattcacattttttaagccattttagctaaactgtcattgtgcatctctgaggttccctcatggagctccacagatccatttttagggaagggattttggctcaaaacgatctgaccacctctgccctgtccaccaggataagtgacacctaggacccaggaaataaatgccgatgatttgtgtga

SEQ ID NO: 24251 - DNA, 338 bp, Homo sapiens
  source 1..338: mol_type = unassigned DNA
gaggcgctgcggaccggcggcccaggcacggagaggcggcgagaccgcagaattcccgtactgattagtcaacagtggaaaatctgaagagatgcaagcaggaaaaagaaattaaaccaggcctgaggagcgatgcgacaggcatgatggaggtcgagtcctcctactcggacttcatctcctgtgaccggacaggccgtcggaatgcggtccctgacatccagggagactcagaggctgtgagcgtgaggaagctggctggagacatgggcgagctggcactcgagggggcagagatggatctcactatgttgccctggctggtctcaaactcctag

SEQ ID NO: 24252 - DNA, 1180 bp, Homo sapiens
  source 1..1180: mol_type = unassigned DNA
aacacccactaaaacctcaaagtgcttttcatttaggagacacggggaagagacagagaggagggtaaagtgagaatcctgcccgcaccacaggtctggactgctaaccttgaatcctggtttcttaaattctgcctccgcttctgactgaggaccactggattttgaggaaactttggtcttaattcccgtactgattagtcaacagtggaaaatctgaagagatgcaagcaggaaaaagaaattaaaccaggcctgaggagcgatgcgacaggcatgatggaggtcgagtcctcctactcggacttcatctcctgtgaccggacaggccgtcggaatgcggtccctgacatccagggagactcagaggctgtgagcgtgaggaagctggctggagacatgggcgagctggcactcgagggggcagaaggacaggtggagggaagcgccccagacaaggaagctggcaaccagccccagagcagcgatgggaccacctcgtcttgaatctgaccttgtccaagaaggctggacgagagaccttctgtcccctcccagagggggaaccctggcactggcccagcagcctcttctctgagctccatgtcccagataaaccaggccagactgagaaggctccccagaggcctctgtggcctccactccgggaaagccctctgcccacacccacaggcttcacattcccaccaccttcgcaccgtgcccaggtacactttcaagacactgtaaccacaagatgttatttattgagctggcgccgggacttgggcggggcctgccctacagtgagcagcccacacaggaacgctcctctcgcgagcggcccgggcagggaccctgtcccaacaccaacacctcctctccagcccaatcttctgggtccagacctgcttgtcccttttttagaaaacacttttaaactttttaaaaattttaaaccttttttcagcagatatggagagagctgacaatcaattcacattttttaagccattttagctaaactgtcattgtgcatctctgaggttccctcatggagctccacagatccatttttagggaagggattttggctcaaaacgatctgaccacctctgccctgtccaccaggataagtgacacctaggacccaggaaataaatgccgatgatttgtgtga

SEQ ID NO: 24253 - DNA, 1489 bp, Homo sapiens
  source 1..1489: mol_type = unassigned DNA
gggcgctaggctgccccggggaggcgctgcggaccggcggcccaggcacggagaggcggcgagaccgcaggagacacggggaagagacagagaggagggtaaagtgagaatcctgcccgcaccacaggtctggactgctaaccttgaatcctggtttcttaaattctgcctccgcttctgactgaggaccactggattttgaggaaactttggtcttaattcccgtactgattagtcaacagtggaaaatctgaagagatgcaagcaggaaaaagaaattaaaccagtaagatagagactgccactctctgggaaccttgctgtgtagctgagcctcagcaagtttgataatacagacacagcaggaggcctggggaggacccagcatgcccggccaccaagcagtgatgcagctggactgttccgcagctttccagagacctccatggaagcacagacttccatgggttgaagagagtttgtgtcacaattccagtccctagccctggccctgtgtgaagtagtaacaccgccctgccagtaggatatagctgctgaggaggcctgaggagcgatgcgacaggcatgatggaggtcgagtcctcctactcggacttcatctcctgtgaccggacaggccgtcggaatgcggtccctgacatccagggagactcagaggctgtgagcgtgaggaagctggctggagacatgggcgagctggcactcgagggggcagaaggacaggtggagggaagcgccccagacaaggaagctggcaaccagccccagagcagcgatgggaccacctcgtcttgaatctgaccttgtccaagaaggctggacgagagaccttctgtcccctcccagagggggaaccctggcactggcccagcagcctcttctctgagctccatgtcccagataaaccaggccagactgagaaggctccccagaggcctctgtggcctccactccgggaaagccctctgcccacacccacaggcttcacattcccaccaccttcgcaccgtgcccaggtacactttcaagacactgtaaccacaagatgttatttattgagctggcgccgggacttgggcggggcctgccctacagtgagcagcccacacaggaacgctcctctcgcgagcggcccgggcagggaccctgtcccaacaccaacacctcctctccagcccaatcttctgggtccagacctgcttgtcccttttttagaaaacacttttaaactttttaaaaattttaaaccttttttcagcagatatggagagagctgacaatcaattcacattttttaagccattttagctaaactgtcattgtgcatctctgaggttccctcatggagctccacagatccatttttagggaagggattttggctcaaaacgatctgaccacctctgccctgtccaccaggataagtgacacctaggacccaggaaataaatgccgatgatttgtgtga

SEQ ID NO: 24254 - DNA, 1443 bp, Homo sapiens
  source 1..1443: mol_type = unassigned DNA
ccgcggctgcggaaggggacgcgaaccgtcctggtcccatccgagccgccgtagcgcgagtgccgcgggagttcggcagcccaggtcgccaaggcaacgggctccgctgcgggttgcgggctgcgggcgctaggctgccccggggaggcgctgcggaccggcggcccaggcacggagaggcggcgagaccgcaggagacacggggaagagacagagaggagggtaaagtgagaatcctgcccgcaccacaggtctggactgctaaccttgaatcctggtttcttaaattctgcctccgcttctgactgaggaccactggattttgaggaaactttggtcttgtggtggtgaggaggtgatgttctggaaggaaggtacctagactttgtggtccctgccaggaagtggagagtggaaatgtggaatgcctcacactcctcaactagaattcccgtactgattagtcaacagtggaaaatctgaagagatgcaagcaggaaaaagaaattaaaccaggcctgaggagcgatgcgacaggcatgatggaggtcgagtcctcctactcggacttcatctcctgtgaccggacaggccgtcggaatgcggtccctgacatccagggagactcagaggctgtgagcgtgaggaagctggctggagacatgggcgagctggcactcgagggggcagaaggacaggtggagggaagcgccccagacaaggaagctggcaaccagccccagagcagcgatgggaccacctcgtcttgaatctgaccttgtccaagaaggctggacgagagaccttctgtcccctcccagagggggaaccctggcactggcccagcagcctcttctctgagctccatgtcccagataaaccaggccagactgagaaggctccccagaggcctctgtggcctccactccgggaaagccctctgcccacacccacaggcttcacattcccaccaccttcgcaccgtgcccaggtacactttcaagacactgtaaccacaagatgttatttattgagctggcgccgggacttgggcggggcctgccctacagtgagcagcccacacaggaacgctcctctcgcgagcggcccgggcagggaccctgtcccaacaccaacacctcctctccagcccaatcttctgggtccagacctgcttgtcccttttttagaaaacacttttaaactttttaaaaattttaaaccttttttcagcagatatggagagagctgacaatcaattcacattttttaagccattttagctaaactgtcattgtgcatctctgaggttccctcatggagctccacagatccatttttagggaagggattttggctcaaaacgatctgaccacctctgccctgtccaccaggataagtgacacctaggacccaggaaataaatgccgatgatttgtgtga

SEQ ID NO: 24255 - DNA, 1338 bp, Homo sapiens
  source 1..1338: mol_type = unassigned DNA
ccgcggctgcggaaggggacgcgaaccgtcctggtcccatccgagccgccgtagcgcgagtgccgcgggagttcggcagcccaggtcgccaaggcaacgggctccgctgcgggttgcgggctgcgggcgctaggctgccccggggaggcgctgcggaccggcggcccaggcacggagaggcggcgagaccgcaggagacacggggaagagacagagaggagggtaaagtgagaatcctgcccgcaccacaggtctggactgctaaccttgaatcctggtttcttaaattctgcctccgcttctgactgaggaccactggattttgaggaaactttggtcttaattcccgtactgattagtcaacagtggaaaatctgaagagatgcaagcaggaaaaagaaattaaaccaggcctgaggagcgatgcgacaggcatgatggaggtcgagtcctcctactcggacttcatctcctgtgaccggacaggccgtcggaatgcggtccctgacatccagggagactcagaggctgtgagcgtgaggaagctggctggagacatgggcgagctggcactcgagggggcagaaggacaggtggagggaagcgccccagacaaggaagctggcaaccagccccagagcagcgatgggaccacctcgtcttgaatctgaccttgtccaagaaggctggacgagagaccttctgtcccctcccagagggggaaccctggcactggcccagcagcctcttctctgagctccatgtcccagataaaccaggccagactgagaaggctccccagaggcctctgtggcctccactccgggaaagccctctgcccacacccacaggcttcacattcccaccaccttcgcaccgtgcccaggtacactttcaagacactgtaaccacaagatgttatttattgagctggcgccgggacttgggcggggcctgccctacagtgagcagcccacacaggaacgctcctctcgcgagcggcccgggcagggaccctgtcccaacaccaacacctcctctccagcccaatcttctgggtccagacctgcttgtcccttttttagaaaacacttttaaactttttaaaaattttaaaccttttttcagcagatatggagagagctgacaatcaattcacattttttaagccattttagctaaactgtcattgtgcatctctgaggttccctcatggagctccacagatccatttttagggaagggattttggctcaaaacgatctgaccacctctgccctgtccaccaggataagtgacacctaggacccaggaaataaatgccgatgatttgtgtga

SEQ ID NO: 24256 - DNA, 1191 bp, Homo sapiens
  source 1..1191: mol_type = unassigned DNA
ccgcggctgcggaaggggacgcgaaccgtcctggtcccatccgagccgccgtagcgcgagtgccgcgggagttcggcagcccaggtcgccaaggcaacgggctccgctgcgggttgcgggctgcgggcgctaggctgccccggggaggcgctgcggaccggcggcccaggcacggagaggcggcgagaccgcagaattcccgtactgattagtcaacagtggaaaatctgaagagatgcaagcaggaaaaagaaattaaaccaggcctgaggagcgatgcgacaggcatgatggaggtcgagtcctcctactcggacttcatctcctgtgaccggacaggccgtcggaatgcggtccctgacatccagggagactcagaggctgtgagcgtgaggaagctggctggagacatgggcgagctggcactcgagggggcagaaggacaggtggagggaagcgccccagacaaggaagctggcaaccagccccagagcagcgatgggaccacctcgtcttgaatctgaccttgtccaagaaggctggacgagagaccttctgtcccctcccagagggggaaccctggcactggcccagcagcctcttctctgagctccatgtcccagataaaccaggccagactgagaaggctccccagaggcctctgtggcctccactccgggaaagccctctgcccacacccacaggcttcacattcccaccaccttcgcaccgtgcccaggtacactttcaagacactgtaaccacaagatgttatttattgagctggcgccgggacttgggcggggcctgccctacagtgagcagcccacacaggaacgctcctctcgcgagcggcccgggcagggaccctgtcccaacaccaacacctcctctccagcccaatcttctgggtccagacctgcttgtcccttttttagaaaacacttttaaactttttaaaaattttaaaccttttttcagcagatatggagagagctgacaatcaattcacattttttaagccattttagctaaactgtcattgtgcatctctgaggttccctcatggagctccacagatccatttttagggaagggattttggctcaaaacgatctgaccacctctgccctgtccaccaggataagtgacacctaggacccaggaaataaatgccgatgatttgtgtga

SEQ ID NO: 24257 - DNA, 2281 bp, Homo sapiens
  source 1..2281: mol_type = unassigned DNA
gggaatgacagtttgctgcagtcccgtcaatgggggaatctgcccgagctctgcctgcattttgagcagcaaagcagctccagccaccaagaccgttgcctgcgctgtcttaggccagcccatgctgtctgccagccgcttgttgcgctgccttggggactgggaacacacccagccccggtccccatctgttgcagacatgcagtggcagcagctcggagcacagccgaaccctagaaattgcctgtgctgaaggggctgggaaaccccttctctgatggacctttcgagtgaggcagcaggatttgtcagagctgggagtgccgcccgtccccgtcactcgcatcctgccatccagcagcttacaagcctgcactgcttattagcatctggaagagaagacctccaggaccccttggggctgagacctgagctccttcgccatgccgctcctggacggagacctggagggttccggaaagcattcctctcgaaaggtggacagccccttcggcccgggcagcccctccaaagggttcttctccagaggcccccagccccggccctccagccccatgtctgcacctgtgaggcccaagaccagccccggctctcccaaaaccgtgttcccgttctcctaccaggagtccccgccacgctcccctcgacgcatgagcttcagtgggatcttccgctcctcctccaaagagtcttcccccaactccaaccctgctacctcgcccgggggcatcaggtttttctcccgctccagaaaaacctccggcctctcctcctctccgtcaacacccacccaagtgaccaagcagcacacgtttcccctggaatcctataagcacgagcctgaacggttagagaatcgcatctatgcctcgtcttcccccccggacacagggcagaggttctgcccgtcttccttccagagcccgaccaggcctccactggcatcaccgacacactatgctccctccaaagccgcggcgctggcggcggccctgggacccgcggaagccggcatgctggagaagctggagttcgaggacgaagcagtagaagactcagaaagtggtgtttacatgcgattcatgaggtcacacaagtgttatgacatcgttccaaccagttcaaagcttgttgtctttgatactacattacaagttaaaaaggccttctttgctttggtagccaacggtgtccgagcagcgccactgtgggagagtaaaaaacaaagttttgtaggaatgctaacaattacagatttcataaatatactacatagatactataaatcacctatggtacagatttatgaattagaggaacataaaattgaaacatggagggagctttatttacaagaaacatttaagcctttagtgaatatatctccagatgcaagcctcttcgatgctgtatactccttgatcaaaaataaaatccacagattgcccgttattgaccctatcagtgggaatgcactttatatacttacccacaaaagaatcctcaagttcctccagctttttatgtctgatatgccaaagcctgccttcatgaagcagaacctggatgagcttggaataggaacgtaccacaacattgccttcatacatccagacactcccatcatcaaagccttgaacatatttgtggaaagacgaatatcagctctgcctgttgtggatgagtcaggaaaagttgtagatatttattccaaatttgatgtaattaatcttgctgctgagaaaacatacaataacctagatatcacggtgacccaggcccttcagcaccgttcacagtattttgaaggtgttgtgaagtgcaataagctggaaatactggagaccatcgtggacagaatagtaagagctgaggtccatcggctggtggtggtaaatgaagcagatagtattgtgggtattatttccctgtcggacattctgcaagccctgatcctcacaccagcaggtgccaaacaaaaggagacagaaacggagtgaccgccgtgaatgtagacgccctaggaggagaacttgaacaaagtctctgggtcacgttttgcctcatgaacactggctgcaagtggttaagaatgtatatcagggtttaacaataggtatttcttccagtgatgttgaaattaagcttaaaaaagaaagattttatgtgcttgaagattcaggcttgcattaaaagactgttttcagacctttgtctgaaggattttaaatgctgtatgtcattaaagtgcactgtgtcc

SEQ ID NO: 24258 - DNA, 2318 bp, Homo sapiens
  source 1..2318: mol_type = unassigned DNA
gcggccgcgccacctgcggcggcggcggcggcctcgggcgggtgggggcagcgctcccgctccgcccccggcccccgctgcccgcgtcccctgccaggcccctcctcccggcggcgcggcagagccaggccccagcgctcggccggccgcgagcccgccggccggggacgagcgtcgcagctcatgctgatcgctgtcctcctcctccccctcaggcggcgctggcggcggccctgggacccgcggaagccggcatgctggagaagctggagttcgaggacgaagcagtagaagactcagaaagtggtgtttacatgcgattcatgaggtcacacaagtgttatgacatcgttccaaccagttcaaagcttgttgtctttgatactacattacaagttaaaaaggccttctttgctttggtagccaacggtgtccgagcagcgccactgtgggagagtaaaaaacaaagttttgtaggaatgctaacaattacagatttcataaatatactacatagatactataaatcacctatggtacagatttatgaattagaggaacataaaattgaaacatggagggagctttatttacaagaaacatttaagcctttagtgaatatatctccagatgcaagcctcttcgatgctgtatactccttgatcaaaaataaaatccacagattgcccgttattgaccctatcagtgggaatgcactttatatacttacccacaaaagaatcctcaagttcctccagctttttatgtctgatatgccaaagcctgccttcatgaagcagaacctggatgagcttggaataggaacgtaccacaacattgccttcatacatccagacactcccatcatcaaagccttgaacatatttgtggaaagacgaatatcagctctgcctgttgtggatgagtcaggaaaagttgtagatatttattccaaatttgatgtaattaatcttgctgctgagaaaacatacaataacctagatatcacggtgacccaggcccttcagcaccgttcacagtattttgaaggtgttgtgaagtgcaataagctggaaatactggagaccatcgtggacagaatagtaagagctgaggtccatcggctggtggtggtaaatgaagcagatagtattgtgggtattatttccctgtcggacattctgcaagccctgatcctcacaccagcaggtgccaaacaaaaggagacagaaacggagtgaccgccgtgaatgtagacgccctaggaggagaacttgaacaaagtctctgggtcacgttttgcctcatgaacactggctgcaagtggttaagaatgtatatcagggtttaacaataggtatttcttccagtgatgttgaaattaagcttaaaaaagaaagattttatgtgcttgaagattcaggcttgcattaaaagactgttttcagacctttgtctgaaggattttaaatgctgtatgtcattaaagtgcactgtgtcctgaagttttcattatttttcatttcaaagaattcactggtatggaacaggtgatgtggcataaggtgagtgcacggtatgttcagatcacagtgccttatgtccgaatacagcaatatgtcaccgccgcagccggggcgcacgcgtgtgaaacaacaccgagcttgaatgtggaagtctttgaaccttttaccaaatcagtttgttttctttagatttgtcaaaaagttgtaatttgaatataaataattactttaaaattgtaatgacacttttacacgtaagtgttttgttctgggctaccgtgtcaacgaggctgctttacaacagctttatttatttttactttcatgcaatttttttacacatcttttggtggagtaaacttcaccacatccatgaataaactctcagttattttgaaatggcaaatttctcattatttaagtttggatctggaaaggacatgacttctgaaatagccgctgctgggttttaaaagctgaggtctctcaaagtgtggaggagacgttgccgtcaggcgggagccaagtgccgggaagatgtctattttttttcttgtgtattgaaatgtaaaatcatgatgtttgttatgactgctgatgcgattgtttttgtaaattttattgtggcatatacagtattgtcatacagttgaagagaaacaatgtttcctaatgtaagtgctctgaaaatgttgacactgtatatatatatatgaggatagtttgttttttttttgttttgggtttttttttttcagattgaaaaattaaaatagatcctactatctacca

SEQ ID NO: 24259 - DNA, 4229 bp, Homo sapiens
  source 1..4229: mol_type = unassigned DNA
agagcgacgcggtggcggcggcagcgccagccccctcctcccccgggaagtcggccgggcttgaggccgggccccagacgtcccgcttcgccccgagtcgccgccgatggtccccggagctcctgcccccagtgcatgagcagccgagcctgctaaccgcagctccgcacttgtccatccccctgcggctacaccatgtccagctcctacgatgaggcctcactggcgccagaggagaccaccgacagcttctgggaggtggggaactacaagcggaccgtgaagcgcatcgatgacggccaccgtctatgcaacgacctgatgaactgcgtgcaggagcgcgccaagatcgagaaggcgtacgggcagcagctcaccgactgggccaagcgttggcgccagctcatcgagaaaggcccacagtatggcagcctggagcgggcctggggtgccataatgacagaggcagacaaggtgagcgagctgcaccaggaggtgaagaacaatctgctgaatgaggacctggagaaggtgaagaactggcagaaggacgcctatcacaagcagatcatgggtggcttcaaggagacgaaggaggctgaagatggcttccgcaaggcccagaagccttgggccaagaagatgaaggagctggaggcagccaagaaggcctaccatttggcttgcaaagaggaaaagctggccatgacacgggagatgaacagcaagacggagcaatcggtcacacctgagcagcaaaagaagctgcaggacaaagtggacaagtgcaagcaggatgtgcagaagacacaggagaagtatgagaaagtgctggaagatgtgggcaagaccacaccccagtacatggagaacatggagcaggtgtttgagcaatgccagcaatttgaggaaaagcggctggtcttcctcaaggaggtgctgctggacatcaaacggcacctcaacctggctgagaacagcagctacatccatgtgtaccgtgagctggagcaggccatccggggggctgatgcccaggaagacctcagatggttccgcagcaccagtggccccggcatgcccatgaactggccccagtttgaggagtggaacccagaccttcctcacaccaccaccaagaaggagaaacagcctaagaaggcagagggagtggcgctgaccaatgccactggggcggtagagtccacatcccaggctggggaccgcggcagtgttagcagctacgacagaggccagccctacgccaccgagtggtcagacgacgagagtgggaacccctttgggggcagtgagaccaacgggggcgccaacccctttgaggacgactccaagggagtgcgcgtgcgggcactctacgactatgacggccaggagcaggacgagctcagctttaaggccggagacgaactcaccaagctgggcgaggaggatgagcagggctggtgccgtgggcggctggacagcgggcagctgggcctctaccctgccaactacgtggaggctatctagaggccccctccctccatactcccgtcactcctccccactgccgcccctcccctcccactctcgtctccttcccctcgccatagagttccagacatattttccgatcaagcttttatttttttaaaagtcaaaacagaacaaaacaaagtatgcagagacagagcatttgcagggccacctggaggctggggtgctggggcttggggtggccccagggtaggtaacagtcttaggacttagcccaacatcacaacatctgctcttcgggttccaccaaagagtctcctgagccctgagggatggatgtctcctgacccttccaccccgcctcactccctccgtcccactccactccaggctgccggcacctgccccattccctggcctggtttcctaacctcttcttcctcccctgccctgcttcccttcctccaccaccctgctctcaaaggcctcctctccagacccctggaagggaggcttccccatctttagttttccactctgccccggggagcacccttctactcctagccacgtcccttgggaccggtgggactggaggaggaacggtcaccctcctcccccatggaggtttccaggggtcccccagacatgaaagaggggtgagctggaggaagtcatggtgtcactggggtacaggagggtgaatgaagggcatgcaggccctcagcccgggctgtgccagccctcccagccccaggcccatctgagggaccaagacgctgttacgcaggcccttctttccagctatcagcactttcagcatcggctcttcagcagatccaaaccccctcagcaacttgcagaggacctgtcccctctcaaaagtcccctggcctagggtggggacccccaaacctacggcaaagccagcaacagtagcagcctgctcccatttgctggggaggagatcatcttgttcccctggccccccactctccctccatgtccatccaaaaaccataaaatcactgggttccacatcagcctccatgaggccaagccttgtacctgcaaggctcttggcctaaccattcctctgtcctcttctctggcctgcctggggagcccgtgaaggccgcacgggtgcctccagcctgagacatcaggggagagcctgcagctgagttcagcagaaaggaggaatcctggccctcaggaagaagatagtcacatgtttttcttccttgtccccacggcccccagaacaacattctccctgctggcagcccttccatgtctccaaacctgggtcagagtgaaaggacctttgggggtgggtgggagcaaagggcccacctgctggttggtgaaagcagtggtgccggagtgctaggtaccgcacgagagggtgcgggggcttgggaagcagaccagggttggacaaaaccccatgagggcggggagctggaagaaaagtctcttggggacctctggggcaaggagctgagaagtcctgcagcaccaggtgagacttgcttacagtggatgccacttctaggcctctggaccgcagatgccctcctccctcctgcacacctggcctcctgggcctccaggtaaagagagagagccagcccagccctgtttcccctcagtcctcctttgctcctgctgcttctcccaacagcccactgttaggaggtagtagaccccagcctcaaggctctgaccttcttcatgtgggcacagagggtcctgacactctggcagggcctgagctggggcaggcctccctcagggccaggggcgatggcaccccggggacaggcagacctccttcctgccgtcagcacccccttccttatcactgtctggtctccgagcttcggctgcagcctgaggtgtgtcctgggctcctcagagcctgaagcaagcttttggaagcctgcagtcctcccagctccagtgcagaagcctctctctccagcctttccccaggcaggagttggggttgggggcctctgtccctcatcgcttaccttggaaaggtgggaagctggcaatctgcaccttggggcctgggctccccctctctgtgccagcggcttcccagcacctgggaggggctgcagccccagctggactccagcctgtccctcttagcactctagctgcccactccagggcagggactcgaaaccccctccgtcctgagcagccacctccagggccctgtttgggaccactctctcagtccccaggtcctcagggccccagagcgggagggtctcctacctggaagtccccctgagctccagggcccagccctacctgccagtgctggtgtcagggcactcaacaccgagtgtgggggccacgccccttgccatgcccacggcctcctcctgtagctcctgcctgcacccacgatgctgcacgggcccgccctggtggggctcggcgagtaatgtgttttgtccccagttaaccaccattctgcggcctggttctgcaaggaaccagggctgccccaccgcccgccgtctgccgccctaggcttcctgactccattagttccgacacttgtgaaactccgagaagtgctgtggtctcagcaatgcacctgttttgtacatgattgtgtaatttaaaggtatataaatacaaatatatatatatatcagttgtgattgtatgactgtggataaaatccagaactgtgtcaacctggc

SEQ ID NO: 24260 - DNA, 1678 bp, Homo sapiens
  source 1..1678: mol_type = unassigned DNA
agttctggcgctgctgccttcctgagtgagcggtggagggaaccctagaggacagagcccccagcccggcagcaggccccctctccgcccgccaccacggaggagaaggaggacagccagcccctccagccctggcctggcccagcgggggcagtaagctcctacttgcccccagcttggtgcccacacgggcccagtgcatgagcagccgagcctgctaaccgcagctccgcacttgtccatccccctgcggctacaccatgtccagctcctacgatgaggcctcactggcgccagaggagaccaccgacagcttctgggaggtggggaactacaagcggaccgtgaagcgcatcgatgacggccaccgtctatgcaacgacctgatgaactgcgtgcaggagcgcgccaagatcgagaaggcgtacgggcagcagctcaccgactgggccaagcgttggcgccagctcatcgagaaaggcccacagtatggcagcctggagcgggcctggggtgccataatgacagaggcagacaaggtgagcgagctgcaccaggaggtgaagaacaatctgctgaatgaggacctggagaaggtgaagaactggcagaaggacgcctatcacaagcagatcatgggtggcttcaaggagacgaaggaggctgaagatggcttccgcaaggcccagaagccttgggccaagaagatgaaggagctggaggcagccaagaaggcctaccatttggcttgcaaagaggaaaagctggccatgacacgggagatgaacagcaagacggagcaatcggtcacacctgagcagcaaaagaagctgcaggacaaagtggacaagtgcaagcaggatgtgcagaagacacaggagaagtatgagaaagtgctggaagatgtgggcaagaccacaccccagtacatggagaacatggagcaggtgtttgagcaatgccagcaatttgaggaaaagcggctggtcttcctcaaggaggtgctgctggacatcaaacggcacctcaacctggctgagaacagcagctacatccatgtgtaccgtgagctggagcaggccatccggggggctgatgcccaggaagacctcagatggttccgcagcaccagtggccccggcatgcccatgaactggccccagtttgaggagtggaacccagaccttcctcacaccaccaccaagaaggagaaacagcctaagaaggcagagggagtggcgctgaccaatgccactggggcggtagagtccacatcccaggctggggaccgcggcagtgttagcagctacgacagaggccagccctacgccaccgagtggtcagacgacgagagtgggaacccctttgggggcagtgagaccaacgggggcgccaacccctttgaggacgactccaagggagtgcgcgtgcgggcactctacgactatgacggccaggagcaggacgagctcagctttaaggccggagacgaactcaccaagctgggcctctaccctgccaactacgtggaggctatctagaggccccctccctccatactcccgtcactcctccccactgccgcccctcccctcccactctcgtctccttcccctcgccattagttccgacacttgtgaaactccgagaagtgctgtggtctcagcaatgcacctgt

SEQ ID NO: 24261 - DNA, 4271 bp, Homo sapiens
  source 1..4271: mol_type = unassigned DNA
gccttcctgagtgagcggtggagggaaccctagaggacagagcccccagcccggcagcaggccccctctccgcccgccaccacggaggagaaggaggacagccagcccctccagccctggcctggcccagcgggggcagtaagctcctacttgcccccagcttggtgcccacacgggcccagtgcatgagcagccgagcctgctaaccgcagctccgcacttgtccatccccctgcggctacaccatgtccagctcctacgatgaggcctcactggcgccagaggagaccaccgacagcttctgggaggtggggaactacaagcggaccgtgaagcgcatcgatgacggccaccgtctatgcaacgacctgatgaactgcgtgcaggagcgcgccaagatcgagaaggcgtacgggcagcagctcaccgactgggccaagcgttggcgccagctcatcgagaaaggcccacagtatggcagcctggagcgggcctggggtgccataatgacagaggcagacaaggtgagcgagctgcaccaggaggtgaagaacaatctgctgaatgaggacctggagaaggtgaagaactggcagaaggacgcctatcacaagcagatcatgggtggcttcaaggagacgaaggaggctgaagatggcttccgcaaggcccagaagccttgggccaagaagatgaaggagctggaggcagccaagaaggcctaccatttggcttgcaaagaggaaaagctggccatgacacgggagatgaacagcaagacggagcaatcggtcacacctgagcagcaaaagaagctgcaggacaaagtggacaagtgcaagcaggatgtgcagaagacacaggagaagtatgagaaagtgctggaagatgtgggcaagaccacaccccagtacatggagaacatggagcaggtgtttgagcaatgccagcaatttgaggaaaagcggctggtcttcctcaaggaggtgctgctggacatcaaacggcacctcaacctggctgagaacagcagctacatccatgtgtaccgtgagctggagcaggccatccggggggctgatgcccaggaagacctcagatggttccgcagcaccagtggccccggcatgcccatgaactggccccagtttgaggagtggaacccagaccttcctcacaccaccaccaagaaggagaaacagcctaagaaggcagagggagtggcgctgaccaatgccactggggcggtagagtccacatcccaggctggggaccgcggcagtgttagcagctacgacagaggccagccctacgccaccgagtggtcagacgacgagagtgggaacccctttgggggcagtgagaccaacgggggcgccaacccctttgaggacgactccaagggagtgcgcgtgcgggcactctacgactatgacggccaggagcaggacgagctcagctttaaggccggagacgaactcaccaagctgggcgaggaggatgagcagggctggtgccgtgggcggctggacagcgggcagctgggcctctaccctgccaactacgtggaggctatctagaggccccctccctccatactcccgtcactcctccccactgccgcccctcccctcccactctcgtctccttcccctcgccatagagttccagacatattttccgatcaagcttttatttttttaaaagtcaaaacagaacaaaacaaagtatgcagagacagagcatttgcagggccacctggaggctggggtgctggggcttggggtggccccagggtaggtaacagtcttaggacttagcccaacatcacaacatctgctcttcgggttccaccaaagagtctcctgagccctgagggatggatgtctcctgacccttccaccccgcctcactccctccgtcccactccactccaggctgccggcacctgccccattccctggcctggtttcctaacctcttcttcctcccctgccctgcttcccttcctccaccaccctgctctcaaaggcctcctctccagacccctggaagggaggcttccccatctttagttttccactctgccccggggagcacccttctactcctagccacgtcccttgggaccggtgggactggaggaggaacggtcaccctcctcccccatggaggtttccaggggtcccccagacatgaaagaggggtgagctggaggaagtcatggtgtcactggggtacaggagggtgaatgaagggcatgcaggccctcagcccgggctgtgccagccctcccagccccaggcccatctgagggaccaagacgctgttacgcaggcccttctttccagctatcagcactttcagcatcggctcttcagcagatccaaaccccctcagcaacttgcagaggacctgtcccctctcaaaagtcccctggcctagggtggggacccccaaacctacggcaaagccagcaacagtagcagcctgctcccatttgctggggaggagatcatcttgttcccctggccccccactctccctccatgtccatccaaaaaccataaaatcactgggttccacatcagcctccatgaggccaagccttgtacctgcaaggctcttggcctaaccattcctctgtcctcttctctggcctgcctggggagcccgtgaaggccgcacgggtgcctccagcctgagacatcaggggagagcctgcagctgagttcagcagaaaggaggaatcctggccctcaggaagaagatagtcacatgtttttcttccttgtccccacggcccccagaacaacattctccctgctggcagcccttccatgtctccaaacctgggtcagagtgaaaggacctttgggggtgggtgggagcaaagggcccacctgctggttggtgaaagcagtggtgccggagtgctaggtaccgcacgagagggtgcgggggcttgggaagcagaccagggttggacaaaaccccatgagggcggggagctggaagaaaagtctcttggggacctctggggcaaggagctgagaagtcctgcagcaccaggtgagacttgcttacagtggatgccacttctaggcctctggaccgcagatgccctcctccctcctgcacacctggcctcctgggcctccaggtaaagagagagagccagcccagccctgtttcccctcagtcctcctttgctcctgctgcttctcccaacagcccactgttaggaggtagtagaccccagcctcaaggctctgaccttcttcatgtgggcacagagggtcctgacactctggcagggcctgagctggggcaggcctccctcagggccaggggcgatggcaccccggggacaggcagacctccttcctgccgtcagcacccccttccttatcactgtctggtctccgagcttcggctgcagcctgaggtgtgtcctgggctcctcagagcctgaagcaagcttttggaagcctgcagtcctcccagctccagtgcagaagcctctctctccagcctttccccaggcaggagttggggttgggggcctctgtccctcatcgcttaccttggaaaggtgggaagctggcaatctgcaccttggggcctgggctccccctctctgtgccagcggcttcccagcacctgggaggggctgcagccccagctggactccagcctgtccctcttagcactctagctgcccactccagggcagggactcgaaaccccctccgtcctgagcagccacctccagggccctgtttgggaccactctctcagtccccaggtcctcagggccccagagcgggagggtctcctacctggaagtccccctgagctccagggcccagccctacctgccagtgctggtgtcagggcactcaacaccgagtgtgggggccacgccccttgccatgcccacggcctcctcctgtagctcctgcctgcacccacgatgctgcacgggcccgccctggtggggctcggcgagtaatgtgttttgtccccagttaaccaccattctgcggcctggttctgcaaggaaccagggctgccccaccgcccgccgtctgccgccctaggcttcctgactccattagttccgacacttgtgaaactccgagaagtgctgtggtctcagcaatgcacctgttttgtacatgattgtgtaatttaaaggtatataaatacaaatatatatatatatcagttgtgattgtatgactgtggataaaatccagaactgtgtc

SEQ ID NO: 24262 - DNA, 1843 bp, Homo sapiens
  source 1..1843: mol_type = unassigned DNA
aggactcgggccggagcgtggccggacccccacccgccgaggggcccagggaggacgcggcagagtcacggtggcagcattgagagttggacacccgggtccttgaagtgatctctaggccccagccccaaatccgccaccattccgtgctgcggggacaccatggctccagaagaggacgctggaggggaggccttagggggcagtttctgggaggctggcaactacaggcgcacggtacagcgggtggaggacgggcaccggctgtgcggggacctggtcagctgcttccaggagcgcgcccgcatcgagaaggcttatgcccagcagttggctgactgggcccgaaagtggagggggaccgtggagaagggcccccagtatggcacactggagaaggcctggcatgcctttttcacggcggctgagcggctgagcgcgctgcacctggaggtgcgggagaagctgcaagggcaggacagtgagcgggtgcgcgcctggcagcggggggctttccaccggcctgtgctgggcggcttccgcgagagccgggcggccgaggacggcttccgcaaggcccagaagccctggctgaagaggctgaaggaggttgaggcttccaagaaaagctaccacgcagcccggaaggatgagaagaccgcccagacgagggagagccacgcaaaggcagacagcgccgtctcccaggagcagctgcgcaaactgcaggaacgggtggaacgctgtgccaaggaggccgagaagacaaaagctcagtatgagcagacgctggcagagctgcatcgctacactccacgctacatggaggacatggaacaggcctttgagacctgccaggccgccgagcgccagcggcttcttttcttcaaggatatgctgctcaccttacaccagcacctggacctttccagcagtgagaagttccatgaactccaccgtgacttgcaccagggcattgaggcagccagtgacgaagaggatctgcgctggtggcgcagcacccacgggccaggcatggccatgaactggccacagttcgaggagtggtccttggacacacagaggacaatcagccggaaagagaagggtggccggagccctgatgaggttaccctgaccagcattgtgcctacaagagatggcaccgcacccccaccccagtccccggggtccccaggcacggggcaggatgaggagtggtcagatgaagagagtccccggaaggctgccaccggggttcgggtgagggcactctatgactacgctggccaggaagctgatgagctgagcttccgagcaggggaggagctgctgaagatgagtgaggaggacgagcagggctggtgccaaggccagttgcagagtggccgcattggcctgtaccctgccaactacgtggagtgtgtgggcgcctgagtgtcctgacagcccttctgcaacgtttacccaccctggttcagagcccagcttctcctggagagccggaccctcagggccctgaaccgtcgctctctggctgctcctctgtcccttgagggaggaagtcctgggacccagggaggggaggggcctttgtctagggaagggactggtagggaagggacgagtctaggctgagggcaagatgggaggtcagaggtgacagaagcgttcaggggtgcctgggcctccccaggagctgtggactcagttcctgacctctgctttggggttcctggggtgggcttggggtgagtgtagttctggcctagcagcaccctcttgtggcttgttctagcgtgtattaaaacttgacacacacccacacacaaaaacaaaaaca

SEQ ID NO: 24263 - DNA, 1832 bp, Homo sapiens
  source 1..1832: mol_type = unassigned DNA
aggactcgggccggagcgtggccggacccccacccgccgaggggcccagggaggacgcggcagagtcacggtggcagcattgagagttggacacccgggtccttgaagtgatctctaggccccagccccaaatccgccaccattccgtgctgcggggacaccatggctccagaagaggacgctggaggggaggccttagggggcagtttctgggaggctggcaactacaggcgcacggtacagcgggtggaggacgggcaccggctgtgcggggacctggtcagctgcttccaggagcgcgcccgcatcgagaaggcttatgcccagcagttggctgactgggcccgaaagtggagggggaccgtggagaagggcccccagtatggcacactggagaaggcctggcatgcctttttcacggcggctgagcggctgagcgcgctgcacctggaggtgcgggagaagctgcaagggcaggacagtgagcgggtgcgcgcctggcagcggggggctttccaccggcctgtgctgggcggcttccgcgagagccgggcggccgaggacggcttccgcaaggcccagaagccctggctgaagaggctgaaggaggttgaggcttccaagaaaagctaccacgcagcccggaaggatgagaagaccgcccagacgagggagacgcaaaggcagacagcgccgtctcccaggagcagctgcgcaaactgcaggaacgggtggaacgctgtgccaaggaggccgagaagacaaaagctcagtatgagcagacgctggcagagctgcatcgctacactccacgctacatggaggacatggaacaggcctttgagacctgccaggccgccgagcgccagcggcttcttttcttcaaggatatgctgctcaccttacaccagcacctggacctttccagcagtgagaagttccatgaactccaccgtgacttgcaccagggcattgaggcagccagtgacgaagaggatctgcgctggtggcgcagcacccacgggccaggcatggccatgaactggccacagttcgaggagtggtccttggacacacagaggacaatcagccggaaagagaagggtggccggagccctgatgaggttaccctgaccagcattgtgcctacaagagatggcaccgcacccccaccccagtccccggggtccccaggcacggggcaggatgaggagtggtcagatgaagagagtccccggaaggctgccaccggggttcgggtgagggcactctatgactacgctggccaggaagctgatgagctgagcttccgagcaggggaggagctgctgaagatgagtgaggaggacgagcagggctggtgccaaggccagttgcagagtggccgcattggcctgtaccctgccaactacgtggagtgtgtgggcgcctgagtgtcctgacagcccttctgcaacgtttacccaccctggttcagagcccagcttctcctggagagccggaccctcagggccctgaaccgtcgctctctggctgctcctctgtcccttgagggaggaagtcctgggacccagggaggggaggggcctttgtctagggaagggactggtagggaagggacgagtctaggctgagggcaagatgggaggtcagaggtgacagaagcgttcaggggtgcctgggcctccccaggagctgtggactcagttcctgacctctgctttggggttcctggggtgggcttggggtgagtgtagttctggcctagcagcaccctcttgtggcttgttctagcgtgtattaaaacttgacacacacccacacacaaaaac

SEQ ID NO: 24264 - DNA, 554 bp, Homo sapiens
  source 1..554: mol_type = unassigned DNA
agcggcaggactcgggccggagcgtggccggacccccacccgccgaggggcccagggaggacgcgcgcgtggggacacacaaatcagaatcctggaagcctctgtcggtgactgaagatagacactgtcctgtcagccacaactccatgggttatacaccccggctgaagggtcacccggggctacaggagcaaggacagagaaacaggggaagtgactgaggagaagatgccttaattggaggcagagtcacggtggcagcattgagagttggacacccgggtccttgaagtgatctctaggccccagccccaaatccgccaccattccgtgctgcggggacaccatggctccagaagaggacgctggaggggaggccttagggggcagtttctgggaggctggcaactacaggcgcacggtacagcgggtggaggacgggcaccggctgtgcggggacctggtcagctgcttccaggagcgcgcccgcatcgagaaggcttatgcccagcagttggctgactgggcccgaaagtggagggggaccgtggaga

SEQ ID NO: 24265 - DNA, 683 bp, Homo sapiens
  source 1..683: mol_type = unassigned DNA
aggggctgcccgggaaagaagcccttgggcgcagcctgtgactcaggttccagggatgggccaggcagaatggctgagctccctcccaggggcaagcccccagcttctggaagaggttggggctggtctggggccgggtaccttcaggcctcaggcagagtcacggtggcagcattgagagttggacacccgggtccttgaagtgatctctaggccccagccccaaatccgccaccattccgtgctgcggggacaccatggctccagaagaggacgctggaggggaggccttagggggcagtttctgggaggctggcaactacaggcgcacggtacagcgggtggaggacgggcaccggctgtgcggggacctggtcagctgcttccaggagcgcgcccgcatcgagaaggcttatgcccagcagttggctgactgggcccgaaagtggagggggaccgtggagaagggcccccagtatggcacactggagaaggcctggcatgcctttttcacggcggctgagcggctgagcgcgctgcacctggaggtgcgggagaagctgcaagggcaggacagtgagcgggtgcgcgcctggcagcggggggctttccaccggcctgtgctgggcggcttccgcgagagccgggcggccgaggacggcttccgcaaggcccagaagccc

SEQ ID NO: 24266 - DNA, 1560 bp, Homo sapiens
  source 1..1560: mol_type = unassigned DNA
aagaccaagttcaacaagtttggccaagaagtctagagcttcggtggctaggcctggccctgccgctccgcgtggctccacgggctccgagttatgcagctccgggcggcaaggggtcctgtcgaggggcgcggtccataagggttgaggccagaggcgcgtagcctctgggcgccgagctctggagtggaggctggggttcggagtgcgtcatctggaagcaggcaccccggccggcaggcagagtcacggtggcagcattgagagttggacacccgggtccttgaagtgatctctaggccccagccccaaatccgccaccattccgtgctgcggggacaccatggctccagaagaggacgctggaggggaggccttagggggcagtttctgggaggctggcaactacaggcgcacggtacagcgggtggaggacgggcaccggctgtgcggggacctggtcagctgcttccaggagcgcgcccgcatcgagaaggcttatgcccagcagttggctgactgggcccgaaagtggagggggaccgtggagaagggcccccagtatggcacactggagaaggcctggcatgcctttttcacggcggctgagcggctgagcgcgctgcacctggaggtgcgggagaagctgcaagggcaggacagtgagcgggtgcgcgcctggcagcggggggctttccaccggcctgtgctgggcggcttccgcgagagccgggcggccgaggacggcttccgcaaggcccagaagccctggctgaagaggctgaaggaggttgaggcttccaagaaaagctaccacgcagcccggaaggatgagaagaccgcccagacgagggagagccacgcaaaggcagacagcgccgtctcccaggagcagctgcgcaaactgcaggaacgggtggaacgctgtgccaaggaggccgagaagacaaaagctcagtatgagcagacgctggcagagctgcatcgctacactccacgctacatggaggacatggaacaggcctttgagacctgccaggccgccgagcgccagcggcttcttttcttcaaggatatgctgctcaccttacaccagcacctggacctttccagcagtgagaagttccatgaactccaccgtgacttgcaccagggcattgaggcagccagtgacgaagaggatctgcgctggtggcgcagcacccacgggccaggcatggccatgaactggccacagttcgaggagtggtccttggacacacagaggacaatcagccggaaagagaagggtggccggagccctgatgaggttaccctgaccagcattgtgcctacaagagatggcaccgcacccccaccccagtccccggggtccccaggcacggggcaggatgaggagtggtcagatgaagagagtccccggaaggctgccaccggggttcgggtgagggcactctatgactacgctggccaggaagctgatgagctgagcttccgagcaggggaggagctgctgaagatgagtgaggaggacgagcagggctggtgccaaggccagtt

SEQ ID NO: 24267 - DNA, 563 bp, Homo sapiens
  source 1..563: mol_type = unassigned DNA
gtcactcaagggaaggcaacagaggccctagcctgggcaggagtcctctcatcggcagttgggggagtggggccttctgcccaccgcccacccccgcctgccatttaatccctggctggatcgtgtgacctgcctggcattctcctccctggaatccggcgcttctgacagcagttgctatattgggggtgccgggcaccgccctggacgctctaggcccccaccctcacccccgctctgttctccttcaaggcagagtcacggtggcagcattgagagttggacacccgggtccttgaagtgatctctaggccccagccccaaatccgccaccattccgtgctgcggggacaccatggctccagaagaggacgctggaggggaggccttagggggcagtttctgggaggctggcaactacaggcgcacggtacagcgggtggaggacgggcaccggctgtgcggggacctggtcagctgcttccaggagcgcgcccgcatcgagaaggcttatgcccagcagttggctgactgggcccgaaagtggagggggaccgtggaga

SEQ ID NO: 24268 - DNA, 654 bp, Homo sapiens
  source 1..654: mol_type = unassigned DNA
gcaggactcgggccggagcgtggccggacccccacccgccgaggggcccagggaggacgcggcagagtcacggtggcagcattgagagttggacacccgggtccttgaagtgatctctaggccccagaaacataatgtccagctttcctgcttacccctctgccctccacagccccaaatccgccaccattccgtgctgcggggacaccatggctccagaagaggacgctggaggggaggccttagggggcagtttctgggaggctggcaactacaggcgcacggtacagcgggtggaggacgggcaccggctgtgcggggacctggtcagctgcttccaggagcgcgcccgcatcgagaaggcttatgcccagcagttggctgactgggcccgaaagtggagggggaccgtggagaagggcccccagtatggcacactggagaaggcctggcatgcctttttcacggcggctgagcggctgagcgcgctgcacctggaggtgcgggagaagctgcaagggcaggacagtgagcgggtgcgcgcctggcagcggggggctttccaccggcctgtgctgggcggcttccgcgagagccgggcggccgaggacggcttccgcaaggcccagaagccctggctgaagaggctgaagg

SEQ ID NO: 24269 - DNA, 2009 bp, Homo sapiens
  source 1..2009: mol_type = unassigned DNA
aagaccaagttcaacaagtttggccaagaagtctagagcttcggtggctaggcctggccctgccgctccgcgtggctccacgggctccgagttatgcagctccgggcggcaaggggtcctgtcgaggggcgcggtccataagggttgaggccagaggcgcgtagcctctgggcgccgagctctggagtggaggctggggttcggagtgcgtcatctggaagcaggcaccccggccggcaggcagagtcacggtggcagcattgagagttggacacccgggtccttgaagtgatctctaggccccagccccaaatccgccaccattccgtgctgcggggacaccatggctccagaagaggacgctggaggggaggccttagggggcagtttctgggaggctggcaactacaggcgcacggtacagcgggtggaggacgggcaccggctgtgcggggacctggtcagctgcttccaggagcgcgcccgcatcgagaaggcttatgcccagcagttggctgactgggcccgaaagtggagggggaccgtggagaagggcccccagtatggcacactggagaaggcctggcatgcctttttcacggcggctgagcggctgagcgcgctgcacctggaggtgcgggagaagctgcaagggcaggacagtgagcgggtgcgcgcctggcagcggggggctttccaccggcctgtgctgggcggcttccgcgagagccgggcggccgaggacggcttccgcaaggcccagaagccctggctgaagaggctgaaggaggttgaggcttccaagaaaagctaccacgcagcccggaaggatgagaagaccgcccagacgagggagagccacgcaaaggcagacagcgccgtctcccaggagcagctgcgcaaactgcaggaacgggtggaacgctgtgccaaggaggccgagaagacaaaagctcagtatgagcagacgctggcagagctgcatcgctacactccacgctacatggaggacatggaacaggcctttgagacctgccaggccgccgagcgccagcggcttcttttcttcaaggatatgctgctcaccttacaccagcacctggacctttccagcagtgagaagttccatgaactccaccgtgacttgcaccagggcattgaggcagccagtgacgaagaggatctgcgctggtggcgcagcacccacgggccaggcatggccatgaactggccacagttcgaggagtggtccttggacacacagaggacaatcagccggaaagagaagggtggccggagccctgatgaggttaccctgaccagcattgtgcctacaagagatggcaccgcacccccaccccagtccccggggtccccaggcacggggcaggatgaggagtggtcagatgaagagagtccccggaaggctgccaccggggttcgggtgagggcactctatgactacgctggccaggaagctgatgagctgagcttccgagcaggggaggagctgctgaagatgagtgaggaggacgagcagggctggtgccaaggccagttgcagagtggccgcattggcctgtaccctgccaactacgtggagtgtgtgggcgcctgagtgtcctgacagcccttctgcaacgtttacccaccctggttcagagcccagcttctcctggagagccggaccctcagggccctgaaccgtcgctctctggctgctcctctgtcccttgagggaggaagtcctgggacccagggaggggaggggcctttgtctagggaagggactggtagggaagggacgagtctaggctgagggcaagatgggaggtcagaggtgacagaagcgttcaggggtgcctgggcctccccaggagctgtggactcagttcctgacctctgctttggggttcctggggtgggcttggggtgagtgtagttctggcctagcagcaccctcttgtggcttgttctagcgtgtattaaaacttgacacacacccacac

SEQ ID NO: 24270 - DNA, 2262 bp, Homo sapiens
  source 1..2262: mol_type = unassigned DNA
gctgcgccgccattaagagctagccctcagaactatcctctctaaggtttcacagtcctgcccaagatggccgtctcggctctggcaccgcccccactcctgcctctcccaacatggcgaccctgagtctccgttcccggtgcggaacgtacgaccggaagtgacggggtccagaaatttccgctttctttctgcagcaggaaccgcggctgctggacaagaggggtgcggtggatactgacctttgctccggcctcgtcgtgaagacacagcgcatctccccgctgtaggcttcctcccacagaacccgtttcgggcctcagagcgtctggtgagatgctgttgccgctgctgctgctgctacccatgtgctgggccgtggaggtcaagaggccccggggcgtctccctcaccaatcatcacttctacgatgagtccaagcctttcacctgcctggacggttcggccaccatcccatttgatcaggtcaacgatgactattgcgactgcaaagatggctctgacgagccaggcacggctgcctgtcctaatggcagcttccactgcaccaacactggctataagcccctgtatatcccctccaaccgggtcaacgatggtgtttgtgactgctgcgatggaacagacgagtacaacagcggcgtcatctgtgagaacacctgcaaagagaagggccgtaaggagagagagtccctgcagcagatggccgaggtcacccgcgaagggttccgtctgaagaagatccttattgaggactggaagaaggcacgggaggagaagcagaaaaagctcattgagctacaggctgggaagaagtctctggaagaccaggtggagatgctgcggacagtgaaggaggaagctgagaagccagagagagaggccaaagagcagcaccagaagctgtgggaagagcagctggctgctgccaaggcccaacaggagcaggagctggcggctgatgccttcaaggagctggatgatgacatggacgggacggtctcggtgactgagctgcagactcacccggagctggacacagatggggatggggcgttgtcagaagcggaagctcaggccctcctcagtggggacacacagacagacgccacctctttctacgaccgcgtctgggccgccatcagggacaagtaccggtccgaggcactgcccaccgaccttccagcaccttctgcccctgacttgacggagcccaaggaggagcagccgccagtgccctcgtcgcccacagaggaggaggaggaggaggaggaggaggaggaagaagaggctgaagaagaggaggaggaggaggattccgaggaggccccaccgccactgtcacccccgcagccggccagccctgctgaggaagacaaaatgccgccctacgacgagcagacgcaggccttcatcgatgctgcccaggaggcccgcaacaagttcgaggaggccgagcggtcgctgaaggacatggaggagtccatcaggaacctggagcaagagatttcttttgactttggccccaacggggagtttgcttacctgtacagccagtgctacgagctcaccaccaacgaatacgtctaccgcctctgccccttcaagcttgtctcgcagaaacccaaactcgggggctctcccaccagccttggcacctggggctcatggattggccccgaccacgacaagttcagtgccatgaagtatgagcaaggcacgggctgctggcagggccccaaccgctccaccaccgtgcgcctcctgtgcgggaaagagaccatggtgaccagcaccacagagcccagtcgctgcgagtacctcatggagctgatgacgccagccgcctgcccggagccaccgcctgaagcacccaccgaagacgaccatgacgagctctagctggatgggcgcagagaacctcaagaaggcatgaagccagcccctgcagtgccgtccacccgcccctctgggcctgcctgtggctctgttgccctcctctgtggcggcaggacctttgtggggcttcgtgccctgctctggggcccaggcggggctggtccacattcccaggccccaacagccttcaaagatgggtaaaggagcttgccctccctgggccccccaccttggtgactcgccccaccacccccagccctgtccctgccacccctcctagtggggactagtgaatgacttgacctgtgacctcaatacaataaatgtgatcccccacccaaa

SEQ ID NO: 24271 - DNA, 2253 bp, Homo sapiens
  source 1..2253: mol_type = unassigned DNA
gctgcgccgccattaagagctagccctcagaactatcctctctaaggtttcacagtcctgcccaagatggccgtctcggctctggcaccgcccccactcctgcctctcccaacatggcgaccctgagtctccgttcccggtgcggaacgtacgaccggaagtgacggggtccagaaatttccgctttctttctgcagcaggaaccgcggctgctggacaagaggggtgcggtggatactgacctttgctccggcctcgtcgtgaagacacagcgcatctccccgctgtaggcttcctcccacagaacccgtttcgggcctcagagcgtctggtgagatgctgttgccgctgctgctgctgctacccatgtgctgggccgtggaggtcaagaggccccggggcgtctccctcaccaatcatcacttctacgatgagtccaagcctttcacctgcctggacggttcggccaccatcccatttgatcaggtcaacgatgactattgcgactgcaaagatggctctgacgagccaggcacggctgcctgtcctaatggcagcttccactgcaccaacactggctataagcccctgtatatcccctccaaccgggtcaacgatggtgtttgtgactgctgcgatggaacagacgagtacaacagcggcgtcatctgtgagaacacctgcaaagagaagggccgtaaggagagagagtccctgcagcagatggccgaggtcacccgcgaagggttccgtctgaagaagatccttattgaggactggaagaaggcacgggaggagaagcagaaaaagctcattgagctacaggctgggaagaagtctctggaagaccaggtggagatgctgcggacagtgaaggaggaagctgagaagccagagagagaggccaaagagcagcaccagaagctgtgggaagagcagctggctgctgccaaggcccaacaggagcaggagctggcggctgatgccttcaaggagctggatgatgacatggacgggacggtctcggtgactgagctgcagactcacccggagctggacacagatggggatggggcgttgtcagaagcggaagctcaggccctcctcagtggggacacacagacagacgccacctctttctacgaccgcgtctgggccgccatcagggacaagtaccggtccgaggcactgcccaccgaccttccagcaccttctgcccctgacttgacggagcccaaggaggagcagccgccagtgccctcgtcgcccacagaggaggaggaggaggaggaggaggaggaggaagaagaggctgaagaagaggaggaggaggaggattccgaggtgcagggggagcagcccaagccggccagccctgctgaggaagacaaaatgccgccctacgacgagcagacgcaggccttcatcgatgctgcccaggaggcccgcaacaagttcgaggaggccgagcggtcgctgaaggacatggaggagtccatcaggaacctggagcaagagatttcttttgactttggccccaacggggagtttgcttacctgtacagccagtgctacgagctcaccaccaacgaatacgtctaccgcctctgccccttcaagcttgtctcgcagaaacccaaactcgggggctctcccaccagccttggcacctggggctcatggattggccccgaccacgacaagttcagtgccatgaagtatgagcaaggcacgggctgctggcagggccccaaccgctccaccaccgtgcgcctcctgtgcgggaaagagaccatggtgaccagcaccacagagcccagtcgctgcgagtacctcatggagctgatgacgccagccgcctgcccggagccaccgcctgaagcacccaccgaagacgaccatgacgagctctagctggatgggcgcagagaacctcaagaaggcatgaagccagcccctgcagtgccgtccacccgcccctctgggcctgcctgtggctctgttgccctcctctgtggcggcaggacctttgtggggcttcgtgccctgctctggggcccaggcggggctggtccacattcccaggccccaacagccttcaaagatgggtaaaggagcttgccctccctgggccccccaccttggtgactcgccccaccacccccagccctgtccctgccacccctcctagtggggactagtgaatgacttgacctgtgacctcaatacaataaatgtgatcccccacccaaa

SEQ ID NO: 24272 - DNA, 2680 bp, Homo sapiens
  source 1..2680: mol_type = unassigned DNA
ccgccccctcgcacttccgtgtgccgcggcgccggagcccgaggcggctgtagcccacatctcccgagcgacccccggcgcccgcccgccgcgcggaggcccgggccacacctcactggccgcttggcccatcccagtcagcgccgcgccgaaccccgtccgcgcgcgccggggagcggcgcccccgccgctgccgccgcgacccttggcgcctgcccctgcaacgggaggtctgcagggaactggccaggcaagggggcaggcccgtttctcctggtggttggtgcgttgtagcagcagcgggagccaggactaaggacaagcaggagctgggagccccagccccactgcaggccccaccatggcgccgttcctgcgcatcgccttcaactcctatgagctgggctccctgcaggccgaggacgaggcgaaccagcccttctgtgccgtgaagatgaaggaggcgctcagcacagagcgtgggaaaacactggtgcagaagaagccgaccatgtatcctgagtggaagtcgacgttcgatgcccacatctatgaggggcgcgtcatccagattgtgctaatgcgggcagcagaggagccagtgtctgaggtgaccgtgggtgtgtcggtgctggccgagcgctgcaagaagaacaatggcaaggctgagttctggctggacctgcagcctcaggccaaggtgttgatgtctgttcagtatttcctggaggacgtggattgcaaacagtctatgcgcagtgaggacgaggccaagttcccaacgatgaaccgccgcggagccatcaaacaggccaaaatccactacatcaagaaccatgagtttatcgccaccttctttgggcaacccaccttctgttctgtgtgcaaagactttgtctggggcctcaacaagcaaggctacaaatgcaggcaatgtaacgctgccatccacaagaaatgcatcgacaagatcatcggcagatgcactggcaccgcggccaacagccgggacactatattccagaaagaacgcttcaacatcgacatgccgcaccgcttcaaggttcacaactacatgagccccaccttctgtgaccactgcggcagcctgctctggggactggtgaagcagggattaaagtgtgaagactgcggcatgaatgtgcaccataaatgccgggagaaggtggccaacctctgcggcatcaaccagaagcttttggctgaggccttgaaccaagtcacccagagagcctcccggagatcagactcagcctcctcagagcctgttgggatatatcagggtttcgagaagaagaccggagttgctggggaggacatgcaagacaacagtgggacctacggcaagatctgggagggcagcagcaagtgcaacatcaacaacttcatcttccacaaggtcctgggcaaaggcagcttcgggaaggtgctgcttggagagctgaagggcagaggagagtactttgccatcaaggccctcaagaaggatgtggtcctgatcgacgacgacgtggagtgcaccatggttgagaagcgggtgctgacacttgccgcagagaatccctttctcacccacctcatctgcaccttccagaccaaggaccacctgttctttgtgatggagttcctcaacgggggggacctgatgtaccacatccaggacaaaggccgctttgaactctaccgtgccacgttttatgccgctgagataatgtgtggactgcagtttctacacagcaagggcatcatttacagggacctcaaactggacaatgtgctgctggaccgggatggccacatcaagattgccgactttgggatgtgcaaagagaacatattcggggagagccgggccagcaccttctgcggcacccctgactatatcgcccctgagatcctacagggcctgaagtacacattctctgtggactggtggtctttcggggtccttctgtacgagatgctcattggccagtcccccttccatggtgatgatgaggatgaactcttcgagtccatccgtgtggacacgccacattatccccgctggatcaccaaggagtccaaggacatcctggagaagctctttgaaagggaaccaaccaagaggctgggagtgaccggaaacatcaaaatccaccccttcttcaagaccataaactggactctgctggaaaagcggaggttggagccacctttcaggcccaaagtgaagtcacccagagactacagtaactttgaccaggagttcctgaacgagaaggcgcgcctctcctacagcgacaagaacctcatcgactccatggaccagtctgcattcgctggcttctcctttgtgaaccccaaattcgagcacctcctggaagattgaggttcctggacagatcaggctagccctgccctccacccacacctgcccgctccccacgataagcaccagtgggactgtggtgacttctgctgctggccccgcccctgcccccagagcgtccttggctgccgtctggccgggctctcatggtacttcctctgtgaactgtgtgtgaatctgcttttcctctgccttcggagggaaattgtaaatcctgtgtttcattacttgaatgtagttatctattgaaaatatatattatatacatagacatatatatatatataa

SEQ ID NO: 24273 - DNA, 2810 bp, Homo sapiens
  source 1..2810: mol_type = unassigned DNA
ggcctggcagggcgaggcctggcgggggcggggcctggcgggggcggggccggcggcacctgggtgaggtcgctcggccccgccccctcgcacttccgtgtgccgcggcgccggagcccgaggcggctgtagcccacatctcccgagcgacccccggcgcccgcccgccgcgcggaggcccgggccacacctcactggccgcttggcccatcccagtcagcgccgcgccgaaccccgtccgcgcgcgccggggagcggcgcccccgccgctgccgccgcgacccttggcgcctgcccctgcaacgggagccccactgcaggccccaccatggcgccgttcctgcgcatcgccttcaactcctatgagctgggctccctgcaggccgaggacgaggcgaaccagcccttctgtgccgtgaagatgaaggaggcgctcagcacagagcgtgggaaaacactggtgcagaagaagccgaccatgtatcctgagtggaagtcgacgttcgatgcccacatctatgaggggcgcgtcatccagattgtgctaatgcgggcagcagaggagccagtgtctgaggtgaccgtgggtgtgtcggtgctggccgagcgctgcaagaagaacaatggcaaggctgagttctggctggacctgcagcctcaggccaaggtgttgatgtctgttcagtatttcctggaggacgtggattgcaaacagtctatgcgcagtgaggacgaggccaagttcccaacgatgaaccgccgcggagccatcaaacaggccaaaatccactacatcaagaaccatgagtttatcgccaccttctttgggcaacccaccttctgttctgtgtgcaaagactttgtctggggcctcaacaagcaaggctacaaatgcaggcaatgtaacgctgccatccacaagaaatgcatcgacaagatcatcggcagatgcactggcaccgcggccaacagccgggacactatattccagaaagaacgcttcaacatcgacatgccgcaccgcttcaaggttcacaactacatgagccccaccttctgtgaccactgcggcagcctgctctggggactggtgaagcagggattaaagtgtgaagactgcggcatgaatgtgcaccataaatgccgggagaaggtggccaacctctgcggcatcaaccagaagcttttggctgaggccttgaaccaagtcacccagagagcctcccggagatcagactcagcctcctcagagcctgttgggatatatcagggtttcgagaagaagaccggagttgctggggaggacatgcaagacaacagtgggacctacggcaagatctgggagggcagcagcaagtgcaacatcaacaacttcatcttccacaaggtcctgggcaaaggcagcttcgggaaggtgctgcttggagagctgaagggcagaggagagtactttgccatcaaggccctcaagaaggatgtggtcctgatcgacgacgacgtggagtgcaccatggttgagaagcgggtgctgacacttgccgcagagaatccctttctcacccacctcatctgcaccttccagaccaaggaccacctgttctttgtgatggagttcctcaacgggggggacctgatgtaccacatccaggacaaaggccgctttgaactctaccgtgccacgttttatgccgctgagataatgtgtggactgcagtttctacacagcaagggcatcatttacagggacctcaaactggacaatgtgctgctggaccgggatggccacatcaagattgccgactttgggatgtgcaaagagaacatattcggggagagccgggccagcaccttctgcggcacccctgactatatcgcccctgagatcctacagggcctgaagtacacattctctgtggactggtggtctttcggggtccttctgtacgagatgctcattggccagtcccccttccatggtgatgatgaggatgaactcttcgagtccatccgtgtggacacgccacattatccccgctggatcaccaaggagtccaaggacatcctggagaagctctttgaaagggaaccaaccaagaggctgggagtgaccggaaacatcaaaatccaccccttcttcaagaccataaactggactctgctggaaaagcggaggttggagccacctttcaggcccaaagtgaagtcacccagagactacagtaactttgaccaggagttcctgaacgagaaggcgcgcctctcctacagcgacaagaacctcatcgactccatggaccagtctgcattcgctggcttctcctttgtgaaccccaaattcgagcacctcctggaagattgaggttcctggacagatcaggctagccctgccctccacccacacctgcccgctccccacgataagcaccagtgggactgtggtgacttctgctgctggccccgcccctgcccccagagcgtccttggctgccgtctggccgggctctcatggtacttcctctgtgaactgtgtgtgaatctgcttttcctctgccttcggagggaaattgtaaatcctgtgtttcattacttgaatgtagttatctattgaaaatatatattatatacatagacatatatatatatataataggctgtatatattgctcagtagagaaaaaccatgggggactggtgatatgttgatctttttcaaaaaaatatatatatgacaaaaaaaaaaaaaaaggagcacaagctgtttgaaccaccaggtttatttgtgtgtctaaataaacaccaaatagtaccaa

SEQ ID NO: 24274 - DNA, 589 bp, Homo sapiens
  source 1..589: mol_type = unassigned DNA
aaggattagggagtcctgagccccaggctgctctgctcagtcttggaaggcctcacgcaacccccttcacaaagcctgcccgattgtgtcctcaagggacaatttatagcatgcaatgacagtgcggagggcaggtctgtctggggagatgaaacgacctgtgcgattacaggagattcctactttcctcgcccccagtcctcaaggtcttctcagaggttcccactaggaggccggctgcagtgccctggacgaccctcacacccaggacctcagttgctccatccaaggaatgggcgagctcaggtcttcctgactttcctggagaacaaagaggccccactgcaggccccaccatggcgccgttcctgcgcatcgccttcaactcctatgagctgggctccctgcaggccgaggacgaggcgaaccagcccttctgtgccgtgaagatgaaggaggcgctcagcacagagcgtgggaaaacactggtgcagaagaagccgaccatgtatcctgagtggaagtcgacgttcgatgcccacatctatgaggggcgcgtcatccagattgtgctaatgcgggcagcaga

SEQ ID NO: 24275 - DNA, 562 bp, Homo sapiens
  source 1..562: mol_type = unassigned DNA
aaactgagaaactgagccgcggtcagcgaaagtcccgccgcgccgagacctgccggtctgcagggaactggccaggcaagggggcaggcccgtttctcctggtggttggtgcgttgtagcagcagcgggagccaggactaaggacaagcaggagctgggagccccagccccactgcaggccccaccatggcgccgttcctgcgcatcgccttcaactcctatgagctgggctccctgcaggccgaggacgaggcgaaccagcccttctgtgccgtgaagatgaaggaggcgctcagcacagagcgtgggaaaacactggtgcagaagaagccgaccatgtatcctgagtggaagtcgacgttcgatgcccacatctatgaggggcgcgtcatccagattgtgctaatgcgggcagcagaggagccagtgtctgaggtgaccgtgggtgtgtcggtgctggccgagcgctgcaagaagaacaatggcaaggctgagttctggctggacctgcagcctcaggccaaggtgttgatgtctgttcagtatttcctggaggacgtgg

SEQ ID NO: 24276 - DNA, 3582 bp, Homo sapiens
  source 1..3582: mol_type = unassigned DNA
gggaagagacgcttggggctggggctcaccggacgggtaggtccggctctccagggagaggagctgcccggccctggagaaggggcgagtcctgcgcgagtccccgggaggcgccgcgcgcttggaagggacggtcgggcttccccggcccgctgagggctcggcggcgggctcccctcctttccacctcgggagggagggaaggaggggagggaaaagtcccacggaggaggcagaatggccagtcgaggggcgcttaggcgctgcctttccccagggctgcctcgactcctgcacctgtcccgagggctggcctgagacgggactcccggttctcccgctgcgaagcagcgcggccccccggggccggggcagcggcgccggcatgtcgtctggcaccatgaagttcaatggctatttgagggtccgcatcggtgaggcagtggggctgcagcccacccgctggtccctgcgccactcgctcttcaagaagggccaccagctgctggacccctatctgacggtgagcgtggaccaggtgcgcgtgggccagaccagcaccaagcagaagaccaacaaacccacgtacaacgaggagttttgcgctaacgtcaccgacggcggccacctcgagttggccgtcttccacgagacgcccctgggctacgaccacttcgtggccaactgcaccctgcagttccaggagctgctgcgcacgaccggcgcctcggacaccttcgagggttgggtggatctcgagccagaggggaaagtatttgtggtaataacccttaccgggagtttcactgaagctactctccagagagaccggatcttcaaacattttaccaggaagcgccaaagggctatgcgaaggcgagtccaccagatcaatggacacaagttcatggccacgtatctgaggcagcccacctactgctctcactgcagggagtttatctggggagtgtttgggaaacagggttatcagtgccaagtgtgcacctgtgtcgtccataaacgctgccatcatctaattgttacagcctgtacttgccaaaacaatattaacaaagtggattcaaagattgcagaacagaggttcgggatcaacatcccacacaagttcagcatccacaactacaaagtgccaacattctgcgatcactgtggctcactgctctggggaataatgcgacaaggacttcagtgtaaaatatgtaaaatgaatgtgcatattcgatgtcaagcgaacgtggcccctaactgtggggtaaatgcggtggaacttgccaagaccctggcagggatgggtctccaacccggaaatatttctccaacctcgaaactcgtttccagatcgaccctaagacgacagggaaaggagagcagcaaagaaggaaatgggattggggttaattcttccaaccgacttggtatcgacaactttgagttcatccgagtgttggggaaggggagttttgggaaggtgatgcttgcaagagtaaaagaaacaggagacctctatgctgtgaaggtgctgaagaaggacgtgattctgcaggatgatgatgtggaatgcaccatgaccgagaaaaggatcctgtctctggcccgcaatcaccccttcctcactcagttgttctgctgctttcagacccccgatcgtctgttttttgtgatggagtttgtgaatgggggtgacttgatgttccacattcagaagtctcgtcgttttgatgaagcacgagctcgcttctatgctgcagaaatcatttcggctctcatgttcctccatgataaaggaatcatctatagagatctgaaactggacaatgtcctgttggaccacgagggtcactgtaaactggcagacttcggaatgtgcaaggaggggatttgcaatggtgtcaccacggccacattctgtggcacgccagactatatcgctccagagatcctccaggaaatgctgtacgggcctgcagtagactggtgggcaatgggcgtgttgctctatgagatgctctgtggtcacgcgccttttgaggcagagaacgaagatgacctctttgaggccatactgaatgatgaggtggtctaccctacctggctccatgaagatgccacagggatcctaaaatctttcatgaccaagaaccccaccatgcgcttgggcagcctgactcagggaggcgagcacgccatcttgagacatcctttttttaaggaaatcgactgggcccagctgaaccatcgccaaatagaaccgcctttcagacccagaatcaaatcccgagaagatgtcagtaattttgaccctgacttcataaaggaagagccagttttaactccaattgatgagggacatcttccaatgattaaccaggatgagtttagaaacttttcctatgtgtctccagaattgcaaccatagccttatggggagtgagagagagggcacgagaacccaaagggaatagagattctccaggaatttcctctatgggaccttcccagcatcagccttagaacaagaaccttaccttcaaggagcaagtgaagaactctgtgaaggatggaactttcagatatcaactatttagagtccagagggagccatggcactagaaatagttgataatgaaatgagattttatgaagtataccgctccacctatgagcgtctgtctctgtgggcttgggatgttaacaggagccaaaaggagggaaagtgtgaagaataaagtagatctgagaaattctgagccaatcaggcttcttaattcaagagacaaaccaagacgttctgtcaactgtgctgtgctcttctttaagccaatgaaccccaattcctggcagtctacaagaagtctcttaatgctaatgaagaatttaaaggtctttttaaggaaatgaagggctttccaaatagaatgatttactctgaagaaacaaacaatggtatctctgaaactcacaacctaaagcccaatcttgaaaatatgttgtgcaccaagacgactgcttcagcttcttctcttatccttactttctttaatagatatttattaaactgtccagtgaaaaggtgccacaatgcccagtattgtaaacaacaggtttgcattcatgaagctttcattcattctggagtctactaatttacctgaatggtgtttgcattctgtgaaatgcctctccacgttgcatatgtcacacttttgtctgcacataactcttttttcacaagaagggtcactgccacaacagcacagtcagcgggtgaattacaggtgcctgctgcctgcctacctgggtaatctgatcttgtctgtatcgccgtgtgctcatcactgaagaattgcaggccactcatgtcagtgaccagatttgtggcttataaacattagcagtttatttatgttttaagatgcaaagatgtgtgtttgatattcactttaataattagaaatggatcttgtaaacagggcatatatcaaagatgaccttataatatgtacccgaatatacagttcaagaattttgtctgactggaaataaatgcattttgtagcaaaa

SEQ ID NO: 24277 - DNA, 562 bp, Homo sapiens
  source 1..562: mol_type = unassigned DNA
atgcttatcggggtgtaatgcctgcctcctgctgctgctccaagctcctccaggagaaggacgctgcttctgcctggtccaggatcgtatcagggtctggggctgcctcgactcctgcacctgtcccgagggctggcctgagacgggactcccggttctcccgctgcgaagcagcgcggccccccggggccggggcagcggcgccggcatgtcgtctggcaccatgaagttcaatggctatttgagggtccgcatcggtgaggcagtggggctgcagcccacccgctggtccctgcgccactcgctcttcaagaagggccaccagctgctggacccctatctgacggtgagcgtggaccaggtgcgcgtgggccagaccagcaccaagcagaagaccaacaaacccacgtacaacgaggagttttgcgctaacgtcaccgacggcggccacctcgagttggccgtcttccacgagacgcccctgggctacgaccacttcgtggccaactgcaccctgcagttccaggagctgctgcgcacgaccggcgcctcggacaccttc

SEQ ID NO: 24278 - DNA, 4950 bp, Homo sapiens
  source 1..4950: mol_type = unassigned DNA
ggttgcgcccgccctaccccggaatgtgggcctttggagcgagcgaagtgggagggaccgacgcaggaggtgtcttgggcccgggcggctgtagaggcggcggcgcctacgggcagtgggaggagccgcgcggttccggctgctccggcgaggcgacccttgggtcggcgctgcgggcgaggtgggcaggtaggtgggcggacggccgcggttctccggcaagcgcaggcggcggagtcccccacggcgcccgaagcgcccccccgcacccccggcctccagcgttgaggcgggggagtgaggagatgccgacccagagggacagcagcaccatgtcccacacggtcgcaggcggcggcagcggggaccattcccaccaggtccgggtgaaagcctactaccgcggggatatcatgataacacattttgaaccttccatctcctttgagggcctttgcaatgaggttcgagacatgtgttcttttgacaacgaacagctcttcaccatgaaatggatagatgaggaaggagacccgtgtacagtatcatctcagttggagttagaagaagcctttagactttatgagctaaacaaggattctgaactcttgattcatgtgttcccttgtgtaccagaacgtcctgggatgccttgtccaggagaagataaatccatctaccgtagaggtgcacgccgctggagaaagctttattgtgccaatggccacactttccaagccaagcgtttcaacaggcgtgctcactgtgccatctgcacagaccgaatatggggacttggacgccaaggatataagtgcatcaactgcaaactcttggttcataagaagtgccataaactcgtcacaattgaatgtgggcggcattctttgccacaggaaccagtgatgcccatggatcagtcatccatgcattctgaccatgcacagacagtaattccatataatccttcaagtcatgagagtttggatcaagttggtgaagaaaaagaggcaatgaacaccagggaaagtggcaaagcttcatccagtctaggtcttcaggattttgatttgctccgggtaataggaagaggaagttatgccaaagtactgttggttcgattaaaaaaaacagatcgtatttatgcaatgaaagttgtgaaaaaagagcttgttaatgatgatgaggatattgattgggtacagacagagaagcatgtgtttgagcaggcatccaatcatcctttccttgttgggctgcattcttgctttcagacagaaagcagattgttctttgttatagagtatgtaaatggaggagacctaatgtttcatatgcagcgacaaagaaaacttcctgaagaacatgccagattttactctgcagaaatcagtctagcattaaattatcttcatgagcgagggataatttatagagatttgaaactggacaatgtattactggactctgaaggccacattaaactcactgactacggcatgtgtaaggaaggattacggccaggagatacaaccagcactttctgtggtactcctaattacattgctcctgaaattttaagaggagaagattatggtttcagtgttgactggtgggctcttggagtgctcatgtttgagatgatggcaggaaggtctccatttgatattgttgggagctccgataaccctgaccagaacacagaggattatctcttccaagttattttggaaaaacaaattcgcataccacgttctctgtctgtaaaagctgcaagtgttctgaagagttttcttaataaggaccctaaggaacgattgggttgtcatcctcaaacaggatttgctgatattcagggacacccgttcttccgaaatgttgattgggatatgatggagcaaaaacaggtggtacctccctttaaaccaaatatttctggggaatttggtttggacaactttgattctcagtttactaatgaacctgtccagctcactccagatgacgatgacattgtgaggaagattgatcagtctgaatttgaaggttttgagtatatcaatcctcttttgatgtctgcagaagaatgtgtctgatcctcatttttcaaccatgtattctactcatgttgccatttaatgcatggataaacttgctgcaagcctggatacaattaaccattttatatttgccacctacaaaaaaacacccaatatcttctcttgtagactatatgaatcaattattacatctgttttactatgaaaaaaaaattaatactactagcttccagacaatcatgtcaaaatttagttgaactggtttttcagtttttaaaaggcctacagatgagtaatgaagttatcttttttgtttaaaaaaaaaaaaaacactgcattaaaaaagtatctgttgcattaaggcacatagtgggattacatcataaacctcccataatttttgtcattctgtgttaaatcatttcagggtttaattttgaaataaaagattaatataaaatgcaacaactttttatattacctattagttttggagttctttatgtttaaaaattcaggtgtaaattttattgccttggataaataaattattgatcttttttaaggcagcagttattaaattggtaatagaagatgctgcttgcttagaattgggaaattcggctgggtgcagtgactcaatgcctgtgatcccagtactttgggaggttgaggcgggcagatcacttgaggtcaggagtttgagattggcctggtcaacatggtgaaatcctgtctctactaaaaatacaaaaattagctgggcatggtggcacatacctgtaatcccagctactcgggaggctgaaacaggagaatcgcttgaacccaggagatggagttggcagtgagccaagattagcctgggcaacagtgagtgagactcggtctcaaacaaaaaccaaattgggaaattcttcttgagttaaaaaagacactttttattatgaatcagattccaaatcattaactatttttgcaaaactggcacaagtggtttttctttttaagtatattaacagggtagctcctgagcctttccctttattggaaactttaactgcagtgttaatatatacactgcaaaagaccaaggatgcagttgaatggaaaattactcagtgtatagaaaggaaaaaaaccagaaatttaaaatagatacagaaaagtacactggtaatatttttatttcctattggagagtgaatccccacagttgctttttgtgacttgattcaaatgaggcactcattattgttaccaaacttgtaaaagcattccatgtattcagtggaggcagaatgtataatattttttccttataatttagcatacaggaaaagtatttattttttaagtagggtatcttaattatgctcatttcttcccctaaaccacattatctatatgattggaccctttagtgaaatcagaaaaataaagtaggcatgaataaatgttcaggacacacacatacactcacacacatcacagtatcagctctttcagtgagtttttattaactagataacacatgtaatacatagtagaatacatttcagaggcagagttcctcggattattttttatggatattagtgttcagcagcttattatttaaaggggtgccaaatatagcatccttctgttgtttattttaaatatatttttaatgaaaagggacttaaaaagtaaacatgattatctaaattacttaaaattttttaatcttagtaaaaattttaggaaagttatctagtttaaatttcaaatgttttaaaatttgtaggcatttaataaattatctttttttggaggggtggatgctgcatttcattggaaatgtcatttttccaaagtttctagctatatactctctttccttcaaataacataagtctgaaagcaatgaaaacgtcaaaggaaaatgtttatatacatccacatgtttatttaatatgtttctcttaacacctgaaacttgttttaaaacaaaaagcagtattcacttcaaatcataaacttagaattctgtatctcatgtcagaaatatgtttatggccttgcttttaagtggtgctgtttcccatagggcattagttctcagattttggaatgtgaaataatcacctaggaagttggtttaaaatgcacactagtgagcccaccttagacttcttttggggccttcgacctcactttgagaaataccttcttcaggttattctttatgtttgtcctgtggttaaatattagagtattcatgataaaacattttgagaaggggtaagcagtgagttattacccacaatttaaagcaaattttgaatgaatctttaagttaggtatctaccttcccaccagccccccaaaaaacctctcagtagtttctttcagtgtacaaaatgatgagcatttttctatgatgaggttttaaccattattcagggtggtcttttgtttttaaatctttttttaactaataagatttacggtgtgtattttatacagaaatgcattataaatgtttttaattgtgttctgttttttgcagtctttaagtgccatgccaattgttcttatattctatagaagttcgctcaaaatactcaacaggggaataggcagcggacagtcagaatggttggaattttggctttctaagaaaaactttattttgcataagcatgtggtcagatcattttgtgcatatgcagcctggattggatgttaagtaaatgcttgttcagtgccggtacatttacttaaatctgtttttatttttgtcatgtagaatactactgtggtcatcataatgtaatctatttctgtaccttttttttttttttttactttgaagtctttaaataaaatgtataatacccattga

SEQ ID NO: 24279 - DNA, 3285 bp, Homo sapiens
  source 1..3285: mol_type = unassigned DNA
ccgccagccccgccagtccccgcgcagtccccgcgcagtccccgcgcagtcccagcgccaccgggcagcagcggcgccgtgctcgctccagggcgcaaccatgtcgccatttcttcggattggcttgtccaactttgactgcgggtcctgccagtcttgtcagggcgaggctgttaacccttactgtgctgtgctcgtcaaagagtatgtcgaatcagagaacgggcagatgtatatccagaaaaagcctaccatgtacccaccctgggacagcacttttgatgcccatatcaacaagggaagagtcatgcagatcattgtgaaaggcaaaaacgtggacctcatctctgaaaccaccgtggagctctactcgctggctgagaggtgcaggaagaacaacgggaagacagaaatatggttagagctgaaacctcaaggccgaatgctaatgaatgcaagatactttctggaaatgagtgacacaaaggacatgaatgaatttgagacggaaggcttctttgctttgcatcagcgccggggtgccatcaagcaggcaaaggtccaccacgtcaagtgccacgagttcactgccaccttcttcccacagcccacattttgctctgtctgccacgagtttgtctggggcctgaacaaacagggctaccagtgccgacaatgcaatgcagcaattcacaagaagtgtattgataaagttatagcaaagtgcacaggatcagctatcaatagccgagaaaccatgttccacaaggagagattcaaaattgacatgccacacagatttaaagtctacaattacaagagcccgaccttctgtgaacactgtgggaccctgctgtggggactggcacggcaaggactcaagtgtgatgcatgtggcatgaatgtgcatcatagatgccagacaaaggtggccaacctttgtggcataaaccagaagctaatggctgaagcgctggccatgattgagagcactcaacaggctcgctgcttaagagatactgaacagatcttcagagaaggtccggttgaaattggtctcccatgctccatcaaaaatgaagcaaggccgccatgtttaccgacaccgggaaaaagagagcctcagggcatttcctgggagtctccgttggatgaggtggataaaatgtgccatcttccagaacctgaactgaacaaagaaagaccatctctgcagattaaactaaaaattgaggattttatcttgcacaaaatgttggggaaaggaagttttggcaaggtcttcctggcagaattcaagaaaaccaatcaatttttcgcaataaaggccttaaagaaagatgtggtcttgatggacgatgatgttgagtgcacgatggtagagaagagagttctttccttggcctgggagcatccgtttctgacgcacatgttttgtacattccagaccaaggaaaacctcttttttgtgatggagtacctcaacggaggggacttaatgtaccacatccaaagctgccacaagttcgacctttccagagcgacgttttatgctgctgaaatcattcttggtctgcagttccttcattccaaaggaatagtctacagggacctgaagctagataacatcctgttagacaaagatggacatatcaagatcgcggattttggaatgtgcaaggagaacatgttaggagatgccaagacgaataccttctgtgggacacctgactacatcgccccagagatcttgctgggtcagaaatacaaccactctgtggactggtggtccttcggggttctcctttatgaaatgctgattggtcagtcgcctttccacgggcaggatgaggaggagctcttccactccatccgcatggacaatcccttttacccacggtggctggagaaggaagcaaaggaccttctggtgaagctcttcgtgcgagaacctgagaagaggctgggcgtgaggggagacatccgccagcaccctttgtttcgggagatcaactgggaggaacttgaacggaaggagattgacccaccgttccggccgaaagtgaaatcaccatttgactgcagcaatttcgacaaagaattcttaaacgagaagccccggctgtcatttgccgacagagcactgatcaacagcatggaccagaatatgttcaggaacttttccttcatgaaccccgggatggagcggctgatatcctgaatcttgcccctccagagacaggaaagaatttgccttctccctgggaactggttcaagagacactgcttgggttcctttttcaacttggaaaaagaaagaaacactcaacaataaagactgagacccgttcgcccccatgtgacttttatctgtagcagaaaccaagtctacttcactaatgacgatgccgtgtgtctcgtctcctgacatgtctcacagacgctcctgaagttaggtcattactaaccatagttatttacttgaaagatgggtctccgcacttggaaaggtttcaagacttgatactgcaataaattatggctcttcacctgggcgccaactgctgatcaatgaaatgcttgttgaatcaggggcaaacggagtacagacgtctcaagactgaaacggccccattgcctggtctagtagcggatctcactcagccgcagacaagtaatcactaacccgttttattctattcctatctgtggatgtgtaaatggctggggggccagccctggataggtttttatgggaattctttacaataaacatagcttgtaacttgagatctacaaatccattcatcctgattgggcatgaaatccatggtcaagaggacaagtggaaagtgagagggaaggtttgctagacaccttcgcttgttatcttgtcaagatagaaaagatagtatcatttcacccttgccagtaaaaacctttccatccacccattctcagcagactccagtattggcacagtcactcactgccattctcacactataacaagaaaagaaatgaagtgcataagtctcctgggaaaagaaccttaaccccttctcgtgccatgactggtgatttcatgactcataagcccctccgtaggcatcattcaagatcaatggcccatgcatgctgtttgcagcagtcaattgagttgaattagaattccaaccatacattttaaaggtatttgtgctgtgtgtatattttgataaaatgttgtgacttcatggcaaacaggtggatgtgtaaaaatggaataaaaaaaaaaaaagagtc

SEQ ID NO: 24280 - DNA, 3042 bp, Homo sapiens
  source 1..3042: mol_type = unassigned DNA
agtccccgcgcagtccccgcgcagtcccagcgccaccgggcagcagcggcgccgtgctcgctccagggcgcaaccatgtcgccatttcttcggattggcttgtccaactttgactgcgggtcctgccagtcttgtcagggcgaggctgttaacccttactgtgctgtgctcgtcaaagagtatgtcgaatcagagaacgggcagatgtatatccagaaaaagcctaccatgtacccaccctgggacagcacttttgatgcccatatcaacaagggaagagtcatgcagatcattgtgaaaggcaaaaacgtggacctcatctctgaaaccaccgtggagctctactcgctggctgagaggtgcaggaagaacaacgggaagacagaaatatggttagagctgaaacctcaaggccgaatgctaatgaatgcaagatactttctggaaatgagtgacacaaaggacatgaatgaatttgagacggaaggcttctttgctttgcatcagcgccggggtgccatcaagcaggcaaaggtccaccacgtcaagtgccacgagttcactgccaccttcttcccacagcccacattttgctctgtctgccacgagtttgtctggggcctgaacaaacagggctaccagtgccgacaatgcaatgcagcaattcacaagaagtgtattgataaagttatagcaaagtgcacaggatcagctatcaatagccgagaaaccatgttccacaaggagagattcaaaattgacatgccacacagatttaaagtctacaattacaagagcccgaccttctgtgaacactgtgggaccctgctgtggggactggcacggcaaggactcaagtgtgatgcatgtggcatgaatgtgcatcatagatgccagacaaaggtggccaacctttgtggcataaaccagaagctaatggctgaagcgctggccatgattgagagcactcaacaggctcgctgcttaagagatactgaacagatcttcagagaaggtccggttgaaattggtctcccatgctccatcaaaaatgaagcaaggccgccatgtttaccgacaccgggaaaaagagagcctcagggcatttcctgggagtctccgttggatgaggtggataaaatgtgccatcttccagaacctgaactgaacaaagaaagaccatctctgcagattaaactaaaaattgaggattttatcttgcacaaaatgttggggaaaggaagttttggcaaggtcttcctggcagaattcaagaaaaccaatcaatttttcgcaataaaggccttaaagaaagatgtggtcttgatggacgatgatgttgagtgcacgatggtagagaagagagttctttccttggcctgggagcatccgtttctgacgcacatgttttgtacattccagaccaaggaaaacctcttttttgtgatggagtacctcaacggaggggacttaatgtaccacatccaaagctgccacaagttcgacctttccagagcgacgttttatgctgctgaaatcattcttggtctgcagttccttcattccaaaggaatagtctacagggacctgaagctagataacatcctgttagacaaagatggacatatcaagatcgcggattttggaatgtgcaaggagaacatgttaggagatgccaagacgaataccttctgtgggacacctgactacatcgccccagagctcttcgtgcgagaacctgagaagaggctgggcgtgaggggagacatccgccagcaccctttgtttcgggagatcaactgggaggaacttgaacggaaggagattgacccaccgttccggccgaaagtgaaatcaccatttgactgcagcaatttcgacaaagaattcttaaacgagaagccccggctgtcatttgccgacagagcactgatcaacagcatggaccagaatatgttcaggaacttttccttcatgaaccccgggatggagcggctgatatcctgaatcttgcccctccagagacaggaaagaatttgccttctccctgggaactggttcaagagacactgcttgggttcctttttcaacttggaaaaagaaagaaacactcaacaataaagactgagacccgttcgcccccatgtgacttttatctgtagcagaaaccaagtctacttcactaatgacgatgccgtgtgtctcgtctcctgacatgtctcacagacgctcctgaagttaggtcattactaaccatagttatttacttgaaagatgggtctccgcacttggaaaggtttcaagacttgatactgcaataaattatggctcttcacctgggcgccaactgctgatcaatgaaatgcttgttgaatcaggggcaaacggagtacagacgtctcaagactgaaacggccccattgcctggtctagtagcggatctcactcagccgcagacaagtaatcactaacccgttttattctattcctatctgtggatgtgtaaatggctggggggccagccctggataggtttttatgggaattctttacaataaacatagcttgtaacttgagatctacaaatccattcatcctgattgggcatgaaatccatggtcaagaggacaagtggaaagtgagagggaaggtttgctagacaccttcgcttgttatcttgtcaagatagaaaagatagtatcatttcacccttgccagtaaaaacctttccatccacccattctcagcagactccagtattggcacagtcactcactgccattctcacactataacaagaaaagaaatgaagtgcataagtctcctgggaaaagaaccttaaccccttctcgtgccatgactggtgatttcatgactcataagcccctccgtaggcatcattcaagatcaatggcccatgcatgctgtttgcagcagtcaattgagttgaattagaattccaaccatacattttaaaggtatttgtgctgtgtgtatattttgataaaatgttgtgacttcatggcaaacaggtggatgtgt

SEQ ID NO: 24281 - DNA, 2008 bp, Homo sapiens
  source 1..2008: mol_type = unassigned DNA
tccttagccttttaccctgccttctctttctccccacaataattcccaagaaaatagtcatccaaagggactctttgccctccaagaaactgagttacggcctgatagcatgtggcatgaatgtgcatcatagatgccagacaaaggtggccaacctttgtggcataaaccagaagctaatggctgaagcgctggccatgattgagagcactcaacaggctcgctgcttaagagatactgaacagatcttcagagaaggtccggttgaaattggtctcccatgctccatcaaaaatgaagcaaggccgccatgtttaccgacaccgggaaaaagagagcctcagggcatttcctgggagtctccgttggatgaggtggataaaatgtgccatcttccagaacctgaactgaacaaagaaagaccatctctgcagattaaactaaaaattgaggattttatcttgcacaaaatgttggggaaaggaagttttggcaaggtcttcctggcagaattcaagaaaaccaatcaatttttcgcaataaaggccttaaagaaagatgtggtcttgatggacgatgatgttgagtgcacgatggtagagaagagagttctttccttggcctgggagcatccgtttctgacgcacatgttttgtacattccagaccaaggaaaacctcttttttgtgatggagtacctcaacggaggggacttaatgtaccacatccaaagctgccacaagttcgacctttccagagcgacgttttatgctgctgaaatcattcttggtctgcagttccttcattccaaaggaatagtctacagggacctgaagctagataacatcctgttagacaaagatggacatatcaagatcgcggattttggaatgtgcaaggagaacatgttaggagatgccaagacgaataccttctgtgggacacctgactacatcgccccagagatcttgctgggtcagaaatacaaccactctgtggactggtggtccttcggggttctcctttatgaaatgctgattggtcagtcgcctttccacgggcaggatgaggaggagctcttccactccatccgcatggacaatcccttttacccacggtggctggagaaggaagcaaaggaccttctggtgaagctcttcgtgcgagaacctgagaagaggctgggcgtgaggggagacatccgccagcaccctttgtttcgggagatcaactgggaggaacttgaacggaaggagattgacccaccgttccggccgaaagtgaaatcaccatttgactgcagcaatttcgacaaagaattcttaaacgagaagccccggctgtcatttgccgacagagcactgatcaacagcatggaccagaatatgttcaggaacttttccttcatgaaccccgggatggagcggctgatatcctgaatcttgcccctccagagacaggaaagaatttgccttctccctgggaactggttcaagagacactgcttgggttcctttttcaacttggaaaaagaaagaaacactcaacaataaagactgagacccgttcgcccccatgtgacttttatctgtagcagaaaccaagtctacttcactaatgacgatgccgtgtgtctcgtctcctgacatgtctcacagacgctcctgaagttaggtcattactaaccatagttatttacttgaaagatgggtctccgcacttggaaaggtttcaagacttgatactgcaataaattatggctcttcacctgggcgccaactgctgatcaatgaaatgcttgttgaatcaggggcaaacggagtacagacgtctcaagactgaaacggccccattgcctggtctagtagcggatctcactcagccgcagacaagtaatcactaacccgttttattctattcctatctgtggatgtgtaaatggctggggggccagccctggataggtttttatgggaattctttacaataaacatagcttgtaacttga

SEQ ID NO: 24282 - DNA, 2284 bp, Homo sapiens
  source 1..2284: mol_type = unassigned DNA
gggcagcagcggcgccgtgctcgctccagggcgcaaccatgtcgccatttcttcggattggcttgtccaactttgactgcgggtcctgccagtcttgtcagggcgaggctgttaacccttactgtgctgtgctcgtcaaagagtatgtcgaatcagagaacgggcagatgtatatccagaaaaagcctaccatgtacccaccctgggacagcacttttgatgcccatatcaacaagggaagagtcatgcagatcattgtgaaaggcaaaaacgtggacctcatctctgaaaccaccgtggagctctactcgctggctgagaggtgcaggaagaacaacgggaagacagaaatatggacacaaaggacatgaatgaatttgagacggaaggcttctttgctttgcatcagcgccggggtgccatcaagcaggcaaaggtccaccacgtcaagtgccacgagttcactgccaccttcttcccacagcccacattttgctctgtctgccacgagtttgtctggggcctgaacaaacagggctaccagtgccgacaatgcaatgcagcaattcacaagaagtgtattgataaagttatagcaaagtgcacaggatcagctatcaatagccgagaaaccatgttccacaaggagagattcaaaattgacatgccacacagatttaaagtctacaattacaagagcccgaccttctgtgaacactgtgggaccctgctgtggggactggcacggcaaggactcaagtgtgatgcatgtggcatgaatgtgcatcatagatgccagacaaaggtggccaacctttgtggcataaaccagaagctaatggctgaagcgctggccatgattgagagcactcaacaggctcgctgcttaagagatactgaacagatcttcagagaaggtccggttgaaattggtctcccatgctccatcaaaaatgaagcaaggccgccatgtttaccgacaccgggaaaaagagagcctcagggcatttcctgggagtctccgttggatgaggtggataaaatgtgccatcttccagaacctgaactgaacaaagaaagaccatctctgcagattaaactaaaaattgaggattttatcttgcacaaaatgttggggaaaggaagttttggcaaggtcttcctggcagaattcaagaaaaccaatcaatttttcgcaataaaggccttaaagaaagatgtggtcttgatggacgatgatgttgagtgcacgatggtagagaagagagttctttccttggcctgggagcatccgtttctgacgcacatgttttgtacattccagaccaaggaaaacctcttttttgtgatggagtacctcaacggaggggacttaatgtaccacatccaaagctgccacaagttcgacctttccagagcgacgttttatgctgctgaaatcattcttggtctgcagttccttcattccaaaggaatagtctacagggacctgaagctagataacatcctgttagacaaagatggacatatcaagatcgcggattttggaatgtgcaaggagaacatgttaggagatgccaagacgaataccttctgtgggacacctgactacatcgccccagagatcttgctgggtcagaaatacaaccactctgtggactggtggtccttcggggttctcctttatgaaatgctgattggtcagtcgcctttccacgggcaggatgaggaggagctcttccactccatccgcatggacaatcccttttacccacggtggctggagaaggaagcaaaggaccttctggtgaagctcttcgtgcgagaacctgagaagaggctgggcgtgaggggagacatccgccagcaccctttgtttcgggagatcaactgggaggaacttgaacggaaggagattgacccaccgttccggccgaaagtgaaatcaccatttgactgcagcaatttcgacaaagaattcttaaacgagaagccccggctgtcatttgccgacagagcactgatcaacagcatggaccagaatatgttcaggaacttttccttcatgaaccccgggatggagcggctgatatcctgaatcttgcccctccagagacaggaaagaatttgccttctccctgggaactggttcaagagacactgcttgggttcctttttcaacttggaaaaagaaagaaacactcaacaataaagactgagacccgttcgcccccatgtgacttttatctgtagcagaaaccaagtctacttcactaatgacgat

SEQ ID NO: 24283 - DNA, 1127 bp, Homo sapiens
  source 1..1127: mol_type = unassigned DNA
gtagtgccggtgccctgagaacaggactgagtgatggcttccaactccagcgatgtgaaagaattcttagccaaagccaaagaagattttcttaaaaaatgggaaagtcccgctcagaacacagcccacttggatcagtttgaacgaatcaagaccctcggcacgggctccttcgggcgggtgatgctggtgaaacacaaggagaccgggaaccactatgccatgaagatcctcgacaaacagaaggtggtgaaactgaaacagatcgaacacaccctgaatgaaaagcgcatcctgcaagctgtcaactttccgttcctcgtcaaactcgagttctccttcaaggacaactcaaacttatacatggtcatggagtacgtgcccggcggggagatgttctcacacctacggcggatcggaaggttcagtgagccccatgcccgtttctacgcggcccagatcgtcctgacctttgagtatctgcactcgctggatctcatctacagggacctgaagccggagaatctgctcattgaccagcagggctacattcaggtgacagacttcggtttcgccaagcgcgtgaagggccgcacttggaccttgtgcggcacccctgagtacctggcccctgagattatcctgagcaaaggctacaacaaggccgtggactggtgggccctgggggttcttatctatgaaatggccgctggctacccgcccttcttcgcagaccagcccatccagatctatgagaagatcgtctctgggaaggtgcgcttcccttcccacttcagctctgacttgaaggacctgctgcggaacctcctgcaggtagatctcaccaagcgctttgggaacctcaagaatggggtcaacgatatcaagaaccacaagtggtttgccacaactgactggattgccatctaccagaggaaggtggaagctcccttcataccaaagtttaaaggccctggggatacgagtaactttgacgactatgaggaagaagaaatccgggtctccatcaatgagaagtgtggcaaggagttttctgagttttaggggcatgcctgtgcccccatgggttttcttttttcttttttcttttttttggtcgggggggt

SEQ ID NO: 24284 - DNA, 4256 bp, Homo sapiens
  source 1..4256: mol_type = unassigned DNA
ggtggagctgtcgcctagccgctatcgcagagtggagcggggctgggagcaaagcgctgagggagctcggtacgccgccgcctcgcacccgcagcctcgcgcccgccgccgcccgtccccagagaaccatggagtctggcagtaccgccgccagtgaggaggcacgcagccttcgagaatgtgagctctacgtccagaagcataacattcaagcgctgctcaaagattctattgtgcagttgtgcactgctcgacctgagagacccatggcattcctcagggaatactttgagaggttggagaaggaggaggcaaaacagattcagaatctgcagaaagcaggcactcgtacagactcaagggaggatgagatttctcctcctccacccaacccagtggttaaaggtaggaggcgacgaggtgctatcagcgctgaggtctacacggaggaagatgcggcatcctatgttagaaaggttataccaaaagattacaagacaatggccgctttagccaaagccattgaaaagaatgtgctgttttcacatcttgatgataatgagagaagtgatatttttgatgccatgttttcggtctcctttatcgcaggagagactgtgattcagcaaggtgatgaaggggataacttctatgtgattgatcaaggagagacggatgtctatgttaacaatgaatgggcaaccagtgttggggaaggagggagctttggagaacttgctttgatttatggaacaccgagagcagccactgtcaaagcaaagacaaatgtgaaattgtggggcatcgaccgagacagctatagaagaatcctcatgggaagcacactgagaaagcggaagatgtatgaggaattccttagtaaagtctctattttagagtctctggacaagtgggaacgtcttacggtagctgatgcattggaaccagtgcagtttgaagatgggcagaagattgtggtgcagggagaaccaggggatgagttcttcattattttagaggggtcagctgctgtgctacaacgtcggtcagaaaatgaagagtttgttgaagtgggaagattggggccttctgattattttggtgaaattgcactactgatgaatcgtcctcgtgctgccacagttgttgctcgtggccccttgaagtgcgttaagctggaccgacctagatttgaacgtgttcttggcccatgctcagacatcctcaaacgaaacatccagcagtacaacagttttgtgtcactgtctgtctgaaatctgcctcctgtgcctcccttttctcctctccccaatccatgcttcactcatgcaaactgctttattttccctacttgcagcgccaagtggccactggcatcgcagcttcctgtctgtttatatattgaaagttgcttttattgcaccattttcaatttggagcattaactaaatgctcatacacagttaaataaatagaaagagttctatggagactttgctgttactgcttctctttgtgcagtgttagtattcaccctgggcagtgagtgccatgctttttggtgagggcagatcccagcacctattgaattaccatagagtaatgatgtaacagtgcaagattttttttttaagtgacataattgtccagttataagcgtatttagactgtggccatatatgctgtatttctttgtagaataaatggtttctcattaaactctaaagattagggaaaatggatatagaaaatcttagtatagtagaaagacatctgcctgtaattaaactagtttaagggtggaaaaatgcccatttttgctaattatcaatgggatatgattggttcagtttttttttttccagagttgttgtttgccaagctaatctgcctggttttatttatatcttgttattaatgtttcttctccaattctgaaatacttttgagtatggctatctatacctgccttttaagtttgaaactaactcatagattgcaaatattggttagtatttaactacatctgcctcggctcacaaattccgattagacctttatccagctagtgccaaataattgatcagatgctgaattgagaataagaatttgaggtctacattcttggttgttaatttagagcgtttggttaaagtatgtccttcagctgactccagtataatctcctctgctcattaaactgattccaggagattggatttgctgtgactagatacagatggagcaaatgtcctaacagagaaatagaggtgatgctgctaaagggagaaatgccaggcggacaaagttcagtgtcgggaattttccccgtgacattcactggggcatgagattttggaagaagttttttactttggtttagtctttttttccttcctttttattcagctagaatttctggtgggttgatggtagggtataatgtgtctgtgttgcttcaaattggtctgaaaggctatcctgctgaaagtcctgctttcctatctagcatttatttctctggcaaacttttctttcttttcttttttaaagtaaacttgtgtattgagtcttaactgtatttcagtattttccagccttatgtgttacattattccaatgatacccaacagtttatttttattatttttttaaacaaaatttcacagttctgtaatgtaggcacttttattttcattgtgatttatatataaggtaatgtagggttatatttgggagtgactgcaagcatttttccatctgtgtgcaactaactgactctgttattgatcccttctcctgccctttcccaggtaatttaaattggtcatggtagatttttttcatagatttgaaaaacttttaggttgttaccaagtatgaagtataaatctggggaagaggttttatttacattttagggtgggtaagaaagccaccttgttacaaattttttaatttccaaaataatctatattaaatgagggtttctgatctgtactttgtgtttagctacctttttatatttaaaaaattaaaaatgaaaattacgttcttacaagcttaaagcttgatttgatctttgtttaaatgccaaaatgtacttaaatgagttacttagaatgccataaaattgcagtttcatgtatgtatataatcatgctcatgtatatttagttacgtataatgctttctgagtgagttttactcttaaatcatttggttaaatcatttggcttgctgtttactcccttctgtagtttttaattaaaaactttaaagataagtctacattaaacaatgatcacatctaaagctttatctttgtgtaatctaagtatatgtgagaaatcagaattggcataatttgtcttagttgatattcaaggctttaaaagtcattattcctgggcttggtaagtgaatttatgagatttactgctctagaaagtatagatggccaaaggaccgttttgtattgcttcctgattaccagtctgattataccatgtgtgctaatatactttttttgttatagattgtcttaatggtaggtcaagtaataaaaagagatgaaataatttaaattcttaaatgaatcagtttttcttccctttctcctttccgtctttcctctctctgtccttccccgaaagtctactcgggtgggcaaaaatgaaaagggggaaagtgaattatgggatcggtgttttgaaagagcaatgtttattttcagtgcttttcagtttgtcaaagagtggatctcaaaatcttgcttaaagggtaattgagatgtagcagatttatttacttagtcatggaaagaaaaaaattcagtcaaaagctaaagatttccttttgattgaagacagattggttctgtggccttggaactttcccagacttaatggggaaacatcatttctagattagcatactctttggtttaaatttaatatatacatttaatgttacttagggatacttttatattttgcatatataaagcctcatatataaagccttatttctgatgctcttagatttctgaggagtgagatgattaagttgtattcattagtgtattggtatttcttcacatccagtgaaattggagatatgttgtatgttagaagagcattctttaaattgtgttgctttgaacatgtgtaccttttctagattcagtaatcccttccccccgtcctctggagtatgaaacctttagagtcacaataaaatgtaactaaagaaaa

SEQ ID NO: 24285 - DNA, 3726 bp, Homo sapiens
  source 1..3726: mol_type = unassigned DNA
tcctcccgcctcggccattttccctcctccccatctcctccccttagtcccctcccctcccgatcctcatccccttgccctcccccagcccagggacttttccggaaagtttttattttccgtctgggctctcggagaaagaagctcctggctcagcggctgcaaaactttcctgctgccgcgccgccagcccccgccctccgctgcccggccctgcgccccgccgagcgatgagcgcccctccggtcctgcggccgcccagtccgctgctgcccgtggcggcggcagctgccgcagcggccgccgcactggtcccagggtccgggcccgggcccgcgccgttcttggctcctgtcgcggccccggtcgggggcatctcgttccatctgcagatcggcctgagccgtgagccggtgctgctgctgcaggactcgtccggggactacagcctggcgcacgtccgcgagatggcttgctccattgtcgaccagaagttccctgaatgtggtttctacggaatgtatgataagatcctgctttttcgccatgaccctacctctgaaaacatccttcagctggtgaaagcggccagtgatatccaggaaggcgatcttattgaagtggtcttgtcagcttccgccacctttgaagactttcagattcgtccccacgctctctttgttcattcatacagagctccagctttctgtgatcactgtggagaaatgctgtgggggctggtacgtcaaggtcttaaatgtgaagggtgtggtctgaattaccataagagatgtgcatttaaaatacccaacaattgcagcggtgtgaggcggagaaggctctcaaacgtttccctcactggggtcagcaccatccgcacatcatctgctgaactctctacaagtgcccctgatgagccccttctgcaaaaatcaccatcagagtcgtttattggtcgagagaagaggtcaaattctcaatcatacattggacgaccaattcaccttgacaagattttgatgtctaaagttaaagtgccgcacacatttgtcatccactcctacacccggcccacagtgtgccagtactgcaagaagcttctgaaggggcttttcaggcagggcttgcagtgcaaagattgcagattcaactgccataaacgttgtgcaccgaaagtaccaaacaactgccttggcgaagtgaccattaatggagatttgcttagccctggggcagagtctgatgtggtcatggaagaagggagtgatgacaatgatagtgaaaggaacagtgggctcatggatgatatggaagaagcaatggtccaagatgcagagatggcaatggcagagtgccagaacgacagtggcgagatgcaagatccagacccagaccacgaggacgccaacagaaccatcagtccatcaacaagcaacaatatcccactcatgagggtagtgcagtctgtcaaacacacgaagaggaaaagcagcacagtcatgaaagaaggatggatggtccactacaccagcaaggacacgctgcggaaacggcactattggagattggatagcaaatgtattaccctctttcagaatgacacaggaagcaggtactacaaggaaattcctttatctgaaattttgtctctggaaccagtaaaaacttcagctttaattcctaatggggccaatcctcattgtttcgaaatcactacggcaaatgtagtgtattatgtgggagaaaatgtggtcaatccttccagcccatcaccaaataacagtgttctcaccagtggcgttggtgcagatgtggccaggatgtgggagatagccatccagcatgcccttatgcccgtcattcccaagggctcctccgtgggtacaggaaccaacttgcacagagatatctctgtgagtatttcagtatcaaattgccagattcaagaaaatgtggacatcagcacagtatatcagatttttcctgatgaagtactgggttctggacagtttggaattgtttatggaggaaaacatcgtaaaacaggaagagatgtagctattaaaatcattgacaaattacgatttccaacaaaacaagaaagccagcttcgtaatgaggttgcaattctacagaaccttcatcaccctggtgttgtaaatttggagtgtatgtttgagacgcctgaaagagtgtttgttgttatggaaaaactccatggagacatgctggaaatgatcttgtcaagtgaaaagggcaggttgccagagcacataacgaagtttttaattactcagatactcgtggctttgcggcaccttcattttaaaaatatcgttcactgtgacctcaaaccagaaaatgtgttgctagcctcagctgatccttttcctcaggtgaaactttgtgattttggttttgcccggatcattggagagaagtctttccggaggtcagtggtgggtacccccgcttacctggctcctgaggtcctaaggaacaagggctacaatcgctctctagacatgtggtctgttggggtcatcatctatgtaagcctaagcggcacattcccatttaatgaagatgaagacatacacgaccaaattcagaatgcagctttcatgtatccaccaaatccctggaaggaaatatctcatgaagccattgatcttatcaacaatttgctgcaagtaaaaatgagaaagcgctacagtgtggataagaccttgagccacccttggctacaggactatcagacctggttagatttgcgagagctggaatgcaaaatcggggagcgctacatcacccatgaaagtgatgacctgaggtgggagaagtatgcaggcgagcaggggctgcagtaccccacacacctgatcaatccaagtgctagccacagtgacactcctgagactgaagaaacagaaatgaaagccctcggtgagcgtgtcagcatcctctgagttccatctcctataatctgtcaaaacactgtggaactaataaatacatacggtcaggtttaacatttgccttgcagaactgccattattttctgtcagatgagaacaaagctgttaaactgttagcactgttgatgtatctgagttgccaagacaaatcaacagaagcatttgtattttgtgtgaccaactgtgttgtattaacaaaagttccctgaaacacgaaacttgttattgtgaatgattcatgttatatttaatgcattaaacctgtctccactgtgcctttgcaaatcagtgtttttcttactggagcttcattttggtaagagacagaatgtatctgtgaagtagttctgtttggtgtgtcccattggtgttgtcattgtaaacaaactcttgaagagtcgattatttccagtgttctatgaacaactccaaaacccatgtgggaaaaaaatgaatgaggagggtagggaataaaatcctaagacacaaatgcatgaacaagttttaatgtatagttttgaatcctttgcctgcctggtgtgcctcagtatatttaaactcaagacaatgcacctagctgtgcaagacctagtgctcttaagcctaaatgccttagaaatgtaaactgccatatataacagatacatttccctctttcttataatactctgttgtactatggaaaatcagctgctcagcaacctttcacctttgtgtatttttcaataataaaaaatattcttgtcaa

SEQ ID NO: 24286 - DNA, 3600 bp, Homo sapiens
  source 1..3600: mol_type = unassigned DNA
actgtcgctccggacacttcctcctgggccgccgccgccgccgccgacttaaactttggagggggaaaaagagctactggcgcctggcgaccctccctgccccccacccaaccccgctccggcaacgcccccttcctcacggctcccgaccgaacttttctccaacttctgcgactcgtgagattcccttctacccactccggccctcgggacccctctgcccatcccctggccggtcgggtccctgcgaacccctttatctctggaatccactcggtccccgactcagagactcctgccctccacccccaaggtgaattcccccgggccgccttctgagtgggatcctcttcttggagcactggatcctgggattccctctgcccccttctcaatccctcctctagggaaggggcctttgaatcgcgggctctcctgatccctgtgaccccgacctactagatttcctctcaggcttcttggaatctcaatcgctgggacctccaacccactacttttctcctttctgatcttctgggagccctggattccgggcctctgacccactatagtgcctttctctccttcccaggaccccgccatcctcaggtcccctccgcctgccagatcttttctcggatccccgctctcccaccacctgctcacgagatcccgcggatctagaacccagggtcccccggggccccccggccgggtcccgggtgggctccaggcggccggtccccggcctccccccatggccaccgccccctcttatcccgccgggctccctggctctcccgggccggggtctcctccgccccccggcggcctagagctgcagtcgccgccaccgctactgccccagatcccggccccgggttccggggtctcctttcacatccagatcgggctgacccgcgagttcgtgctgttgcccgccgcctccgagctggctcatgtgaagcagctggcctgttccatcgtggaccagaagttccctgagtgtggcttctacggcctttacgacaagatcctgcttttcaaacatgaccccacgtcggccaacctcctgcagctggtgcgctcgtccggagacatccaggagggcgacctggtggaggtggtgctgtcggcctcggccaccttcgaggacttccagatccgcccgcacgccctcacggtgcactcctatcgggcgcctgccttctgtgatcactgcggggagatgctcttcggcctagtgcgccagggcctcaagtgcgatggctgcgggctgaactaccacaagcgctgtgccttcagcatccccaacaactgtagtggggcccgcaaacggcgcctgtcatccacgtctctggccagtggccactcggtgcgcctcggcacctccgagtccctgccctgcacggctgaagagctgagccgtagcaccaccgaactcctgcctcgccgtcccccgtcatcctcttcctcctcttctgcctcatcgtatacgggccgccccattgagctggacaagatgctgctctccaaggtcaaggtgccgcacaccttcctcatccacagctatacacggcccaccgtttgccaggcttgcaagaaactcctcaagggcctcttccggcagggcctgcaatgcaaagactgcaagtttaactgtcacaaacgctgcgccacccgcgtccctaatgactgcctgggggaggcccttatcaatggagatgtgccgatggaggaggccaccgatttcagcgaggctgacaagagcgccctcatggatgagtcagaggactccggtgtcatccctggctcccactcagagaatgcgctccacgccagtgaggaggaggaaggcgagggaggcaaggcccagagctccctggggtacatccccctaatgagggtggtgcaatcggtgcgacacacgacgcggaaatccagcaccacgctgcgggagggttgggtggttcattacagcaacaaggacacgctgagaaagcggcactattggcgcctggactgcaagtgtatcacgctcttccagaacaacacgaccaacagatactataaggaaattccgctgtcagaaatcctcacggtggagtccgcccagaacttcagccttgtgccgccgggcaccaacccacactgctttgagatcgtcactgccaatgccacctacttcgtgggcgagatgcctggcgggactccgggtgggccaagtgggcagggggctgaggccgcccggggctgggagacagccatccgccaggccctgatgcccgtcatccttcaggacgcacccagcgccccaggccacgcgccccacagacaagcttctctgagcatctctgtgtccaacagtcagatccaagagaatgtggacattgccactgtctaccagatcttccctgacgaagtgctgggctcagggcagtttggagtggtctatggaggaaaacaccggaagacaggccgggacgtggcagttaaggtcattgacaaactgcgcttccctaccaagcaggagagccagctccggaatgaagtggccattctgcagagcctgcggcatcccgggatcgtgaacctggagtgcatgttcgagacgcctgagaaagtgtttgtggtgatggagaagctgcatggggacatgttggagatgatcctgtccagtgagaagggccggctgcctgagcgcctcaccaagttcctcatcacccagatcctggtggctttgagacaccttcacttcaagaacattgtccactgtgacttgaaaccagaaaacgtgttgctggcatcagcagacccatttcctcaggtgaagctgtgtgactttggctttgctcgcatcatcggcgagaagtcgttccgccgctcagtggtgggcacgccggcctacctggcacccgaggtgctgctcaaccagggctacaaccgctcgctggacatgtggtcagtgggcgtgatcatgtacgtcagcctcagcggcaccttccctttcaacgaggatgaggacatcaatgaccagatccagaacgccgccttcatgtacccggccagcccctggagccacatctcagctggagccattgacctcatcaacaacctgctgcaggtgaagatgcgcaaacgctacagcgtggacaaatctctcagccacccctggttacaggagtaccagacgtggctggacctccgagagctggaggggaagatgggagagcgatacatcacgcatgagagtgacgacgtgcgctgggagcagtttgcagcagagcatccgctgcctgggtctgggctgcccacggacagggatctcggtggggcctgtccaccacaggaccacgacatgcaggggctggcggagcgcatcagtgttctctgaggtcctgtgccctcgtccagctgctgccctccacagcggttcttcacaggatcccagcaatgaactgttctagggaaagtggcttcctgcccaaactggatgggacacgtggggagtggggtggggggagctatttccaaggcccctccctgtttccccagcaattaaaacggactcatctctggccccatggccttgatctcagc

SEQ ID NO: 24287 - DNA, 3321 bp, Homo sapiens
  source 1..3321: mol_type = unassigned DNA
actgtcgctccggacacttcctcctgggccgccgccgccgccgccgacttaaactttggagggggaaaaagagctactggcgcctggcgaccctccctgccccccacccaaccccgctccggcaacgcccccttcctcacggctcccgaccgaacttttctccaacttctgcgactcgtgagattcccttctacccactccggccctcgggacccctctgcccatcccctggccggtcgggtccctgcgaacccctttatctctggaatccactcggtccccgactcagagactcctgccctccacccccaaggaccccgccatcctcaggtcccctccgcctgccagatcttttctcggatccccgctctcccaccacctgctcacgagatcccgcggatctagaacccagggtcccccggggccccccggccgggtcccgggtgggctccaggcggccggtccccggcctccccccatggccaccgccccctcttatcccgccgggctccctggctctcccgggccggggtctcctccgccccccggcggcctagagctgcagtcgccgccaccgctactgccccagatcccggccccgggttccggggtctcctttcacatccagatcgggctgacccgcgagttcgtgctgttgcccgccgcctccgagctggctcatgtgaagcagctggcctgttccatcgtggaccagaagttccctgagtgtggcttctacggcctttacgacaagatcctgcttttcaaacatgaccccacgtcggccaacctcctgcagctggtgcgctcgtccggagacatccaggagggcgacctggtggaggtggtgctgtcggcctcggccaccttcgaggacttccagatccgcccgcacgccctcacggtgcactcctatcgggcgcctgccttctgtgatcactgcggggagatgctcttcggcctagtgcgccagggcctcaagtgcgatggctgcgggctgaactaccacaagcgctgtgccttcagcatccccaacaactgtagtggggcccgcaaacggcgcctgtcatccacgtctctggccagtggccactcggtgcgcctcggcacctccgagtccctgccctgcacggctgaagagctgagccgtagcaccaccgaactcctgcctcgccgtcccccgtcatcctcttcctcctcttctgcctcatcgtatacgggccgccccattgagctggacaagatgctgctctccaaggtcaaggtgccgcacaccttcctcatccacagctatacacggcccaccgtttgccaggcttgcaagaaactcctcaagggcctcttccggcagggcctgcaatgcaaagactgcaagtttaactgtcacaaacgctgcgccacccgcgtccctaatgactgcctgggggaggcccttatcaatggagatgtgccgatggaggaggccaccgatttcagcgaggctgacaagagcgccctcatggatgagtcagaggactccggtgtcatccctggctcccactcagagaatgcgctccacgccagtgaggaggaggaaggcgagggaggcaaggcccagagctccctggggtacatccccctaatgagggtggtgcaatcggtgcgacacacgacgcggaaatccagcaccacgctgcgggagggttgggtggttcattacagcaacaaggacacgctgagaaagcggcactattggcgcctggactgcaagtgtatcacgctcttccagaacaacacgaccaacagatactataaggaaattccgctgtcagaaatcctcacggtggagtccgcccagaacttcagccttgtgccgccgggcaccaacccacactgctttgagatcgtcactgccaatgccacctacttcgtgggcgagatgcctggcgggactccgggtgggccaagtgggcagggggctgaggccgcccggggctgggagacagccatccgccaggccctgatgcccgtcatccttcaggacgcacccagcgccccaggccacgcgccccacagacaagcttctctgagcatctctgtgtccaacagtcagatccaagagaatgtggacattgccactgtctaccagatcttccctgacgaagtgctgggctcagggcagtttggagtggtctatggaggaaaacaccggaagacaggccgggacgtggcagttaaggtcattgacaaactgcgcttccctaccaagcaggagagccagctccggaatgaagtggccattctgcagagcctgcggcatcccgggatcgtgaacctggagtgcatgttcgagacgcctgagaaagtgtttgtggtgatggagaagctgcatggggacatgttggagatgatcctgtccagtgagaagggccggctgcctgagcgcctcaccaagttcctcatcacccagatcctggtggctttgagacaccttcacttcaagaacattgtccactgtgacttgaaaccagaaaacgtgttgctggcatcagcagacccatttcctcaggtgaagctgtgtgactttggctttgctcgcatcatcggcgagaagtcgttccgccgctcagtggtgggcacgccggcctacctggcacccgaggtgctgctcaaccagggctacaaccgctcgctggacatgtggtcagtgggcgtgatcatgtacgtcagcctcagcggcaccttccctttcaacgaggatgaggacatcaatgaccagatccagaacgccgccttcatgtacccggccagcccctggagccacatctcagctggagccattgacctcatcaacaacctgctgcaggtgaagatgcgcaaacgctacagcgtggacaaatctctcagccacccctggttacaggagtaccagacgtggctggacctccgagagctggaggggaagatgggagagcgatacatcacgcatgagagtgacgacgtgcgctgggagcagtttgcagcagagcatccgctgcctgggtctgggctgcccacggacagggatctcggtggggcctgtccaccacaggaccacgacatgcaggggctggcggagcgcatcagtgttctctgaggtcctgtgccctcgtccagctgctgccctccacagcggttcttcacaggatcccagcaatgaactgttctagggaaagtggcttcctgcccaaactggatgggacacgtggggagtggggtggggggagctatttccaaggcccctccctgtttccccagcaattaaaacggactcatctctggccccatggccttgatctcagc

SEQ ID NO: 24288 - DNA, 2923 bp, Homo sapiens
  source 1..2923: mol_type = unassigned DNA
gttcattcagcatcccctcccacctccgccaggttccggaaaattcgaggtgtccacgctcccggagccactctccctcccaccccagctcccccttccagccaccaaacccacgccggcgccccctccccgtacaattggggcgctggcatcctgcccggctcgcgctggggttgggagggggcaggcaggaagcgagggcctgcggggtctctgcgtttccgggggaaacagccggccctgccctgggagggtcacagtccgcccgctgctgaaggcggctctgagcttttccgtcgccacatccctctcccgcccctcagttccctgagtgtggcttctacggcctttacgacaagatcctgcttttcaaacatgaccccacgtcggccaacctcctgcagctggtgcgctcgtccggagacatccaggagggcgacctggtggaggtggtgctgtcggcctcggccaccttcgaggacttccagatccgcccgcacgccctcacggtgcactcctatcgggcgcctgccttctgtgatcactgcggggagatgctcttcggcctagtgcgccagggcctcaagtgcgatggctgcgggctgaactaccacaagcgctgtgccttcagcatccccaacaactgtagtggggcccgcaaacggcgcctgtcatccacgtctctggccagtggccactcggtgcgcctcggcacctccgagtccctgccctgcacggctgaagagctgagccgtagcaccaccgaactcctgcctcgccgtcccccgtcatcctcttcctcctcttctgcctcatcgtatacgggccgccccattgagctggacaagatgctgctctccaaggtcaaggtgccgcacaccttcctcatccacagctatacacggcccaccgtttgccaggcttgcaagaaactcctcaagggcctcttccggcagggcctgcaatgcaaagactgcaagtttaactgtcacaaacgctgcgccacccgcgtccctaatgactgcctgggggaggcccttatcaatggagatgtgccgatggaggaggccaccgatttcagcgaggctgacaagagcgccctcatggatgagtcagaggactccggtgtcatccctggctcccactcagagaatgcgctccacgccagtgaggaggaggaaggcgagggaggcaaggcccagagctccctggggtacatccccctaatgagggtggtgcaatcggtgcgacacacgacgcggaaatccagcaccacgctgcgggagggttgggtggttcattacagcaacaaggacacgctgagaaagcggcactattggcgcctggactgcaagtgtatcacgctcttccagaacaacacgaccaacagatactataaggaaattccgctgtcagaaatcctcacggtggagtccgcccagaacttcagccttgtgccgccgggcaccaacccacactgctttgagatcgtcactgccaatgccacctacttcgtgggcgagatgcctggcgggactccgggtgggccaagtgggcagggggctgaggccgcccggggctgggagacagccatccgccaggccctgatgcccgtcatccttcaggacgcacccagcgccccaggccacgcgccccacagacaagcttctctgagcatctctgtgtccaacagtcagatccaagagaatgtggacattgccactgtctaccagatcttccctgacgaagtgctgggctcagggcagtttggagtggtctatggaggaaaacaccggaagacaggccgggacgtggcagttaaggtcattgacaaactgcgcttccctaccaagcaggagagccagctccggaatgaagtggccattctgcagagcctgcggcatcccgggatcgtgaacctggagtgcatgttcgagacgcctgagaaagtgtttgtggtgatggagaagctgcatggggacatgttggagatgatcctgtccagtgagaagggccggctgcctgagcgcctcaccaagttcctcatcacccagatcctggtggctttgagacaccttcacttcaagaacattgtccactgtgacttgaaaccagaaaacgtgttgctggcatcagcagacccatttcctcaggtgaagctgtgtgactttggctttgctcgcatcatcggcgagaagtcgttccgccgctcagtggtgggcacgccggcctacctggcacccgaggtgctgctcaaccagggctacaaccgctcgctggacatgtggtcagtgggcgtgatcatgtacgtcagcctcagcggcaccttccctttcaacgaggatgaggacatcaatgaccagatccagaacgccgccttcatgtacccggccagcccctggagccacatctcagctggagccattgacctcatcaacaacctgctgcaggtgaagatgcgcaaacgctacagcgtggacaaatctctcagccacccctggttacaggagtaccagacgtggctggacctccgagagctggaggggaagatgggagagcgatacatcacgcatgagagtgacgacgtgcgctgggagcagtttgcagcagagcatccgctgcctgggtctgggctgcccacggacagggatctcggtggggcctgtccaccacaggaccacgacatgcaggggctggcggagcgcatcagtgttctctgaggtcctgtgccctcgtccagctgctgccctccacagcggttcttcacaggatcccagcaatgaactgttctagggaaagtggcttcctgcccaaactggatgggacacgtggggagtggggtggggggagctatttccaaggcccctccctgtttccccagcaattaaaacggactcatctctggccccatggccttgatctc

SEQ ID NO: 24289 - DNA, 2502 bp, Homo sapiens
  source 1..2502: mol_type = unassigned DNA
gaggcaagtgtcaggccgatgtgtcgcccgcgaggggccggggtcggggccgccggggccatgcgcgcgggctgggcagggggccggcggggcgcagagcggagccgcctcggagcctgagccgcccggggccggggccggggagccgcgcggggccggccggccggggggaggggagcgatgcggcgccggcgggcggcagtggccgcgggtttctgcgcctccttcctgctgggctccgtcctcaacgtgctcttcgctccgggctcggagcctccgaggccaggccagtcccctgagccttcgccggccccgggtccgggccgtcgcgggggccgcggggagctggcccggcagatccgggcgcgctacgaggaggtgcagcgctattcccgcgggggccccgggcccggggcgggccggccggagcggcggcgcctgatggacctggctccgggcgggcccggcctgccgcgcccccggcccccttgggcccggcccctgtccgacggcgccccaggctggcccccggctcccggcccaggctcccccggcccgggcccgcgcctgggctgcgccgcgcttcgcaacgtgtccggcgcgcagtacatgggctcaggctacaccaaggccgtgtaccgggtccgcctgcccggcggtgccgcggtggcgctcaaggcggtggactttagcggccacgatctgggcagctgcgtgcgcgagttcggggtacggaggggctgctatcggctggcggcccacaagctgcttaaggagatggtgctgctggagcggctgcggcaccccaacgtgctgcagctctatggctactgctaccaggacagcgaggacatcccagacaccctgaccaccatcacggagctgggcgcccctgtagaaatgatccagctgctgcaaacttcctgggaggatcgattccgaatctgcctgagcctgggccgcctcctccaccacctggcccactccccactgggctccgtcactctgctggacttccgccctcggcagtttgtgctggtggatggggagctcaaagtgacggacctggatgacgcacgtgtggaggagacgccgtgtgcaggcagcaccgactgcatactcgagtttccggccaggaacttcaccctgccctgctcagcccagggctggtgcgagggcatgaacgagaagcggaacctctataatgcctacaggtttttcttcacatacctcctgcctcacagtgccccgccttcactgcgtcctctgctggacagcatcgtcaacgccacaggagagctcgcctggggggtggacgagaccctggcccagctggagaaggtgctgcacctgtaccggagcgggcagtatctgcagaactccacggcaagcagcagtaccgagtaccagtgtatcccagacagcaccatcccccaggaagactaccgctgctggccatcctaccaccacgggagctgcctcctttcagtgttcaacctggctgaggctgtggatgtctgtgagagccatgcccagtgtcgggcctttgtggtcaccaaccagaccacctggacaggtcggcagctggtctttttcaagactggatggagccaagtggtccctgatcccaacaagaccacatatgtgaaggcctctggctgacctatctgagggctcggctgaccagctgactatcctcagcagctgggcttgcctgtggagggagtgacttgcactggcagcactgcatgtcacctgggaacccctgcagacaaagctaacatcccagacagacagatgtgaccaggacaaacgtgcaataatgccaaatgttaaaatgtgagtttaccagcctagctatgggactgctggctcctagtccaggaatcatgggggtatgactgcctctccaaccctgtgggctgtaagcaagctcaggctagtctccccactgggggctgtgcccctccctgggacggttccgtgggcagccccatcactgtgttcaatagtgtgagaatgtagctaaagcccctgctgctgctgctgcacatgccacagcaggcggtgggggctgcgtggggacaatccatcgtggagtgttctctcagcttaggtctggacaggagacttggcgggagatgctccaggatgtgggtgattctgtacctggggaggctatctctgacctcccgacaggggacactcccaggccagcccaggggtcaggggcagaggtgcacacctcagcatgagccaagactggggtcagggagcaggtgtggtttgagccaggacctggggcgggggtggggccggggcctttctgcctcatttgctttcaatgaaagcctcaaagcagccaaaaccaggctttcccccttcctcgagtttgaatatccagaatcttttgtacttcttgttggttaaattgtttatttttgtaaaaaataaaataaaattagttaataaaatgatgtttcacagcaaactcttccctaa

SEQ ID NO: 24290 - DNA, 3069 bp, Homo sapiens
  source 1..3069: mol_type = unassigned DNA
cggcggcctggccaggcgaggcgggagccgagcaggccggagcgggccgcgcgccggggagggtcgcgccgcgcccgccccctccccgccacgcccggggcgcacgcgcgctcctctggccgcccctccctccgcgcggggacccctggcgggcggcaggaggacatggccagcgacgccgtgcagagtgagcctcgcagctggtccctgctagagcagctgggcctggccggggcagacctggcggcccccggggtacagcagcagctggagctggagcgggagcggctgcggcgggaaatccgcaaggagctgaagctgaaggagggtgctgagaacctgcggcgggccaccactgacctgggccgcagcctgggccccgtagagctgctgctgcggggctcctcgcgccgcctcgacctgctgcaccagcagctgcaggagctgcacgcccacgtggtgcttcccgacccggcggccacccacgatggcccccagtcccctggtgcgggtggccccacctgctcggccaccaacctgagccgcgtggcgggcctggagaagcagttggccattgagctgaaggtgaagcagggggcggagaacatgatccagacctacagcaatggcagcaccaaggaccggaagctgctgctgacagcccagcagatgttgcaggacagtaagaccaagattgacatcatccgcatgcaactccgccgggcgctgcaggccggccagctggagaaccaggcagccccggatgacacccaagggagtcctgacctgggggctgtggagctgcgcatcgaagagctgcggcaccacttccgagtggagcacgcggtggccgagggtgccaagaacgtactgcgcctgctcagcgctgccaaggccccggaccgcaaggcagtcagcgaggcccaggagaaattaacagaatccaaccagaagctggggctgctgcgggaggctctggagcggagacttggggagctgcccgccgaccaccccaaggggcggctgctgcgagaagagctcgctgcggcctcctccgctgccttcagcacccgcctggccgggccctttcccgccacgcactacagcaccctgtgcaagcccgcgccgctcacagggaccctggaggtacgagtggtgggctgcagagacctcccagagaccatcccgtggaaccctaccccctcaatggggggacctgggaccccagacagccgcccccccttcctgagccgcccagcccggggcctttacagccgaagcggaagcctcagtggccggagcagcctcaaagcagaagccgagaacaccagtgaagtcagcactgtgcttaagctggataacacagtggtggggcagacgtcttggaagccatgtggccccaatgcctgggaccagagcttcactctggagctggaaagggcacgggaactggagttggctgtgttctggcgggaccagcggggcctgtgtgccctcaaattcctgaagttggaggatttcttggacaatgagaggcatgaggtgcagctggacatggaaccccagggctgcctggtggctgaggtcaccttccgcaaccctgtcattgagaggattcctcggctccgacggcagaagaaaattttctccaagcagcaagggaaggcgttccagcgtgctaggcagatgaacatcgatgtcgccacgtgggtgcggctgctccggaggctcatccccaatgccacgggcacaggcacctttagccctggggcttctccaggatccgaggcccggaccacgggtgacatatcggtggagaagctgaacctcggcactgactcggacagctcacctcagaagagctcgcgggatcctccttccagcccatcgagcctgagctcccccatccaggaatccactgctcccgagctgccttcggagacccaggagaccccaggccccgccctgtgcagccctctgaggaagtcacctctgaccctcgaagatttcaagttcctggcggtgctgggccggggtcattttgggaaggtgctcctctccgaattccggcccagtggggagctgttcgccatcaaggctctgaagaaaggggacattgtggcccgagacgaggtggagagcctgatgtgtgagaagcggatattggcggcagtgaccagtgcgggacaccccttcctggtgaacctcttcggctgtttccagacaccggagcacgtgtgcttcgtgatggagtactcggccggtggggacctgatgctgcacatccacagcgacgtgttctctgagccccgtgccatcttttattccgcctgcgtggtgctgggcctacagtttcttcacgaacacaagatcgtctacagggacctgaagttggacaatttgctcctggacaccgagggctacgtcaagatcgcagactttggcctctgcaaggaggggatgggctatggggaccggaccagcacattctgtgggaccccggagttcctggcccctgaggtgctgacggacacgtcgtacacgcgagctgtggactggtggggactgggtgtgctgctctacgagatgctggttggcgagtccccattcccaggggatgatgaggaggaggtcttcgacagcatcgtcaacgacgaggttcgctacccccgcttcctgtcggccgaagccatcggcatcatgagaaggctgcttcggaggaacccagagcggaggctgggatctagcgagagagatgcagaagatgtgaagaaacagcccttcttcaggactctgggctgggaagccctgttggcccggcgcctgccaccgccctttgtgcccacgctgtccggccgcaccgacgtcagcaacttcgacgaggagttcaccggggaggcccccacactgagcccgccccgcgacgcgcggcccctcacagccgcggagcaggcagccttcctggacttcgacttcgtggccgggggctgctagccccctcccctgcccctgcccctgcccctgcccgagagctcttagtttttaaaaaggcctttgggatttgccgga

SEQ ID NO: 24291 - DNA, 2960 bp, Homo sapiens
  source 1..2960: mol_type = unassigned DNA
aagagggcggggccctcagcccggacccaggatggcggaggccaataacccctcggagcaggagctggagagtgagcctcgcagctggtccctgctagagcagctgggcctggccggggcagacctggcggcccccggggtacagcagcagctggagctggagcgggagcggctgcggcgggaaatccgcaaggagctgaagctgaaggagggtgctgagaacctgcggcgggccaccactgacctgggccgcagcctgggccccgtagagctgctgctgcggggctcctcgcgccgcctcgacctgctgcaccagcagctgcaggagctgcacgcccacgtggtgcttcccgacccggcggccacccacgatggcccccagtcccctggtgcgggtggccccacctgctcggccaccaacctgagccgcgtggcgggcctggagaagcagttggccattgagctgaaggtgaagcagggggcggagaacatgatccagacctacagcaatggcagcaccaaggaccggaagctgctgctgacagcccagcagatgttgcaggacagtaagaccaagattgacatcatccgcatgcaactccgccgggcgctgcaggccggccagctggagaaccaggcagccccggatgacacccaagggagtcctgacctgggggctgtggagctgcgcatcgaagagctgcggcaccacttccgagtggagcacgcggtggccgagggtgccaagaacgtactgcgcctgctcagcgctgccaaggccccggaccgcaaggcagtcagcgaggcccaggagaaattaacagaatccaaccagaagctggggctgctgcgggaggctctggagcggagacttggggagctgcccgccgaccaccccaaggggcggctgctgcgagaagagctcgctgcggcctcctccgctgccttcagcacccgcctggccgggccctttcccgccacgcactacagcaccctgtgcaagcccgcgccgctcacagggaccctggaggtacgagtggtgggctgcagagacctcccagagaccatcccgtggaaccctaccccctcaatggggggacctgggaccccagacagccgcccccccttcctgagccgcccagcccggggcctttacagccgaagcggaagcctcagtggccggagcagcctcaaagcagaagccgagaacaccagtgaagtcagcactgtgcttaagctggataacacagtggtggggcagacgtcttggaagccatgtggccccaatgcctgggaccagagcttcactctggagctggaaagggcacgggaactggagttggctgtgttctggcgggaccagcggggcctgtgtgccctcaaattcctgaagttggaggatttcttggacaatgagaggcatgaggtgcagctggacatggaaccccagggctgcctggtggctgaggtcaccttccgcaaccctgtcattgagaggattcctcggctccgacggcagaagaaaattttctccaagcagcaagggaaggcgttccagcgtgctaggcagatgaacatcgatgtcgccacgtgggtgcggctgctccggaggctcatccccaatgccacgggcacaggcacctttagccctggggcttctccaggatccgaggcccggaccacgggtgacatatcggtggagaagctgaacctcggcactgactcggacagctcacctcagaagagctcgcgggatcctccttccagcccatcgagcctgagctcccccatccaggaatccactgctcccgagctgccttcggagacccaggagaccccaggccccgccctgtgcagccctctgaggaagtcacctctgaccctcgaagatttcaagttcctggcggtgctgggccggggtcattttgggaaggtgctcctctccgaattccggcccagtggggagctgttcgccatcaaggctctgaagaaaggggacattgtggcccgagacgaggtggagagcctgatgtgtgagaagcggatattggcggcagtgaccagtgcgggacaccccttcctggtgaacctcttcggctgtttccagacaccggagcacgtgtgcttcgtgatggagtactcggccggtggggacctgatgctgcacatccacagcgacgtgttctctgagccccgtgccatcttttattccgcctgcgtggtgctgggcctacagtttcttcacgaacacaagatcgtctacagggacctgaagttggacaatttgctcctggacaccgagggctacgtcaagatcgcagactttggcctctgcaaggaggggatgggctatggggaccggaccagcacattctgtgggaccccggagttcctggcccctgaggtgctgacggacacgtcgtacacgcgagctgtggactggtggggactgggtgtgctgctctacgagatgctggttggcgagtccccattcccaggggatgatgaggaggaggtcttcgacagcatcgtcaacgacgaggttcgctacccccgcttcctgtcggccgaagccatcggcatcatgagaaggctgcttcggaggaacccagagcggaggctgggatctagcgagagagatgcagaagatgtgaagaaacagcccttcttcaggactctgggctgggaagccctgttggcccggcgcctgccaccgccctttgtgcccacgctgtccggccgcaccgacgtcagcaacttcgacgaggagttcaccggggaggcccccacactgagcccgccccgcgacgcgcggcccctcacagccgcggagcaggcagccttcctggacttcgacttcgtggccgggggctgctagccccctcccctgcccctgcccctgcccctgcccgagagctcttagtttttaaaaaggcctttgggatttgccggatccttgc

SEQ ID NO: 24292 - DNA, 2632 bp, Homo sapiens
  source 1..2632: mol_type = unassigned DNA
gcttttgcgacgcggtgacagccaaatggtgcgacaggaggagctgcagccgcggccgcagcgcccgcacggagaggcttgaggcggctcctggcgtcgcccagagggagcgactagacgaacagtccggtgagggcggcgagaggaagcccgctacgagtgccctagctccccgccgctctcgatgaaccggacggaataagccgcgcctccagcaggggctgcgcctccatgaatccctagttgtttttttttttttctttctctcccctctcctcacccccaccccgagccccgtcccgccttctcccttcgccagaggcggccgcgtccaggtgcggagtccataccggagcgcaatggcgtccaaccccgaacggggggagattctgctcacggaactgcagggggattcccgaagtcttccgttttctgagaatgtgagtgctgttcaaaaattagacttttcagatacaatggtgcagcagaaattggatgatatcaaggatcgaattaagagagaaataaggaaagaactgaaaatcaaagaaggagctgaaaatctgaggaaagtcacaacagataaaaaaagtttggcttatgtagacaacattttgaaaaaatcaaataaaaaattagaagaactacatcacaagctgcaggaattaaatgcacatattgttgtatcagatccagaagatattacagattgcccaaggactccagatactccaaataatgaccctcgttgttctactagcaacaatagattgaaggccttacaaaaacaattggatatagaacttaaagtaaaacaaggtgcagagaatatgatacagatgtattcaaatggatcttcaaaggatcggaaactccatggtacagctcagcaactgctccaggacagcaagacaaaaatagaagtcatacgaatgcagattcttcaggcagtccagactaatgaattggcttttgataatgcaaaacctgtgataagtcctcttgaacttcggatggaagaattaaggcatcattttaggatagagtttgcagtagcagaaggtgcaaagaatgtaatgaaattacttggctcaggaaaagtaacagacagaaaagcactttcagaagctcaagcaagatttaatgaatcaagtcagaagttggaccttttaaagtattcattagagcaaagattaaacgaagtccccaagaatcatcccaaaagcaggattattattgaagaactttcacttgttgctgcatcaccaacactaagtccacgtcaaagtatgatatctacgcaaaatcaatatagtacactatccaaaccagcagcactaacaggtactttggaagttcgtcttatgggctgccaagatatcctagagaatgtccctggacggtcaaaagcaacatcagttgcactgcctggttggagtccaagtgaaaccagatcatctttcatgagcagaacgagtaaaagtaaaagcggaagtagtcgaaatcttctaaaaaccgatgacttgtccaatgatgtctgtgctgttttgaagctcgataatactgtggttggccaaactagctggaaacccatttccaatcagtcatgggaccagaagtttacactggaactggacaggtcacgtgaactggaaatttcagtttattggcgtgattggcggtctctgtgtgctgtaaaatttctgaggttagaagattttttagacaaccaacggcatggcatgtgtctctatttggaaccacagggtactttatttgcagaggttaccttttttaatccagttattgaaagaagaccaaaacttcaaagacaaaagaaaattttttcaaagcaacaaggcaaaacatttctcagagctcctcaaatgaatattaatattgccacttggggaaggctagtaagaagagctattcctacagtaaatcattctggcaccttcagccctcaagctcctgtgcctactacagtgccagtggttgatgtacgcatccctcaactagcacctccagctaggtatgtgtctgagattttaagcatctcttatacaaagttattgggacattcttacgtactgattatagcaggtgtactgagtcttgcttttttcccaagtagtattttgaaagtagtgttctgtttacttaaaaagtaaattgtttgctttaattttaaagctgtttaaaatacagactttctattactgttttggtgagttactttatcttctataagtgattctacagtaaccaaattggactttgatcttgagcctgaacctcctccagccccaccacgagcttcttctcttggagaaatagatgaatcttctgaattaagagttttggatataccaggacaggcaagccattttaaaccttgcataattcctcttcactgaatgaattagcaataaaagcatcatagtgaataaggcgtgtctttccatttaaaattgccactgaactgtgaatttatggttttttgtttgttttttgtttttgtttttgttttttgagacagagtttcactcttgttacccaggctggagtgcaatggcatgatctcggctcactgcaacctccgcctcccggattcaagcgattctcctgc

SEQ ID NO: 24293 - DNA, 3147 bp, Homo sapiens
  source 1..3147: mol_type = unassigned DNA
tcctggcgtcgcccagagggagcgactagacgaacagtccggtgagggcggcgagaggaagcccgctacgagtgccctagctccccgccgctctcgatgaaccggacggaataagccgcgcctccagcaggggctgcgcctccatgaatccctagttgtttttttttttttctttctctcccctctcctcacccccaccccgagccccgtcccgccttctcccttcgccagaggcggccgcgtccaggtgcggagtccataccggagcgcaatggcgtccaaccccgaacggggggagattctgctcacggaactgcagattgcccaaggactccagatactccaaataatgaccctcgttgttctactagcaacaatagattgaaggccttacaaaaacaattggatatagaacttaaagtaaaacaaggtgcagagaatatgatacagatgtattcaaatggatcttcaaaggatcggaaactccatggtacagctcagcaactgctccaggacagcaagacaaaaatagaagtcatacgaatgcagattcttcaggcagtccagactaatgaattggcttttgataatgcaaaacctgtgataagtcctcttgaacttcggatggaagaattaaggcatcattttaggatagagtttgcagtagcagaaggtgcaaagaatgtaatgaaattacttggctcaggaaaagtaacagacagaaaagcactttcagaagctcaagcaagatttaatgaatcaagtcagaagttggaccttttaaagtattcattagagcaaagattaaacgaagtccccaagaatcatcccaaaagcaggattattattgaagaactttcacttgttgctgcatcaccaacactaagtccacgtcaaagtatgatatctacgcaaaatcaatatagtacactatccaaaccagcagcactaacaggtactttggaagttcgtcttatgggctgccaagatatcctagagaatgtccctggacggtcaaaagcaacatcagttgcactgcctggttggagtccaagtgaaaccagatcatctttcatgagcagaacgagtaaaagtaaaagcggaagtagtcgaaatcttctaaaaaccgatgacttgtccaatgatgtctgtgctgttttgaagctcgataatactgtggttggccaaactagctggaaacccatttccaatcagtcatgggaccagaagtttacactggaactggacaggtcacgtgaactggaaatttcagtttattggcgtgattggcggtctctgtgtgctgtaaaatttctgaggttagaagattttttagacaaccaacggcatggcatgtgtctctatttggaaccacagggtactttatttgcagaggttaccttttttaatccagttattgaaagaagaccaaaacttcaaagacaaaagaaaattttttcaaagcaacaaggcaaaacatttctcagagctcctcaaatgaatattaatattgccacttggggaaggctagtaagaagagctattcctacagtaaatcattctggcaccttcagccctcaagctcctgtgcctactacagtgccagtggttgatgtacgcatccctcaactagcacctccagctagtgattctacagtaaccaaattggactttgatcttgagcctgaacctcctccagccccaccacgagcttcttctcttggagaaatagatgaatcttctgaattaagagttttggatataccaggacaggattcagagactgtttttgatattcagaatgacagaaatagtatacttccaaaatctcaatctgaatacaagcctgatactcctcagtcaggcctagaatatagtggtattcaagaacttgaggacagaagatctcagcaaaggtttcagtttaatctacaagatttcaggtgttgtgctgtcttgggaagaggacattttggaaaggtgcttttagctgaatataaaaacacaaatgagatgtttgctataaaagccttaaagaaaggagatattgtggctcgagatgaagtagacagcctgatgtgtgaaaaaagaatttttgaaactgtgaatagtgtaaggcatccctttttggtgaacctttttgcatgtttccaaaccaaagagcatgtttgctttgtaatggaatatgctgccggtggggacctaatgatgcacattcatactgatgtcttttctgaaccaagagctgtattttatgctgcttgtgtagttcttgggttgcagtatttacatgaacacaaaattgtttatagagatttgaaattggataacttattgctagatacagagggctttgtgaaaattgctgattttggtctttgcaaagaaggaatgggatatggagatagaacaagcacattttgtggcactcctgaatttcttgccccagaagtattaacagaaacttcttatacaagggctgtagattggtggggccttggcgtgcttatatatgaaatgcttgttggtgagtctccctttcctggtgatgatgaagaggaagtttttgacagtattgtaaatgatgaagtaaggtatccaaggttcttatctacagaagccatttctataatgagaaggctgttaagaagaaatcctgaacggcgccttggggctagcgagaaagatgcagaggatgtaaaaaagcacccatttttccggctaattgattggagcgctctgatggacaaaaaagtaaagccaccatttatacctaccataagaggacgagaagatgttagtaattttgatgatgaatttacctcagaagcacctattctgactccacctcgagaaccaaggatactttcggaagaggagcaggaaatgttcagagattttgactacattgctgattggtgttaagttgctagacactgcgaaaccaagctgactcacaagaagacctcttaaaaatagcaacccttcatttgctctctgtgccaccaatagcttctgagttttttgttgttgttgtttttattgaaacacgtgaagatttgtttaaaagtaccattctaatacttcttcaaaagtggctcctcattgtacttcagcgtaaatatgagcactggaaacagtttcatg

SEQ ID NO: 24294 - DNA, 2890 bp, Homo sapiens
  source 1..2890: mol_type = unassigned DNA
ggagcgcaatggcgtccaaccccgaacggggggagattctgctcacggaactgcagggggattcccgaagtcttccgttttctgagaatgtgagtgctgttcaaaaattagacttttcagatacaatggtgcagcagaaattggatgatatcaaggatcgaattaagagagaaataaggaaagaactgaaaatcaaagaaggagctgaaaatctgaggaaagtcacaacagataaaaaaagtttggcttatgtagacaacattttgaaaaaatcaaataaaaaattagaagaactacatcacaagctgcaggaattaaatgcacatattgttgtatcagatccagaagatattacagattgcccaaggactccagatactccaaataatgaccctcgttgttctactagcaacaatagattgaaggccttacaaaaacaattggatatagaacttaaagtaaaacaaggtgcagagaatatgatacagatgtattcaaatggatcttcaaaggatcggaaactccatggtacagctcagcaactgctccaggacagcaagacaaaaatagaagtcatacgaatgcagattcttcaggcagtccagactaatgaattggcttttgataatgcaaaacctgtgataagtcctcttgaacttcggatggaagaattaaggcatcattttaggatagagtttgcagtagcagaaggtgcaaagaatgtaatgaaattacttggctcaggaaaagtaacagacagaaaagcactttcagaagctcaagcaagatttaatgaatcaagtcagaagttggaccttttaaagtattcattagagcaaagattaaacgaagtccccaagaatcatcccaaaagcaggattattattgaagaactttcacttgttgctgcatcaccaacactaagtccacgtcaaagtatgatatctacgcaaaatcaatatagtacactatccaaaccagcagcactaacaggtactttggaagttcgtcttatgggctgccaagatatcctagagaatgtccctggacggtcaaaagcaacatcagttgcactgcctggttggagtccaagtgaaaccagatcatctttcatgagcagaacgagtaaaagtaaaagcggaagtagtcgaaatcttctaaaaaccgatgacttgtccaatgatgtctgtgctgttttgaagctcgataatactgtggttggccaaactagctggaaacccatttccaatcagtcatgggaccagaagtttacactggaactggacagggttaccttttttaatccagttattgaaagaagaccaaaacttcaaagacaaaagaaaattttttcaaagcaacaaggcaaaacatttctcagagctcctcaaatgaatattaatattgccacttggggaaggctagtaagaagagctattcctacagtaaatcattctggcaccttcagccctcaagctcctgtgcctactacagtgccagtggttgatgtacgcatccctcaactagcacctccagctagtgattctacagtaaccaaattggactttgatcttgagcctgaacctcctccagccccaccacgagcttcttctcttggagaaatagatgaatcttctgaattaagagttttggatataccaggacaggattcagagactgtttttgatattcagaatgacagaaatagtatacttccaaaatctcaatctgaatacaagcctgatactcctcagtcaggcctagaatatagtggtattcaagaacttgaggacagaagatctcagcaaaggtttcagtttaatctacaagatttcaggtgttgtgctgtcttgggaagaggacattttggaaaggtgcttttagctgaatataaaaacacaaatgagatgtttgctataaaagccttaaagaaaggagatattgtggctcgagatgaagtagacagcctgatgtgtgaaaaaagaatttttgaaactgtgaatagtgtaaggcatccctttttggtgaacctttttgcatgtttccaaaccaaagagcatgtttgctttgtaatggaatatgctgccggtggggacctaatgatgcacattcatactgatgtcttttctgaaccaagagctgtattttatgctgcttgtgtagttcttgggttgcagtatttacatgaacacaaaattgtttatagagatttgaaattggataacttattgctagatacagagggctttgtgaaaattgctgattttggtctttgcaaagaaggaatgggatatggagatagaacaagcacattttgtggcactcctgaatttcttgccccagaagtattaacagaaacttcttatacaagggctgtagattggtggggccttggcgtgcttatatatgaaatgcttgttggtgagtctccctttcctggtgatgatgaagaggaagtttttgacagtattgtaaatgatgaagtaaggtatccaaggttcttatctacagaagccatttctataatgagaaggctgttaagaagaaatcctgaacggcgccttggggctagcgagaaagatgcagaggatgtaaaaaagcacccatttttccggctaattgattggagcgctctgatggacaaaaaagtaaagccaccatttatacctaccataagaggacgagaagatgttagtaattttgatgatgaatttacctcagaagcacctattctgactccacctcgagaaccaaggatactttcggaagaggagcaggaaatgttcagagattttgactacattgctgattggtgttaagttgctagacactgcgaaaccaagctgactcacaagaagacctcttaaaaatagcaacccttcatttgctc

SEQ ID NO: 24295 - DNA, 6121 bp, Homo sapiens
  source 1..6121: mol_type = unassigned DNA
gcttttgcgacgcggtgacagccaaatggtgcgacaggaggagctgcagccgcggccgcagcgcccgcacggagaggcttgaggcggctcctggcgtcgcccagagggagcgactagacgaacagtccggtgagggcggcgagaggaagcccgctacgagtgccctagctccccgccgctctcgatgaaccggacggaataagccgcgcctccagcaggggctgcgcctccatgaatccctagttgtttttttttttttctttctctcccctctcctcacccccaccccgagccccgtcccgccttctcccttcgccagaggcggccgcgtccaggtgcggagtccataccggagcgcaatggcgtccaaccccgaacggggggagattctgctcacggaactgcagggggattcccgaagtcttccgttttctgagaatgtgagtgctgttcaaaaattagacttttcagatacaatggtgcagcagaaattggatgatatcaaggatcgaattaagagagaaataaggaaagaactgaaaatcaaagaaggagctgaaaatctgaggaaagtcacaacagataaaaaaagtttggcttatgtagacaacattttgaaaaaatcaaataaaaaattagaagaactacatcacaagctgcaggaattaaatgcacatattgttgtatcagatccagaagatattacagattgcccaaggactccagatactccaaataatgaccctcgttgttctactagcaacaatagattgaaggccttacaaaaacaattggatatagaacttaaagtaaaacaaggtgcagagaatatgatacagatgtattcaaatggatcttcaaaggatcggaaactccatggtacagctcagcaactgctccaggacagcaagacaaaaatagaagtcatacgaatgcagattcttcaggcagtccagactaatgaattggcttttgataatgcaaaacctgtgataagtcctcttgaacttcggatggaagaattaaggcatcattttaggatagagtttgcagtagcagaaggtgcaaagaatgtaatgaaattacttggctcaggaaaagtaacagacagaaaagcactttcagaagctcaagcaagatttaatgaatcaagtcagaagttggaccttttaaagtattcattagagcaaagattaaacgaagtccccaagaatcatcccaaaagcaggattattattgaagaactttcacttgttgctgcatcaccaacactaagtccacgtcaaagtatgatatctacgcaaaatcaatatagtacactatccaaaccagcagcactaacaggtactttggaagttcgtcttatgggctgccaagatatcctagagaatgtccctggacggtcaaaagcaacatcagttgcactgcctggttggagtccaagtgaaaccagatcatctttcatgagcagaacgagtaaaagtaaaagcggaagtagtcgaaatcttctaaaaaccgatgacttgtccaatgatgtctgtgctgttttgaagctcgataatactgtggttggccaaactagctggaaacccatttccaatcagtcatgggaccagaagtttacactggaactggacaggtcacgtgaactggaaatttcagtttattggcgtgattggcggtctctgtgtgctgtaaaatttctgaggttagaagattttttagacaaccaacggcatggcatgtgtctctatttggaaccacagggtactttatttgcagaggttaccttttttaatccagttattgaaagaagaccaaaacttcaaagacaaaagaaaattttttcaaagcaacaaggcaaaacatttctcagagctcctcaaatgaatattaatattgccacttggggaaggctagtaagaagagctattcctacagtaaatcattctggcaccttcagccctcaagctcctgtgcctactacagtgccagtggttgatgtacgcatccctcaactagcacctccagctagtgattctacagtaaccaaattggactttgatcttgagcctgaacctcctccagccccaccacgagcttcttctcttggagaaatagatgaatcttctgaattaagagttttggatataccaggacaggattcagagactgtttttgatattcagaatgacagaaatagtatacttccaaaatctcaatctgaatacaagcctgatactcctcagtcaggcctagaatatagtggtattcaagaacttgaggacagaagatctcagcaaaggtttcagtttaatctacaagatttcaggtgttgtgctgtcttgggaagaggacattttggaaaggtgcttttagctgaatataaaaacacaaatgagatgtttgctataaaagccttaaagaaaggagatattgtggctcgagatgaagtagacagcctgatgtgtgaaaaaagaatttttgaaactgtgaatagtgtaaggcatccctttttggtgaacctttttgcatgtttccaaaccaaagagcatgtttgctttgtaatggaatatgctgccggtggggacctaatgatgcacattcatactgatgtcttttctgaaccaagagctgtattttatgctgcttgtgtagttcttgggttgcagtatttacatgaacacaaaattgtttatagagatttgaaattggataacttattgctagatacagagggctttgtgaaaattgctgattttggtctttgcaaagaaggaatgggatatggagatagaacaagcacattttgtggcactcctgaatttcttgccccagaagtattaacagaaacttcttatacaagggctgtagattggtggggccttggcgtgcttatatatgaaatgcttgttggtgagtctccctttcctggtgatgatgaagaggaagtttttgacagtattgtaaatgatgaagtaaggtatccaaggttcttatctacagaagccatttctataatgagaaggctgttaagaagaaatcctgaacggcgccttggggctagcgagaaagatgcagaggatgtaaaaaagcacccatttttccggctaattgattggagcgctctgatggacaaaaaagtaaagccaccatttatacctaccataagaggacgagaagatgttagtaattttgatgatgaatttacctcagaagcacctattctgactccacctcgagaaccaaggatactttcggaagaggagcaggaaatgttcagagattttgactacattgctgattggtgttaagttgctagacactgcgaaaccaagctgactcacaagaagacctcttaaaaatagcaacccttcatttgctctctgtgccaccaatagcttctgagttttttgttgttgttgtttttattgaaacacgtgaagatttgtttaaaagtaccattctaatacttcttcaaaagtggctcctcattgtacttcagcgtaaatatgagcactggaaacagtttcatggagtttaagttgagtgaacatcggccatgaaaatccatcacgaatacttttggatcaatagtctatttttaaaaagaaagaaaaaaaccacttttttatagtccctagctttgccatatgcccgccttaagtggaaggaaagttaatcacttaactatgttttataaaaagaaaaaagggcttggaatgctattactgttcacacaaagtatgattctgtttgaataaggcaaatgctcctttttttaaaaaaaaagacattactgtaatatcaaaaaccgtggcagtttgtatacaactcggggcttgattttttttaaaaaaacagaatgaattgatgtcttattttataaatgttctatatttattaggagaaaactttatattgccttttttatcaatcatgtaacaggcttatagctttccaacagagctgcttgccaaacaattttttttgtttattaaacagtgctgaaacaaacaggatcagcatttacttaagatgttaagaatgaggacttttaatcagccgaaccaagatattgttacctgtatgcattcccaaagtctagatgctcagtatgttcagtcatatctttcagaatcagtgaaccgattaccctttttttggtattcactctacatctgccaacctagttcaccttggttttgtgtctgctgtagaagggaaccataacttggttaaaccgtagggattatcattgtatacatgctgtgaacatgtatatgtgcaagttttaatgtattctatgttgtaggcttattatttaattttaccacttcatcacttttgtacagtggccaagcagacacctcaaactccagcatttacattaagtgcatttgtacattttaggccactggatccagattttatattggcagttattgagggcaaaagcaatatattgtaacagaatgtataaatatttttgataaaacagtctatattttattaaaaaatgaattataacactaaagctgtacctcaaaagtctcaaaaataatttgatgaaatattttatacaactcttcaaaggatccgtctgtggctttttatactcttttagggttgtctttttacaaaccatgactttccacttgcctgtagttttttgtttgttttggtttggtttgattttatatttttttctcctaatctatgactttattgttttttcttagtttagtaatagcatctttgatcctgtgcttagcatgttagggtcattatacctcaggaatagcaagctgttaagtaaccatactgaattaactatttaattacagtgagctcatctcttaaaaattgttcaggtgtaaatcttatgagaaacatgaaaaagcacactgatttatggagagttgagctaaaaacatttataaatatttgctgggatgttttagcatcttttcattgtactctgagaacaattaaaattgtccagagatcatttatattaccttccaaattgtttattacccaagatcctttgggagaaaatcttatagaatgggggaacaatatgtggtttaaagttattttaaaatgccagttaatttcctcggcaaaggacaatagaggaacttagcttaattgtctggctttaatttaaactgtgttaatacaacattaaaataaaacactaaatacttttgaggtacagtctgctcacttttttggttctcaaatagcaaagaaagtaatgtctaaaataggctcttagcattaaaaactgacagcatttcgtaactacacagtgtacagaatttttttttaattgaagtcaatcactaaaaaaattagaaggcagggtctatttacacaattaagctgaagaaagcactaattttttgtagtttaaaatatatatatattttagtcagatttaaaattttaagctttatagagtgtaaatatattttgctattactgtatgtgtatgtgactgctcaagcactttgtaaagaaattaggatattttagaatggtacactatgcattcaaatgaaatgtgcctttcactatgtcattctaagaaaacaagtgttttttgcagtcataaattatcacaaatgcacaaattaaagtctatatagattgaaatttgtaactttggttttaagtattctttccttttagaaacttcctaatgattaaaatatactttaacttttctgtgttcaaaatctcaaagactaattaactttaataaacattcttgcaagtactttttgtcctagtgaaggcttaaaaccatgaacattcagagcaaactgtccacttcattgggaataatgggaaaagtttgtattctgctcctgtaaggtcagtagcatcttttatttgaagcatatttatggactgcttactgtgtatagatactgagaataggaagtttttttttttaaagcaacaaaatgttgatgaatgaagaacagcctgttttaattaagatgcaagcaccagtattgtatgtacttttctcttgtttgaggttagcttattttaatttaggacctggcttctcaaaaaggcaaatgaataaaacagaatactagta

SEQ ID NO: 24296 - DNA, 632 bp, Homo sapiens
  source 1..632: mol_type = unassigned DNA
ggaagaattaaggcatcattttaggatagagtttgcagtagcagaaggtgcaaagaatgtaatgaaattacttggctcaggaaaagtaacagacagaaaagcactttcagaagctcaagcaagatttaatgaatcaagtcagaagttggaccttttaaagtattcattagagcaaagattaaacgaagtccccaagaatcatcccaaaagcaggattattattgaagaactttcacttgttgctgcatcaccaacactaagtccacgtcaaagtatgatatctacgcaaaatcaatatagtacactatccaaaccagcagcactaacagatgatgtctgtgctgttttgaagctcgataatactgtggttggccaaactagctggaaacccatttccaatcagtcatgggaccagaagtttacactggaactggacaggtcacgtgaactggaaatttcagtttattggcgtgattggcggtctctgtgtgctgtaaaatttctgaggttagaagattttttagacaaccaacggcatggcatgtgtctctatttggaaccacagggtactttatttgcagaggttaccttttttaatccagttattgaaagaagaccaaaacttcaaagac

SEQ ID NO: 24297 - DNA, 342 bp, Homo sapiens
  source 1..342: mol_type = unassigned DNA
gggctttgtgaaaattgctgattttggtctttgcaaagaaggaatgggatatggagatagaacaagcacattttgtggcactcctgaatttcttgccccagaagtattaacagaaacttcttatacaagggctgtagattggtggggccttggcgtgcttatatatgaaatgcttgttggtgagacttccgtctgagcaacacactctgcatccttgcttcaccgggaaactactgaagttcctggggaagcaaagtagaatttcgtaagaacaaaatggatggagagaggagaaaacctatggtagctgtgaaggccctgatgccatgtatgtcaaattga

SEQ ID NO: 24298 - DNA, 2379 bp, Homo sapiens
  source 1..2379: mol_type = unassigned DNA
aaaaaattctttaagctcctactggaccataaactaaattttaagtaactagggagagaaatactactgacattaatagaagactacacatgacgaaaagatgaacatggatgaatagtactttggaagttcgtcttatgggctgccaagatatcctagagaatgtccctggacggtcaaaagcaacatcagttgcactgcctggttggagtccaagtgaaaccagatcatctttcatgagcagaacgagtaaaagtaaaagcggaagtagtcgaaatcttctaaaaaccgatgacttgtccaatgatgtctgtgctgttttgaagctcgataatactgtggttggccaaactagctggaaacccatttccaatcagtcatgggaccagaagtttacactggaactggacaggtcacgtgaactggaaatttcagtttattggcgtgattggcggtctctgtgtgctgtaaaatttctgaggttagaagattttttagacaaccaacggcatggcatgtgtctctatttggaaccacagggtactttatttgcagaggttaccttttttaatccagttattgaaagaagaccaaaacttcaaagacaaaagaaaattttttcaaagcaacaaggcaaaacatttctcagagctcctcaaatgaatattaatattgccacttggggaaggctagtaagaagagctattcctacagtaaatcattctggcaccttcagccctcaagctcctgtgcctactacagtgccagtggttgatgtacgcatccctcaactagcacctccagctagtgattctacagtaaccaaattggactttgatcttgagcctgaacctcctccagccccaccacgagcttcttctcttggagaaatagatgaatcttctgaattaagagttttggatataccaggacaggattcagagactgtttttgatattcagaatgacagaaatagtatacttccaaaatctcaatctgaatacaagcctgatactcctcagtcaggcctagaatatagtggtattcaagaacttgaggacagaagatctcagcaaaggtttcagtttaatctacaagatttcaggtgttgtgctgtcttgggaagaggacattttggaaaggtgcttttagctgaatataaaaacacaaatgagatgtttgctataaaagccttaaagaaaggagatattgtggctcgagatgaagtagacagcctgatgtgtgaaaaaagaatttttgaaactgtgaatagtgtaaggcatccctttttggtgaacctttttgcatgtttccaaaccaaagagcatgtttgctttgtaatggaatatgctgccggtggggacctaatgatgcacattcatactgatgtcttttctgaaccaagagctgtattttatgctgcttgtgtagttcttgggttgcagtatttacatgaacacaaaattgtttatagagatttgaaattggataacttattgctagatacagagggctttgtgaaaattgctgattttggtctttgcaaagaaggaatgggatatggagatagaacaagcacattttgtggcactcctgaatttcttgccccagaagtattaacagaaacttcttatacaagggctgtagattggtggggccttggcgtgcttatatatgaaatgcttgttggtgagtctccctttcctggtgatgatgaagaggaagtttttgacagtattgtaaatgatgaagtaaggtatccaaggttcttatctacagaagccatttctataatgagaaggctgttaagaagaaatcctgaacggcgccttggggctagcgagaaagatgcagaggatgtaaaaaagcacccatttttccggctaattgattggagcgctctgatggacaaaaaagtaaagccaccatttatacctaccataagaggacgagaagatgttagtaattttgatgatgaatttacctcagaagcacctattctgactccacctcgagaaccaaggatactttcggaagaggagcaggaaatgttcagagattttgactacattgctgattggtgttaagttgctagacactgcgaaaccaagctgactcacaagaagacctcttaaaaatagcaacccttcatttgctctctgtgccaccaatagcttctgagttttttgttgttgttgtttttattgaaacacgtgaagatttgtttaaaagtaccattctaatacttcttcaaaagtggctcctcattgtacttcagcgtaaatatgagcactggaaacagtttcatggagtttaagttgagtgaacatcggccatgaaaatccatcacgaatacttttggatcaatagtctattttt

SEQ ID NO: 24299 - DNA, 476 bp, Homo sapiens
  source 1..476: mol_type = unassigned DNA
acagcctgatgtgtgaaaaaagaatttttgaaactgtgaatagtgtaaggcatccctttttggtgaacctttttgcatgtttccaaaccaaagagcatgtttgctttgtaatggaatatgctgccggtggggacctaatgatgcacattcatactgatgtcttttctgaaccaagagctgtattttatgctgcttgtgtagttcttgggttgcagtatttacatgaacacaaaattgtttatagagatttgaaattggataacttattgctagatacagagggctttgtgaaaattgctgattttggtctttgcaaagaaggaatgggatatggagatagaacaagcacattttgtggcactcctgaatttcttgccccagaagtattaacagaaacttcttatacaagggctgtagattggtggggccttggcgtgcttatatatgaaatgcttgttggtgagacttccgtctga

SEQ ID NO: 24300 - DNA, 3375 bp, Homo sapiens
  source 1..3375: mol_type = unassigned DNA
ggctcccgcgggcgcgcggcggggaaggccagaggacctgggcgcgggcgatgtgcctcctgagcgtccaaaccgggggtgaggcgcggtcacgcccagcgggaaccgcaggcgccgaagcccgggtactgggcccagaatcccgcggaattttggatccgagggaggcgctggggcgcgggacctcgggcgtggggtcccgggcgctggatcggcgcggacgggaggcggcgctggtcccgcgggccagcgggtctcgggagggggcgcccgatcccgcgtctccggcgccgcttcccgggaagtttcaagtttgaaagtcctggcggagggtctgcggcttccgggaccggagtggctgagagaagggccccaagcggccggagcggcgccatggaggagggggcgccgcggcagcctgggccgagccagtggcccccagaggatgagaaggaggtgatccgccgggccatccagaaagagctgaagatcaaggagggggtggagaacctgcggcgcgtggccacagaccgccgccacttgggccatgtgcagcagctgctgcggtcctccaaccgccgcctggagcagctgcatggcgagctgcgggagctgcacgcccgaatcctgctgcccggccctgggcctggcccagctgagcctgtggcctcaggaccccggccgtgggcagagcagctcagggctcggcacctagaggctctccggaggcagctgcatgtggagctgaaggtgaagcagggggctgagaacatgacccacacgtgcgccagtggcacccccaaggagaggaagctcctggcagctgcccagcagatgctgcgggacagccagctgaaggtggccctgctgcggatgaagatcagcagcctggaggccagtgggtccccggagccagggcctgagctgctggcggaggagctacagcatcgactgcacgttgaggcagctgtggctgagggcgccaagaacgtggtgaaactgcttagtagccggagaacacaggaccgcaaggcactggctgaggcccaggcccagctacaggagtcctctcagaaactggacctcctgcgcctggccttggagcagctgctggagcaactgcctcctgcccaccctttgcgcagcagagtgacccgagagttgcgggctgcggtgcctggatacccccagccttcagggacacctgtgaagcccaccgccctaacagggacactgcaggtccgcctcctgggctgtgaacagttgctgacagccgtgcctgggcgctccccagcggccgcactggccagcagcccctccgagggctggcttcggaccaaggccaagcaccagcgtggccgaggcgagcttgccagcgaggtgctggctgtgctaaaggtggacaaccgtgttgtggggcagacgggctgggggcaggtggccgaacagtcctgggaccagacctttgtcatcccactggagcgagcccgtgagctggagattggggtacactggcgggactggcggcagctatgtggcgtggccttcctgagacttgaggacttcctggacaatgcctgtcaccaactgtccctcagcctggtaccgcagggactgctttttgcccaggtgaccttctgcgatcctgtcattgagaggcggccccggctgcagaggcaggaacgcatcttctctaaacgcagaggccaggacttcctgagggcttcgcagatgaacctcggcatggcggcctgggggcgcctcgtcatgaacctgctgcccccctgcagctccccgagcacaatcagcccccctaaaggatgccctcggaccccaacaacactgcgagaggcctctgaccctgccactcccagtaatttcctgcccaagaagacccccttgggtgaagagatgacacccccacccaagcccccacgcctctacctcccccaggagccaacatccgaggagactccgcgcaccaaacgtccccatatggagcctaggactcgacgtgggccatctccaccagcctcccccaccaggaaaccccctcggcttcaggacttccgctgcttagctgtgctgggccggggacactttgggaaggtcctcctggtccagttcaaggggacagggaaatactacgccatcaaagcactgaagaagcaggaggtgctcagccgggacgagatagagagcctgtactgcgagaagcggatcctggaggctgtgggctgcacagggcaccctttcctgctctccctccttgcctgcttccagacctccagccatgcctgctttgtgactgagtttgtgcctggtggtgacctcatgatgcagatccacgaggatgtcttccccgagccccaggcccgcttctacgtggcttgtgttgtcctggggctgcagttcttacacgagaagaagatcatttacagggacctgaagttggataaccttctgctggatgcccagggattcctgaagatcgcagactttggactctgcaaggaagggatcggcttcggggaccggactagcaccttctgtggcaccccggagttcctggctcccgaggtgctgacccaggaggcatacacacgggctgtggactggtgggggctgggtgtgctgctctacgagatgctggtgggtgagtgcccgttcccaggggacacagaggaagaggtgtttgactgcatcgtcaacatggacgccccctaccccggctttctgtcggtgcaagggcttgagttcattcagaagctcctccagaagtgcccggagaagcgcctcggggcaggtgagcaggatgccgaggagatcaaggtccagccattcttcaggaccaccaactggcaagccctgctcgcccgcaccatccagccccccttcgtgcctaccctgtgtggccctgcggacctgcgctactttgagggcgagttcacagggctgccgcctgccctgaccccacctgcaccccacagcctcctcactgcccgccaacaggccgccttccgggacttcgactttgtgtcagagcgattcctggaaccctgagggcatctcctggcacctctgtccccttcccccacagactgttagagcctctgctcgttcacccgtgcgccctgcctggaggtccaggccttgctgggtacttctgagcccttgggattcaaagtggcagccatggggccactgttgtgggctttgctcagtgtcactgggcaaagtgtgtcccttccccctccagctcgccctcttctacctcccagcgagacctggcccagaaagggtgccgcagcaaggagtgatatggtttgtctttttaagactggacttgctttatattaaatttgtaaaagtgtg

SEQ ID NO: 24301 - DNA, 1918 bp, Homo sapiens
  source 1..1918: mol_type = unassigned DNA
attctcctggcagcccccgcccgccccgccagggggagcgtctgcgcccgacgtaggctgcggggcctgggctggcggcgcagggcggtgactcggctcggtggctgccctcccgcgtccccaccccctccccgcccgcccccggcgcggccctgcccgccccctccgccccctcccgcagcgccatgcgcagactcagttcctggagaaagatggcgacagccgagaagcagaaacacgacgggcgggtgaagatcggccactacattctgggtgacacgctgggggtcggcaccttcggcaaagtgaaggttggcaaacatgaattgactgggcataaagtagctgtgaagatactcaatcgacagaagattcggagccttgatgtggtaggaaaaatccgcagagaaattcagaacctcaagcttttcaggcatcctcatataattaaactgtaccaggtcatcagtacaccatctgatattttcatggtgatggaatatgtctcaggaggagagctatttgattatatctgtaagaatggaaggaaatctgatgtacctggagtagtaaaaacaggctccacgaaggagctggatgaaaaagaaagtcggcgtctgttccaacagatcctttctggtgtggattattgtcacaggcatatggtggtccatagagatttgaaacctgaaaatgtcctgcttgatgcacacatgaatgcaaagatagctgattttggtctttcaaacatgatgtcagatggtgaatttttaagaacaagttgtggctcacccaactatgctgcaccagaagtaatttcaggaagattgtatgcaggcccagaggtagatatatggagcagtggggttattctctatgctttattatgtggaacccttccatttgatgatgaccatgtgccaactctttttaagaagatatgtgatgggatcttctatacccctcaatatttaaatccttctgtgattagccttttgaaacatatgctgcaggtggatcccatgaagagggccacaatcaaagatatcagggaacatgaatggtttaaacaggaccttccaaaatatctctttcctgaggatccatcatatagttcaaccatgattgatgatgaagccttaaaagaagtatgtgaaaagtttgagtgctcagaagaggaagttctcagctgtctttacaacagaaatcaccaggatcctttggcagttgcctaccatctcataatagataacaggagaataatgaatgaagccaaagatttctatttggcgacaagcccacctgattcttttcttgatgatcatcacctgactcggccccatcctgaaagagtaccattcttggttgctgaaacaccaagggcacgccatacccttgatgaattaaatccacagaaatccaaacaccaaggtgtaaggaaagcaaaatggcatttaggaattagaagtcaaagtcgaccaaatgatattatggcagaagtatgtagagcaatcaaacaattggattatgaatggaaggttgtaaacccatattatttgcgtgtacgaaggaagaatcctgtgacaagcacttactccaaaatgagtctacagttataccaagtggatagtagaacttatctactggatttccgtagtattgatgatgaaattacagaagccaaatcagggactgctactccacagagatcgggatcagttagcaactatcgatcttgccaaaggagtgattcagatgctgaggctcaaggaaaatcctcagaagtttctcttacctcatctgtgacctcacttgactcttctcctgttgacctaactccaagacctggaagtcacacaatagaattttttgagatgtgtgcaaatctaattaaaattcttgcacaataaacagaaaa

SEQ ID NO: 24302 - DNA, 5088 bp, Homo sapiens
  source 1..5088: mol_type = unassigned DNA
cgcagcgccatgcgcagactcagttcctggagaaagatggcgacagccgagaagcagaaacacgacgggcgggtgaagatcggccactacattctgggtgacacgctgggggtcggcaccttcggcaaagtgaaggttggcaaacatgaattgactgggcataaagtagctgtgaagatactcaatcgacagaagattcggagccttgatgtggtaggaaaaatccgcagagaaattcagaacctcaagcttttcaggcatcctcatataattaaactgtaccaggtcatcagtacaccatctgatattttcatggtgatggaatatgtctcaggaggagagctatttgattatatctgtaagaatggaaggctggatgaaaaagaaagtcggcgtctgttccaacagatcctttctggtgtggattattgtcacaggcatatggtggtccatagagatttgaaacctgaaaatgtcctgcttgatgcacacatgaatgcaaagatagctgattttggtctttcaaacatgatgtcagatggtgaatttttaagaacaagttgtggctcacccaactatgctgcaccagaagtaatttcaggaagattgtatgcaggcccagaggtagatatatggagcagtggggttattctctatgctttattatgtggaacccttccatttgatgatgaccatgtgccaactctttttaagaagatatgtgatgggatcttctatacccctcaatatttaaatccttctgtgattagccttttgaaacatatgctgcaggtggatcccatgaagagggccacaatcaaagatatcagggaacatgaatggtttaaacaggaccttccaaaatatctctttcctgaggatccatcatatagttcaaccatgattgatgatgaagccttaaaagaagtatgtgaaaagtttgagtgctcagaagaggaagttctcagctgtctttacaacagaaatcaccaggatcctttggcagttgcctaccatctcataatagataacaggagaataatgaatgaagccaaagatttctatttggcgacaagcccacctgattcttttcttgatgatcatcacctgactcggccccatcctgaaagagtaccattcttggttgctgaaacaccaagggcacgccatacccttgatgaattaaatccacagaaatccaaacaccaaggtgtaaggaaagcaaaatggcatttaggaattagaagtcaaagtcgaccaaatgatattatggcagaagtatgtagagcaatcaaacaattggattatgaatggaaggttgtaaacccatattatttgcgtgtacgaaggaagaatcctgtgacaagcacttactccaaaatgagtctacagttataccaagtggatagtagaacttatctactggatttccgtagtattgatgatgaaattacagaagccaaatcagggactgctactccacagagatcgggatcagttagcaactatcgatcttgccaaaggagtgattcagatgctgaggctcaaggaaaatcctcagaagtttctcttacctcatctgtgacctcacttgactcttctcctgttgacctaactccaagacctggaagtcacacaatagaattttttgagatgtgtgcaaatctaattaaaattcttgcacaataaacagaaaactttgcttatttcttttgcagcaataagcatgcataataagtcacagccaaatgcttccatttgtaatcaagttatacataattataaccgagggctggcgttttggaatgcaatttgcacagggattggaacatgatttatagttaaaagcctaatatgcagaaatgaattaagatcattttgttgttcattgtgcagtatgtatatagcataatatacacagtgaattataggtctcaggcttacttgatttttggctattttatatttagtgtacacagggctttgaaatattaatttacataaaggccttcatatattattacgtgttatatattacgtgttataaatttattcaataaatatttgcctagaattcccaagacctttataggtgattttgttttctgggctccttaacttcataaatagctagtatcttccagcagtagtaacagtctggataacttcttccatatccctccctctttgtttttttgagacagtgtcactttgtcacccaggctggagtgcaatggtgtggtctcggctcactgcaacctccacctcccgggttcaagtgattctcccgcctcagcttcctgagtagctggaactacaggcgtgtgccaccacacccggctaatttttcgtatttttagtgtagacggggtttcactatgttgcccaggctggtctcgaactcctgaccgcgtgatccaccacctcagcttcccaaagtggtgggattacaggcgtgagccaccgcacccggcctccatatcccccttttaaaattctgtagtgtatggtaagtcatatcagatatcagacctaatttaaatttcattttagctttacaagtccaaaaacacagaatttatatattcagatactctagcactaattttagtcttaaaatattcccacgatattctgtacacaaaatgttctttttgttacaagagctgagttgcatatactgtagataaatcatattatttttgccaatttcacaaattcctctggcccatcatgtcagtcattattgagtatatgcacacattgctacttatttgattatgtatcttttaaattgattcagtgcatagaaaactatctcttacaaactttaagtgctctgatatgacttcccccccaaattttattatgaacatttttaaaaacagaaaaattgaaaaactgtttggtaagcacatgtatatctaccatttagattcagcagttgttaatgttttgtcatttgttttctctatacctatatatgtatagatacagctagttatgcatatatatgcatatatgtgtttgtttgtgtatgtatatatgcttttttccccctgaaccatttggatgttacagacatacttatcaccgtgaaaatacttcaagtatctcctacagataatgacattctcctaaaaatccgtaataccattgtaaaagtaataattccccaatatcatctaatcaagccatatttaaatttctgaagttaactccaaatttctttatagctgattatttcaaactaggatccaattaaagtttacatatgacacttggttataactctttagttggatataacattattattattttgataaaatatggaacaaatcaattctattaataagtggtcacatttgttttgggcttaaattactttttaaagatactggattttcctaagatttctgatttacactgatatttttttttgtcattcttaattgcatcacacaatagatgtaaatgaagatgtagtcacctcagataaaattggtatcgtgtatgataatattgtatcatttatatttgccttatgttaactttaagaaattgatttttttgtattaatcattttcccattgcaacagagctatattttttctattttaagaatcatattttaggattatttttggcaaatacagtgagcacttatgtaaccagatgataatgaactcaaatgtcatgatagcttgcataaatggtgactctagtagatttgactcaagcacttctagaatcatgcactgaattcaaaagaaaaatcttgctgctttttgtccagggcttgttctattcaacttctaatttgaaagctgtacaaagtaatagaagttccatttaaatatgagttcaaaactgtatttactttttatgtggccctctctttaggggattctaattttacttagggtctctaagtgcagcataatgttcctgatgttaacagaagactgtatttttaaagttacaaatttgtatatggaattaagtaatggcgctatatacgctgttgtggggaggggggaagaaaaggaggaaccaattaaataggaccttttaaaaattgttaattttgtaaactttgcttctcttataagttattgtgattcattttagttactgtgttttattttgaaaatatttaaatattgcacttctataaatagtatgataaatgcacagacaattgcagtaaattcttttttaagctaggatatttgaaatgacaacctttggttaagtgtgtcaaggttgcaacagaattttcacaatttttttgttgtttgcaaattgttactaatattgaagaggtaagggaggcaatgcaaatgatttttaatctttttttattatcttttcagcagtttatattttttgtgactttatgcaaccatatttttactttgtcttgacaactgaaagatgtataaggttttttgccagaaatgtactgtatacatagttttaagtataacagattttactgatatgtaaaaattttgccattaaaataaatgatttctcactgagaggaacttttctaccaggttggggcatatgggagcttaatatatcatatctaatttaaaataatttcactgaaataaactccattgcttttacctaatttttttcttgagatgcttttgtagtttttcagagttttagatgattttatacaaaatcctctgcctagcactgctctttttgatgttgtagtgacaccatttacattgaattaatgcttggtagcctggggctagatgtggaactccatggatctgtgttctgactggcacctttggaatgaaagaaaagtgtgtgctgtccaaattttttccccttaattctttccctcatcttctcacccataatagaaattttatttccattgtgagttctgacaagaatgaaattccacatacaacataactgtaaattgttggtaggtagaagttaatatttgtggttcatgtatattttgaccagagtatatttaagtatataatttcagcttccttgatttagaaatatgatataataaagaaaaactccatttatcatctgtta

SEQ ID NO: 24303 - DNA, 9347 bp, Homo sapiens
  source 1..9347: mol_type = unassigned DNA
ggtaggcggcggcggcggcggctacgcggagcggcaggcggtggagcgaggccgcgcgcgccgaagatggctgagaagcagaagcacgacgggcgggtgaagatcggacactacgtgctgggcgacacgctgggcgtcggcaccttcggcaaagtgaagattggagaacatcaattaacaggccataaagtggcagttaaaatcttaaatagacagaagattcgcagtttagatgttgttggaaaaataaaacgagaaattcaaaatctaaaactctttcgtcatcctcatattatcaaactataccaggtgatcagcactccaacagatttttttatggtaatggaatatgtgtctggaggtgaattatttgactacatctgtaagcatggacgggttgaagagatggaagccaggcggctctttcagcagattctgtctgctgtggattactgtcataggcatatggttgttcatcgagacctgaaaccagagaatgtcctgttggatgcacacatgaatgccaagatagccgatttcggattatctaatatgatgtcagatggtgaatttctgagaactagttgcggatctccaaattatgcagcacctgaagtcatctcaggcagattgtatgcaggtcctgaagttgatatctggagctgtggtgttatcttgtatgctcttctttgtggcaccctcccatttgatgatgagcatgtacctacgttatttaagaagatccgagggggtgtcttttatatcccagaatatctcaatcgttctgtcgccactctcctgatgcatatgctgcaggttgacccactgaaacgagcaactatcaaagacataagagagcatgaatggtttaaacaagatttgcccagttacttatttcctgaagacccttcctatgatgctaacgtcattgatgatgaggctgtgaaagaagtgtgtgaaaaatttgaatgtacagaatcagaagtaatgaacagtttatatagtggtgaccctcaagaccagcttgcagtggcttatcatcttatcattgacaatcggagaataatgaaccaagccagtgagttctacctcgcctctagtcctccatctggttcttttatggatgatagtgccatgcatattcccccaggcctgaaacctcatccagaaaggatgccacctcttatagcagacagccccaaagcaagatgtccattggatgcactgaatacgactaagcccaaatctttagctgtgaaaaaagccaagtggcatcttggaatccgaagtcagagcaaaccgtatgacattatggctgaagtttaccgagctatgaagcagctggattttgaatggaaggtagtgaatgcataccatcttcgtgtaagaagaaaaaatccagtgactggcaattacgtgaaaatgagcttacaactttacctggttgataacaggagctatcttttggactttaaaagcattgatgatgaagtagtggagcagagatctggttcctcaacacctcagcgttcctgttctgctgctggcttacacagaccaagatcaagttttgattccacaactgcagagagccattcactttctggctctctcactggctctttgaccggaagcacattgtcttcagtttcacctcgcctgggcagtcacaccatggatttttttgaaatgtgtgccagtctgattactactttagcccgttgatctgtctctagtttctttctgttattgcactatgaaaatcagttatattctttaaatttttatcttacttttggataatatccactgcaatactaattgagaaacatgaattatttccaggggcacacaatgctattgaaattactgaaaacaaaatatctgacatcttatttacttgtagaaatctgtaattctattgtgcctatgataaattcacataggcaatatctttaataggttaatatcaatgaagatttttaattacaataatgagttcactacagacgattaacacaccacactggcgaaccatctcaatgtaagggtggtttggcaacacctccttgctttgctgtttggtgtaggtaaatctagtttacttcctaaatttcagtaggctttatgctgtgtttatgcccccaatttattttaacaaaagaagattaaaaagtaaaagaaccacgagtaagatattatttaaatgttgaaatcttaaaaacctgcctccaagatttcagaagccaagtttttctaacagtatttgtacaaatactgcctagtgtattcaacagaaggactgtggtcatgtaacaggtaaccacaattttcaggtttcttaaaaacagctgtaactaactcaggatttttatcttgagatttccctgaataatatatttatcttaagagccttcaagtttcaaattaatattggaacatctggaattgcaacaacttttgtcttttacataaacttacgtcatttaaaaaatgtcttcaaaatctacctttctcaaattctttttgcctctatttatttttgcatttcaccaacagtgataaaatagttaaatgaaacaaagcaaagtatcaacagtcccttaaatgagaatccttatctttgatctttattttctgtgttaggtgttagggtcctggtgcagctcataatgctaattcttcattggaagccactcccttcacctcacctcacctagtcactattgtctttgttcattgtttgatcctgagtggttgattgatatagctttgaatcttttctagtccaagtttgaaaacactgttctggccctaagggctggctatgacctttactgttgaacctgatagggcagggaagctttgaacatcaagaaaaaatttttatcttaaataaataaatatatatattcacacaccagtgcttttaagcaaaaaccagtttttttgtttgtttgttttgctttgtgcaggttttctttaagattaaaaaaacacaaactatagcagggtagataatagtttattgattatattttgttttagtaaaagtatttaattttaaattctgtgtaatttatctaatttgtatttattcatttgttatttttatgttgtaattaacacttatttacctggattaccctaaaaaaattaagctcttgaaaacaaaaaaatgacattaccttgacaggcttctctttgccaaaagtaatgtatgttctgccaagaagcaaatgagaatgttagactaagtttctcctgtgttagtggaaaacaagtgtgtctatctttaaatattctttgaatcaggagtttgcgttgtgtcacatcatatggctttgcagatcttttaaaaactgatgttaaataacttataagtccaacttcttaatatcaagataaatgaatagttcaccaatttgggaaggagggcgggttgcaatttgagatagtttaaggtttaattattgaaagactgccatcttgtggcaccaaaaggtaatttttacatgattatttgtatagtgataagcagtcctgctgtgttagcctggtccattatagatatggcatagttttgggttctctaaatgggtccatacctcttttgggaaaaaacagggccacctcataatatttgcctgattatgaatggaattaccttagaaataaggaactaatcagattacttaaccccaatgacaaaatccacaaaaattttgaaggcagagaaacagaaggaatccagtgatgttttagctccattagtctaataggtcagatattaaaaaattgttcatatcaaaattaccttatatggattattgccatgttttttgagagttaattatttactgttttctaattcttgccagtatttatgaacagctgtagcttgatatttacctactgaattttaggagaactaatggtcacagtttgggttcttttatgtgtatgtttttaaaacagctattttgtgaatctaggtggttggtttttagaagatttcaggagatgcagtccagcacaattagagctggaacattgttacagcaggctttttgttgctcatgggcagatagagggaaagaatcagttgttagccccaaatttccacatttcagtgttgtaaactctgaatgtgataggtagatgtgggctaagaataatttcctccagtgaagacacgggagaagagcttctattatgaggttatagataaggccttagttatatcatggaaatggactccatgtagttctagaactgcatttcccaaagtatatcctgtgagatgctccacagaaaaaatgattgcatggactaagtttgaaaaatgttgcatgctactcttcccctcgaagatgacagtggatgtcagcattaaagactttgacaggtctttctgtgaaaaaaagaaagccacataactttgttgaactttgcccaaattaatttttcattttaaaaaacttaatagcccatgaaaagcaaatttgggaaatacattttttaggaaaatactgtcccagaatgccataattagggtagttaataattaacacttccatttctcttactggttgttgggagaatctgattgaaaattagaattactttgttttaacttgcagacatgttcatcgtgagtgaatgctggattaaatagaattttctgtgtctgcaacttgtttcatgacaccttggttttcttaatcatcttgtattattatttgagtgcaacattattcttatgcatgggtgactgaaaaacctgaaacaagattacttgttaaaaaaaagtctaagagactaatgactcatgcttatggctcagtgggtaatgaatcagtgtcactgattcttacttttaaaatgtgtagtcagtgaacattttctaaatacttttctttgggataccatatgaagatctaattccttatgtttcagtgtaggaacagctaccttctcaaatagaatatgcagggagggaagtaggcaaaccatttacaagttgggtttttgttttgattaacctgttaagagacacttttgtaatctctagtgtttacattcctttatactagctatctataaagagaatccagaaggctaaattaatcagaaataattatatttctatgtcagggtattggctatatgtagcatgaacaattctccattttctgcaaatgggtttttcaggacagttttataattctgagtttgctttttcttattccctagacagtttgtactcagggaatacaaattgatttttactgttaaatgagacatagtttagaaaaaatcataagcaactattgtagatttttgatctgtttggatttatctgtagcattgaataatgtgcagtgtactgagttaatgtaggcacctcactttggatttataaaatgtaaaaacctggaacatgcctgccacagacaccactttgtctattcaccgggtactaatttacatcctattaatggttgtaaaagctgagtgtctaaatgctagacatgttcacaattttgtctgtttttgtttatttgtttttaagacccaaaccttttcaatcttgcatttatttacttggttctcctgtgtcaccctgtggctttttaaatagggaatgtaatttattttaatagtagttctcaaagactctattaaaaactctggacgagggatatgtgcaatctgttggtaagtcacatcctatgtttggcctcatttttataactcctaaaatgagaaaggtagattttaacacttctaaggtacctttgagctttaaagttcttttctgcttttccatatgatttgtgttagtgttcactttttatatatttagagtttttatatgagtgtgaatgtttctgttttgatttggtgaggcatgtcagaggtatatacttgaatatttttctaaatacagctgctggaggaatgcaaatggcaaaaatcatccagaaaaccaaacacggtgaaacatcacatccatttggcatgaagcaaagcattacaaatttggagtgatgaaagtgttccatatattttttatagtgatttttcgatctagagacccttcatattgtttacttactattacgataactttgagaggtaaccagagaaagcatttttgccatttccagatgaggaagcaggaccagaaagctcttcataaagctttaacaccatacaagtatccagcagtgatcaattgctctttataggaaaccacctttcctctggggaagaacagtctgaattaataaaacatcagagtggttgagtagtaaaaataaacacagatgtattgctttcaagtcttagagtgacataaagtagtcttaaataaatagttcttagtttattttaagcagttgattgtactaacgagatgtaattatctgaagtatttatgattagcatattggtttttataagtatttctgagttattgagggtgcttaaaaatgctgaagaaactttaaaacatgattcttcttataattttatgtgattcttatagcacaatcatttttgaaaaaggaaaactaggctgggtgtagtggctcatgcctataatcccagcactttgggaggccaaagtgggtggatcacccgagttcaggagttcgagaccagtctggccaacatggtgaaacctcgtctctactaaaaataccaaaattatccggtgtggtgacaggctgcttgtaatcccagctactcgggaggctgaggcacgggaatctcttgaacctgggaggcagagattgcaataagccaagatcatgccactgcatgccagcctgggtgacagcacaagactgtctcaaaaaaaaacaaaaaaaggaaaaagaaaactagccccagtccctgtctaaattgttatagtttttgactattatctgaattagtcttatccaaatttcatatgcagattgatttttcattttgtatgtatattacatgatataactattttcatagaatatatttctaatttacaaacactgaattattagcttgatagagtttctcccaaaccttataaaactttgaaatgtacttatgtttgagctttaaaaattataaaaacttcatttaaacaagttgctggcatcattactagcctttccacctataattatgatgcatttgatgccactgaacagtaatagcacaaagaacaggtcacacagtctagactggattgagttttaattaaacttcttcatccatagcctgataagaatcaggctgggtctagaagagttatcagactgtaggcctgtattaattttgcaagctaatgttaatgtttactgccagccttgcatagcaatgccagtttgcagttgtgactatgatgtgacttttggtaaaaatggtttatatctaaagtagtttagattttatggaagtggctcttgattgtttggacaagcagggtaggtaaatttcaattacgtttgaagtgtaattaaatcctagaatagagcactctccagaaaaaaaaatgaaaaaagaatttggagaatatcctggcatgaaaacttttttgaataatacgtagaattttgacaaggttcatacagtgcatacagtgtgaccttttctgaggtgggcagggagggttgctacgttgtgttgatttaaaatttcaaggaggaacaaaaacattctagccaaggagaattgcattgttatttttttttctactaatttaaacgtgcatttttcacagttacacatttaagttttgctaccaaaaatggccatttttctagacagataacattttcctaaagtggaagagagatccactgttctaaaaaaaaaaaaaaaaaaaaacactaaattgtgccttctcccttaaattataagaagagtaatagtaaaaacttgtttaaactatattttctttttttctaatccctctcagttctccttagatctgcctcctacaaatgatcatgttgtttgcatctgcctgattgagttcccttggtcaaacctctccctatcactatcagaagttgttcactaaatgtattttcctatttctttcatgttgattgactttataagtcaccttggtaaacataacatttggctaccttctcatgctttataaatgaatttgatgaatggcagtttttatattttaaccctttaaaaagtttgtcaaggaaacaactcagagctaagaacaaaatctaacttggaatcagtttcttcctttggctgctgaagcagcagcaagtcacgtaacctcatttagttttttgatttacaaaatgtggataataacctacctcacagatgtgtgtgagcaactgtttgaaagcccttgtttaaatacagggtttatatccccacattcaatgtaaattcctttttttaaaaaaaataagtatctttgatactgataggatgagtatcttgatttttaggtaagatcacagtttcacaaattgtggtgttgttaggtgacatttaatatttcttgagacctcaagtattcaaatatcaaacttgtcctgtgttgtaacaaatattcagaatctcttaaaatgttggctgaagctgccttaatgtaccaaaatacagctctcaagactgttcacaaatatctgtggttgtacaatgttttgaacatttaatgtaaagttgttgtagaactgtgaactctaaggatagtatctttattgttttaggaagaatggttgtgttctttgtcatgtatgcttaaatatacagtggattttgaatgcaacaaataaaactgaaaacagccatttggttgtgtcatgacaatcataatataggatataatatttactttttttcaaaaacatcctgcattcattcattcttagcatacctttgaaaaagaaaaaaaaatccataggttgatacattgacccattgaagtacttcattacgtatttattgaaaattttttttaattgttgaaattgggaccactttttataattggtttcaagaaaaaaaaatgaacagacttccagtgcttttctgttcaaataaactccgattcaaatttcagttttgtttgttatatactttttgtgagtgttaaatgatatgggaaggatttgtctttcattaaccatatggaaaagatgtcttcctgaattacatagcatttcatagttacagattcttcctaattaatgtttgcaccatatgaaactcataggtaacaaacacaaaggagaaaagcagcctgtctgattgcttataagcttttttcacaaaatcaaattaaaagtctctgattcatttgaaagcta

SEQ ID NO: 24304 - DNA, 1738 bp, Homo sapiens
  source 1..1738: mol_type = unassigned DNA
ggatgtggggcggggcctgccccaagagagtttcctaaagcgaggaaaccaagccgggcgcctcttgcaatggagacggtcatttcttcagatagctccccagctgtggaaaatgagcatcctcaagagaccccagaatccaacaatagcgtgtatacttccttcatgaagtctcatcgctgctatgacctgattcccacaagctccaaattggttgtatttgatacgtccctgcagtcctgcccctgtggatttgcctttatgattattactgtcttggctacaggtgaagaaagctttttttgctttggtgactaacggtgtacgagctgcccctttatgggatagtaagaagcaaagttttgtgggcatgctgaccatcactgatttcatcaatatcctgcaccgctactataaatcagccttggtacagatctatgagctagaagaacacaagatagaaacttggagagaggtgtatctccaggactcctttaaaccgcttgtctgcatttctcctaatgccagcttgtttgatgctgtctcttcattaattcggaacaagatccacaggctgccagttattgacccagaatcaggcaatactttgtacatcctcacccacaagcgcattctgaagttcctcaaattgtttatcactgagttccccaagccagagttcatgtccaagtctctggaagagctacagattggcacctatgccaatattgctatggttcgcactaccacccccgtctatgtggctctggggatttttgtacagcatcgagtctcagccctgccagtggtggatgagaaggggcgtgtggtggacatctactccaagtttgatgttatcaatctggcagcagaaaagacctacaacaacctagatgtatctgtgactaaagccttgcaacatcgatcacattactttgagggtgttctcaagtgctacctgcatgagactctggagaccatcatcaacaggctagtggaagcagaggttcaccgacttgtagtggtggatgaaaatgatgtggtcaagggaattgtatcactgtctgacatcctgcaggccctggtgctcacaggtggagagaagaagccctgagctgggggaaggggtcatgcagcaccaggggatatgcccaactcactgcctgctggaagctctgtgggaatcagatgaaacttgagggaattgtgactctgttccctgttcagggtcccctgcccttctatctgggagctagggaaggtatgggggaggaaagagaatggatttatagctacccttaccctcacacatacacttgaaaaaactttcagcctagccagttctagcccctgtcctcttagatatatccccctttctgggtgaactataggctctgtgcctctcagacaaattctgatctctaagagatccccagacctcacttgcctctgcctccatcttggccctgattcaaccctaagataatagcacaacaaaattcttcataaagatatttttattcacctgttccgtgctatatggaggaggccaagtccatttagtgacatttcttcccataatgtgagtggggaggattgtggggaggaggggctttgggttcctgtgtttgtgcatatgaagggagatgggggttaggtggaggaggagagcagcgtggttagctaaggttattgctttttgtggcaaatctaattaaatgacaggaatctcttcacg

SEQ ID NO: 24305 - DNA, 2071 bp, Homo sapiens
  source 1..2071: mol_type = unassigned DNA
acagcaaggttggtccttcgtaacaacggatgaaatggttcccttttttaaagcgccctctctccctccaccctcagcgcccctgtccttggcatgttttgtatcagcgatcattctgaactgtacatatttatgttgcgagaggcaaagggcaagttttggattttgcttcttccaagtttgtttttaaacgacaaataaaaaaagaacattttaaatacaagcggctccgtcccatgaccctcgccgtcagccggatccgtgcggtccgcgaggacccgggggagggcggttaccgaggcccgccaccgccggaagggtgggttccttgccttccgccccagtctggcgactgccatgacgtgggcggaagtggcgtcgccgcaccggatgtggggcggggcctgccccaagagagtttcctaaagcgaggaaaccaagccgggcgcctcttgcaatggagacggtcatttcttcagatagctccccagctgtggaaaatgagcatcctcaagagaccccagaatccaacaatagcgtgtatacttccttcatgaagtctcatcgctgctatgacctgattcccacaagctccaaattggttgtatttgatacgtccctgcaggtgaagaaagctttttttgctttggtgactaacggtgtacgagctgcccctttatgggatagtaagaagcaaagttttgtgggcatgctgaccatcactgatttcatcaatatcctgcaccgctactataaatcagccttggtacagatctatgagctagaagaacacaagatagaaacttggagagaggtgtatctccaggactcctttaaaccgcttgtctgcatttctcctaatgccagcttgtttgatgctgtctcttcattaattcggaacaagatccacaggctgccagttattgacccagaatcaggcaatactttgtacatcctcacccacaagcgcattctgaagttcctcaaattgtttatcactgagttccccaagccagagttcatgtccaagtctctggaagagctacagattggcacctatgccaatattgctatggttcgcactaccacccccgtctatgtggctctggggatttttgtacagcatcgagtctcagccctgccagtggtggatgagaaggggcgtgtggtggacatctactccaagtttgatgttatcaatctggcagcagaaaagacctacaacaacctagatgtatctgtgactaaagccttgcaacatcgatcacattactttgagggtgttctcaagtgctacctgcatgagactctggagaccatcatcaacaggctagtggaagcagaggttcaccgacttgtagtggtggatgaaaatgatgtggtcaagggaattgtatcactgtctgacatcctgcaggccctggtgctcacaggtggagagaagaagccctgagctgggggaaggggtcatgcagcaccaggggatatgcccaactcactgcctgctggaagctctgtgggaatcagatgaaacttgagggaattgtgactctgttccctgttcagggtcccctgcccttctatctgggagctagggaaggtatgggggaggaaagagaatggatttatagctacccttaccctcacacatacacttgaaaaaactttcagcctagccagttctagcccctgtcctcttagatatatccccctttctgggtgaactataggctctgtgcctctcagacaaattctgatctctaagagatccccagacctcacttgcctctgcctccatcttggccctgattcaaccctaagataatagcacaacaaaattcttcataaagatatttttattcacctgttccgtgctatatggaggaggccaagtccatttagtgacatttcttcccataatgtgagtggggaggattgtggggaggaggggctttgggttcctgtgtttgtgcatatgaagggagatgggggttaggtggaggaggagagcagcgtggttagctaaggttattgctttttgtggcaaatctaattaaatgacaggaatctc

SEQ ID NO: 24306 - DNA, 3282 bp, Homo sapiens
  source 1..3282: mol_type = unassigned DNA
gagctggtttattctgcggccgaggattacatttatgcacgaacgggcttactggttccagattccccacttgggcacaggcataggaggcttgttttccaaattgctggttttaattgcacctgcctttcagattacctctgggaatctgtgggaggagccgagagggtggaaaatgtttcttagctttgcaaaaggaagaaaactttgtcacccagcgggagacctcagccacgagtaacccggggagacaccagaaccgggacgggctttgactgatttgcctacgagggttccgtaggaaaggacgcttgaattcggcgcttcggcggcggcggcggccgcgcgagttccctgctcaccctccctctccgcggaagtccccacgaggtggcttcagggtgtaacagagcgcgcggctccagtccgaaggcagcggccgggggagggaaggaggggaccgaacccccgaggagtttcgcagaatcaacttctggttagagttatgggaagcgcggttatggacaccaagaagaaaaaagatgtttccagccccggcgggagcggcggcaagaaaaatgccagccagaagaggcgttcgctgcgcgtgcacattccggacctgagctccttcgccatgccgctcctggacggagacctggagggttccggaaagcattcctctcgaaaggtggacagccccttcggcccgggcagcccctccaaagggttcttctccagaggcccccagccccggccctccagccccatgtctgcacctgtgaggcccaagaccagccccggctctcccaaaaccgtgttcccgttctcctaccaggagtccccgccacgctcccctcgacgcatgagcttcagtgggatcttccgctcctcctccaaagagtcttcccccaactccaaccctgctacctcgcccgggggcatcaggtttttctcccgctccagaaaaacctccggcctctcctcctctccgtcaacacccacccaagtgaccaagcagcacacgtttcccctggaatcctataagcacgagcctgaacggttagagaatcgcatctatgcctcgtcttcccccccggacacagggcagaggttctgcccgtcttccttccagagcccgaccaggcctccactggcatcaccgacacactatgctccctccaaagccgcggcgctggcggcggccctgggacccgcggaagccggcatgctggagaagctggagttcgaggacgaagcagtagaagactcagaaagtggtgtttacatgcgattcatgaggtcacacaagtgttatgacatcgttccaaccagttcaaagcttgttgtctttgatactacattacaagttaaaaaggccttctttgctttggtagccaacggtgtccgagcagcgccactgtgggagagtaaaaaacaaagttttgtaggaatgctaacaattacagatttcataaatatactacatagatactataaatcacctatggtacagatttatgaattagaggaacataaaattgaaacatggagggagctttatttacaagaaacatttaagcctttagtgaatatatctccagatgcaagcctcttcgatgctgtatactccttgatcaaaaataaaatccacagattgcccgttattgaccctatcagtgggaatgcactttatatacttacccacaaaagaatcctcaagttcctccagctttttatgtctgatatgccaaagcctgccttcatgaagcagaacctggatgagcttggaataggaacgtaccacaacattgccttcatacatccagacactcccatcatcaaagccttgaacatatttgtggaaagacgaatatcagctctgcctgttgtggatgagtcaggaaaagttgtagatatttattccaaatttgatgtaattaatcttgctgctgagaaaacatacaataacctagatatcacggtgacccaggcccttcagcaccgttcacagtattttgaaggtgttgtgaagtgcaataagctggaaatactggagaccatcgtggacagaatagtaagagctgaggtccatcggctggtggtggtaaatgaagcagatagtattgtgggtattatttccctgtcggacattctgcaagccctgatcctcacaccagcaggtgccaaacaaaaggagacagaaacggagtgaccgccgtgaatgtagacgccctaggaggagaacttgaacaaagtctctgggtcacgttttgcctcatgaacactggctgcaagtggttaagaatgtatatcagggtttaacaataggtatttcttccagtgatgttgaaattaagcttaaaaaagaaagattttatgtgcttgaagattcaggcttgcattaaaagactgttttcagacctttgtctgaaggattttaaatgctgtatgtcattaaagtgcactgtgtcctgaagttttcattatttttcatttcaaagaattcactggtatggaacaggtgatgtggcataaggtgagtgcacggtatgttcagatcacagtgccttatgtccgaatacagcaatatgtcaccgccgcagccggggcgcacgcgtgtgaaacaacaccgagcttgaatgtggaagtctttgaaccttttaccaaatcagtttgttttctttagatttgtcaaaaagttgtaatttgaatataaataattactttaaaattgtaatgacacttttacacgtaagtgttttgttctgggctaccgtgtcaacgaggctgctttacaacagctttatttatttttactttcatgcaatttttttacacatcttttggtggagtaaacttcaccacatccatgaataaactctcagttattttgaaatggcaaatttctcattatttaagtttggatctggaaaggacatgacttctgaaatagccgctgctgggttttaaaagctgaggtctctcaaagtgtggaggagacgttgccgtcaggcgggagccaagtgccgggaagatgtctattttttttcttgtgtattgaaatgtaaaatcatgatgtttgttatgactgctgatgcgattgtttttgtaaattttattgtggcatatacagtattgtcatacagttgaagagaaacaatgtttcctaatgtaagtgctctgaaaatgttgacactgtatatatatatatgaggatagtttgttttttttttgttttgggtttttttttttcagattgaaaaattaaaatagatccta

SEQ ID NO: 24307 - DNA, 2645 bp, Homo sapiens
  source 1..2645: mol_type = unassigned DNA
gctgtggccggaggtgcagccccgtcaggacggctccactccctggcgcctcacagactctggggctgcggtgaggtcgccctgaagaccccctggtgaggacgcttgaacccgggctgtcacctgagcacaggctgccactctgagcttttggggcgccctgtgcctgtcgggctgatgctcctctggctcccggccacctggggctgacaccggttctgtgggtcctgatatgttcacctgtcgccactcctgtggccacagctacccatgaagcgctttgggagcctcaggagcaacaagaaacacaaggaccaaaatcgaagcacggagaggcgccagtcggagcctcatggccttttcgcctccggcctctcctcctctccgtcaacacccacccaagtgaccaagcagcacacgtttcccctggaatcctataagcacgagcctgaacggttagagaatcgcatctatgcctcgtcttcccccccggacacagggcagaggttctgcccgtcttccttccagagcccgaccaggcctccactggcatcaccgacacactatgctccctccaaagccgcggcgctggcggcggccctgggacccgcggaagccggcatgctggagaagctggagttcgaggacgaagtagaagactcagaaagtggtgtttacatgcgattcatgaggtcacacaagtgttatgacatcgttccaaccagttcaaagcttgttgtctttgatactacattacaagttaaaaaggccttctttgctttggtagccaacggtgtccgagcagcgccactgtgggagagtaaaaaacaaagttttgtaggaatgctaacaattacagatttcataaatatactacatagatactataaatcacctatggtacagatttatgaattagaggaacataaaattgaaacatggagggagctttatttacaagaaacatttaagcctttagtgaatatatctccagatgcaagcctcttcgatgctgtatactccttgatcaaaaataaaatccacagattgcccgttattgaccctatcagtgggaatgcactttatatacttacccacaaaagaatcctcaagttcctccagctttttatgtctgatatgccaaagcctgccttcatgaagcagaacctggatgagcttggaataggaacgtaccacaacattgccttcatacatccagacactcccatcatcaaagccttgaacatatttgtggaaagacgaatatcagctctgcctgttgtggatgagtcaggaaaagttgtagatatttattccaaatttgatgtaattaatcttgctgctgagaaaacatacaataacctagatatcacggtgacccaggcccttcagcaccgttcacagtattttgaaggtgttgtgaagtgcaataagctggaaatactggagaccatcgtggacagaatagtaagagctgaggtccatcggctggtggtggtaaatgaagcagatagtattgtgggtattatttccctgtcggacattctgcaagccctgatcctcacaccagcaggtgccaaacaaaaggagacagaaacggagtgaccgccgtgaatgtagacgccctaggaggagaacttgaacaaagtctctgggtcacgttttgcctcatgaacactggctgcaagtggttaagaatgtatatcagggtttaacaataggtatttcttccagtgatgttgaaattaagcttaaaaaagaaagattttatgtgcttgaagattcaggcttgcattaaaagactgttttcagacctttgtctgaaggattttaaatgctgtatgtcattaaagtgcactgtgtcctgaagttttcattatttttcatttcaaagaattcactggtatggaacaggtgatgtggcataaggtgagtgcacggtatgttcagatcacagtgccttatgtccgaatacagcaatatgtcaccgccgcagccggggcgcacgcgtgtgaaacaacaccgagcttgaatgtggaagtctttgaaccttttaccaaatcagtttgttttctttagatttgtcaaaaagttgtaatttgaatataaataattactttaaaattgtaatgacacttttacacgtaagtgttttgttctgggctaccgtgtcaacgaggctgctttacaacagctttatttatttttactttcatgcaatttttttacacatcttttggtggagtaaacttcaccacatccatgaataaactctcagttattttgaaatggcaaatttctcattatttaagtttggatctggaaaggacatgacttctgaaatagccgctgctgggttttaaaagctgaggtctctcaaagtgtggaggagacgttgccgtcaggcgggagccaagtgccgggaagatgtctattttttttcttgtgtattgaaatgtaaaatcatgatgtttgttatgactgctgatgcgattgtttttgtaaattttattgtggcatatacagtattgtcatacagttgaagagaaacaatgtttcctaatgtaagtgctctgaaaatgttgacactgtatatatatatatgaggatagtttgttttttttttgttttgggttttttttttt

SEQ ID NO: 24308 - DNA, 2326 bp, Homo sapiens
  source 1..2326: mol_type = unassigned DNA
gccacagtgtcgcacacttgctctcagttggtctggggctggccacatggagcccgggctggagcacgcactgcgcaggaccccttcctggagcagccttgggggttctgagcatcaagagatgagcttcctagagcaagaaaacagcagctcatggccatcaccagctgtgaccagcagctcagaaagaatccgtgggaaacggagggccaaagccttgagatggacaaggcagaagtcggtggaggaaggggagccaccaggtcagggggaaggtccccggtccaggccagctgctgagtccaccgggctggaggccacattccccaagaccacacccttggctcaagctgatcctgccggggtgggcactccaccaacagggtgggactgcctcccctctgactgtacagcctcagctgcaggctccagcacagatgatgtggagctggccacggagttcccagccacagaggcctgggagtgtgagctagaaggcctgctggaagagaggcctgccctgtgcctgtccccgcaggccccatttcccaagctgggctgggatgacgaactgcggaaacccggcgcccagatctacatgcgcttcatgcaggagcacacctgctacgatgccatggcaactagctccaagctagtcatcttcgacaccatgctggagatcaagaaggccttctttgctctggtggccaacggtgtgcgggcagcccctctatgggacagcaagaagcagagctttgtggggatgctgaccatcactgacttcatcctggtgctgcatcgctactacaggtcccccctggtccagatctatgagattgaacaacataagattgagacctggagggagatctacctgcaaggctgcttcaagcctctggtctccatctctcctaatgatagcctgtttgaagctgtctacaccctcatcaagaaccggatccatcgcctgcctgttcttgacccggtgtcaggcaacgtactccacatcctcacacacaaacgcctgctcaagttcctgcacatctttggttccctgctgccccggccctccttcctctaccgcactatccaagatttgggcatcggcacattccgagacttggctgtggtgctggagacagcacccatcctgactgcactggacatctttgtggaccggcgtgtgtctgcactgcctgtggtcaacgaatgtggtcaggtcgtgggcctctattcccgctttgatgtgattcacctggctgcccagcaaacctacaaccacctggacatgagtgtgggagaagccctgaggcagaggacactatgtctggagggagtcctttcctgccagccccacgagagcttgggggaagtgatcgacaggattgctcgggagcaggtacacaggctggtgctagtggacgagacccagcatctcttgggcgtggtctccctctccgacatccttcaggcactggtgctcagccctgctggcatcgatgccctcggggcctgagaagatctgagtcctcaatcccaagccacctgcacacctggaagccaatgaagggaactggagaactcagccttcatcttcccccacccccatttgctggttcagctatgattcaggcttcttcagccctcccaaattgcccttgccctacctgtgctcccagaagccctcgggcatgcccagtgcaccatgggatgatgaaattaaggagaacagctgagtcaagcttggaggtccctgaaccagaggcactaggattaccccagggccatctgtgctccatgcccgcccatccccttgccgcctgactgggtcggatggccccagtgggtttagtcagggcttctggattcctcggtttctgggctacctatggcttcagccttcagctcctgggagtcccagctgttgttcccagcaacgtcgccactgccctcctactctccaggctttgtcatttcaaggctgctgaaatgctgcatttcaggggccaccatggagcagccgttatttatagaactgcctgttggaggtggggagtcctccctccattcttgtccagaaaactccttagctctcgcagtgagccatgttcttagtctccagggatggatggccttgtatatggacccctgagaatgagcaattgagaaaacaaaacaaaaggaacaatccatgaacttagattttattggtttcactcaaaatgctgcagtcatttgacctgaacttgtggcaagagacttgtgctttctaaattcaaagactagaaggaaaatggataaaaatcacaagtgccgtttctcttgc

SEQ ID NO: 24309 - DNA, 1193 bp, Homo sapiens
  source 1..1193: mol_type = unassigned DNA
acacttgctctcagttggtctggggctggccacatggagcccgggctggagcacgcactgcgcaggaccccttcctggagcagccttgggggttctgagcatcaagagatgagcttcctagagcaagaaaacagcagctcatggccatcaccagctgtgaccagcagctcagaaagaatccgtgggaaacggagggccaaagccttgagatggacaaggcagaagtcggtggaggaaggggagccaccaggtcagggggaaggtccccggtccaggccagctgctgagtccaccgggctggaggccacattccccaagaccacacccttggctcaagctgatcctgccggggtgggcactccaccaacagggtgggactgcctcccctctgactgtacagcctcagctgcaggctccagcacagatgatgtggagctggccacggagttcccagccacagaggcctgggagtgtgagctagaaggcctgctggaagagaggcctgccctgtgcctgtccccgcaggccccatttcccaagctgggctgggatgacgaactgcggaaacccggcgcccagatctacatgcgcttcatgcaggagcacacctgctacgatgccatggcaactagctccaagctagtcatcttcgacaccatgctggagatcaagaaggccttctttgctctggtggccaacggtgtgcgggcagcccctctatgggacagcaagaagcagagctttgtggggatgctgaccatcactgacttcatcctggtgctgcatcgctactacaggtcccccctgagatctacctgcaaggctgcttcaagcctctggtctccatctctcctaatgatagcctgtttgaagctgtctacaccctcatcaagaaccggatccatcgcctgcctgttcttgacccggtgtcaggcaacgtactccacatcctcacacacaaacgcctgctcaagttcctgcacatctttggttccctgctgccccggccctccttcctctaccgcactatccaagatttgggcatcggcacattccgagacttggctgtggtgctggagacagcacccatcctgactgcactggacatctttgtggaccggcgtgtgtctgcactgcctgtggtcaacgaatgtggtcaggtcgtgggcctctattcccgctttgatgtgatt

SEQ ID NO: 24310 - DNA, 2301 bp, Homo sapiens
  source 1..2301: mol_type = unassigned DNA
agttggtctggggctggccacatggagcccgggctggagcacgcactgcgcaggaccccttcctggagcagccttgggggttctgagcatcaagagatgagcttcctagagcaagaaaacagcagctcatggccatcaccagctgtgaccagcagctcagaaagaatccgtgggaaacggagggccaaagccttgagatggacaaggcagaagtcggtggaggaaggggagccaccaggtcagggggaaggtccccggtccaggccagctgctgagtccaccgggctggaggccacattccccaagaccacacccttggctcaagctgatcctgccggggtgggcactccaccaacagggtgggactgcctcccctctgactgtacagcctcagctgcaggctccagcacagatgatgtggagctggccacggagttcccagccacagaggcctgggagtgtgagctagaaggcctgctggaagagaggcctgccctgtgcctgtccccgcaggccccatttcccaagctgggctgggatgacgaactgcggaaacccggcgcccagatctacatgcgcttcatgcaggagcacacctgctacgatgccatggcaactagctccaagctagtcatcttcgacaccatgctggagatcaagaaggccttctttgctctggtggccaacggtgtgcgggcagcccctctatgggacagcaagaagcagagctttgtggggatgctgaccatcactgacttcatcctggtgctgcatcgctactacaggtcccccctggtccagatctatgagattgaacaacataagattgagacctggagggagatctacctgcaaggctgcttcaagcctctggtctccatctctcctaatgatagcctgtttgaagctgtctacaccctcatcaagaaccggatccatcgcctgcctgttcttgacccggtgtcaggcaacgtactccacatcctcacacacaaacgcctgctcaagttcctgcacatctttggttccctgctgccccggccctccttcctctaccgcactatccaagatttgggcatcggcacattccgagacttggctgtggtgctggagacagcacccatcctgactgcactggacatctttgtggaccggcgtgtgtctgcactgcctgtggtcaacgaatgtggtcaggtcgtgggcctctattcccgctttgatgtgattcacctggctgcccagcaaacctacaaccacctggacatgagtgtgggagaagccctgaggcagaggacactatgtctggagggagtcctttcctgccagccccacgagagcttgggggaagtgatcgacaggattgctcgggagcaggtacacaggctggtgctagtggacgagacccagcatctcttgggcgtggtctccctctccgacatccttcaggcactggtgctcagccctgctggcatcgatgccctcggggcctgagaagatctgagtcctcaatcccaagccacctgcacacctggaagccaatgaagggaactggagaactcagccttcatcttcccccacccccatttgctggttcagctatgattcaggcttcttcagccctcccaaattgcccttgccctacctgtgctcccagaagccctcgggcatgcccagtgcaccatgggatgatgaaattaaggagaacagctgagtcaagcttggaggtccctgaaccagaggcactaggattaccccagggccatctgtgctccatgcccgcccatccccttgccgcctgactgggtcggatggccccagtgggtttagtcagggcttctggattcctcggtttctgggctacctatggcttcagccttcagctcctgggagtcccagctgttgttcccagcaacgtcgccactgccctcctactctccaggctttgtcatttcaaggctgctgaaatgctgcatttcaggggccaccatggagcagccgttatttatagaactgcctgttggaggtggggagtcctccctccattcttgtccagaaaactccttagctctcgcagtgagccatgttcttagtctccagggatggatggccttgtatatggacccctgagaatgagcaattgagaaaacaaaacaaaaggaacaatccatgaacttagattttattggtttcactcaaaatgctgcagtcatttgacctgaacttgtggcaagagacttgtgctttctaaattcaaagactagaaggaaaatggataaaaatcacaagtgccgtttctcttgc

SEQ ID NO: 24311 - DNA, 2222 bp, Homo sapiens
  source 1..2222: mol_type = unassigned DNA
ctgctcaatgaccatgttcccacatgctccaagccacatcccctcaaaaagggtccctctagcttgtcctcagtgacccaggaggcagctgaggaccaagtacccagattatccggtgcgccccttccctcccagcaacccccagccttcagggctgtagcagctgagcaaatgggggcccctccctctcattgcctgacacccaatcagagagaaaccgatcctggcagggcagggtgcccggggccgggcccagaatagtgcagcccagccacagtgtcgcacacttgctctcagttggtctggggctggccacatggagcccgggctggagcacgcactgcgcaggaccccttcctggagcagccttgggggttctgagcatcaagagatgagcttcctagagcaagaaaacagcagctcatggccatcaccagctgtgaccagcagctcagaaagaatccgtgggaaacggagggccaaagccttgagatggacaaggcagaagtcggtggaggaaggggagccaccaggtcagggggaaggtccccggtccaggccagctgctgagtccaccgggctggaggccacattccccaagaccacacccttggctcaagctgatcctgccggggtgggcactccaccaacagggtgggactgcctcccctctgactgtacagcctcagctgcaggctccagcacagatgatgtggagctggccacggagttcccagccacagaggcctgggagtgtgagctagaaggcctgctggaagagaggcctgccctgtgcctgtccccgcaggccccatttcccaagctgggctgggatgacgaactgcggaaacccggcgcccagatctacatgcgcttcatgcaggagcacacctgctacgatgccatggcaactagctccaagctagtcatcttcgacaccatgctggagatcaagaaggccttctttgctctggtggccaacggtgtgcgggcagcccctctatgggacagcaagaagcagagctttgtggggatgctgaccatcactgacttcatcctggtgctgcatcgctactacaggtcccccctggtccagatctatgagattgaacaacataagattgagacctggagggagatctacctgcaaggctgcttcaagcctctggtctccatctctcctaatgatagcctgtttgaagctgtctacaccctcatcaagaaccggatccatcgcctgcctgttcttgacccggtgtcaggcaacgtactccacatcctcacacacaaacgcctgctcaagttcctgcacatctttggttccctgctgccccggccctccttcctctaccgcactatccaagatttgggcatcggcacattccgagacttggctgtggtgctggagacagcacccatcctgactgcactggacatctttgtggaccggcgtgtgtctgcactgcctgtggtcaacgaatgtggtcaggtcgtgggcctctattcccgctttgatgtgattcacctggctgcccagcaaacctacaaccacctggacatgagtgtgggagaagccctgaggcagaggacactatgtctggagggagtcctttcctgccagccccacgagagcttgggggaagtgatcgacaggattgctcgggagcaggtacacaggctggtgctagtggacgagacccagcatctcttgggcgtggtctccctctccgacatccttcaggcactggtgctcagccctgctggcatcgatgccctcggggcctgagaagatctgagtcctcaatcccaagccacctgcacacctggaagccaatgaagggaactggagaactcagccttcatcttcccccacccccatttgctggttcagctatgattcaggtaggctctgccctgggccatgacaccagcctcttagtcttcctgatttcctggatctcagattgggacaccctgaggatgggagtggccaagctcaaagctgagcagccctgtgaaaactgcaagtgtaaggactcacaggtccccactttgtcccattttcagctgaggtcatggagactgtcctagaagggagggacaaagccccggctaaaagctaaggctgcgatgtgacttcagacactctgggaagatttacttgttccctcacaattcaatttccacctgctggaaatccccttagaaggaagcaagctata

SEQ ID NO: 24312 - DNA, 1784 bp, Homo sapiens
  source 1..1784: mol_type = unassigned DNA
acttgctctcagttggtctggggctggccacatggagcccgggctggagcacgcactgcgcaggaccccttcctggagcagccttgggggttctgagcatcaagagatgagcttcctagagcaagaaaacagcagctcatggccatcaccagctgtgaccagcagctcagaaagaatccgtgggaaacggagggccaaagccttgagatggacaaggcagaagtcggtggaggaaggggagccaccaggtccccggtccaggccagctgctgagtccaccgggctggaggccacattccccaagaccacacccttggctcaaggtgggactgcctcccctctgactgtacagcctcagctgcaggctccagcacagatgatgtggagctggccacggagttcccagccacagaggcctgggagtgtgagctagaaggcctgctggaagagaggcctgccctgtgcctgtccccgcaggccccatttcccaagctgggctgggatgacgaactgcggaaacccggcgcccagatctacatgcgcttcatgcaggagcacacctgctacgatgccatggcaactagctccaagctagtcatcttcgacaccatgctggagatcaagaaggccttctttgctctggtggccaacggtgtgcgggcagcccctctatgggacagcaagaagcagagctttgtggggatgctgaccatcactgacttcatcctggtgctgcatcgctactacaggtcccccctggtccagatctatgagattgaacaacataagattgagacctggagggagatctacctgcaaggctgcttcaagcctctggtctccatctctcctaatgatagcctgtttgaagctgtctacaccctcatcaagaaccggatccatcgcctgcctgttcttgacccggtgtcaggcaacgtactccacatcctcacacacaaacgcctgctcaagttcctgcacatctttggttccctgctgccccggccctccttcctctaccgcactatccaagatttgggcatcggcacattccgagacttggctgtggtgctggagacagcacccatcctgactgcactggacatctttgtggaccggcgtgtgtctgcactgcctgtggtcaacgaatgtggtcaggtcgtgggcctctattcccgctttgatgtgattcacctggctgcccagcaaacctacaaccacctggacatgagtgtgggagaagccctgaggcagaggacactatgtctggagggagtcctttcctgccagccccacgagagcttgggggaagtgatcgacaggattgctcgggagcaggtacacaggctggtgctagtggacgagacccagcatctcttgggcgtggtctccctctccgacatccttcaggcactggtgctcagccctgctggcatcgatgccctcggggcctgagaagatctgagtcctcaatcccaagccacctgcacacctggaagccaatgaagggaactggagaactcagccttcatcttcccccacccccatttgctggttcagctatgattcaggcttcttcagccctcccaaattgcccttgccctacctgtgctcccagaagccctcgggcatgcccagtgcaccatgggatgatgaaattaaggagaacagctgagtcaagcttggaggtccctgaaccagaggcactaggattaccccagggccatctgtgctccatgcccgcccatccccttgccgcctgactgggtcggatggccccagtg

SEQ ID NO: 24313 - DNA, 2671 bp, Homo sapiens
  source 1..2671: mol_type = unassigned DNA
gatcttgggctgaggttcccgggcgggcgggcgcggagagacgcgggaagcaggggctgggcgggggtcgcggcgccgcagctagcgcagccagcccgagggccgccgccgccgccgcccagcgcgctccggggccgccggccgcagccagcacccgccgcgccgcagctccgggaccggccccggccgccgccgccgcgatgggcaacgccgccgccgccaagaagggcagcgagcaggagagcgtgaaagaattcttagccaaagccaaagaagattttcttaaaaaatgggaaagtcccgctcagaacacagcccacttggatcagtttgaacgaatcaagaccctcggcacgggctccttcgggcgggtgatgctggtgaaacacaaggagaccgggaaccactatgccatgaagatcctcgacaaacagaaggtggtgaaactgaaacagatcgaacacaccctgaatgaaaagcgcatcctgcaagctgtcaactttccgttcctcgtcaaactcgagttctccttcaaggacaactcaaacttatacatggtcatggagtacgtgcccggcggggagatgttctcacacctacggcggatcggaaggttcagtgagccccatgcccgtttctacgcggcccagatcgtcctgacctttgagtatctgcactcgctggatctcatctacagggacctgaagccggagaatctgctcattgaccagcagggctacattcaggtgacagacttcggtttcgccaagcgcgtgaagggccgcacttggaccttgtgcggcacccctgagtacctggcccctgagattatcctgagcaaaggctacaacaaggccgtggactggtgggccctgggggttcttatctatgaaatggccgctggctacccgcccttcttcgcagaccagcccatccagatctatgagaagatcgtctctgggaaggtgcgcttcccttcccacttcagctctgacttgaaggacctgctgcggaacctcctgcaggtagatctcaccaagcgctttgggaacctcaagaatggggtcaacgatatcaagaaccacaagtggtttgccacaactgactggattgccatctaccagaggaaggtggaagctcccttcataccaaagtttaaaggccctggggatacgagtaactttgacgactatgaggaagaagaaatccgggtctccatcaatgagaagtgtggcaaggagttttctgagttttaggggcatgcctgtgcccccatgggttttcttttttcttttttcttttttttggtcgggggggtgggagggttggattgaacagccagagggccccagagttccttgcatctaatttcacccccaccccaccctccagggttagggggagcaggaagcccagataatcagagggacagaaacaccagctgctccccctcatccccttcaccctcctgccccctctcccacttttcccttcctctttccccacagccccccagcccctcagccctcccagcccacttctgcctgttttaaacgagtttctcaactccagtcagaccaggtcttgctggtgtatccagggacagggtatggaaagaggggctcacgcttaactccagcccccacccacacccccatcccacccaaccacaggccccacttgctaagggcaaatgaacgaagcgccaaccttcctttcggagtaatcctgcctgggaaggagagatttttagtgacatgttcagtgggttgcttgctagaatttttttaaaaaaacaacaatttaaaatcttatttaagttccaccagtgcctccctccctccttcctctactcccacccctcccatgtccccccattcctcaaatccattttaaagagaagcagactgactttggaaagggaggcgctggggtttgaacctccccgctgctaatctcccctgggcccctccccggggaatcctctctgccaatcctgcgagggtctaggcccctttaggaagcctccgctctctttttccccaacagacctgtcttcacccttgggctttgaaagccagacaaagcagctgcccctctccctgccaaagaggagtcatcccccaaaaagacagagggggagccccaagcccaagtctttcctcccagcagcgtttccccccaactccttaattttattctccgctagattttaacgtccagccttccctcagctgagtggggagggcatccctgcaaaagggaacagaagaggccaagtccccccaagccacggcccggggttcaaggctagagctgctggggaggggctgcctgttttactcacccaccagcttccgcctcccccatcctgggcgcccctcctccagcttagctgtcagctgtccatcacctctcccccactttctcatttgtgcttttttctctcgtaatagaaaagtggggagccgctggggagccaccccattcatccccgtatttccccctctcataacttctccccatcccaggaggagttctcaggcctggggtggggccccgggtgggtgcgggggcgattcaacctgtgtgctgcgaaggacgagacttcctcttgaacagtgtgctgttgtaaacatatttgaaaactattaccaataaagttttgttt

SEQ ID NO: 24314 - DNA, 2472 bp, Homo sapiens
  source 1..2472: mol_type = unassigned DNA
ggtgccctgagaacaggactgagtgatggcttccaactccagcgatgtgaaagaattcttagccaaagccaaagaagattttcttaaaaaatgggaaagtcccgctcagaacacagcccacttggatcagtttgaacgaatcaagaccctcggcacgggctccttcgggcgggtgatgctggtgaaacacaaggagaccgggaaccactatgccatgaagatcctcgacaaacagaaggtggtgaaactgaaacagatcgaacacaccctgaatgaaaagcgcatcctgcaagctgtcaactttccgttcctcgtcaaactcgagttctccttcaaggacaactcaaacttatacatggtcatggagtacgtgcccggcggggagatgttctcacacctacggcggatcggaaggttcagtgagccccatgcccgtttctacgcggcccagatcgtcctgacctttgagtatctgcactcgctggatctcatctacagggacctgaagccggagaatctgctcattgaccagcagggctacattcaggtgacagacttcggtttcgccaagcgcgtgaagggccgcacttggaccttgtgcggcacccctgagtacctggcccctgagattatcctgagcaaaggctacaacaaggccgtggactggtgggccctgggggttcttatctatgaaatggccgctggctacccgcccttcttcgcagaccagcccatccagatctatgagaagatcgtctctgggaaggtgcgcttcccttcccacttcagctctgacttgaaggacctgctgcggaacctcctgcaggtagatctcaccaagcgctttgggaacctcaagaatggggtcaacgatatcaagaaccacaagtggtttgccacaactgactggattgccatctaccagaggaaggtggaagctcccttcataccaaagtttaaaggccctggggatacgagtaactttgacgactatgaggaagaagaaatccgggtctccatcaatgagaagtgtggcaaggagttttctgagttttaggggcatgcctgtgcccccatgggttttcttttttcttttttcttttttttggtcgggggggtgggagggttggattgaacagccagagggccccagagttccttgcatctaatttcacccccaccccaccctccagggttagggggagcaggaagcccagataatcagagggacagaaacaccagctgctccccctcatccccttcaccctcctgccccctctcccacttttcccttcctctttccccacagccccccagcccctcagccctcccagcccacttctgcctgttttaaacgagtttctcaactccagtcagaccaggtcttgctggtgtatccagggacagggtatggaaagaggggctcacgcttaactccagcccccacccacacccccatcccacccaaccacaggccccacttgctaagggcaaatgaacgaagcgccaaccttcctttcggagtaatcctgcctgggaaggagagatttttagtgacatgttcagtgggttgcttgctagaatttttttaaaaaaacaacaatttaaaatcttatttaagttccaccagtgcctccctccctccttcctctactcccacccctcccatgtccccccattcctcaaatccattttaaagagaagcagactgactttggaaagggaggcgctggggtttgaacctccccgctgctaatctcccctgggcccctccccggggaatcctctctgccaatcctgcgagggtctaggcccctttaggaagcctccgctctctttttccccaacagacctgtcttcacccttgggctttgaaagccagacaaagcagctgcccctctccctgccaaagaggagtcatcccccaaaaagacagagggggagccccaagcccaagtctttcctcccagcagcgtttccccccaactccttaattttattctccgctagattttaacgtccagccttccctcagctgagtggggagggcatccctgcaaaagggaacagaagaggccaagtccccccaagccacggcccggggttcaaggctagagctgctggggaggggctgcctgttttactcacccaccagcttccgcctcccccatcctgggcgcccctcctccagcttagctgtcagctgtccatcacctctcccccactttctcatttgtgcttttttctctcgtaatagaaaagtggggagccgctggggagccaccccattcatccccgtatttccccctctcataacttctccccatcccaggaggagttctcaggcctggggtggggccccgggtgggtgcgggggcgattcaacctgtgtgctgcgaaggacgagacttcctcttgaacagtgtgctgttgtaaacatatttgaaaactattaccaataaagttttgttt

SEQ ID NO: 24315 - DNA, 1457 bp, Homo sapiens
  source 1..1457: mol_type = unassigned DNA
acagacagcggcagagatcttgggctgaggttcccgggcgggcgggcgcggagagacgcgggaagcagccgccgccgccgcgatgggcaacgccgccgccgccaagaagggcagcgagcaggagagcgtgaaagaattcttagccaaagccaaagaagattttcttaaaaaatgggaaagtcccgctcagaacacagcccacttggatcagtttgaacgaatcaagaccctcggcacgggctccttcgggcgggtgatgctggtgaaacacaaggagaccgggaaccactatgccatgaagatcctcgacaaacagaaggtggtgaaactgaaacagatcgaacacaccctgaatgaaaagcgcatcctgcaagctgtcaactttccgttcctcgtcaaactcgagttctccttcaaggacaactcaaacttatacatggtcatggagtacgtgcccggcggggagatgttctcacacctacggcggatcggaaggttcagtgagccccatgcccgtttctacgcggcccagatcgtcctgacctttgagtatctgcactcgctggatctcatctacagggacctgaagccggagaatctgctcattgaccagcagggctacattcaggtgacagacttcggtttcgccaagcgcgtgaagggccgcacttggaccttgtgcggcacccctgagtacctggcccctgagattatcctgagcaaaggctacaacaaggccgtggactggtgggccctgggggttcttatctatgaaatggccgctggctacccgcccttcttcgcagaccagcccatccagatctatgagaagatcgtctctgggaaggtgcgcttcccttcccacttcagctctgacttgaaggacctgctgcggaacctcctgcaggtagatctcaccaagcgctttgggaacctcaagaatggggtcaacgatatcaagaaccacaagtggtttgccacaactgactggattgccatctaccagaggaaggtggaagctcccttcataccaaagtttaaaggccctggggatacgagtaactttgacgactatgaggaagaagaaatccgggtctccatcaatgagaagtgtggcaaggagttttctgagttttaggggcatgcctgtgcccccatgggttttcttttttcttttttcttttttttggtcgggggggtgggagggttggattgaacagccagagggccccagagttccttgcatctaatttcacccccaccccaccctccagggttagggggagcaggaagcccagataatcagagggacagaaacaccagctgctccccctcatccccttcaccctcctgccccctctcccacttttcccttcctctttccccacagccccccagcccctcagccctcccagcccacttctgcctgttttaaacgagtttctcaactccagtca

SEQ ID NO: 24316 - DNA, 1524 bp, Homo sapiens
  source 1..1524: mol_type = unassigned DNA
ctctgcaaaccttggctagcttggagcaggtacctttaaaagcttctgtggcaaccagctcctcctccctggtcccctgaggccatcccaaggaagctgacttagaggctctgcgttttcctggtttctcagcaaaaggaagattccagggagagcccaagggggctggggatggatctgggatcaggcagcagccagggtggggacttggagaccaccttccagctgtggctgcagctgctcctctgggcccacctggctgtacgtttcctgggctacctgcaccgcaccttccgggggcctaagccacagccagcaccctgagcctccctggccagggggcagaaggccgccagatcaccccatcccacccaccctttattctaccctttcctggaagagacaggaagcagagtgaaagaattcttagccaaagccaaagaagattttcttaaaaaatgggaaagtcccgctcagaacacagcccacttggatcagtttgaacgaatcaagaccctcggcacgggctccttcgggcgggtgatgctggtgaaacacaaggagaccgggaaccactatgccatgaagatcctcgacaaacagaaggtggtgaaactgaaacagatcgaacacaccctgaatgaaaagcgcatcctgcaagctgtcaactttccgttcctcgtcaaactcgagttctccttcaaggacaactcaaacttatacatggtcatggagtacgtgcccggcggggagatgttctcacacctacggcggatcggaaggttcagtgagccccatgcccgtttctacgcggcccagatcgtcctgacctttgagtatctgcactcgctggatctcatctacagggacctgaagccggagaatctgctcattgaccagcagggctacattcaggtgacagacttcggtttcgccaagcgcgtgaagggccgcacttggaccttgtgcggcacccctgagtacctggcccctgagattatcctgagcaaaggctacaacaaggccgtggactggtgggccctgggggttcttatctatgaaatggccgctggctacccgcccttcttcgcagaccagcccatccagatctatgagaagatcgtctctgggaaggtgaggtccggatgtggggacacagccctggaagaaacagaccgttccctgctcacccatcctattccctggggagccctgcttgttgtcagaataatctagaagttccttaagtcaggccaggtggtgaagctggacgcgccggccacactgaggccaacacctcaagcccccttgctgtccagccccaaccccgcggttccagaatcccatgggcttccaaaatcccgagcctcacgggaacatcttggccacagaacacaaaccgccctgccagacgaccctccttttcgctcctcatcccagttagtgtgagttttcgcaaattccaaggcagaaaaacgaatgtatttggttcctgttcccaggtgctgtccatagcctcaccca

SEQ ID NO: 24317 - DNA, 1278 bp, Homo sapiens
  source 1..1278: mol_type = unassigned DNA
attctgctgtttgctccttgccaggttcaacatgggattgtcacgcaaatcatcagatgcatctgcttgctcctcttcagaaatatctgattttgtgaaagagtttctagccaaagccaaagaagactttttgaaaaaatgggagaatccaactcagaataatgccggacttgaagattttgaaaggaaaaaaacccttggaacaggttcatttggaagagtcatgttggtaaaacacaaagccactgaacagtattatgccatgaagatcttagataagcagaaggttgttaaactgaagcaaatagagcatactttgaatgagaaaagaatattacaggcagtgaattttcctttccttgttcgactggagtatgcttttaaggataattctaatttatacatggttatggaatatgtccctgggggtgaaatgttttcacatctaagaagaattggaaggttcagtgagccccatgcacggttctatgcagctcagatagtgctaacattcgagtacctccattcactagacctcatctacagagatctaaaacctgaaaatctcttaattgaccatcaaggctatatccaggtcacagactttgggtttgccaaaagagttaaaggcagaacttggacattatgtggaactccagagtatttggctccagaaataattctcagcaagggctacaataaggcagtggattggtgggcattaggagtgctaatctatgaaatggcagctggctatcccccattctttgcagaccaaccaattcagatttatgaaaagattgtttctggaaaggtccgattcccatcccacttcagttcagatctcaaggaccttctacggaacctgctgcaggtggatttgaccaagagatttggaaatctaaagaatggtgtcagtgatataaaaactcacaagtggtttgccacgacagattggattgctatttaccagaggaaggttgaagctccattcataccaaagtttagaggctctggagataccagcaactttgatgactatgaagaagaagatatccgtgtctctataacagaaaaatgtgcaaaagaatttggtgaattttaaagaggaacaagatgacatctgagctcacactcagtgtttgcactctgttgagagataaggtagagctgagaccgtccttgttgaagcagttacctagttccttcattccaacgactgagtgaggtctttattgccatcatcccgtgtgcgcactctgcatccacctatgtaac

SEQ ID NO: 24318 - DNA, 1914 bp, Homo sapiens
  source 1..1914: mol_type = unassigned DNA
ccattttgagttgttctagtggtatatgaaggaggctgggataactagcttgaaagaaattcagtctagttatagacatctttggcattaatctgatgtttactagtgatatctcatgctaggcagttatgctttgcttctaggggcttctctttttaaaacaaaagaaagctcttttcgttttctgtgtgctgcatgctccagtgtgtgtgtttacaccatcggttcttctccctctagagattagcataactccctttgctgttggattgttattttgagcaatatgttttggaaaggttggttttcatcatgagtgcacgcaaatcatcagatgcatctgcttgctcctcttcagaaatatctgattcctttgtgaaagagtttctagccaaagccaaagaagactttttgaaaaaatgggagaatccaactcagaataatgccggacttgaagattttgaaaggaaaaaaacccttggaacaggttcatttggaagagtcatgttggtaaaacacaaagccactgaacagtattatgccatgaagatcttagataagcagaaggttgttaaactgaagcaaatagagcatactttgaatgagaaaagaatattacaggcagtgaattttcctttccttgttcgactggagtatgcttttaaggataattctaatttatacatggttatggaatatgtccctgggggtgaaatgttttcacatctaagaagaattggaaggttcagtgagccccatgcacggttctatgcagctcagatagtgctaacattcgagtacctccattcactagacctcatctacagagatctaaaacctgaaaatctcttaattgaccatcaaggctatatccaggtcacagactttgggtttgccaaaagagttaaaggcagaacttggacattatgtggaactccagagtatttggctccagaaataattctcagcaagggctacaataaggcagtggattggtgggcattaggagtgctaatctatgaaatggcagctggctatcccccattctttgcagaccaaccaattcagatttatgaaaagattgtttctggaaagcagaacttttgatatgaacaaaacaaaactttgagaaaaattaacagacaaggcagtgatttatttttgaagaatttgagaagtgtagactctcaagaggactaaaggtcatatgaagaatgatgagagaaccaaaatacattaaaatcacaaatggaagaagaatattttactaatacaaaaactaagaatgtaaatgttataataattgtttcaaatcatttaattgacagtaattataaagttcttgaatctttactatattacttttatttatattcatataagaaatccaattttctaacaaggatactgtcataactaaatttacatttattaagaaaaactgctttagttaaaattaatgtgtcttcatttttatgcattggcctcgatttgccaatcattctctattggttaaattttatattcagctgtttatgaatatatattcattttatatcaaactttaaaattttgtatctaataatcagcatatattctaaaatcataacagtctaaatcctgggcaccttagaagaatgacaccagaaaaccttattatatcacaatattctgttttccccttcatttatttagaaatatgacaggatatttggtgtacttttgttttttaactaaaagtaccagattatctctccccatgtgggatataaaattatccccatctcttactccctttactcatctaaagtagaagtcatgaaagtggaatttttgccattaaaaggctctgtattatgtgaagttagattgtattaaccatttcccaataaatcatctgtttcaaaactcaaa

SEQ ID NO: 24319 - DNA, 1380 bp, Homo sapiens
  source 1..1380: mol_type = unassigned DNA
atgctgctactatctagttctataagcttatataaagacagaaatgaagcaagactgatttcttcacagaataatgccggacttgaagattttgaaaggaaaaacccttggaacaggttcatttggaagagtcatgttggtaaaacacaaagccactgaacagtattatgccatgaagatcttagataagcagaaggttgttaaactgaagcaaatagagcatactttgaatgagaaaagaatattacaggcagtgaattttcctttccttgttcgactggagtatgcttttaaggataattctaatttatacatggttatggaatatgtccctgggggtgaaatgttttcacatctaagaagaattggaaggttcagtgagccccatgcacggttctatgcagctcagatagtgctaacattcgagtacctccattcactagacctcatctacagagatctaaaacctgaaaatctcttaattgaccatcaaggctatatccaggtcacagactttgggtttgccaaaagagttaaaggcagaacttggacattatgtggaactccagagtatttggctccagaaataattctcagcaagggctacaataaggcagtggattggtgggcattaggagtgctaatctatgaaatggcagctggctatcccccattctttgcagaccaaccaattcagatttatgaaaagattgtttctggaaaggtccgattcccatcccacttcagttcagatctcaaggaccttctacggaacctgctgcaggtggatttgaccaagagatttggaaatctaaagaatggtgtcagtgatataaaaactcacaagtggtttgccacgacagattggattgctatttaccagaggaaggttgaagctccattcataccaaagtttagaggctctggagataccagcaactttgatgactatgaagaagaagatatccgtgtctctataacagaaaaatgtgcaaaagaatttggtgaattttaaagaggaacaagatgacatctgagctcacactcagtgtttgcactctgttgagagataaggtagagctgagaccgtccttgttgaagcagttacctagttccttcattccaacgactgagtgaggtctttattgccatcatcccgtgtgcgcactctgcatccacctatgtaacaaggcaccgctaagcaagcattgtctgtgccataacacagtactagaccactttcttacttctctttgggttgtctttctcctctcctatatccatttcttccttttccaatttcattggttttctctaaacagtgctccattttattttgttggtgtttcagatgggcagtgttatggctacgtgatattt

SEQ ID NO: 24320 - DNA, 4283 bp, Homo sapiens
  source 1..4283: mol_type = unassigned DNA
attctgctgtttgctccttgccaggttcaacatgggattgtcacgcaaatcatcagatgcatctgcttgctcctcttcagaaatatctgtgaaagagtttctagccaaagccaaagaagactttttgaaaaaatgggagaatccaactcagaataatgccggacttgaagattttgaaaggaaaaaaacccttggaacaggttcatttggaagagtcatgttggtaaaacacaaagccactgaacagtattatgccatgaagatcttagataagcagaaggttgttaaactgaagcaaatagagcatactttgaatgagaaaagaatattacaggcagtgaattttcctttccttgttcgactggagtatgcttttaaggataattctaatttatacatggttatggaatatgtccctgggggtgaaatgttttcacatctaagaagaattggaaggttcagtgagccccatgcacggttctatgcagctcagatagtgctaacattcgagtacctccattcactagacctcatctacagagatctaaaacctgaaaatctcttaattgaccatcaaggctatatccaggtcacagactttgggtttgccaaaagagttaaaggcagaacttggacattatgtggaactccagagtatttggctccagaaataattctcagcaagggctacaataaggcagtggattggtgggcattaggagtgctaatctatgaaatggcagctggctatcccccattctttgcagaccaaccaattcagatttatgaaaagattgtttctggaaaggtccgattcccatcccacttcagttcagatctcaaggaccttctacggaacctgctgcaggtggatttgaccaagagatttggaaatctaaagaatggtgtcagtgatataaaaactcacaagtggtttgccacgacagattggattgctatttaccagaggaaggttgaagctccattcataccaaagtttagaggctctggagataccagcaactttgatgactatgaagaagaagatatccgtgtctctataacagaaaaatgtgcaaaagaatttggtgaattttaaagaggaacaagatgacatctgagctcacactcagtgtttgcactctgttgagagataaggtagagctgagaccgtccttgttgaagcagttacctagttccttcattccaacgactgagtgaggtctttattgccatcatcccgtgtgcgcactctgcatccacctatgtaacaaggcaccgctaagcaagcattgtctgtgccataacacagtactagaccactttcttacttctctttgggttgtctttctcctctcctatatccatttcttccttttccaatttcattggttttctctaaacagtgctccattttattttgttggtgtttcagatgggcagtgttatggctacgtgatatttgaagggaaggataagtgttgctttcagtagttattgccaatattgttgttggtcaatggcttgaagataaactttctaataattattatttctttgagtagctcagacttggttttgccaaaactcttggtaatttttgaagatagactgtcttatcaccaaggaaatttatacaaattaagactaactttcttggaattcactattctggcaataaattttggtagactaatacagtacagctagacccagaaatttggaaggctgtagatcagaggttctagttccctttccctccttttatatcctcctctccttgagtaatgaagtgaccagcctgtgtagtgtgacaaacgtgtctcattcagcaggaaaaactaatgatatggatcatcacccagattctctcacttggtaccagcatttctgtaggtattagagaagagttctaagttttctaaaccttaactgttccttaaggattttagccagtattttaatagaacatgattaatgaaagtgacaaattttaaattttctctaatagtcctcatcataaactttttaaaggaaaataagcaaactaaaaagaacattggtttagataaatacttatactttgcaaagtcaaaaatggcttgatttttggaaacaatatagaggtattcatatttaaatgagggtttacatttgttttgttttgtaaccgttaaaaagaagttgtttccagctaattattgtggtgtactatatttgtgagcctagggtaggggcactgctgcaacttctgctttcatcccatgcctcatcaatgaggaaagggaacaaagtgtataaaactgccacaattgtattttaattttgaggtatgatattttcagatatttcataatttctaacctctgttctctcagtaaacagaatgtctgatcgatcatgcagatacaatgttggtatttgagaggttagtttttttcctacacttttttttgccaactgacttaacaacattgctgtcaggtggaaatttcaagcacttttgcacatttagttcagtgtttgttgagaatccatggcttaacccacttgttttgctatttttttctttgcttttaattttccccatctgattttatctctgcgtttcagtgacctaccttaaaacaacacacgagaagagttaaactgggttcattttaatgatcaatttacctgcatataaaatttatttttaatcaagctgatcttaatgtatataatcattctatttgctttattatcggtgcaggtaggtcattaacaccacttcttttcatctgtaccacaccctggtgaaacctttgaagacataaaaaaaacctgtctgagatgttctttctaccaatctatatgtctttcggttatcaagtgtttctgcatggtaatgtcatgtaaatgctgatattgatttcactggtccatctatatttaaaacgtgcaagaaaaaaataaaatactctgctctagcaagttttgtgtaacaaaggcatatcgtcatgttaataaatttaaaacatcattcgtataaaatattttaattttcttgtatttcatttagacccaagaacatgctgaccaatgtgttctatatgtaaactacaaattctatggtagctttgttgtatattattgtaaaattattttaataagtcatggggatgacaatttgattattacaatttagttttcagtaatcaaaaagatttctatgaattctaaaaaatatttttttctatgaaattactagtgcccagctgtagaatctaccttaggtagatgatccctagacatacgttggttttgagggctattcagccattccattttactctctatttaaaggccgtgagcaagcttgtcatgagcaaatatgtcaagggagtcaatttctgaccaatcaagtacactaaattagaatatttttaaagtatgtaacattcccagtttcagccacaatttagccaagaataagataaaaacttgaataagaagtaagtagcataaatcagtatttaacctaaaattacatatttgaaacagaagatattatgttatgctcagtaaataattaagagatggcattgtgtaagaaggagccctagactgaaagtcaagacatctgaatttcaggctggaaaactatcagtatgatctcagcctcagttctcttgtctgtaaaatggaagaactggattaggcagtttgtaagattcctcctaactttcacagtcgatgacaagattgtctttttatctgatattttgaagggtatattgctttgaagtaagtctcaataaggcaatatattttagggcatctttcttcttatctctgacagtgttcttaaaattatttgaatatcataagagccttggtgtctgtcctaattcctttctcactcaccgatgctgaatacccagttgaatcaaactgtcaacctaccaaaaacgatattgtggcttatgggtattgctgtctcattcttggtatattcttgtgttaactgcccattggcctgaaaatactcattgtaagcctgaaaaaaaaaatctttcccactgttttttctgcttgttgtaagaatcaaatgaaataatgtatgtgaaagcaccttgtaaactgtaacctatcaatgtaaaatgttaaggtgtgttgttatttcattaattacttctttgtttagaatggaatttcctatgcactactgtagctaggaaatgctgaaaacaactgtgttttttaattaatcaataactgcaaaattaaagtaccttcaatgg

SEQ ID NO: 24321 - DNA, 869 bp, Homo sapiens
  source 1..869: mol_type = unassigned DNA
aatatcagtgaggtccacagctagcagtaagagctggtgtaattgaaagacgtttaggtgcaatcattctgctgtttgctccttgccaggttcaacatgggattgttgaaagagtttctagccaaagccaaagaagactttttgaaaaaatgggagaatccaactcagaataatgccggacttgaagattttgaaaggaaaaaaacccttggaacaggttcatttggaagagtcatgttggtaaaacacaaagccactgaacagtattatgccatgaagatcttagataagcagaaggttgttaaactgaagcaaatagagcatactttgaatgagaaaagaatattacaggcagtgaattttcctttccttgttcgactggagtatgcttttaaggataattctaatttatacatggttatggaatatgtccctgggggtgaaatgttttcacatctaagaagaattggaaggttcagtgagccccatgcacggttctatgcagctcagatagtgctaacattcgagtacctccattcactagacctcatctacagagatctaaaacctgaaaatctcttaattgaccatcaaggctatatccaggtcacagactttgggtttgccaaaagagttaaaggcagaacttggacattatgtggaactccagagtatttggctccagaaataattctcagcaagggctacaataaggcagtggattggtgggcattaggagtgctaatctatgaaatggcagctggctatcccccattctttgcagaccaaccaattcagatttatgaaaagattgtttctggaaagaacttttgatatgaacaaaacaaaactttgagaaaaattaacag

SEQ ID NO: 24322 - DNA, 4481 bp, Homo sapiens
  source 1..4481: mol_type = unassigned DNA
acatgcatagctcttagcttctgtgtaagaagttgtgagctccttctggaaacatttgcagttacattaagtaaagtgtaaatgcacatgaatggcagcttatagagaaccaccttgtaaccagtatacaggtacaactacagctcttcagaaattggaaggttttgctagccggttatttcatagacactctaaaggtactgcacatgatcagaaaacagctctggaaaatgacagccttcatttctctgaacatactgccttatgggacagatcaatgaaagagtttctagccaaagccaaagaagactttttgaaaaaatgggagaatccaactcagaataatgccggacttgaagattttgaaaggaaaaaaacccttggaacaggttcatttggaagagtcatgttggtaaaacacaaagccactgaacagtattatgccatgaagatcttagataagcagaaggttgttaaactgaagcaaatagagcatactttgaatgagaaaagaatattacaggcagtgaattttcctttccttgttcgactggagtatgcttttaaggataattctaatttatacatggttatggaatatgtccctgggggtgaaatgttttcacatctaagaagaattggaaggttcagtgagccccatgcacggttctatgcagctcagatagtgctaacattcgagtacctccattcactagacctcatctacagagatctaaaacctgaaaatctcttaattgaccatcaaggctatatccaggtcacagactttgggtttgccaaaagagttaaaggcagaacttggacattatgtggaactccagagtatttggctccagaaataattctcagcaagggctacaataaggcagtggattggtgggcattaggagtgctaatctatgaaatggcagctggctatcccccattctttgcagaccaaccaattcagatttatgaaaagattgtttctggaaaggtccgattcccatcccacttcagttcagatctcaaggaccttctacggaacctgctgcaggtggatttgaccaagagatttggaaatctaaagaatggtgtcagtgatataaaaactcacaagtggtttgccacgacagattggattgctatttaccagaggaaggttgaagctccattcataccaaagtttagaggctctggagataccagcaactttgatgactatgaagaagaagatatccgtgtctctataacagaaaaatgtgcaaaagaatttggtgaattttaaagaggaacaagatgacatctgagctcacactcagtgtttgcactctgttgagagataaggtagagctgagaccgtccttgttgaagcagttacctagttccttcattccaacgactgagtgaggtctttattgccatcatcccgtgtgcgcactctgcatccacctatgtaacaaggcaccgctaagcaagcattgtctgtgccataacacagtactagaccactttcttacttctctttgggttgtctttctcctctcctatatccatttcttccttttccaatttcattggttttctctaaacagtgctccattttattttgttggtgtttcagatgggcagtgttatggctacgtgatatttgaagggaaggataagtgttgctttcagtagttattgccaatattgttgttggtcaatggcttgaagataaactttctaataattattatttctttgagtagctcagacttggttttgccaaaactcttggtaatttttgaagatagactgtcttatcaccaaggaaatttatacaaattaagactaactttcttggaattcactattctggcaataaattttggtagactaatacagtacagctagacccagaaatttggaaggctgtagatcagaggttctagttccctttccctccttttatatcctcctctccttgagtaatgaagtgaccagcctgtgtagtgtgacaaacgtgtctcattcagcaggaaaaactaatgatatggatcatcacccagattctctcacttggtaccagcatttctgtaggtattagagaagagttctaagttttctaaaccttaactgttccttaaggattttagccagtattttaatagaacatgattaatgaaagtgacaaattttaaattttctctaatagtcctcatcataaactttttaaaggaaaataagcaaactaaaaagaacattggtttagataaatacttatactttgcaaagtcaaaaatggcttgatttttggaaacaatatagaggtattcatatttaaatgagggtttacatttgttttgttttgtaaccgttaaaaagaagttgtttccagctaattattgtggtgtactatatttgtgagcctagggtaggggcactgctgcaacttctgctttcatcccatgcctcatcaatgaggaaagggaacaaagtgtataaaactgccacaattgtattttaattttgaggtatgatattttcagatatttcataatttctaacctctgttctctcagtaaacagaatgtctgatcgatcatgcagatacaatgttggtatttgagaggttagtttttttcctacacttttttttgccaactgacttaacaacattgctgtcaggtggaaatttcaagcacttttgcacatttagttcagtgtttgttgagaatccatggcttaacccacttgttttgctatttttttctttgcttttaattttccccatctgattttatctctgcgtttcagtgacctaccttaaaacaacacacgagaagagttaaactgggttcattttaatgatcaatttacctgcatataaaatttatttttaatcaagctgatcttaatgtatataatcattctatttgctttattatcggtgcaggtaggtcattaacaccacttcttttcatctgtaccacaccctggtgaaacctttgaagacataaaaaaaacctgtctgagatgttctttctaccaatctatatgtctttcggttatcaagtgtttctgcatggtaatgtcatgtaaatgctgatattgatttcactggtccatctatatttaaaacgtgcaagaaaaaaataaaatactctgctctagcaagttttgtgtaacaaaggcatatcgtcatgttaataaatttaaaacatcattcgtataaaatattttaattttcttgtatttcatttagacccaagaacatgctgaccaatgtgttctatatgtaaactacaaattctatggtagctttgttgtatattattgtaaaattattttaataagtcatggggatgacaatttgattattacaatttagttttcagtaatcaaaaagatttctatgaattctaaaaaatatttttttctatgaaattactagtgcccagctgtagaatctaccttaggtagatgatccctagacatacgttggttttgagggctattcagccattccattttactctctatttaaaggccgtgagcaagcttgtcatgagcaaatatgtcaagggagtcaatttctgaccaatcaagtacactaaattagaatatttttaaagtatgtaacattcccagtttcagccacaatttagccaagaataagataaaaacttgaataagaagtaagtagcataaatcagtatttaacctaaaattacatatttgaaacagaagatattatgttatgctcagtaaataattaagagatggcattgtgtaagaaggagccctagactgaaagtcaagacatctgaatttcaggctggaaaactatcagtatgatctcagcctcagttctcttgtctgtaaaatggaagaactggattaggcagtttgtaagattcctcctaactttcacagtcgatgacaagattgtctttttatctgatattttgaagggtatattgctttgaagtaagtctcaataaggcaatatattttagggcatctttcttcttatctctgacagtgttcttaaaattatttgaatatcataagagccttggtgtctgtcctaattcctttctcactcaccgatgctgaatacccagttgaatcaaactgtcaacctaccaaaaacgatattgtggcttatgggtattgctgtctcattcttggtatattcttgtgttaactgcccattggcctgaaaatactcattgtaagcctgaaaaaaaaaatctttcccactgttttttctgcttgttgtaagaatcaaatgaaataatgtatgtgaaagcaccttgtaaactgtaacctatcaatgtaaaatgttaaggtgtgttgttatttcattaattacttctttgtttagaatggaatttcctatgcactactgtagctaggaaatgctgaaaacaactgtgttttttaattaatcaataactgcaaaattaaagtaccttcaatggataagacaa

SEQ ID NO: 24323 - DNA, 1905 bp, Homo sapiens
  source 1..1905: mol_type = unassigned DNA
gttcgctggagccctttcctcagacccggcccggtcttcgcgcccggactcctggcgccagcgctaggcgcactcaccgctctgacgggtgcagacgcgggagttgtcccagactgtggagtggcgggcacggccccagccccccttcccttccctgaccccttcttgccatcgccccagacatggggaacgcggcgaccgccaagaaaggcagcgaggtggagagcgtgaaagagtttctagccaaagccaaagaagactttttgaaaaaatgggagaatccaactcagaataatgccggacttgaagattttgaaaggaaaaaaacccttggaacaggttcatttggaagagtcatgttggtaaaacacaaagccactgaacagtattatgccatgaagatcttagataagcagaaggttgttaaactgaagcaaatagagcatactttgaatgagaaaagaatattacaggcagtgaattttcctttccttgttcgactggagtatgcttttaaggataattctaatttatacatggttatggaatatgtccctgggggtgaaatgttttcacatctaagaagaattggaaggttcagtgagccccatgcacggttctatgcagctcagatagtgctaacattcgagtacctccattcactagacctcatctacagagatctaaaacctgaaaatctcttaattgaccatcaaggctatatccaggtcacagactttgggtttgccaaaagagttaaaggcagaacttggacattatgtggaactccagagtatttggctccagaaataattctcagcaagggctacaataaggcagtggattggtgggcattaggagtgctaatctatgaaatggcagctggctatcccccattctttgcagaccaaccaattcagatttatgaaaagattgtttctggaaagaacttttgatatgaacaaaacaaaactttgagaaaaattaacagacaaggcagtgatttatttttgaagaatttgagaagtgtagactctcaagaggactaaaggtcatatgaagaatgatgagagaaccaaaatacattaaaatcacaaatggaagaagaatattttactaatacaaaaactaagaatgtaaatgttataataattgtttcaaatcatttaattgacagtaattataaagttcttgaatctttactatattacttttatttatattcatataagaaatccaattttctaacaaggatactgtcataactaaatttacatttattaagaaaaactgctttagttaaaattaatgtgtcttcatttttatgcattggcctcgatttgccaatcattctctattggttaaattttatattcagctgtttatgaatatatattcattttatatcaaactttaaaattttgtatctaataatcagcatatattctaaaatcataacagtctaaatcctgggcaccttagaagaatgacaccagaaaaccttattatatcacaatattctgttttccccttcatttatttagaaatatgacaggatatttggtgtacttttgttttttaactaaaagtaccagattatctctccccatgtgggatataaaattatccccatctcttactccctttactcatctaaagtagaagtcatgaaagtggaatttttgccattaaaaggctctgtattatgtgaagttagattgtattaaccatttcccaataaatcatctgtttcaaaactcaaattcaaactagaatgtgtctctattcacattgcaaaaatattattgtctctctggttagtggctaaaagccaaattggaaactaactagttttttaaattttttaaattgtgcaaattattaaaaatccaatttggtcttata

SEQ ID NO: 24324 - DNA, 4513 bp, Homo sapiens
  source 1..4513: mol_type = unassigned DNA
gtctgcccgccgccgccactgctgctgccaccgccgtcgccgccgccgccgccgccgccgctgctgctgccggtgctaaggagttcgctggagccctttcctcagacccggcccggtcttcgcgcccggactcctggcgccagcgctaggcgcactcaccgctctgacgggtgcagacgcgggagttgtcccagactgtggagtggcgggcacggccccagccccccttcccttccctgaccccttcttgccatcgccccagacatggggaacgcggcgaccgccaagaaaggcagcgaggtggagagcgtgaaagagtttctagccaaagccaaagaagactttttgaaaaaatgggagaatccaactcagaataatgccggacttgaagattttgaaaggaaaaaaacccttggaacaggttcatttggaagagtcatgttggtaaaacacaaagccactgaacagtattatgccatgaagatcttagataagcagaaggttgttaaactgaagcaaatagagcatactttgaatgagaaaagaatattacaggcagtgaattttcctttccttgttcgactggagtatgcttttaaggataattctaatttatacatggttatggaatatgtccctgggggtgaaatgttttcacatctaagaagaattggaaggttcagtgagccccatgcacggttctatgcagctcagatagtgctaacattcgagtacctccattcactagacctcatctacagagatctaaaacctgaaaatctcttaattgaccatcaaggctatatccaggtcacagactttgggtttgccaaaagagttaaaggcagaacttggacattatgtggaactccagagtatttggctccagaaataattctcagcaagggctacaataaggcagtggattggtgggcattaggagtgctaatctatgaaatggcagctggctatcccccattctttgcagaccaaccaattcagatttatgaaaagattgtttctggaaaggtccgattcccatcccacttcagttcagatctcaaggaccttctacggaacctgctgcaggtggatttgaccaagagatttggaaatctaaagaatggtgtcagtgatataaaaactcacaagtggtttgccacgacagattggattgctatttaccagaggaaggttgaagctccattcataccaaagtttagaggctctggagataccagcaactttgatgactatgaagaagaagatatccgtgtctctataacagaaaaatgtgcaaaagaatttggtgaattttaaagaggaacaagatgacatctgagctcacactcagtgtttgcactctgttgagagataaggtagagctgagaccgtccttgttgaagcagttacctagttccttcattccaacgactgagtgaggtctttattgccatcatcccgtgtgcgcactctgcatccacctatgtaacaaggcaccgctaagcaagcattgtctgtgccataacacagtactagaccactttcttacttctctttgggttgtctttctcctctcctatatccatttcttccttttccaatttcattggttttctctaaacagtgctccattttattttgttggtgtttcagatgggcagtgttatggctacgtgatatttgaagggaaggataagtgttgctttcagtagttattgccaatattgttgttggtcaatggcttgaagataaactttctaataattattatttctttgagtagctcagacttggttttgccaaaactcttggtaatttttgaagatagactgtcttatcaccaaggaaatttatacaaattaagactaactttcttggaattcactattctggcaataaattttggtagactaatacagtacagctagacccagaaatttggaaggctgtagatcagaggttctagttccctttccctccttttatatcctcctctccttgagtaatgaagtgaccagcctgtgtagtgtgacaaacgtgtctcattcagcaggaaaaactaatgatatggatcatcacccagattctctcacttggtaccagcatttctgtaggtattagagaagagttctaagttttctaaaccttaactgttccttaaggattttagccagtattttaatagaacatgattaatgaaagtgacaaattttaaattttctctaatagtcctcatcataaactttttaaaggaaaataagcaaactaaaaagaacattggtttagataaatacttatactttgcaaagtcaaaaatggcttgatttttggaaacaatatagaggtattcatatttaaatgagggtttacatttgttttgttttgtaaccgttaaaaagaagttgtttccagctaattattgtggtgtactatatttgtgagcctagggtaggggcactgctgcaacttctgctttcatcccatgcctcatcaatgaggaaagggaacaaagtgtataaaactgccacaattgtattttaattttgaggtatgatattttcagatatttcataatttctaacctctgttctctcagtaaacagaatgtctgatcgatcatgcagatacaatgttggtatttgagaggttagtttttttcctacacttttttttgccaactgacttaacaacattgctgtcaggtggaaatttcaagcacttttgcacatttagttcagtgtttgttgagaatccatggcttaacccacttgttttgctatttttttctttgcttttaattttccccatctgattttatctctgcgtttcagtgacctaccttaaaacaacacacgagaagagttaaactgggttcattttaatgatcaatttacctgcatataaaatttatttttaatcaagctgatcttaatgtatataatcattctatttgctttattatcggtgcaggtaggtcattaacaccacttcttttcatctgtaccacaccctggtgaaacctttgaagacataaaaaaaacctgtctgagatgttctttctaccaatctatatgtctttcggttatcaagtgtttctgcatggtaatgtcatgtaaatgctgatattgatttcactggtccatctatatttaaaacgtgcaagaaaaaaataaaatactctgctctagcaagttttgtgtaacaaaggcatatcgtcatgttaataaatttaaaacatcattcgtataaaatattttaattttcttgtatttcatttagacccaagaacatgctgaccaatgtgttctatatgtaaactacaaattctatggtagctttgttgtatattattgtaaaattattttaataagtcatggggatgacaatttgattattacaatttagttttcagtaatcaaaaagatttctatgaattctaaaaaatatttttttctatgaaattactagtgcccagctgtagaatctaccttaggtagatgatccctagacatacgttggttttgagggctattcagccattccattttactctctatttaaaggccgtgagcaagcttgtcatgagcaaatatgtcaagggagtcaatttctgaccaatcaagtacactaaattagaatatttttaaagtatgtaacattcccagtttcagccacaatttagccaagaataagataaaaacttgaataagaagtaagtagcataaatcagtatttaacctaaaattacatatttgaaacagaagatattatgttatgctcagtaaataattaagagatggcattgtgtaagaaggagccctagactgaaagtcaagacatctgaatttcaggctggaaaactatcagtatgatctcagcctcagttctcttgtctgtaaaatggaagaactggattaggcagtttgtaagattcctcctaactttcacagtcgatgacaagattgtctttttatctgatattttgaagggtatattgctttgaagtaagtctcaataaggcaatatattttagggcatctttcttcttatctctgacagtgttcttaaaattatttgaatatcataagagccttggtgtctgtcctaattcctttctcactcaccgatgctgaatacccagttgaatcaaactgtcaacctaccaaaaacgatattgtggcttatgggtattgctgtctcattcttggtatattcttgtgttaactgcccattggcctgaaaatactcattgtaagcctgaaaaaaaaaatctttcccactgttttttctgcttgttgtaagaatcaaatgaaataatgtatgtgaaagcaccttgtaaactgtaacctatcaatgtaaaatgttaaggtgtgttgttatttcattaattacttctttgtttagaatggaatttcctatgcactactgtagctaggaaatgctgaaaacaactgtgttttttaattaatcaataactgcaaaattaaagtaccttcaatggataagacaa

SEQ ID NO: 24325 - DNA, 4292 bp, Homo sapiens
  source 1..4292: mol_type = unassigned DNA
attctgctgtttgctccttgccaggttcaacatgggattgtcacgcaaatcatcagatgcatctgcttgctcctcttcagaaatatctgattcctttgtgaaagagtttctagccaaagccaaagaagactttttgaaaaaatgggagaatccaactcagaataatgccggacttgaagattttgaaaggaaaaaaacccttggaacaggttcatttggaagagtcatgttggtaaaacacaaagccactgaacagtattatgccatgaagatcttagataagcagaaggttgttaaactgaagcaaatagagcatactttgaatgagaaaagaatattacaggcagtgaattttcctttccttgttcgactggagtatgcttttaaggataattctaatttatacatggttatggaatatgtccctgggggtgaaatgttttcacatctaagaagaattggaaggttcagtgagccccatgcacggttctatgcagctcagatagtgctaacattcgagtacctccattcactagacctcatctacagagatctaaaacctgaaaatctcttaattgaccatcaaggctatatccaggtcacagactttgggtttgccaaaagagttaaaggcagaacttggacattatgtggaactccagagtatttggctccagaaataattctcagcaagggctacaataaggcagtggattggtgggcattaggagtgctaatctatgaaatggcagctggctatcccccattctttgcagaccaaccaattcagatttatgaaaagattgtttctggaaaggtccgattcccatcccacttcagttcagatctcaaggaccttctacggaacctgctgcaggtggatttgaccaagagatttggaaatctaaagaatggtgtcagtgatataaaaactcacaagtggtttgccacgacagattggattgctatttaccagaggaaggttgaagctccattcataccaaagtttagaggctctggagataccagcaactttgatgactatgaagaagaagatatccgtgtctctataacagaaaaatgtgcaaaagaatttggtgaattttaaagaggaacaagatgacatctgagctcacactcagtgtttgcactctgttgagagataaggtagagctgagaccgtccttgttgaagcagttacctagttccttcattccaacgactgagtgaggtctttattgccatcatcccgtgtgcgcactctgcatccacctatgtaacaaggcaccgctaagcaagcattgtctgtgccataacacagtactagaccactttcttacttctctttgggttgtctttctcctctcctatatccatttcttccttttccaatttcattggttttctctaaacagtgctccattttattttgttggtgtttcagatgggcagtgttatggctacgtgatatttgaagggaaggataagtgttgctttcagtagttattgccaatattgttgttggtcaatggcttgaagataaactttctaataattattatttctttgagtagctcagacttggttttgccaaaactcttggtaatttttgaagatagactgtcttatcaccaaggaaatttatacaaattaagactaactttcttggaattcactattctggcaataaattttggtagactaatacagtacagctagacccagaaatttggaaggctgtagatcagaggttctagttccctttccctccttttatatcctcctctccttgagtaatgaagtgaccagcctgtgtagtgtgacaaacgtgtctcattcagcaggaaaaactaatgatatggatcatcacccagattctctcacttggtaccagcatttctgtaggtattagagaagagttctaagttttctaaaccttaactgttccttaaggattttagccagtattttaatagaacatgattaatgaaagtgacaaattttaaattttctctaatagtcctcatcataaactttttaaaggaaaataagcaaactaaaaagaacattggtttagataaatacttatactttgcaaagtcaaaaatggcttgatttttggaaacaatatagaggtattcatatttaaatgagggtttacatttgttttgttttgtaaccgttaaaaagaagttgtttccagctaattattgtggtgtactatatttgtgagcctagggtaggggcactgctgcaacttctgctttcatcccatgcctcatcaatgaggaaagggaacaaagtgtataaaactgccacaattgtattttaattttgaggtatgatattttcagatatttcataatttctaacctctgttctctcagtaaacagaatgtctgatcgatcatgcagatacaatgttggtatttgagaggttagtttttttcctacacttttttttgccaactgacttaacaacattgctgtcaggtggaaatttcaagcacttttgcacatttagttcagtgtttgttgagaatccatggcttaacccacttgttttgctatttttttctttgcttttaattttccccatctgattttatctctgcgtttcagtgacctaccttaaaacaacacacgagaagagttaaactgggttcattttaatgatcaatttacctgcatataaaatttatttttaatcaagctgatcttaatgtatataatcattctatttgctttattatcggtgcaggtaggtcattaacaccacttcttttcatctgtaccacaccctggtgaaacctttgaagacataaaaaaaacctgtctgagatgttctttctaccaatctatatgtctttcggttatcaagtgtttctgcatggtaatgtcatgtaaatgctgatattgatttcactggtccatctatatttaaaacgtgcaagaaaaaaataaaatactctgctctagcaagttttgtgtaacaaaggcatatcgtcatgttaataaatttaaaacatcattcgtataaaatattttaattttcttgtatttcatttagacccaagaacatgctgaccaatgtgttctatatgtaaactacaaattctatggtagctttgttgtatattattgtaaaattattttaataagtcatggggatgacaatttgattattacaatttagttttcagtaatcaaaaagatttctatgaattctaaaaaatatttttttctatgaaattactagtgcccagctgtagaatctaccttaggtagatgatccctagacatacgttggttttgagggctattcagccattccattttactctctatttaaaggccgtgagcaagcttgtcatgagcaaatatgtcaagggagtcaatttctgaccaatcaagtacactaaattagaatatttttaaagtatgtaacattcccagtttcagccacaatttagccaagaataagataaaaacttgaataagaagtaagtagcataaatcagtatttaacctaaaattacatatttgaaacagaagatattatgttatgctcagtaaataattaagagatggcattgtgtaagaaggagccctagactgaaagtcaagacatctgaatttcaggctggaaaactatcagtatgatctcagcctcagttctcttgtctgtaaaatggaagaactggattaggcagtttgtaagattcctcctaactttcacagtcgatgacaagattgtctttttatctgatattttgaagggtatattgctttgaagtaagtctcaataaggcaatatattttagggcatctttcttcttatctctgacagtgttcttaaaattatttgaatatcataagagccttggtgtctgtcctaattcctttctcactcaccgatgctgaatacccagttgaatcaaactgtcaacctaccaaaaacgatattgtggcttatgggtattgctgtctcattcttggtatattcttgtgttaactgcccattggcctgaaaatactcattgtaagcctgaaaaaaaaaatctttcccactgttttttctgcttgttgtaagaatcaaatgaaataatgtatgtgaaagcaccttgtaaactgtaacctatcaatgtaaaatgttaaggtgtgttgttatttcattaattacttctttgtttagaatggaatttcctatgcactactgtagctaggaaatgctgaaaacaactgtgttttttaattaatcaataactgcaaaattaaagtaccttcaatgg

SEQ ID NO: 24326 - DNA, 4200 bp, Homo sapiens
  source 1..4200: mol_type = unassigned DNA
gttattttgagcaatatgttttggaaaggttggttttcatcatgagtgcacgcaaatcatcagatgcatctgcttgctcctcttcagaaatatctgtgaaagagtttctagccaaagccaaagaagactttttgaaaaaatgggagaatccaactcagaataatgccggacttgaagattttgaaaggaaaaaaacccttggaacaggttcatttggaagagtcatgttggtaaaacacaaagccactgaacagtattatgccatgaagatcttagataagcagaaggataattctaatttatacatggttatggaatatgtccctgggggtgaaatgttttcacatctaagaagaattggaaggttcagtgagccccatgcacggttctatgcagctcagatagtgctaacattcgagtacctccattcactagacctcatctacagagatctaaaacctgaaaatctcttaattgaccatcaaggctatatccaggtcacagactttgggtttgccaaaagagttaaaggcagaacttggacattatgtggaactccagagtatttggctccagaaataattctcagcaagggctacaataaggcagtggattggtgggcattaggagtgctaatctatgaaatggcagctggctatcccccattctttgcagaccaaccaattcagatttatgaaaagattgtttctggaaaggtccgattcccatcccacttcagttcagatctcaaggaccttctacggaacctgctgcaggtggatttgaccaagagatttggaaatctaaagaatggtgtcagtgatataaaaactcacaagtggtttgccacgacagattggattgctatttaccagaggaaggttgaagctccattcataccaaagtttagaggctctggagataccagcaactttgatgactatgaagaagaagatatccgtgtctctataacagaaaaatgtgcaaaagaatttggtgaattttaaagaggaacaagatgacatctgagctcacactcagtgtttgcactctgttgagagataaggtagagctgagaccgtccttgttgaagcagttacctagttccttcattccaacgactgagtgaggtctttattgccatcatcccgtgtgcgcactctgcatccacctatgtaacaaggcaccgctaagcaagcattgtctgtgccataacacagtactagaccactttcttacttctctttgggttgtctttctcctctcctatatccatttcttccttttccaatttcattggttttctctaaacagtgctccattttattttgttggtgtttcagatgggcagtgttatggctacgtgatatttgaagggaaggataagtgttgctttcagtagttattgccaatattgttgttggtcaatggcttgaagataaactttctaataattattatttctttgagtagctcagacttggttttgccaaaactcttggtaatttttgaagatagactgtcttatcaccaaggaaatttatacaaattaagactaactttcttggaattcactattctggcaataaattttggtagactaatacagtacagctagacccagaaatttggaaggctgtagatcagaggttctagttccctttccctccttttatatcctcctctccttgagtaatgaagtgaccagcctgtgtagtgtgacaaacgtgtctcattcagcaggaaaaactaatgatatggatcatcacccagattctctcacttggtaccagcatttctgtaggtattagagaagagttctaagttttctaaaccttaactgttccttaaggattttagccagtattttaatagaacatgattaatgaaagtgacaaattttaaattttctctaatagtcctcatcataaactttttaaaggaaaataagcaaactaaaaagaacattggtttagataaatacttatactttgcaaagtcaaaaatggcttgatttttggaaacaatatagaggtattcatatttaaatgagggtttacatttgttttgttttgtaaccgttaaaaagaagttgtttccagctaattattgtggtgtactatatttgtgagcctagggtaggggcactgctgcaacttctgctttcatcccatgcctcatcaatgaggaaagggaacaaagtgtataaaactgccacaattgtattttaattttgaggtatgatattttcagatatttcataatttctaacctctgttctctcagtaaacagaatgtctgatcgatcatgcagatacaatgttggtatttgagaggttagtttttttcctacacttttttttgccaactgacttaacaacattgctgtcaggtggaaatttcaagcacttttgcacatttagttcagtgtttgttgagaatccatggcttaacccacttgttttgctatttttttctttgcttttaattttccccatctgattttatctctgcgtttcagtgacctaccttaaaacaacacacgagaagagttaaactgggttcattttaatgatcaatttacctgcatataaaatttatttttaatcaagctgatcttaatgtatataatcattctatttgctttattatcggtgcaggtaggtcattaacaccacttcttttcatctgtaccacaccctggtgaaacctttgaagacataaaaaaaacctgtctgagatgttctttctaccaatctatatgtctttcggttatcaagtgtttctgcatggtaatgtcatgtaaatgctgatattgatttcactggtccatctatatttaaaacgtgcaagaaaaaaataaaatactctgctctagcaagttttgtgtaacaaaggcatatcgtcatgttaataaatttaaaacatcattcgtataaaatattttaattttcttgtatttcatttagacccaagaacatgctgaccaatgtgttctatatgtaaactacaaattctatggtagctttgttgtatattattgtaaaattattttaataagtcatggggatgacaatttgattattacaatttagttttcagtaatcaaaaagatttctatgaattctaaaaaatatttttttctatgaaattactagtgcccagctgtagaatctaccttaggtagatgatccctagacatacgttggttttgagggctattcagccattccattttactctctatttaaaggccgtgagcaagcttgtcatgagcaaatatgtcaagggagtcaatttctgaccaatcaagtacactaaattagaatatttttaaagtatgtaacattcccagtttcagccacaatttagccaagaataagataaaaacttgaataagaagtaagtagcataaatcagtatttaacctaaaattacatatttgaaacagaagatattatgttatgctcagtaaataattaagagatggcattgtgtaagaaggagccctagactgaaagtcaagacatctgaatttcaggctggaaaactatcagtatgatctcagcctcagttctcttgtctgtaaaatggaagaactggattaggcagtttgtaagattcctcctaactttcacagtcgatgacaagattgtctttttatctgatattttgaagggtatattgctttgaagtaagtctcaataaggcaatatattttagggcatctttcttcttatctctgacagtgttcttaaaattatttgaatatcataagagccttggtgtctgtcctaattcctttctcactcaccgatgctgaatacccagttgaatcaaactgtcaacctaccaaaaacgatattgtggcttatgggtattgctgtctcattcttggtatattcttgtgttaactgcccattggcctgaaaatactcattgtaagcctgaaaaaaaaaatctttcccactgttttttctgcttgttgtaagaatcaaatgaaataatgtatgtgaaagcaccttgtaaactgtaacctatcaatgtaaaatgttaaggtgtgttgttatttcattaattacttctttgtttagaatggaatttcctatgcactactgtagctaggaaatgctgaaaacaactgtgttttttaattaatcaataactgcaaaattaaagtaccttcaatggataagacaa

SEQ ID NO: 24327 - DNA, 730 bp, Homo sapiens
  source 1..730: mol_type = unassigned DNA
gtgtttacaccatcggttcttctccctctagagattagcataactccctttgctgttggattgttattttgagcaatatgttttggaaaggttggttttcatcatgagtgcttgctcctcttcagaaatatctgtgaaagagtttctagccaaagccaaagaagactttttgaaaaaatgggagaatccaactcagaataatgccggacttgaagattttgaaaggaaaaaaacccttggaacaggttcatttggaagagtcatgttggtaaaacacaaagccactgaacagtattatgccatgaagatcttagataagcagaaggttgttaaactgaagcaaatagagcatactttgaatgagaaaagaatattacaggcagtgaattttcctttccttgttcgactggagtatgcttttaaggataattctaatttatacatggttatggaatatgtccctgggggtgaaatgttttcacatctaagaagaattggaaggttcagtgagccccatgcacggttctatgcagctcagatagtgctaacattcgagtacctccattcactagacctcatctacagagatctaaaacctgaaaatctcttaattgaccatcaaggctatatccaggtcacagactttgggtttgccaaaagagttaaaggcagaacttggacattatgtggaactccagagtatttggctccagaaataattctcagcaag

SEQ ID NO: 24328 - DNA, 686 bp, Homo sapiens
  source 1..686: mol_type = unassigned DNA
accatcggttcttctccctctagagattagcataactccctttgctgttggattgttattttgagcaatatgttttggaaaggttggttttcatcatgagtgtgaaagagtttctagccaaagccaaagaagactttttgaaaaaatgggagaatccaactcagaataatgccggacttgaagattttgaaaggaaaaaaacccttggaacaggttcatttggaagagtcatgttggtaaaacacaaagccactgaacagtattatgccatgaagatcttagataagcagaaggttgttaaactgaagcaaatagagcatactttgaatgagaaaagaatattacaggcagtgaattttcctttccttgttcgactggagtatgcttttaaggataattctaatttatacatggttatggaatatgtccctgggggtgaaatgttttcacatctaagaagaattggaaggttcagtgagccccatgcacggttctatgcagctcagatagtgctaacattcgagtacctccattcactagacctcatctacagagatctaaaacctgaaaatctcttaattgaccatcaaggctatatccaggtcacagactttgggtttgccaaaagagttaaaggcagaacttggacattatgtggaactccagagtatttggctccagaaata

SEQ ID NO: 24329 - DNA, 662 bp, Homo sapiens
  source 1..662: mol_type = unassigned DNA
gctccttgccaggttcaacatgggattgtcttgctcctcttcagaaatatctgtgaaagagtttctagccaaagccaaagaagactttttgaaaaaatgggagaatccaactcagaataatgccggacttgaagattttgaaaggaaaaaaacccttggaacaggttcatttggaagagtcatgttggtaaaacacaaagccactgaacagtattatgccatgaagatcttagataagcagaaggttgttaaactgaagcaaatagagcatactttgaatgagaaaagaatattacaggcagtgaattttcctttccttgttcgactggagtatgcttttaaggataattctaatttatacatggttatggaatatgtccctgggggtgaaatgttttcacatctaagaagaattggaaggttcagtgagccccatgcacggttctatgcagctcagatagtgctaacattcgagtacctccattcactagacctcatctacagagatctaaaacctgaaaatctcttaattgaccatcaaggctatatccaggtcacagactttgggtttgccaaaagagttaaaggcagaacttggacattatgtggaactccagagtatttggctccagaaataattctcagcaagggctacaataagg

SEQ ID NO: 24330 - DNA, 648 bp, Homo sapiens
  source 1..648: mol_type = unassigned DNA
agtgaggtccacagctagcagtaagagctggtgtaattgaaagacgtttaggtgcaatcattctgctgtttgctccttgccaggttcaacatgggattgtcacgcaaatcatcagatgcatctgcttgctcctcttcagaaatatctgtgaaagagtttctagccaaagccaaagaagactttttgaaaaaatgggagaatccaactcagaataatgccggacttgaagattttgaaaggaaaaaaacccttggaacaggttcatttggaagagtcatgttggtaaaacacaaagccactgaacagtattatgccatgaagatcttagataagcagaaggttgttaaactgaagcaaatagagcatactttgaatgagaaaagaatattacaggcagtgaattttcctttccttgttcgactggagtatgcttttaaggataattctaatttatacatggttatggaatatgtccctgggggtgaaatgttttcacatctaagaagaattggaaggttcagtgagccccatgcacggttctatgcagctcagatagtgctaacattcgagtacctccattcactagacctcatctacagagatctaaaacctgaaaatctcttaattgaccatcaaggctatatccag

SEQ ID NO: 24331 - DNA, 638 bp, Homo sapiens
  source 1..638: mol_type = unassigned DNA
agcacacagcattttaatatcagtgaggtccacagctagcagtaagagctggtgtaattgaaagacgtttaggtgcaatcattctgctgtttgctccttgccaggttcaacatgggattgtcacgcaaatcatcagatgcatctgcttgctcctcttcagaaatatctgattcctttgtgaaagagtttctagccaaagccaaagaagactttttgaaaaaatgggagaatccaactcagaataatgccggacttgaagattttgaaaggaaaaaaacccttggaacaggttcatttggaagagtcatgttggtaaaacacaaagccactgaacagtattatgccatgaagatcttagataagcagaaggttgttaaactgaagcaaatagagcatactttgaatgagaaaagaatattacaggcagtgaattttcctttccttgttcgactggagtatgcttttaaggataattctaatttatacatggttatggaatatgtccctgggggtgaaatgttttcacatctaagaagaattggaaggttcagtgagccccatgcacggttctatgcagctcagatagtgctaacattcgagtacctccattcactagacctcatctacagagatctaaa

SEQ ID NO: 24332 - DNA, 944 bp, Homo sapiens
  source 1..944: mol_type = unassigned DNA
acattttctccctgccattttgagttgttctagtggtatatgaaggaggctgggataactagcttgaaagaaattcagtctagttatagacatctttggcattaatctgatgtttactagtgatatctcatgctaggcagttatgctttgcttctaggggcttctctttttaaaacaaaagaaagctcttttcgttttctgtgtgctgcatgctccagtgtgtgtgtttacaccatcggttcttctccctctagagattagcataactccctttgctgttggattgttattttgagcaatatgttttggaaaggttggttttcatcatgagtgcacgcaaatcatcagatgcatctgcttgctcctcttcagaaatatctgtgaaagagtttctagccaaagccaaagaagactttttgaaaaaatgggagaatccaactcagaataatgccggacttgaagattttgaaaggaaaaaaacccttggaacaggttcatttggaagagtcatgttggtaaaacacaaagccactgaacagtattatgccatgaagatcttagataagcagaaggttgttaaactgaagcaaatagagcatactttgaatgagaaaagaatattacaggcagtgaattttcctttccttgttcgactggagtatgcttttaaggataattctaatttatacatggttatggaatatgtccctgggggtgaaatgttttcacatctaagaagaattggaaggttcagtgagccccatgcacggttctatgcagctcagatagtgctaacattcgagtacctccattcactagacctcatctacagagatctaaaacctgaaaatctcttaattgaccatcaaggctatatccaggtcacagactttgggtttgccaaaagagttaaaggcagaacttggacattatgtggaactcca

SEQ ID NO: 24333 - DNA, 1571 bp, Homo sapiens
  source 1..1571: mol_type = unassigned DNA
cgagacccccgcccctgccgccgccaccgccatgggcaacgcccccgccaagaaggacaccgagcaggaggagagcgtgaacgagttcctagccaaagccagaggagatttcctctacagatggggaaaccccgctcaaaacaccgccagctcggatcagttcgaacggctcaggacgctgggcatgggctccttcgggcgggtgatgctggtgaggcaccaggagaccggcggccactacgccatgaagatcctcaacaagcagaaggtggtgaagatgaagcaggtcgagcacatactgaacgagaagcgcatcctgcaggcgatcgactttccgttcctcgtcaagctccagttctcctttaaggacaactcctacctgtacctggtgatggagtacgtgccgggtggggagatgttctcccgcctacagcgcgtcggaaggtttagcgagccccatgcctgtttctatgccgcccaggtcgtcctggccgtccagtacctacactcgctcgacctcatccaccgcgacctgaagcccgagaatctcctcatcgaccagcagggctacctgcaggtgacggacttcggtttcgccaagcgcgtgaagggccgcacttggaccttgtgcgggaccccagagtacctggcccccgagatcatcctgagcaaaggctacaacaaggccgtggactggtgggccctaggggtgctcatctatgagatggccgtgggcttcccacccttctacgccgaccagcccatccagatctacgagaagatcgtctctgggagggtgcggtttccctccaaactcagctctgacctcaagcatctgctgcggagcctgctgcaggtggacctcaccaagcgcttcggaaacctcaggaacggggttggcgacatcaagaaccacaagtggttcgccacaaccagctggatcgccatctatgagaagaaggtggaagctcccttcatcccgaagtacacaggccctggggatgccagtaactttgacgactacgaggaggaagagctccggatctccatcaatgagaagtgtgccaaggagttttctgagttttaggggtgtgcttgtgcccctgtgggttttctttcctttttgtttttggtggtttgggggatgggagggttggattgaacagccagagggccccagagttccttgtatctaatttcatcctcaccccaccctccagggttgggggagcaggaagcccagatatttggaggaacagaaacaccagctgctccctcacccccccccatgccttcctggtccctctgtgcttctctctttctcctcccacagggtcccccttgccccagcccccttctgcctgttttaaacgagtttctcagctctattcaggccaggtcttgctgttgtatcaagggacacggtgtggaaagaggggctcaaacttaactccagccctgaacaggcaccacttactaagagaggatgaatgaaaagcacacctaccctttggcgtaatcctgcctgggaaggagagaggtttagtgccatgttcagtgggctgtttgct

SEQ ID NO: 24334 - DNA, 3644 bp, Homo sapiens
  source 1..3644: mol_type = unassigned DNA
agggagggggtggaaaggagggagaaaaggcagaggcgtcaagggaggccggagggagagtggggtggacagaggagcggagggacgagagggaagcgcacgatagctgcgcggagagagagcgaagagcaggcggaggaacaaaggcgacccaagacacccagagagggacagagaaccatggagtctggcagtaccgccgccagtgaggaggcacgcagccttcgagaatgtgagctctacgtccagaagcataacattcaagcgctgctcaaagattctattgtgcagttgtgcactgctcgacctgagagacccatggcattcctcagggaatactttgagaggttggagaaggaggaggcaaaacagattcagaatctgcagaaagcaggcactcgtacagactcaagggaggatgagatttctcctcctccacccaacccagtggttaaaggtaggaggcgacgaggtgctatcagcgctgaggtctacacggaggaagatgcggcatcctatgttagaaaggttataccaaaagattacaagacaatggccgctttagccaaagccattgaaaagaatgtgctgttttcacatcttgatgataatgagagaagtgatatttttgatgccatgttttcggtctcctttatcgcaggagagactgtgattcagcaaggtgatgaaggggataacttctatgtgattgatcaaggagagacggatgtctatgttaacaatgaatgggcaaccagtgttggggaaggagggagctttggagaacttgctttgatttatggaacaccgagagcagccactgtcaaagcaaagacaaatgtgaaattgtggggcatcgaccgagacagctatagaagaatcctcatgggaagcacactgagaaagcggaagatgtatgaggaattccttagtaaagtctctattttagagtctctggacaagtgggaacgtcttacggtagctgatgcattggaaccagtgcagtttgaagatgggcagaagattgtggtgcagggagaaccaggggatgagttcttcattattttagaggggtcagctgctgtgctacaacgtcggtcagaaaatgaagagtttgttgaagtgggaagattggggccttctgattattttggtgaaattgcactactgatgaatcgtcctcgtgctgccacagttgttgctcgtggccccttgaagtgcgttaagctggaccgacctagatttgaacgtgttcttggcccatgctcagacatcctcaaacgaaacatccagcagtacaacagttttgtgtcactgtctgtctgaaatctgcctcctgtgcctcccttttctcctctccccaatccatgcttcactcatgcaaactgctttattttccctacttgcagcgccaagtggccactggcatcgcagcttcctgtctgtttatatattgaaagttgcttttattgcaccattttcaatttggagcattaactaaatgctcatacacagttaaataaatagaaagagttctatggagactttgctgttactgcttctctttgtgcagtgttagtattcaccctgggcagtgagtgccatgctttttggtgagggcagatcccagcacctattgaattaccatagagtaatgatgtaacagtgcaagattttttttttaagtgacataattgtccagttataagcgtatttagactgtggccatatatgctgtatttctttgtagaataaatggtttctcattaaactctaaagattagggaaaatggatatagaaaatcttagtatagtagaaagacatctgcctgtaattaaactagtttaagggtggaaaaatgcccatttttgctaattatcaatgggatatgattggttcagtttttttttttccagagttgttgtttgccaagctaatctgcctggttttatttatatcttgttattaatgtttcttctccaattctgaaatacttttgagtatggctatctatacctgccttttaagtttgaaactaactcatagattgcaaatattggttagtatttaactacatctgcctcggctcacaaattccgattagacctttatccagctagtgccaaataattgatcagatgctgaattgagaataagaatttgaggtctacattcttggttgttaatttagagcgtttggttaaagtatgtccttcagctgactccagtataatctcctctgctcattaaactgattccaggagattggatttgctgtgactagatacagatggagcaaatgtcctaacagagaaatagaggtgatgctgctaaagggagaaatgccaggcggacaaagttcagtgtcgggaattttccccgtgacattcactggggcatgagattttggaagaagttttttactttggtttagtctttttttccttcctttttattcagctagaatttctggtgggttgatggtagggtataatgtgtctgtgttgcttcaaattggtctgaaaggctatcctgctgaaagtcctgctttcctatctagcatttatttctctggcaaacttttctttcttttcttttttaaagtaaacttgtgtattgagtcttaactgtatttcagtattttccagccttatgtgttacattattccaatgatacccaacagtttatttttattatttttttaaacaaaatttcacagttctgtaatgtaggcacttttattttcattgtgatttatatataaggtaatgtagggttatatttgggagtgactgcaagcatttttccatctgtgtgcaactaactgactctgttattgatcccttctcctgccctttcccaggtaatttaaattggtcatggtagatttttttcatagatttgaaaaacttttaggttgttaccaagtatgaagtataaatctggggaagaggttttatttacattttagggtgggtaagaaagccaccttgttacaaattttttaatttccaaaataatctatattaaatgagggtttctgatctgtactttgtgtttagctacctttttatatttaaaaaattaaaaatgaaaattacgttcttacaagcttaaagcttgatttgatctttgtttaaatgccaaaatgtacttaaatgagttacttagaatgccataaaattgcagtttcatgtatgtatataatcatgctcatgtatatttagttacgtataatgctttctgagtgagttttactcttaaatcatttggttaaatcatttggcttgctgtttactcccttctgtagtttttaattaaaaactttaaagataagtctacattaaacaatgatcacatctaaagctttatctttgtgtaatctaagtatatgtgagaaatcagaattggcataatttgtcttagttgatattcaaggctttaaaagtcattattcctgggcttggtaagtgaatttatgagatttactgctctagaaagtatagatggccaaaggaccgttttgtattgcttcctgattaccagtctgattataccatgtgtgctaatatactttttttgttatagattgtcttaatggtaggtcaagtaataaaaagagatgaaataatttaaattctt

SEQ ID NO: 24335 - DNA, 3617 bp, Homo sapiens
  source 1..3617: mol_type = unassigned DNA
gattggctgcggccaggccgtttccggtggagctgtcgcctagccgctatcgcagagtggagcggggctgggagcaaagcgctgagggagctcggtacgccgccgcctcgcacccgcagcctcgcgcccgccgccgcccgtccccagagaaccatggagtctggcagtaccgccgccagtgaggaggcacgcagccttcgagaatgtgagctctacgtccagaagcataacattcaagcgctgctcaaagattctattgtgcagttgtgcactgctcgacctgagagacccatggcattcctcagggaatactttgagaggttggagaaggaggaggcaaaacagattcagaatctgcagaaagcaggcactcgtacagactcaagggaggatgagatttctcctcctccacccaacccagtggttaaaggtaggaggcgacgaggtgctatcagcgctgaggtctacacggaggaagatgcggcatcctatgttagaaaggttataccaaaagattacaagacaatggccgctttagccaaagccattgaaaagaatgtgctgttttcacatcttgatgataatgagagaagtgatatttttgatgccatgttttcggtctcctttatcgcaggagagactgtgattcagcaaggtgatgaaggggataacttctatgtgattgatcaaggagagacggatgtctatgttaacaatgaatgggcaaccagtgttggggaaggagggagctttggagaacttgctttgatttatggaacaccgagagcagccactgtcaaagcaaagacaaatgtgaaattgtggggcatcgaccgagacagctatagaagaatcctcatgggaagcacactgagaaagcggaagatgtatgaggaattccttagtaaagtctctattttagagtctctggacaagtgggaacgtcttacggtagctgatgcattggaaccagtgcagtttgaagatgggcagaagattgtggtgcagggagaaccaggggatgagttcttcattattttagaggggtcagctgctgtgctacaacgtcggtcagaaaatgaagagtttgttgaagtgggaagattggggccttctgattattttggtgaaattgcactactgatgaatcgtcctcgtgctgccacagttgttgctcgtggccccttgaagtgcgttaagctggaccgacctagatttgaacgtgttcttggcccatgctcagacatcctcaaacgaaacatccagcagtacaacagttttgtgtcactgtctgtctgaaatctgcctcctgtgcctcccttttctcctctccccaatccatgcttcactcatgcaaactgctttattttccctacttgcagcgccaagtggccactggcatcgcagcttcctgtctgtttatatattgaaagttgcttttattgcaccattttcaatttggagcattaactaaatgctcatacacagttaaataaatagaaagagttctatggagactttgctgttactgcttctctttgtgcagtgttagtattcaccctgggcagtgagtgccatgctttttggtgagggcagatcccagcacctattgaattaccatagagtaatgatgtaacagtgcaagattttttttttaagtgacataattgtccagttataagcgtatttagactgtggccatatatgctgtatttctttgtagaataaatggtttctcattaaactctaaagattagggaaaatggatatagaaaatcttagtatagtagaaagacatctgcctgtaattaaactagtttaagggtggaaaaatgcccatttttgctaattatcaatgggatatgattggttcagtttttttttttccagagttgttgtttgccaagctaatctgcctggttttatttatatcttgttattaatgtttcttctccaattctgaaatacttttgagtatggctatctatacctgccttttaagtttgaaactaactcatagattgcaaatattggttagtatttaactacatctgcctcggctcacaaattccgattagacctttatccagctagtgccaaataattgatcagatgctgaattgagaataagaatttgaggtctacattcttggttgttaatttagagcgtttggttaaagtatgtccttcagctgactccagtataatctcctctgctcattaaactgattccaggagattggatttgctgtgactagatacagatggagcaaatgtcctaacagagaaatagaggtgatgctgctaaagggagaaatgccaggcggacaaagttcagtgtcgggaattttccccgtgacattcactggggcatgagattttggaagaagttttttactttggtttagtctttttttccttcctttttattcagctagaatttctggtgggttgatggtagggtataatgtgtctgtgttgcttcaaattggtctgaaaggctatcctgctgaaagtcctgctttcctatctagcatttatttctctggcaaacttttctttcttttcttttttaaagtaaacttgtgtattgagtcttaactgtatttcagtattttccagccttatgtgttacattattccaatgatacccaacagtttatttttattatttttttaaacaaaatttcacagttctgtaatgtaggcacttttattttcattgtgatttatatataaggtaatgtagggttatatttgggagtgactgcaagcatttttccatctgtgtgcaactaactgactctgttattgatcccttctcctgccctttcccaggtaatttaaattggtcatggtagatttttttcatagatttgaaaaacttttaggttgttaccaagtatgaagtataaatctggggaagaggttttatttacattttagggtgggtaagaaagccaccttgttacaaattttttaatttccaaaataatctatattaaatgagggtttctgatctgtactttgtgtttagctacctttttatatttaaaaaattaaaaatgaaaattacgttcttacaagcttaaagcttgatttgatctttgtttaaatgccaaaatgtacttaaatgagttacttagaatgccataaaattgcagtttcatgtatgtatataatcatgctcatgtatatttagttacgtataatgctttctgagtgagttttactcttaaatcatttggttaaatcatttggcttgctgtttactcccttctgtagtttttaattaaaaactttaaagataagtctacattaaacaatgatcacatctaaagctttatctttgtgtaatctaagtatatgtgagaaatcagaattggcataatttgtcttagttgatattcaaggctttaaaagtcattattcctgggcttggtaagtgaatttatgagatttactgctctagaaagtatagatggccaaaggaccgttttgtattgcttcctgattaccagtctgattataccatgtgtgctaatatactttttttgttatagattgtcttaatggtaggtcaagtaataaaaagagatgaaataatttaaattctt

SEQ ID NO: 24336 - DNA, 3648 bp, Homo sapiens
  source 1..3648: mol_type = unassigned DNA
gattggctgcggccaggccgtttccggtggagctgtcgcctagccgctatcgcagagtggagcggggctgggagcaaagcgctgagggagctcggtacgccgccgcctcgcacccgcagcctcgcgcccgccgccgcccgtccccaggtgagtggggtcggccgggggctcaggcgagagaaccatggagtctggcagtaccgccgccagtgaggaggcacgcagccttcgagaatgtgagctctacgtccagaagcataacattcaagcgctgctcaaagattctattgtgcagttgtgcactgctcgacctgagagacccatggcattcctcagggaatactttgagaggttggagaaggaggaggcaaaacagattcagaatctgcagaaagcaggcactcgtacagactcaagggaggatgagatttctcctcctccacccaacccagtggttaaaggtaggaggcgacgaggtgctatcagcgctgaggtctacacggaggaagatgcggcatcctatgttagaaaggttataccaaaagattacaagacaatggccgctttagccaaagccattgaaaagaatgtgctgttttcacatcttgatgataatgagagaagtgatatttttgatgccatgttttcggtctcctttatcgcaggagagactgtgattcagcaaggtgatgaaggggataacttctatgtgattgatcaaggagagacggatgtctatgttaacaatgaatgggcaaccagtgttggggaaggagggagctttggagaacttgctttgatttatggaacaccgagagcagccactgtcaaagcaaagacaaatgtgaaattgtggggcatcgaccgagacagctatagaagaatcctcatgggaagcacactgagaaagcggaagatgtatgaggaattccttagtaaagtctctattttagagtctctggacaagtgggaacgtcttacggtagctgatgcattggaaccagtgcagtttgaagatgggcagaagattgtggtgcagggagaaccaggggatgagttcttcattattttagaggggtcagctgctgtgctacaacgtcggtcagaaaatgaagagtttgttgaagtgggaagattggggccttctgattattttggtgaaattgcactactgatgaatcgtcctcgtgctgccacagttgttgctcgtggccccttgaagtgcgttaagctggaccgacctagatttgaacgtgttcttggcccatgctcagacatcctcaaacgaaacatccagcagtacaacagttttgtgtcactgtctgtctgaaatctgcctcctgtgcctcccttttctcctctccccaatccatgcttcactcatgcaaactgctttattttccctacttgcagcgccaagtggccactggcatcgcagcttcctgtctgtttatatattgaaagttgcttttattgcaccattttcaatttggagcattaactaaatgctcatacacagttaaataaatagaaagagttctatggagactttgctgttactgcttctctttgtgcagtgttagtattcaccctgggcagtgagtgccatgctttttggtgagggcagatcccagcacctattgaattaccatagagtaatgatgtaacagtgcaagattttttttttaagtgacataattgtccagttataagcgtatttagactgtggccatatatgctgtatttctttgtagaataaatggtttctcattaaactctaaagattagggaaaatggatatagaaaatcttagtatagtagaaagacatctgcctgtaattaaactagtttaagggtggaaaaatgcccatttttgctaattatcaatgggatatgattggttcagtttttttttttccagagttgttgtttgccaagctaatctgcctggttttatttatatcttgttattaatgtttcttctccaattctgaaatacttttgagtatggctatctatacctgccttttaagtttgaaactaactcatagattgcaaatattggttagtatttaactacatctgcctcggctcacaaattccgattagacctttatccagctagtgccaaataattgatcagatgctgaattgagaataagaatttgaggtctacattcttggttgttaatttagagcgtttggttaaagtatgtccttcagctgactccagtataatctcctctgctcattaaactgattccaggagattggatttgctgtgactagatacagatggagcaaatgtcctaacagagaaatagaggtgatgctgctaaagggagaaatgccaggcggacaaagttcagtgtcgggaattttccccgtgacattcactggggcatgagattttggaagaagttttttactttggtttagtctttttttccttcctttttattcagctagaatttctggtgggttgatggtagggtataatgtgtctgtgttgcttcaaattggtctgaaaggctatcctgctgaaagtcctgctttcctatctagcatttatttctctggcaaacttttctttcttttcttttttaaagtaaacttgtgtattgagtcttaactgtatttcagtattttccagccttatgtgttacattattccaatgatacccaacagtttatttttattatttttttaaacaaaatttcacagttctgtaatgtaggcacttttattttcattgtgatttatatataaggtaatgtagggttatatttgggagtgactgcaagcatttttccatctgtgtgcaactaactgactctgttattgatcccttctcctgccctttcccaggtaatttaaattggtcatggtagatttttttcatagatttgaaaaacttttaggttgttaccaagtatgaagtataaatctggggaagaggttttatttacattttagggtgggtaagaaagccaccttgttacaaattttttaatttccaaaataatctatattaaatgagggtttctgatctgtactttgtgtttagctacctttttatatttaaaaaattaaaaatgaaaattacgttcttacaagcttaaagcttgatttgatctttgtttaaatgccaaaatgtacttaaatgagttacttagaatgccataaaattgcagtttcatgtatgtatataatcatgctcatgtatatttagttacgtataatgctttctgagtgagttttactcttaaatcatttggttaaatcatttggcttgctgtttactcccttctgtagtttttaattaaaaactttaaagataagtctacattaaacaatgatcacatctaaagctttatctttgtgtaatctaagtatatgtgagaaatcagaattggcataatttgtcttagttgatattcaaggctttaaaagtcattattcctgggcttggtaagtgaatttatgagatttactgctctagaaagtatagatggccaaaggaccgttttgtattgcttcctgattaccagtctgattataccatgtgtgctaatatactttttttgttatagattgtcttaatggtaggtcaagtaataaaaagagatgaaataatttaaattctt

SEQ ID NO: 24337 - DNA, 3693 bp, Homo sapiens
  source 1..3693: mol_type = unassigned DNA
atcgcagagtggagcggggctgggagcaaagcgctgagggagctcggtacgccgccgcctcgcacccgcagcctcgcgcccgccgccgcccgtccccagttgacttttgtgccctggtaattctgtatcctgtttaccgtttacctacttcccacgtcatcatgatttcttttgagggagaactgaatgaaattcccttaagggcctgacttcagcacccgtctctgcagagagaaccatggagtctggcagtaccgccgccagtgaggaggcacgcagccttcgagaatgtgagctctacgtccagaagcataacattcaagcgctgctcaaagattctattgtgcagttgtgcactgctcgacctgagagacccatggcattcctcagggaatactttgagaggttggagaaggaggaggcaaaacagattcagaatctgcagaaagcaggcactcgtacagactcaagggaggatgagatttctcctcctccacccaacccagtggttaaaggtaggaggcgacgaggtgctatcagcgctgaggtctacacggaggaagatgcggcatcctatgttagaaaggttataccaaaagattacaagacaatggccgctttagccaaagccattgaaaagaatgtgctgttttcacatcttgatgataatgagagaagtgatatttttgatgccatgttttcggtctcctttatcgcaggagagactgtgattcagcaaggtgatgaaggggataacttctatgtgattgatcaaggagagacggatgtctatgttaacaatgaatgggcaaccagtgttggggaaggagggagctttggagaacttgctttgatttatggaacaccgagagcagccactgtcaaagcaaagacaaatgtgaaattgtggggcatcgaccgagacagctatagaagaatcctcatgggaagcacactgagaaagcggaagatgtatgaggaattccttagtaaagtctctattttagagtctctggacaagtgggaacgtcttacggtagctgatgcattggaaccagtgcagtttgaagatgggcagaagattgtggtgcagggagaaccaggggatgagttcttcattattttagaggggtcagctgctgtgctacaacgtcggtcagaaaatgaagagtttgttgaagtgggaagattggggccttctgattattttggtgaaattgcactactgatgaatcgtcctcgtgctgccacagttgttgctcgtggccccttgaagtgcgttaagctggaccgacctagatttgaacgtgttcttggcccatgctcagacatcctcaaacgaaacatccagcagtacaacagttttgtgtcactgtctgtctgaaatctgcctcctgtgcctcccttttctcctctccccaatccatgcttcactcatgcaaactgctttattttccctacttgcagcgccaagtggccactggcatcgcagcttcctgtctgtttatatattgaaagttgcttttattgcaccattttcaatttggagcattaactaaatgctcatacacagttaaataaatagaaagagttctatggagactttgctgttactgcttctctttgtgcagtgttagtattcaccctgggcagtgagtgccatgctttttggtgagggcagatcccagcacctattgaattaccatagagtaatgatgtaacagtgcaagattttttttttaagtgacataattgtccagttataagcgtatttagactgtggccatatatgctgtatttctttgtagaataaatggtttctcattaaactctaaagattagggaaaatggatatagaaaatcttagtatagtagaaagacatctgcctgtaattaaactagtttaagggtggaaaaatgcccatttttgctaattatcaatgggatatgattggttcagtttttttttttccagagttgttgtttgccaagctaatctgcctggttttatttatatcttgttattaatgtttcttctccaattctgaaatacttttgagtatggctatctatacctgccttttaagtttgaaactaactcatagattgcaaatattggttagtatttaactacatctgcctcggctcacaaattccgattagacctttatccagctagtgccaaataattgatcagatgctgaattgagaataagaatttgaggtctacattcttggttgttaatttagagcgtttggttaaagtatgtccttcagctgactccagtataatctcctctgctcattaaactgattccaggagattggatttgctgtgactagatacagatggagcaaatgtcctaacagagaaatagaggtgatgctgctaaagggagaaatgccaggcggacaaagttcagtgtcgggaattttccccgtgacattcactggggcatgagattttggaagaagttttttactttggtttagtctttttttccttcctttttattcagctagaatttctggtgggttgatggtagggtataatgtgtctgtgttgcttcaaattggtctgaaaggctatcctgctgaaagtcctgctttcctatctagcatttatttctctggcaaacttttctttcttttcttttttaaagtaaacttgtgtattgagtcttaactgtatttcagtattttccagccttatgtgttacattattccaatgatacccaacagtttatttttattatttttttaaacaaaatttcacagttctgtaatgtaggcacttttattttcattgtgatttatatataaggtaatgtagggttatatttgggagtgactgcaagcatttttccatctgtgtgcaactaactgactctgttattgatcccttctcctgccctttcccaggtaatttaaattggtcatggtagatttttttcatagatttgaaaaacttttaggttgttaccaagtatgaagtataaatctggggaagaggttttatttacattttagggtgggtaagaaagccaccttgttacaaattttttaatttccaaaataatctatattaaatgagggtttctgatctgtactttgtgtttagctacctttttatatttaaaaaattaaaaatgaaaattacgttcttacaagcttaaagcttgatttgatctttgtttaaatgccaaaatgtacttaaatgagttacttagaatgccataaaattgcagtttcatgtatgtatataatcatgctcatgtatatttagttacgtataatgctttctgagtgagttttactcttaaatcatttggttaaatcatttggcttgctgtttactcccttctgtagtttttaattaaaaactttaaagataagtctacattaaacaatgatcacatctaaagctttatctttgtgtaatctaagtatatgtgagaaatcagaattggcataatttgtcttagttgatattcaaggctttaaaagtcattattcctgggcttggtaagtgaatttatgagatttactgctctagaaagtatagatggccaaaggaccgttttgtattgcttcctgattaccagtctgattataccatgtgtgctaatatactttttttgttatagattgtcttaatggtaggtcaagtaataaaaagagatgaaataatt

SEQ ID NO: 24338 - DNA, 628 bp, Homo sapiens
  source 1..628: mol_type = unassigned DNA
ctgtgatgtgggaggcccttcgcatgcagggtaaatccgcagggcccgtgtgggtgaaggccacatttaagggaatcaaaggatgctcagtaaggaatctggaatgaaaaagtggcatgttgggtagcccgggtgtacgtgaacggagagtgggtgaccaacatcagcgagggaggcagcttcggggagctggcgctcatctacggcacccccagggctgcgaccgtgaaagccaagacggacctcaagctctgggggatcgaccgggacagctaccggcgcatccttatgggcagcacgctgaggaaacgcaagatgtacgaggagttcctcagcaaggtctccatcctagagtccctggagaagtgggagcgtctgaccgtggcggatgcgctggagcccgtccagtttgaagatggagagaaaattgtggtccagggagagcctggggacgacttttacatcatcacggagaaaaatttgccgggtgtggtggcacatgcctgtaatcccagctacttgggaggctgaagcaggagaatcgcttgaacccgggagatggaggttgcagtgagccaagatcacaccattgcactccagcatggacaacagagtgagattccgtctc

SEQ ID NO: 24339 - DNA, 2007 bp, Homo sapiens
  source 1..2007: mol_type = unassigned DNA
gcgggcggcgttgggggtgcagcagctgcgcgcggcgcgggggcgggcgtggagggcggcgccgctgcagtgcggggacccgctcgctcgctcgccagccgtccccgcgccccgcgtccccgcgcagccgcctcctggcctcgggcgccgcgcatccaggaaggaagcagccaccctcgccatggcctccccgcccgcctgcccctcggaggaggacgagagcctgaagggctgtgagctgtacgtgcagctgcacgggatccagcaggtcctcaaagactgtatcgtccacctctgcatctccaagcccgaacgccccatgaagttcctccgggagcacttcgagaagctggagaaggaagaaaacaggcagattttggcgcggcaaaagtcaaactcacagtcggactcccatgatgaggaggtgtcgcccacccccccgaaccctgtggtgaaggcccgccgccggcgaggaggcgtgagtgccgaggtgtacaccgaggaggacgccgtgtcctacgtcaggaaggtgattcccaaggactacaaaaccatgactgcgctggccaaggccatctccaagaacgtgctcttcgctcacctggatgacaacgagaggagtgacatattcgatgccatgttccctgtcactcacatcgctggggagactgttatacagcaagggaatgaaggagacaacttctatgtcgttgatcaaggggaagtggatgtgtacgtgaacggagagtgggtgaccaacatcagcgagggaggcagcttcggggagctggcgctcatctacggcacccccagggctgcgaccgtgaaagccaagacggacctcaagctctgggggatcgaccgggacagctaccggcgcatccttatgggcagcacgctgaggaaacgcaagatgtacgaggagttcctcagcaaggtctccatcctagagtccctggagaagtgggagcgtctgaccgtggcggatgcgctggagcccgtccagtttgaagatggagagaaaattgtggtccagggagagcctggggacgacttttacatcatcacggagggcaccgcgtccgtgctgcagcgccggtcccccaatgaggagtacgtggaggtggggcgcctgggaccctctgactacttcggggagattgcactgctgctgaaccggccccgggcggccactgtcgtggcccgggggcccctcaagtgtgtgaagctggaccggccccgcttcgagcgtgtgctggggccctgctctgagatcctcaagaggaacattcagcgttacaacagcttcatctccctcaccgtctgagcacagctcccgccctgcagccccagctccccagtgtggtggccgtgccctgctcgtctgtgtcgggggcccgggagccgctgtgtgaggtgtgggccgggtggggctgggtcccggcagcgtgaggactgccccttccccggactcactttttggaataaatgatcaccttgtgcatttccaaatcaaaggacaagcggacaaaatgcatcccaagatcaaggaagggacaggccagcttcctccccacacgcctccccggctgcctctgtgggcttctcctggggggcccaccccacccctgccagtctcctggagatgcttgaggatcggtcctccccagaaccaggccaggacgttgcccctggggcctggtgaccctgtgaggtcaggtcccccagattgaggtctgagtgtgggcaagtgtgtcaaaaggggctgccccccaggggagatgaggctgagagcagggagttgaggccgaagaagtcaaggcccctcccgcaaatgtgtacccctgcccgcgccactgcaccccgccgcacccccacctcccccgggggccctgctgcggatgccggagtgggagagtctctgagctgtgagattgatcttgcccctaattggagaggaagccgggcgccaagacacacggggctcctgccttgggagccagggcc

SEQ ID NO: 24340 - DNA, 1917 bp, Homo sapiens
  source 1..1917: mol_type = unassigned DNA
gtgagggccaagcaggaacaggggtcacggggcaaggagcacgtggcagcgcaggaaacaggaaggaagcagccaccctcgccatggcctccccgcccgcctgcccctcggaggaggacgagagcctgaagggctgtgagctgtacgtgcagctgcacgggatccagcaggtcctcaaagactgtatcgtccacctctgcatctccaagcccgaacgccccatgaagttcctccgggagcacttcgagaagctggagaaggaagaaaacaggcagattttggcgcggcaaaagtcaaactcacagtcggactcccatgatgaggaggtgtcgcccacccccccgaaccctgtggtgaaggcccgccgccggcgaggaggcgtgagtgccgaggtgtacaccgaggaggacgccgtgtcctacgtcaggaaggtgattcccaaggactacaaaaccatgactgcgctggccaaggccatctccaagaacgtgctcttcgctcacctggatgacaacgagaggagtgacatattcgatgccatgttccctgtcactcacatcgctggggagactgttatacagcaagggaatgaaggagacaacttctatgtcgttgatcaaggggaagtggatgtgtacgtgaacggagagtgggtgaccaacatcagcgagggaggcagcttcggggagctggcgctcatctacggcacccccagggctgcgaccgtgaaagccaagacggacctcaagctctgggggatcgaccgggacagctaccggcgcatccttatgggcagcacgctgaggaaacgcaagatgtacgaggagttcctcagcaaggtctccatcctagagtccctggagaagtgggagcgtctgaccgtggcggatgcgctggagcccgtccagtttgaagatggagagaaaattgtggtccagggagagcctggggacgacttttacatcatcacggagggcaccgcgtccgtgctgcagcgccggtcccccaatgaggagtacgtggaggtggggcgcctgggaccctctgactacttcggggagattgcactgctgctgaaccggccccgggcggccactgtcgtggcccgggggcccctcaagtgtgtgaagctggaccggccccgcttcgagcgtgtgctggggccctgctctgagatcctcaagaggaacattcagcgttacaacagcttcatctccctcaccgtctgagcacagctcccgccctgcagccccagctccccagtgtggtggccgtgccctgctcgtctgtgtcgggggcccgggagccgctgtgtgaggtgtgggccgggtggggctgggtcccggcagcgtgaggactgccccttccccggactcactttttggaataaatgatcaccttgtgcatttccaaatcaaaggacaagcggacaaaatgcatcccaagatcaaggaagggacaggccagcttcctccccacacgcctccccggctgcctctgtgggcttctcctggggggcccaccccacccctgccagtctcctggagatgcttgaggatcggtcctccccagaaccaggccaggacgttgcccctggggcctggtgaccctgtgaggtcaggtcccccagattgaggtctgagtgtgggcaagtgtgtcaaaaggggctgccccccaggggagatgaggctgagagcagggagttgaggccgaagaagtcaaggcccctcccgcaaatgtgtacccctgcccgcgccactgcaccccgccgcacccccacctcccccgggggccctgctgcggatgccggagtgggagagtctctgagctgtgagattgatcttgcccctaattggagaggaagccgggcgccaagacacacggggctcctgccttgggagccagggccgcggccgc

SEQ ID NO: 24341 - DNA, 2553 bp, Homo sapiens
  source 1..2553: mol_type = unassigned DNA
agtttctgccgccgccaccctggcaggatggggcaacggtgtgcggtaggaggatgaggttgattccctttcctgcagggctgggcttgtgggttaggaccgtcaccaagaggctcctcctaggcctccgtgacctctggatccccaagaaaggaaggaagcagccaccctcgccatggcctccccgcccgcctgcccctcggaggaggacgagagcctgaagggctgtgagctgtacgtgcagctgcacgggatccagcaggtcctcaaagactgtatcgtccacctctgcatctccaagcccgaacgccccatgaagttcctccgggagcacttcgagaagctggagaaggaagaaaacaggcagattttggcgcggcaaaagtcaaactcacagtcggactcccatgatgaggaggtgtcgcccacccccccgaaccctgtggtgaaggcccgccgccggcgaggaggcgtgagtgccgaggtgtacaccgaggaggacgccgtgtcctacgtcaggaaggtgattcccaaggactacaaaaccatgactgcgctggccaaggccatctccaagaacgtgctcttcgctcacctggatgacaacgagaggagtgacatattcgatgccatgttccctgtcactcacatcgctggggagactgttatacagcaagggaatgaaggagacaacttctatgtcgttgatcaaggggaagtggatgtgtacgtgaacggagagtgggtgaccaacatcagcgagggaggcagcttcggggagctggcgctcatctacggcacccccagggctgcgaccgtgaaagccaagacggacctcaagctctgggggatcgaccgggacagctaccggcgcatccttatgggcagcacgctgaggaaacgcaagatgtacgaggagttcctcagcaaggtctccatcctagagtccctggagaagtgggagcgtctgaccgtggcggatgcgctggagcccgtccagtttgaagatggagagaaaattgtggtccagggagagcctggggacgacttttacatcatcacggagggcaccgcgtccgtgctgcagcgccggtcccccaatgaggagtacgtggaggtggggcgcctgggaccctctgactacttcggggagattgcactgctgctgaaccggccccgggcggccactgtcgtggcccgggggcccctcaagtgtgtgaagctggaccggccccgcttcgagcgtgtgctggggccctgctctgagatcctcaagaggaacattcagcgttacaacagcttcatctccctcaccgtctgagcacagctcccgccctgcagccccagctccccagtgtggtggccgtgccctgctcgtctgtgtcgggggcccgggagccgctgtgtgaggtgtgggccgggtggggctgggtcccggcagcgtgaggactgccccttccccggactcactttttggaataaatgatcaccttgtgcatttccaaatcaaaggacaagcggacaaaatgcatcccaagatcaaggaagggacaggccagcttcctccccacacgcctccccggctgcctctgtgggcttctcctggggggcccaccccacccctgccagtctcctggagatgcttgaggatcggtcctccccagaaccaggccaggacgttgcccctggggcctggtgaccctgtgaggtcaggtcccccagattgaggtctgagtgtgggcaagtgtgtcaaaaggggctgccccccaggggagatgaggctgagagcagggagttgaggccgaagaagtcaaggcccctcccgcaaatgtgtacccctgcccgcgccactgcaccccgccgcacccccacctcccccgggggccctgctgcggatgccggagtgggagagtctctgagctgtgagattgatcttgcccctaattggagaggaagccgggcgccaagacacacggggctcctgccttgggagccagggccgcggccgcaggtagaccccagtagggggggccgggctcgaagttcctttgggaggggctggcgggactccagcaggccgtcctcacctttcttagaaagtccacccagggcaagttgatgttgggggaaagcagaagtcaagccagccgcgggccccacacgccccgacccgctcaaccgacttgtcccttaaatgtgtcttggatcccgcagtgatgacgtgagccagccaggcccgaaagggtgaggccagtgcagagaagcttcccaggggattcctgggttcccccgaaagacaagcgaggtcattgcagttcacctgatgttgctcctgtcccgtgcgtcccggggaggctgtccttggtccgaggctgctcgttgcagcccctcccctgctggcggttacgatgcgtggggtccccctccccacccagccccggccacgtcgccgtgtcccgcctgtgcctgtgacgtccctgtggacctgtgagccatccccccccttatctctgctctgaatactgcatgaagcattaaacgtgcaatgaagta

SEQ ID NO: 24342 - DNA, 651 bp, Homo sapiens
  source 1..651: mol_type = unassigned DNA
gtgggagcggggcccggggtgctcaccgggcgtggcctgcgccagggcggcggcgcagctgcagctctcgcggcgcacggcggcgaaggggtcgagcagggagcagcgcagcgcgcgcagagcgtcgtccaggaaggaagcagccaccctcgccatggcctccccgcccgcctgcccctcggaggaggacgagagcctgaagggctgtgagctgtacgtgcagctgcacgggatccagcaggtcctcaaagactgtatcgtccacctctgcatctccaagcccgaacgccccatgaagttcctccgggagcacttcgagaagctggagaaggaagaaaacaggcagattttggcgcggcaaaagtcaaactcacagtcggactcccatgatgaggaggtgtcgcccacccccccgaaccctgtggtgaaggcccgccgccggcgaggaggcgtgagtgccgaggtgtacaccgaggaggacgccgtgtcctacgtcaggaaggtgattcccaaggactacaaaaccatgactgcgctggccaaggccatctccaagaacgtgctcttcgctcacctggatgacaacgagaggagtgacatattcgatgccatgttccctgtcactcacatcgctggggagactgttataca

SEQ ID NO: 24343 - DNA, 1006 bp, Homo sapiens
  source 1..1006: mol_type = unassigned DNA
ctctggccgctaaggcagagtgagaccccagggaacgggcgtgcttgctgggtaccgggtgtcctgcagaggcagggatgtgatcccctaggtgaaggaagcagccaccctcgccatggcctccccgcccgcctgcccctcggaggaggacgagagcctgaagggctgtgagctgtacgtgcagctgcacgggatccagcaggtcctcaaagactgtatcgtccacctctgcatctccaagcccgaacgccccatgaagttcctccgggagcacttcgagaagctggagaaggaagaaaacaggcagattttggcgcggcaaaagtcaaactcacagtcggactcccatgatgaggaggtgtcgcccacccccccgaaccctgtggtgaaggcccgccgccggcgaggaggcgtgagtgccgaggtgtacaccgaggaggacgccgtgtcctacgtcaggaaggtgattcccaaggactacaaaaccatgactgcgctggccaaggccatctccaagaacgtgctcttcgctcacctggatgacaacgagaggagtgacatattcgatgccatgttccctgtcactcacatcgctggggagactgttatacagcaagggaatgaaggagacaacttctatgtcgttgatcaaggggaagtggatgtgtacgtgaacggagagtgggtgaccaacatcagcgagggaggcagcttcggggagctggcgctcatctacggcacccccagggctgcgaccgtgaaagccaagacggacctcaagctctgggggatcgaccgggacagctaccggcgcatccttatgggcagcacgctgaggaaacgcaagatgtacgaggagttcctcagcaaggtctccatcctagagtccctggagaagtgggagcgtctgaccgtggcggatgcgctggagcccgtccagtttgaagatggagagaaaattgtggtccagggagagcctggggacgacttttacatcatcacggag

SEQ ID NO: 24344 - DNA, 346 bp, Homo sapiens
  source 1..346: mol_type = unassigned DNA
ggatccccaagaaaggtgggaaagaatttaggagggttccgatttcccactgggcatcggggtgaagctggtgcgcctaagcgctgggagtcacctggggaagcggggctgggcccacctggccaccctctctggccgctaaggcagagaaggaagcagccaccctcgccatggcctccccgcccgcctgcccctcggaggaggacgagagcctgaagggctgtgagctgtacgtgcagctgcacgggatccagcaggtcctcaaagactgtatcgtccacctctgcatctccaagcccgaacgccccatgaagttcctccgggagcacttcgagaagctggagaa

SEQ ID NO: 24345 - DNA, 2533 bp, Homo sapiens
  source 1..2533: mol_type = unassigned DNA
gtgggagcggggcccggggtgctcaccgggcgtggcctgcgccagggcggcggcgcagctgcagctctcgcggcgcacggcggcgaaggggtcgagcagggagcagcgcagcgcgcgcagagcgtcgtccaggaaggaagcagccaccctcgccatggcctccccgcccgcctgcccctcggaggaggacgagagcctgaagggctgtgagctgtacgtgcagctgcacgggatccagcaggtcctcaaagactgtatcgtccacctctgcatctccaagcccgaacgccccatgaagttcctccgggagcacttcgagaagctggagaaggaagaaaacaggcagattttggcgcggcaaaagtcaaactcacagtcggactcccatgatgaggaggtgtcgcccacccccccgaaccctgtggtgaaggcccgccgccggcgaggaggcgtgagtgccgaggtgtacaccgaggaggacgccgtgtcctacgtcaggaaggtgattcccaaggactacaaaaccatgactgcgctggccaaggccatctccaagaacgtgctcttcgctcacctggatgacaacgagaggagtgacatattcgatgccatgttccctgtcactcacatcgctggggagactgttatacagcaagggaatgaaggagacaacttctatgtcgttgatcaaggggaagtggatgtgtacgtgaacggagagtgggtgaccaacatcagcgagggaggcagcttcggggagctggcgctcatctacggcacccccagggctgcgaccgtgaaagccaagacggacctcaagctctgggggatcgaccgggacagctaccggcgcatccttatgggcagcacgctgaggaaacgcaagatgtacgaggagttcctcagcaaggtctccatcctagagtccctggagaagtgggagcgtctgaccgtggcggatgcgctggagcccgtccagtttgaagatggagagaaaattgtggtccagggagagcctggggacgacttttacatcatcacggagggcaccgcgtccgtgctgcagcgccggtcccccaatgaggagtacgtggaggtggggcgcctgggaccctctgactacttcggggagattgcactgctgctgaaccggccccgggcggccactgtcgtggcccgggggcccctcaagtgtgtgaagctggaccggccccgcttcgagcgtgtgctggggccctgctctgagatcctcaagaggaacattcagcgttacaacagcttcatctccctcaccgtctgagcacagctcccgccctgcagccccagctccccagtgtggtggccgtgccctgctcgtctgtgtcgggggcccgggagccgctgtgtgaggtgtgggccgggtggggctgggtcccggcagcgtgaggactgccccttccccggactcactttttggaataaatgatcaccttgtgcatttccaaatcaaaggacaagcggacaaaatgcatcccaagatcaaggaagggacaggccagcttcctccccacacgcctccccggctgcctctgtgggcttctcctggggggcccaccccacccctgccagtctcctggagatgcttgaggatcggtcctccccagaaccaggccaggacgttgcccctggggcctggtgaccctgtgaggtcaggtcccccagattgaggtctgagtgtgggcaagtgtgtcaaaaggggctgccccccaggggagatgaggctgagagcagggagttgaggccgaagaagtcaaggcccctcccgcaaatgtgtacccctgcccgcgccactgcaccccgccgcacccccacctcccccgggggccctgctgcggatgccggagtgggagagtctctgagctgtgagattgatcttgcccctaattggagaggaagccgggcgccaagacacacggggctcctgccttgggagccagggccgcggccgcaggtagaccccagtagggggggccgggctcgaagttcctttgggaggggctggcgggactccagcaggccgtcctcacctttcttagaaagtccacccagggcaagttgatgttgggggaaagcagaagtcaagccagccgcgggccccacacgccccgacccgctcaaccgacttgtcccttaaatgtgtcttggatcccgcagtgatgacgtgagccagccaggcccgaaagggtgaggccagtgcagagaagcttcccaggggattcctgggttcccccgaaagacaagcgaggtcattgcagttcacctgatgttgctcctgtcccgtgcgtcccggggaggctgtccttggtccgaggctgctcgttgcagcccctcccctgctggcggttacgatgcgtggggtccccctccccacccagccccggccacgtcgccgtgtcccgcctgtgcctgtgacgtccctgtggacctgtgagccatccccccccttatctctgctctgaatactgcatgaagcattaaacgtgcaatgaagtac

SEQ ID NO: 24346 - DNA, 2494 bp, Homo sapiens
  source 1..2494: mol_type = unassigned DNA
ctctggccgctaaggcagagtgagaccccagggaacgggcgtgcttgctgggtaccgggtgtcctgcagaggcagggatgtgatcccctaggtgaaggaagcagccaccctcgccatggcctccccgcccgcctgcccctcggaggaggacgagagcctgaagggctgtgagctgtacgtgcagctgcacgggatccagcaggtcctcaaagactgtatcgtccacctctgcatctccaagcccgaacgccccatgaagttcctccgggagcacttcgagaagctggagaaggaagaaaacaggcagattttggcgcggcaaaagtcaaactcacagtcggactcccatgatgaggaggtgtcgcccacccccccgaaccctgtggtgaaggcccgccgccggcgaggaggcgtgagtgccgaggtgtacaccgaggaggacgccgtgtcctacgtcaggaaggtgattcccaaggactacaaaaccatgactgcgctggccaaggccatctccaagaacgtgctcttcgctcacctggatgacaacgagaggagtgacatattcgatgccatgttccctgtcactcacatcgctggggagactgttatacagcaagggaatgaaggagacaacttctatgtcgttgatcaaggggaagtggatgtgtacgtgaacggagagtgggtgaccaacatcagcgagggaggcagcttcggggagctggcgctcatctacggcacccccagggctgcgaccgtgaaagccaagacggacctcaagctctgggggatcgaccgggacagctaccggcgcatccttatgggcagcacgctgaggaaacgcaagatgtacgaggagttcctcagcaaggtctccatcctagagtccctggagaagtgggagcgtctgaccgtggcggatgcgctggagcccgtccagtttgaagatggagagaaaattgtggtccagggagagcctggggacgacttttacatcatcacggagggcaccgcgtccgtgctgcagcgccggtcccccaatgaggagtacgtggaggtggggcgcctgggaccctctgactacttcggggagattgcactgctgctgaaccggccccgggcggccactgtcgtggcccgggggcccctcaagtgtgtgaagctggaccggccccgcttcgagcgtgtgctggggccctgctctgagatcctcaagaggaacattcagcgttacaacagcttcatctccctcaccgtctgagcacagctcccgccctgcagccccagctccccagtgtggtggccgtgccctgctcgtctgtgtcgggggcccgggagccgctgtgtgaggtgtgggccgggtggggctgggtcccggcagcgtgaggactgccccttccccggactcactttttggaataaatgatcaccttgtgcatttccaaatcaaaggacaagcggacaaaatgcatcccaagatcaaggaagggacaggccagcttcctccccacacgcctccccggctgcctctgtgggcttctcctggggggcccaccccacccctgccagtctcctggagatgcttgaggatcggtcctccccagaaccaggccaggacgttgcccctggggcctggtgaccctgtgaggtcaggtcccccagattgaggtctgagtgtgggcaagtgtgtcaaaaggggctgccccccaggggagatgaggctgagagcagggagttgaggccgaagaagtcaaggcccctcccgcaaatgtgtacccctgcccgcgccactgcaccccgccgcacccccacctcccccgggggccctgctgcggatgccggagtgggagagtctctgagctgtgagattgatcttgcccctaattggagaggaagccgggcgccaagacacacggggctcctgccttgggagccagggccgcggccgcaggtagaccccagtagggggggccgggctcgaagttcctttgggaggggctggcgggactccagcaggccgtcctcacctttcttagaaagtccacccagggcaagttgatgttgggggaaagcagaagtcaagccagccgcgggccccacacgccccgacccgctcaaccgacttgtcccttaaatgtgtcttggatcccgcagtgatgacgtgagccagccaggcccgaaagggtgaggccagtgcagagaagcttcccaggggattcctgggttcccccgaaagacaagcgaggtcattgcagttcacctgatgttgctcctgtcccgtgcgtcccggggaggctgtccttggtccgaggctgctcgttgcagcccctcccctgctggcggttacgatgcgtggggtccccctccccacccagccccggccacgtcgccgtgtcccgcctgtgcctgtgacgtccctgtggacctgtgagccatccccccccttatctctgctctgaatactgcatgaagcattaaacgtgcaatgaagtac

SEQ ID NO: 24347 - DNA, 6471 bp, Homo sapiens
  source 1..6471: mol_type = unassigned DNA
agctcgcctgcccgtcggtccccgcggcggcggcggctgcccagtgacagcggcggcggtgccaggtcggccgtggtagcgtagggttgcgcggcccggaaacgcagagccggccaaagagcggcgcgacgtgagccggggccgtgcgcgaagagacctcgcgggcgcggagcgaaaggccggcgtgagtgagcgcggagacagtggccgccggcggcccaacccgtctatcccttcggccgccgccggcatgagccacatccagatcccgccggggctcacggagctgctgcagggctacacggtggaggtgctgcgacagcagccgcctgacctcgtcgaattcgcagtggagtacttcacccgcctgcgcgaggcccgcgccccagcctcagtcctgcccgccgccaccccacgccagagcctgggccaccccccgccagaacccggcccggaccgtgtcgccgacgccaaaggggacagcgagtcggaggaggacgaggacttggaagttccagttcctagcagatttaatagacgagtatcagtctgtgctgagacctataaccctgatgaggaagaggaagatacagatccaagggtgattcatcctaaaactgatgaacagagatgcagacttcaggaagcttgcaaagatattctccttttcaaaaatcttgatcaggaacagctttctcaagttctcgatgccatgtttgaaaggatagtcaaagctgatgagcatgtcattgaccaaggagatgatggagacaacttttatgtcatagaacggggaacttatgacattttagtaacaaaagataatcaaacccgctctgttggtcaatatgacaaccgtggcagttttggagaactagctctgatgtacaacaccccgagagctgctaccattgttgctacctcagaaggctccctttggggactggaccgggtgacttttagaagaatcatagtgaaaaataatgcaaagaagaggaagatgtttgaatcatttattgagtctgtgcccctccttaaatcactagaggtgtcagaacgaatgaagattgtggatgtaataggagagaagatctataaggatggagaacgcataatcactcagggtgaaaaggctgatagcttttacatcatagagtctggcgaagtgagcatcttgattagaagcaggactaaatcaaacaaggatggtgggaaccaggaggtcgagattgcccgctgccataaggggcagtactttggagagcttgccctggtcaccaacaaacccagagctgcctcagcttatgcagttggagatgtcaaatgcttagttatggatgtacaagcattcgagaggcttctggggccctgcatggacatcatgaagaggaacatctcacactatgaggaacagctggtgaagatgtttggctccagcgtggatctgggcaacctcgggcagtaggtgtgccacaccccagagccttcttagtgtgacaccaaaaccttctggtcagccacagaacacatacagaaaacagacatgacagaactgttcctgccgttgccgccactgctgccattgctgtggttatgggcatttagaaaacttgaaagtcagcactaaaggatgggcagaggttcaacccacacctccactttgcttctgaaggcccattcattagaccacttgtaaagattactccaacccagtttttatatctttggttcaaaacggcatgtctctccaacaatttaagtgcctgatacaaagtccaaagtataaacatgctcctttcctctcttgctgctactcttgcttttggaagttaccacagggtctgcagaaacctgttgtataactgtagacactctctaatggttctcaaaggaggaaatgtagccttcagtctcctcatttgtcctttgaggaagtccacatttgttcacagttgcagcctttggttttacagtgggaaatggtggtggatgatatggacatatgtagcccagtggcattgtactttctgctgacagctgcacacattacagctgtctccaaacccacagtgatgcttagggaaagaccctgctcaggacccagcaggtcagcaccccagagcagactgataggtccgtgggacccatgttagagcagaaaatttgggctcagcacattttactgttagtagagagccaggaaacgttttctgggttggggattttgtgggattttttaatttttttagtaggttttgtttaacctctgtgcagtttgtatgaatgaattgctatacatttataaggagccagggtctggagggttgctatcactttgtccagcccaaataccttcctgggcaactcctaccatttgtttgcagttgcctctactagctgatggcagtatgctggaaagaggttgtactataaagagagttctttccttctactccagagttgttgtgtagctttgccattgaaccgatcaatttttaaactctttaaagaagcagcagctatttttttgaaattaaagaaaattctcaggccaggctcaatggctcatgcctataattgtagtgctttgggaggctgagctgggaggatcgcttaagaccagcctaggcaacagagtgagatcctgtctctacaaaaacaaaaattttttttttgttttctttttgagacggagtttcgctcttgttgcccaggctggagtgcaatggtgcggtcttggctcaccgcaacctccgcctcccagattaaagtgattctcctgcctcaacctcctgagtagctgggattacaggcatgcgccaccatgccgggcgaattttgtatttttaatagagacagggtttctctgtgttggtcaggctggtctcaaactcccaacctcaggtgatccgcccacctcagcctctcagagtgctgggattacagatgtgagccactgcacctggcaaaaaaaaaatttttttttaatttgtcaggtgtggtgatgcatgcatgtagtcccaaatacttaggaggctgaggtggaaggatcacttgagcccaggaggtcaaggcaacagtgagctgtgatcatgccactgcactccagtctgggtgacacagtgagaccctgtctcttaaaaaaaaaaaaagaaagaaaaaaaattattctttaggtaatttcacttggacatattcatgtatatggagtttgtcagctgactcaggcatttaccctaaagatcaaatctgttttcaaaaattggcattggccaggcacggtgacccacacctgtaatcccagcactttgggaggccgaggcgggcggatcacgaggtcaggggttcaagaccagcctggccaacatagtgaaaccccgtctctactaaaaatacaaaaaattagctgggcatggtggtgggcgcctgtaatcccagctacttgagaggctcaggcaggagaatcgcttgaacctgggagtggaggttgcagtgagccgagattgcaccattgtattccaccccgggtgacagtgcaagactccatctcaaaaaaaaaaaaaaaatttggcatcatttacaatttcatagaattactgtgaaggcctttctagttgagatgttggggtatttgggattctaattgttaaccccagaagaaggtaatttagcttgtatttatttaaaacccatttagccttttacttatatctggtagaattccagtgatcatcctaataaggtatatttcagaataatttttttttccttcagaataacttagaatcagatgctataagggctcctaggagcagtgtgaaatttccgtaaagataaatttgaatgttgtaaccaagtttatattaaaccaagaggccatttccaatatgattttttgtttctttttaacttgttaagtccctaagagattacatgctagggcttgagtcatttctattgtagataatgatggcccacacagtcaccttcaactatccacataagctaggctttccgcttttgccacggacagtgtgaccaagatatttccagagtaaataacccaccacaaccttggtaattcctcttttcttcttaagctccaggaagcgaaagcagaaggactcttttcagactgccctctgtagcctacattgcagctttccaaaacaggcagctagcactgggaaagcccatgtggtgaccccatatttttctgaggttcttcttttccatggtgttactttattatcagaaagtaaattcagaaaacaggtcttgcccttagcagacaagaaccacaccagtttcttgtaaaggtaacggatacattgggattcaggagtgacacagaggtccagccccagaacttgtaaggattttgtttgaacactgagcagatgcctcctccctgccacccatcacactagttagggctggccatgaattctatgccagagtcactcctgcagtctgctagggatgggccttcttatcccactctcgcacacatcccagtctagtctttgccttcacagagtcctccttgacacccctgacttaatgatagttgctgttttggagtagaattgatcaggtttaagtcatcctgctcaggttgggcatagtggctcatgcctgtaatctcagcactttgggaagccaaagtgggaggattgcttgagcccaggagttccaaaccatcctgggcaacagagggagaccctgtctctaccaagaaaaaaaaaaaaaaaaaaagttaaaaaaacaattagctggacctggtggtgcacactcagtaggctgaggtgaaaggattcctttaacctgggagactgaagctgcagtgagccatgatcgtgccactgcactccagtctgggggacaaagtgggaccctatctcaaaaaaaaaaaaaaaaagtcatcctcctccaactactgattgacatatggatcatcagttcagaccctcactgcatacaggatccctagagggttctatttaatagcttgaggaagggagactttaaaaggacgtgtgtgagtgaaataggatatagccattaccacggtgccaggacctgacagcgttccaattctttttgcagcatggggaatcaaaggtggcatgccaagttcaactcagggctgaggtatccacattgtccacatcaggcaagccctgcactgacggttgagcctcatggagaggagcatgtgttggaaagagatccctttgttaactgttttgtggtgttctcttcaatgaattagagctcatgccccttttctggctttgctgttgattttggatggtagagaatattcctgagagccttccttttggcccccagcttatgccacccactctcttctcttggttgaattctctgaaggaaaggttcatgtgctattgtcctgttagtcaatagtcttcatatataattgtgttacatatattgctgtagactctcagaaatcagggtagagcttttcctttgagcagtttaatgagtgaattcagcagcaaagtcgcaagaaatggttctccagccaggagaggttatgtttatcctctgattgcccgttttctctgcacacagtgatatcgtattcagtgagaggtgctgttggcacccagcagcaccctgggcacacagcatttcatgtcatgtcacagtgtacaagctaccctctaattcagaaagaagagcattttgcacagagaaaaataaaaagatccatgaatgtcatcttttatcttttattttcagttggctgatgttggaatttttgttcttgtcatgaacttgtaaaccaatcttgccaagatacaagttgttttggtttttcactacaatgacctcttgttcctcctgtcttgactgctgacgttcctcaatgattctattgtctattttatgggaagcagccttcccataggtttccttttacacactgcagggctatctttatactttaaaaaaaaaaaaaaaaaaaaaaaaaaggacaagaactgtcactaacctcatggaggggtttgcgtaaaaccatttagcccaccttgagcaaagggtagattccgtgttgtttttttaagctcactgtaataaaataaatctaattcagcattattgtgctacctcaaaggtaaaaaatgttttaaggtcttcttttggtcctgagttctatatacagtgtttgaaatgtccttcatttggaattattttttaaattcttggagtgaattttattttaatctgttttaatcttgtattttaatctcagaagaataagtgattgaaacgtgatcaattcttgctctgtggtgttaaacatataatgaacagtcattaagaattaagtcactgtttgccataaacaaggttgatgttctttttgttgttgttaaggaaaccctagggctcggctttactcttgattaataaaggctgacaaatcatgtctga

SEQ ID NO: 24348 - DNA, 3318 bp, Homo sapiens
  source 1..3318: mol_type = unassigned DNA
tccccgcggcggcggcggctgcccagtgacagcggcggcggtgccaggtcggccgtggtagcgtagggttgcgcggcccggaaacgcagagccggccaaagagcggcgcgacgtgagccggggccgtgcgcgaagagacctcgcgggcgcggagcgaaaggccggcgtgagtgagcgcggagacagtggccgccggcggcccaacccgtctatcccttcggccgccgccggcatgagccacatccagatcccgccggggctcacggagctgctgcagggctacacggtggaggtgctgcgacagcagccgcctgacctcgtcgaattcgcagtggagtacttcacccgcctgcgcgaggcccgcgccccagcctcagtcctgcccgccgccaccccacgccagagcctgggccaccccccgccagaacccggcccggaccgtgtcgccgacgccaaaggggacagcgagtcggaggaggacgaggacttggaagttccagttcctagcagatttaatagacgagtatcagtctgtgctgagacctataaccctgatgaggaagaggaagatacagatccaagggtgattcatcctaaaactgatgaacagagatgcagacttcaggaagcttgcaaagatattctccttttcaaaaatcttgatcaggaacagctttctcaagttctcgatgccatgtttgaaaggatagtcaaagctgatgagcatgtcattgaccaaggagatgatggagacaacttttatgtcatagaacggggaacttatgacattttagtaacaaaagataatcaaacccgctctgttggtcaatatgacaaccgtggcagttttggagaactagctctgatgtacaacaccccgagagctgctaccattgttgctacctcagaaggctccctttggggactggaccgggtgacttttagaagaatcatagtgaaaaataatgcaaagaagaggaagatgtttgaatcatttattgagtctgtgcccctccttaaatcactagaggtgtcagaacgaatgaagattgtggatgtaataggagagaagatctataaggatggagaacgcataatcactcagactaaatcaaacaaggatggtgggaaccaggaggtcgagattgcccgctgccataaggggcagtactttggagagcttgccctggtcaccaacaaacccagagctgcctcagcttatgcagttggagatgtcaaatgcttagttatggatgtacaagcattcgagaggcttctggggccctgcatggacatcatgaagaggaacatctcacactatgaggaacagctggtgaagatgtttggctccagcgtggatctgggcaacctcgggcagtaggtgtgccacaccccagagccttcttagtgtgacaccaaaaccttctggtcagccacagaacacatacagaaaacagacatgacagaactgttcctgccgttgccgccactgctgccattgctgtggttatgggcatttagaaaacttgaaagtcagcactaaaggatgggcagaggttcaacccacacctccactttgcttctgaaggcccattcattagaccacttgtaaagattactccaacccagtttttatatctttggttcaaaacggcatgtctctccaacaatttaagtgcctgatacaaagtccaaagtataaacatgctcctttcctctcttgctgctactcttgcttttggaagttaccacagggtctgcagaaacctgttgtataactgtagacactctctaatggttctcaaaggaggaaatgtagccttcagtctcctcatttgtcctttgaggaagtccacatttgttcacagttgcagcctttggttttacagtgggaaatggtggtggatgatatggacatatgtagcccagtggcattgtactttctgctgacagctgcacacattacagctgtctccaaacccacagtgatgcttagggaaagaccctgctcaggacccagcaggtcagcaccccagagcagactgataggtccgtgggacccatgttagagcagaaaatttgggctcagcacattttactgttagtagagagccaggaaacgttttctgggttggggattttgtgggattttttaatttttttagtaggttttgtttaacctctgtgcagtttgtatgaatgaattgctatacatttataaggagccagggtctggagggttgctatcactttgtccagcccaaataccttcctgggcaactcctaccatttgtttgcagttgcctctactagctgatggcagtatgctggaaagaggttgtactataaagagagttctttccttctactccagagttgttgtgtagctttgccattgaaccgatcaatttttaaactctttaaagaagcagcagctatttttttgaaattaaagaaaattctcaggccaggctcaatggctcatgcctataattgtagtgctttgggaggctgagctgggaggatcgcttaagaccagcctaggcaacagagtgagatcctgtctctacaaaaacaaaaattttttttttgttttctttttgagacggagtttcgctcttgttgcccaggctggagtgcaatggtgcggtcttggctcaccgcaacctccgcctcccagattaaagtgattctcctgcctcaacctcctgagtagctgggattacaggcatgcgccaccatgccgggcgaattttgtatttttaatagagacagggtttctctgtgttggtcaggctggtctcaaactcccaacctcaggtgatccgcccacctcagcctctcagagtgctgggattacagatgtgagccactgcacctggcaaaaaaaaaatttttttttaatttgtcaggtgtggtgatgcatgcatgtagtcccaaatacttaggaggctgaggtggaaggatcacttgagcccaggaggtcaaggcaacagtgagctgtgatcatgccactgcactccagtctgggtgacacagtgagaccctgtctcttaaaaaaaaaaaaagaaagaaaaaaaattattctttaggtaatttcacttggacatattcatgtatatggagtttgtcagctgactcaggcatttaccctaaagatcaaatctgttttcaaaaattggcattggccaggcacggtgacccacacctgtaatcccagcactttgggaggccgaggcgggcggatcacgaggtcaggggttcaagaccagcctggccaacatagtgaaaccccgtctctactaaaaatacaaaaaa

SEQ ID NO: 24349 - DNA, 1849 bp, Homo sapiens
  source 1..1849: mol_type = unassigned DNA
agtgacagcggcggcggtgccaggtcggccgtggtagcgtagggttgcgcggcccggaaacgcagagccggccaaagagcggcgcgacgtgagccggggccgtgcgcgaagagacctcgcgggcgcggagcgaaaggccggcgtgagtgagcgcggagacagtggccgccggcggcccaacccgtctatcccttcggccgccgccggcatgagccacatccagatcccgccggggctcacggagctgctgcagggctacacggtggaggtgctgcgacagcagccgcctgacctcgtcgaattcgcagtggagtacttcacccgcctgcgcgaggcccgcgccccagcctcagtcctgcccgccgccaccccacgccagagcctgggccaccccccgccagaacccggcccggaccgtgtcgccgacgccaaaggggacagcgagtcggaggaggacgaggacttggaagttccagttcctagcagatttaatagacgagtatcagtctgtgctgagacctataaccctgatgaggaagaggaagatacagatccaagggtgattcatcctaaaactgatgaacagagatgcagacttcaggaagcttgcaaagatattctccttttcaaaaatcttgatcaggaacagctttctcaagttctcgatgccatgtttgaaaggatagtcaaagctgatgagcatgtcattgaccaaggagatgatggagacaacttttatgtcatagaacggggaacttatgacattttagtaacaaaagataatcaaacccgctctgttggtcaatatgacaaccgtggcagttttggagaactagctctgatgtacaacaccccgagagctgctaccattgttgctacctcagaaggctccctttggggactggaccgggtgacttttagaagaatcatagtgaaaaataatgcaaagaagaggaagatgtttgaatcatttattgagtctgtgcccctccttaaatcactagaggtgtcagaacgaatgaagattgtggatgtaataggagagaagatctataaggatggagaacgcataatcactcagggtgaaaaggctgatagcttttacatcatagagtctggcgaagtgagcatcttgattagaagcaggactaaatcaaacaaggatggtgggaaccaggaggtcgagattgcccgctgccataaggggcagtactttggagagcttgccctggtcaccaacaaacccagagctgcctcagcttatgcagttggagatgtcaaatgcttagttatggatgtacaagcattcgagaggcttctggggccctgcatggacatcatgaagaggaacatctcacactatgaggaacagctggtgaagatgtttggctccagcgtggatctgggcaacctcgggcagtagcatggggaatcaaaggtggcatgccaagttcaactcagggctgaggtatccacattgtccacatcaggcaagccctgcactgacggttgagcctcatggagaggagcatgtgttggaaagagatccctttgttaactgttttgtggtgttctcttcaatgaattagagctcatgccccttttctggctttgctgttgattttggatggtagagaatattcctgagagccttccttttggcccccagcttatgccacccactctcttctcttggttgaattctctgaaggaaaggttcatgtgctattgtcctgttagtcaatagtcttcatatataattgtgttacatatattgctgtagactctcagaaatcagggtagagcttttcctttgagcagtttaatgagtgaattcagcagcaaagtc

SEQ ID NO: 24350 - DNA, 3745 bp, Homo sapiens
  source 1..3745: mol_type = unassigned DNA
gccgcggctggagcgggaggagcaggagatgctgccagccctcccggggccgcgctcgctcagccgccgccaccacacggagcagacgcgcgccgggagccgcgggccgggccagccgggccgccggggcccagtgcgccgcgctcgcagccggtagcgcgccagcgccgtaggcgctcgctcggcagccgcggggccctaggccgtgccggggagggggcgagggcggcgcccaggcgcctgccgccccggaggcaggatgagcatcgagatcccggcgggactgacggagctgctgcagggcttcacggtggaggtgctgaggcaccagcccgcggacctgctggagttcgcgctgcagcacttcacccgcctgcagcaggagaacgagcgcaaaggcaccgcgcgcttcggccatgagggcaggacctggggggacctgggcgccgctgccgggggcggcacccccagcaagggggtcaacttcgccgaggagcccatgcagtccgactccgaggacggggaggaggaggaggcggcgcccgcggacgcaggggcgttcaatgctccagtaataaaccgattcacaaggcgtgcctcagtatgtgcagaagcttataatcctgatgaagaagaagatgatgcagagtccaggattatacatccaaaaactgatgatcaaagaaataggttgcaagaggcttgcaaagacatcctgctgtttaagaatctggatccggagcagatgtctcaagtattagatgccatgtttgaaaaattggtcaaagatggggagcatgtaattgatcaaggtgacgatggtgacaacttttatgtaattgatagaggcacatttgatatttatgtgaaatgtgatggtgttggaagatgtgttggtaactatgataatcgtgggagtttcggcgaactggccttaatgtacaatacacccagagcagctacaatcactgctacctctcctggtgctctgtggggtttggacagggtaaccttcaggagaataattgtgaaaaacaatgccaaaaagagaaaaatgtatgaaagctttattgagtcactgccattccttaaatctttggagttttctgaacgcctgaaagtagtagatgtgataggcaccaaagtatacaacgatggagaacaaatcattgctcagggagattcggctgattcttttttcattgtagaatctggagaagtgaaaattactatgaaaagaaagggtaaatcagaagtggaagagaatggtgcagtagaaatcgctcgatgctcgcggggacagtactttggagagcttgccctggtaactaacaaacctcgagcagcttctgcccacgccattgggactgtcaaatgtttagcaatggatgtgcaagcatttgaaaggcttctgggaccttgcatggaaattatgaaaaggaacatcgctacctatgaagaacagttagttgccctgtttggaacgaacatggatattgttgaacccactgcatgaagcaaaagtatggagcaagacctgtagtgacaaaattacacagtagtggttagtccactgagaatgtgtttgtgtagatgccaagcattttctgtgatttcaggttttttcctttttttacatttacaacgtatcaataaacagtagtgatttaatagtcaataggctttaacatcactttctaaagagtagttcataaaaaaatcaacatactgataaaatgactttgtactccacaaaattatgactgaaaggtttattaaaatgattgtaatatatagaaagtatctgtgtttaagaagataattaaaggatgttatcataggctatatgtgttttacttattcagactgataatcatattagtgactatccccatgtaagagggcacttggcaattaaacatgctacacagcatggcatcacttttttttataactcattaaacacagtaaaattttaatcatttttgttttaaagttttctagcttgataagttatgtgctggccttggcctattggtgaaatggtataaaatatcatatgcagttttaaaactttttatatttttgcaataaagtacattttgactttgttggcataatgtcagtaacatacatattccagtggttttatggacaggcaatttagtcattatgataataaggaaaacagtgttttagatgagagatcattaatgcatttttccctcatcaagcatatatctgcttttttttattttgcaattctctgtattctatgtctttaaaaatttgatcttgacatttaatgtcacaaagttttgtttttttaaaaagtgatttaaacttaagatccgacattttttgtattctttaagattttacacctaaaaaatctctcctatcccaaaaataatgtgggatccttatcagcatgcccacagtttatttctttgttcttcactaggcctgcataatacagtcctatgtagacatctgttcccttgggtttccgttctttcttaggatggttgccaacccacaatctcattgatcagcagccaatatgggtttgtttggtttttttaattcttaaaaacatcctctagaggaatagaaacaaatttttatgagcataaccctatataaagacaaaatgaatttctgaccttaccatatataccattaggccttgccattgctttaatgtagactcatagttgaaattagtgcagaaagaactcagatgtactagattttcattgttcattgatatgctcagtatgctgccacataagatgaatttaattatattcaaccaaagcaatatactcttacatgatttctaggccccatgacccagtgtctagagacattaattctaaccagttgtttgcttttaaatgagtgatttcattttgggaaacaggtttcaaatgaatatatatacatgggtaaaattactctgtgctagtgtagtcttactagagaatgtttatggtcccacttgtatatgaaaatgtggttagaatgttaattggataatgtatatataagaagttaaagtatgtaaagtataacttcagccacatttttagaacactgtttaacatttttgcaaaaccttcttgtaggaaaagagagctctctacatgaagatgacttgttttatatttcagattttattttaaaagccatgtctgttaaacaagaaaaaacacaaaagaactccagattcctggttcatcattctgtattcttactcactttttcaagttatctattttgttgcataaactaattgttaactattcatggaacagcaaacgcctgtttaataaagaactttgaccaaggctataaatgccacgtacattattttcagtattgttggttatatttaaattttccttacaataaagcacacttttataataaaatacatgaattattgtttttcatacttttttgcttgtttctttaaagttttctgacgtgcataatgcataattcattgaaaagcatgatagcaatgtggcatgtggaagcgaacccccagggcataacatagtaagaaagtatggttctgtatggcaataggtttttaaaattattagctattcatcatgtgtgggagaaataattgtggtgtgttgcagatttatttggccatttagaataaccaaatcaatctggctaactaggaatttatgtgtaaaattatctgattaaaacagctcaagtttga

SEQ ID NO: 24351 - DNA, 3468 bp, Homo sapiens
  source 1..3468: mol_type = unassigned DNA
cgcctgccgccccggaggcaggatgagcatcgagatcccggcgggactgacggagctgctgcagggcttcacggtggaggtgctgaggcaccagcccgcggacctgctggagttcgcgctgcagcacttcacccgcctgcagcaggagaacgagcgcaaaggcaccgcgcgcttcggccatgagggcaggacctggggggacctgggcgccgctgccgggggcggcacccccagcaagggggtcaacttcgccgaggaggcggcgcccgcggacgcaggggcgttcaatgctccagtaataaaccgattcacaaggcgtgcctcagtatgtgcagaagcttataatcctgatgaagaagaagatgatgcagagtccaggattatacatccaaaaactgatgatcaaagaaataggttgcaagaggcttgcaaagacatcctgctgtttaagaatctggatccggagcagatgtctcaagtattagatgccatgtttgaaaaattggtcaaagatggggagcatgtaattgatcaaggtgacgatggtgacaacttttatgtaattgatagaggcacatttgatatttatgtgaaatgtgatggtgttggaagatgtgttggtaactatgataatcgtgggagtttcggcgaactggccttaatgtacaatacacccagagcagctacaatcactgctacctctcctggtgctctgtggggtttggacagggtaaccttcaggagaataattgtgaaaaacaatgccaaaaagagaaaaatgtatgaaagctttattgagtcactgccattccttaaatctttggagttttctgaacgcctgaaagtagtagatgtgataggcaccaaagtatacaacgatggagaacaaatcattgctcagggagattcggctgattcttttttcattgtagaatctggagaagtgaaaattactatgaaaagaaagggtaaatcagaagtggaagagaatggtgcagtagaaatcgctcgatgctcgcggggacagtactttggagagcttgccctggtaactaacaaacctcgagcagcttctgcccacgccattgggactgtcaaatgtttagcaatggatgtgcaagcatttgaaaggcttctgggaccttgcatggaaattatgaaaaggaacatcgctacctatgaagaacagttagttgccctgtttggaacgaacatggatattgttgaacccactgcatgaagcaaaagtatggagcaagacctgtagtgacaaaattacacagtagtggttagtccactgagaatgtgtttgtgtagatgccaagcattttctgtgatttcaggttttttcctttttttacatttacaacgtatcaataaacagtagtgatttaatagtcaataggctttaacatcactttctaaagagtagttcataaaaaaatcaacatactgataaaatgactttgtactccacaaaattatgactgaaaggtttattaaaatgattgtaatatatagaaagtatctgtgtttaagaagataattaaaggatgttatcataggctatatgtgttttacttattcagactgataatcatattagtgactatccccatgtaagagggcacttggcaattaaacatgctacacagcatggcatcacttttttttataactcattaaacacagtaaaattttaatcatttttgttttaaagttttctagcttgataagttatgtgctggccttggcctattggtgaaatggtataaaatatcatatgcagttttaaaactttttatatttttgcaataaagtacattttgactttgttggcataatgtcagtaacatacatattccagtggttttatggacaggcaatttagtcattatgataataaggaaaacagtgttttagatgagagatcattaatgcatttttccctcatcaagcatatatctgcttttttttattttgcaattctctgtattctatgtctttaaaaatttgatcttgacatttaatgtcacaaagttttgtttttttaaaaagtgatttaaacttaagatccgacattttttgtattctttaagattttacacctaaaaaatctctcctatcccaaaaataatgtgggatccttatcagcatgcccacagtttatttctttgttcttcactaggcctgcataatacagtcctatgtagacatctgttcccttgggtttccgttctttcttaggatggttgccaacccacaatctcattgatcagcagccaatatgggtttgtttggtttttttaattcttaaaaacatcctctagaggaatagaaacaaatttttatgagcataaccctatataaagacaaaatgaatttctgaccttaccatatataccattaggccttgccattgctttaatgtagactcatagttgaaattagtgcagaaagaactcagatgtactagattttcattgttcattgatatgctcagtatgctgccacataagatgaatttaattatattcaaccaaagcaatatactcttacatgatttctaggccccatgacccagtgtctagagacattaattctaaccagttgtttgcttttaaatgagtgatttcattttgggaaacaggtttcaaatgaatatatatacatgggtaaaattactctgtgctagtgtagtcttactagagaatgtttatggtcccacttgtatatgaaaatgtggttagaatgttaattggataatgtatatataagaagttaaagtatgtaaagtataacttcagccacatttttagaacactgtttaacatttttgcaaaaccttcttgtaggaaaagagagctctctacatgaagatgacttgttttatatttcagattttattttaaaagccatgtctgttaaacaagaaaaaacacaaaagaactccagattcctggttcatcattctgtattcttactcactttttcaagttatctattttgttgcataaactaattgttaactattcatggaacagcaaacgcctgtttaataaagaactttgaccaaggctataaatgccacgtacattattttcagtattgttggttatatttaaattttccttacaataaagcacacttttataataaaatacatgaattattgtttttcatacttttttgcttgtttctttaaagttttctgacgtgcataatgcataattcattgaaaagcatgatagcaatgtggcatgtggaagcgaacccccagggcataacatagtaagaaagtatggttctgtatggcaataggtttttaaaattattagctattcatcatgtgtgggagaaataattgtggtgtgttgcagatttatttggccatttagaataaccaaatcaatctggctaactaggaatttatgtgtaaaattatctgattaaaacagctcaagtttg

SEQ ID NO: 24352 - DNA, 1385 bp, Homo sapiens
  source 1..1385: mol_type = unassigned DNA
agccgccgccaccacacggaggcaggatgagcatcgagatcccggcgggactgacggagctgctgcagggcttcacggtggaggtgctgaggcaccagcccgcggacctgctggagttcgcgctgcagcacttcacccgcctgcagcaggagaacgagcgcaaaggcaccgcgcgcttcggccatgagggcaggacctggggggacctgggcgccgctgccgggggcggcacccccagcaagggggtcaacttcgccgaggagcccatgcagtccgactccgaggacggggaggaggaggaggcggcgcccgcggacgcaggggcgttcaatgctccagtaataaaccgattcacaaggcgtgcctcagtatgtgcagaagcttataatcctgatgaagaagaagatgatgcagagtccaggattatacatccaaaaactgatgatcaaagaaataggttgcaagaggcttgcaaagacatcctgctgtttaagaatctggatccggagcagatgtctcaagtattagatgccatgtttgaaaaattggtcaaagatggggagcatgtaattgatcaaggtgacgatggtgacaacttttatgtaattgatagaggcacatttgatatttatgtgaaatgtgatggtgttggaagatgtgttggtaactatgataatcgtgggagtttcggcgaactggccttaatgtacaatacacccagagcagctacaatcactgctacctctcctggtgctctgtggggtttggacagggtaaccttcaggagaataattgtgaaaaacaatgccaaaaagagaaaaatgtatgaaagctttattgagtcactgccattccttaaatctttggagttttctgaacgcctgaaagtagtagatgtgataggcaccaaagtatacaacgatggagaacaaatcattgctcagggagattcggctgattcttttttcattgtagaatctggagaagtgaaaattactatgaaaagaaagggtaaatcagaagtggaagagaatggtgcagtagaaatcgctcgatgctcgcggggacagtactttggagagcttgccctggtaactaacaaacctcgagcagcttctgcccacgccattgggactgtcaaatgtttagcaatggatgtgcaagcatttgaaaggcttctgggaccttgcatggaaattatgaaaaggaacatcgctacctatgaagaacagttagttgccctgtttggaacgaacatggatattgttgaacccactgcatgaagcaaaagtatggagcaagacctgtagtgacaaaattacacagtagtggttagtccactgagaatgtgtttgtgtagatgccaagcattttctgtgatttca

SEQ ID NO: 24353 - DNA, 1755 bp, Homo sapiens
  source 1..1755: mol_type = unassigned DNA
attcataggaggcacacataaataatgttggtttaattaattaaattaacaaaaggctgcacctgaagttcagacttggtaaagcaggattttacacattaatttgagaagatctggagacccactatgaaaatggagaatatattatcaggcaaggtgcaagaggggacaccttctttatcatcagcaaaggaacggtaaatgtcactcgtgaagactcaccgagtgaagacccagtctttcttagaactttaggaaaaggagactggtttggagagaaagccttgcaggggcatttgggaaatactgatggagaagcaaaacatgtttcttcatggatcttacattctgagggaagatgtgagaacagcaaacgtaattgctgcagaagctgtaacctgccttgtgattgacagagactcttttaaacatttgattggagggctggatgatgtttctaataaagcatatgaagatgcagaagctaaagcaaaatatgaagctgaagcggctttcttcgccaacctgaagctgtctgatttcaacatcattgatacccttggagttggaggtttcggacgagtagaactggtccagttgaaaagtgaagaatccaaaacgtttgcaatgaagattctcaagaaacgtcacattgtggacacaagacagcaggagcacatccgctcagagaagcagatcatgcagggggctcattccgatttcatagtgagactgtacagaacatttaaggacagcaaatatttgtatatgttgatggaagcttgtctaggtggagagctctggaccattctcagggatagaggttcgtttgaagattctacaaccagattttacacagcatgtgtggtagaagcttttgcctatctgcattccaaaggaatcatttacagggacctcaagccagaaaatctcatcctagatcaccgaggttatgccaaactggttgattttggctttgcaaagaaaataggatttggaaagaaaacatggactttttgtgggactccagagtatgtagccccagagatcatcctgaacaaaggccatgacatttcagccgactactggtcactgggaatcctaatgtatgaactcctgactggcagcccacctttctcaggcccagatcctatgaaaacctataacatcatattgagggggattgacatgatagaatttccaaagaagattgccaaaaatgctgctaatttaattaaaaaactatgcagggacaatccatcagaaagattagggaatttgaaaaatggagtaaaagacattcaaaagcacaaatggtttgagggctttaactgggaaggcttaagaaaaggtaccttgacacctcctataataccaagtgttgcatcacccacagacacaagtaattttgacagtttccctgaggacaacgatgaaccaccacctgatgacaactcaggatgggatatagacttctaatgtatttctcttacctgcttctgccttgctgaagacagctttttctgagacacagctgccagcaaacctgagggaaagagagaagattagtgctcggggtcaccatgatgcctttgatcgatgctgctccagtaactacagtggcattaggacttaccgcttagatgacaatagtgctctttacatgttttctgtttgaacctaaaatagcagttgacatggtggtcctgaagcaaagcctttcaccagtaaaagatgttttctattgttgcaatg

SEQ ID NO: 24354 - DNA, 5873 bp, Homo sapiens
  source 1..5873: mol_type = unassigned DNA
ttcataggaggcacacataaataatgttggtttaattaattaaattaacaaaaggctgcactacttggtaaagcaggattttacacattaatttgagaagatctggaggcaagtttttattctgacccactatgaaaatggagaatatattatcaggcaaggtgcaagaggggacaccttctttatcatcagcaaaggaacggtaaatgtcactcgtgaagactcaccgagtgaagacccagtctttcttagaactttaggaaaaggagactggtttggagagaaagccttgcagggggaagatgtgagaacagcaaacgtaattgctgcagaagctgtaacctgccttgtgattgacagagactcttttaaacatttgattggagggctggatgatgtttctaataaagcatatgaagatgcagaagctaaagcaaaatatgaagctgaagcggctttcttcgccaacctgaagctgtctgatttcaacatcattgatacccttggagttggaggtttcggacgagtagaactggtccagttgaaaagtgaagaatccaaaacgtttgcaatgaagattctcaagaaacgtcacattgtggacacaagacagcaggagcacatccgctcagagaagcagatcatgcagggggctcattccgatttcatagtgagactgtacagaacatttaaggacagcaaatatttgtatatgttgatggaagcttgtctaggtggagagctctggaccattctcagggatagaggttcgtttgaagattctacaaccagattttacacagcatgtgtggtagaagcttttgcctatctgcattccaaaggaatcatttacagggacctcaagccagaaaatctcatcctagatcaccgaggttatgccaaactggttgattttggctttgcaaagaaaataggatttggaaagaaaacatggactttttgtgggactccagagtatgtagccccagagatcatcctgaacaaaggccatgacatttcagccgactactggtcactgggaatcctaatgtatgaactcctgactggcagcccacctttctcaggcccagatcctatgaaaacctataacatcatattgagggggattgacatgatagaatttccaaagaagattgccaaaaatgctgctaatttaattaaaaaactatgcagggacaatccatcagaaagattagggaatttgaaaaatggagtaaaagacattcaaaagcacaaatggtttgagggctttaactgggaaggcttaagaaaaggtaccttgacacctcctataataccaagtgttgcatcacccacagacacaagtaattttgacagtttccctgaggacaacgatgaaccaccacctgatgacaactcaggatgggatatagacttctaatgtatttctcttacctgcttctgccttgctgaagacagctttttctgagacacagctgccagcaaacctgagggaaagagagaagattagtgctcggggtcaccatgatgcctttgatcgatgctgctccagtaactacagtggcattaggacttaccgcttagatgacaatagtgctctttacatgttttctgtttgaacctaaaatagcagttgacatggtggtcctgaagcaaagcctttcaccagtaaaagatgttttctattgttgcaatgaccttgctttgctctgattataatttgaaagactgtaggaaacacttcaatgtagtataagagtctgtaccttgctggaatattcaagaagatgaaagaataatatattgggtacaatagattactatggtacagaaactgggctattccctttcttcaagtgaaggctgtgggatctattactgcaggccggtgtatataccatacaaaagaggaccacacatctgttggtcacagagttcatgtcacaccagtgctagaagtttcatgattttatttcccagcagtgctgatgacaagactgaatgttaccttttctttctgacagattttaaaaattgatatgataaaagcacaactgctatagattctgctgagacctctcatagtaggtatatatgagttttcacagaagactgaaaaataatgcatgatatttgtttgttttttttgataaattggcatgacagagtggggaaaaaaagcaattcacaaaaccatttcatattttttaaaatattgtgcttaaagatggtcctggaagtaaatgactagcagccaattggttttacttaacataccctcaaactgaggcttaaagtattcccttttataaaaataaatgcttggggtagggtggagtggggagggattaaaacccatccaaaaaataaataaaaactatataggtgctatgtatatctttcatctgtaaatgtcagtgtctgaacagacaacacaaattcaaatcattatacgtgtagccagaaactcaagcattttcactaaagttattaaaccaaactcctgtccaatttcacttatacaacatagtcagtctagagttgagagacaaaggtaattataaacctatttgaactagcttcttgtcttaggcctgaaccaaaaaacaacaaacaaacaaaaaacaagaatgaaaaacagaaataaaagaagtagaaaagacaaagaaagaaagcccaaagtcaaagttgttaatatttacaggtttaccagatctggaacattacttatttgaggtcagagaacaaaacaagaacctggccaggtgttgattaccttttagtgaataagctgagtccatatacttgtctaactaagaaagcagtacagaggaaaacaggaacctgatttttttaaaataaattttaaataaaatagaattactacaattctgcaatttcatactacctaaaaaagactagatttgaaaatgtcaagctgatttactttattcacatggagaaaagaatccacaaattaaactgagtccttcactggcatgccagttgactattattagctgtcataagtaactcagccatttggaagcatttcctggacaaaattacattatacctgtgaagaaaaatatagaagctttcaagctgtcattctgttttggccctgtgtgaatttggtatattaaattgacgcttgctttttttttcagtagagttttctttttaatcaatcaaacgcctacatttctggaagaaaaagtccaattagatcattacaccttaactaagaaggcaaatcttataaattttgcttgaattgttcttactcaaaactaccttagaatatggtatcttatgaaaatataatattcttaaaattttggaggataaaatgaaaagggtataaacttcaattagaactttaatcctaaaatattgttattcttgtatttttggagttttccgtcccttacaatttctccaaattggtctattccccaagatatccactgttttctacagattttagaatataaaattaaacatatcaacctaaaatctagctatgaatgttatttcaagagttttatatttttaattggctttttaaaaatatgtaattccaatattatagtgaatgttcagtaacttttgttgaaagataatgtggtttaggcttgctaaagaaaggcttgctagaatactaaatttaccttgttatttggaaagagaatctgctcctataacgttttaaaaatccccaaagtcccagagattagcacttgctatggattttggaactatggttcaagtctaagacaaccaatatgaataagttcaatggagaaggaagaagtagcattcagcacaagaaactgtagattgtttctcccacttgttactgcatctttgttcatttcacccatagcattgcatttgatgtctgaagtaattaccacaaaataaaggtaaactacatcttccaagatgtaccaacagaaaacattcgtctaattttgtcaacattgaatttttaggatttaaatcttgtcttaatgaagactctagggctaaaattcatggtcagttccataaaatgcatctcactttatttctgaatttttcacaacccctctattttcttacattaaagaacatctggataagttagaatagtgccaacttgtttgatttgttatatgattttcttgttaatgtgttgagtatgggaaataagggctttctgtgtgtcttgactcacaggaaaactgaaactgccaagggaagcaacattaaaacaactgggatagattgaatacatttgaaaaaataatttctggaaaaacgctatacatgctttttatgtttatatcttctttcttattaagacatgaatcagatccatgtggcattcaaaacaaatttattttggttatattctttacaagtcataatttttacctaaaattgtggaatatgcatgtgaattacacatgtgtagtaataaactcaactattgaatttttcctgtttcatttctaaatgactgaactgatggtaaacaaatttaatgaagtcagctaccatgttgaaaataaggatattagaactgatttcatacaatagaggtgatctgtgcattatccataacaacgttttctttcactataggaccacagacaaatatttatgtaaataggtatttttgtgtgatattttgtggtacatataactttttttagtgtttcacagcattattatttcattttatttgtattgaataatgtttttaggtccaagtagacttgaattaatgtcataattgtcagtattattgaaaattatgtcaactgtactgttattcatctgtcccatagtttagaacatgacctggctatctggcattgttgcaagtgccttaaattcatggcatcctattaaaaaaacaaatttggtgttatgctgcatgacaaagacaaacacacctcaaaatgttgtcctttcttagcttgctgcgttttacagttctttctgctaacaatttataagcctttattatataatattgatgaattacagaaatgatgaagttgttctcttatttctgttaaatgtaccagagctgtgtatctgttaatgagatacagcgtcatttctgtgaaatgtataaatgtatgtgcaggtcaaattaatatatgacattctatcagtctgtatacaggtattcctgttttgctaagctgtgcagattctgtaaaaataaattagtgcagtcaagttctaacatatctcattttatagactccattgacaatggtccaaccgaaaagaaaaattggaaatgactgctaaccagacctcgttatgaaaccaatgatgaaaaagtcacttggtgcacctctcaacaaaacaggatgctttttccgagttcttgtatatgcaaatcatttacgaggcaagttttcaacagacctagaaagcaaaacattgaaagtgtgttgttagccctcctctctgcccctgaatcaacagacagagctctgggaccttggcaatgactcagaggttggggctttctgagtaaagggacatttctttaagcatcatctatcaaatttatttcaatgtatgatgtttttacaactggtcagttcttttgtattcttacagctatggttatttgattgtcctcttacaatttgttctacatgaaagagttctttgttagtcagaatgcaacaaactgtcatcaaatggtcattgaccacttgcactcttttgatgtagattaaaaactttttcataaatttacctgctttgatttgctctgtatttttcctgcagctgtaattgctgagtgcctgttgtatactttatagagttgaaataaaaaaataattacttttgaa

SEQ ID NO: 24355 - DNA, 584 bp, Homo sapiens
  source 1..584: mol_type = unassigned DNA
agttgcatcatcaaagaaggagacgtggggtcactggtgtatgtcatggaagatggtaaggttgaagttacaaaagaaggtgtgaagttgtgtaccatgggtccaggaaaagtgtttggggaattggctattctttacaactgtacccggacagcgaccgtcaagactcttgtaaatgtaaaactctgggccattgatcgacaatgttttcaaacaataatgatgaggacaggactcatcaagcataccgagtatatggaatttttaaaaagcgttccaacattccagagccttcctgaagagatcctcagcaagcttgctgatgtccttgaagagacccactatgaaaatggagaatatattatcaggcaaggtgcaagaggggacaccttctttatcatcagcaaaggaacggtaaatgtcactcgtgaagactcaccgagtgaagacccagtctttcttagaactttaggaaaaggagactggtttggagagaaagccttgcagggctggacttggaatctgtttgaatacgttgtggaataaattccttaatttctaataaatcagtgttatattaattg

SEQ ID NO: 24356 - DNA, 6928 bp, Homo sapiens
  source 1..6928: mol_type = unassigned DNA
gccccgcaagcttccttgggcgcccggcgcgagggactctgagagcccagccgctgcctcggagcccccattcacgtcccctcctcccgctcccccgccaccgcgcctccgactcttctcccccgcgccgcggcgcccaccgcgtctcaggtttaatcccgggttggacctgctggtttgctctccccgctctgagcctcacagccagcccagagaagtggaatctgcactgaaactctgggtggctggagccggcggactgggcatgctcagaagccagggctggctttggtctcaagtaggaagctttggcactcgggaggcagcggcgactttggggaaagttgatcggagaggggaggaagcctcaagacgcggagcagcggcaggaaggagcccccggcagcccggaggagcatgggcaccttgcgggatttacagtacgcgctccaggagaagatcgaggagctgaggcagcgggatgctctcatcgacgagctggagctggagttggatcagaaggacgaactgatccagaagctgcagaacgagctggacaagtaccgctcggtgatccgaccagccacccagcaggcgcagaagcagagcgcgagcaccttgcagggcgagccgcgcaccaagcggcaggcgatctccgccgagcccaccgccttcgacatccaggatctcagccatgtgaccctgcccttctaccccaagagcccacagtccaaggatcttataaaggaagctatccttgacaatgactttatgaagaacttggagctgtcgcagatccaggagattgtggattgtatgtacccggtggagtatggcaaggacagttgcatcatcaaagaaggagacgtggggtcactggtgtatgtcatggaagatggtaaggttgaagttacaaaagaaggtgtgaagttgtgtaccatgggtccaggaaaagtgtttggggaattggctattctttacaactgtacccggacagcgaccgtcaagactcttgtaaatgtaaaactctgggccattgatcgacaatgttttcaaacaataatgatgaggacaggactcatcaagcataccgagtatatggaatttttaaaaagcgttccaacattccagagccttcctgaagagatcctcagcaagcttgctgatgtccttgaagagacccactatgaaaatggagaatatattatcaggcaaggtgcaagaggggacaccttctttatcatcagcaaaggaacggtaaatgtcactcgtgaagactcaccgagtgaagacccagtctttcttagaactttaggaaaaggagactggtttggagagaaagccttgcagggggaagatgtgagaacagcaaacgtaattgctgcagaagctgtaacctgccttgtgattgacagagactcttttaaacatttgattggagggctggatgatgtttctaataaagcatatgaagatgcagaagctaaagcaaaatatgaagctgaagcggctttcttcgccaacctgaagctgtctgatttcaacatcattgatacccttggagttggaggtttcggacgagtagaactggtccagttgaaaagtgaagaatccaaaacgtttgcaatgaagattctcaagaaacgtcacattgtggacacaagacagcaggagcacatccgctcagagaagcagatcatgcagggggctcattccgatttcatagtgagactgtacagaacatttaaggacagcaaatatttgtatatgttgatggaagcttgtctaggtggagagctctggaccattctcagggatagaggttcgtttgaagattctacaaccagattttacacagcatgtgtggtagaagcttttgcctatctgcattccaaaggaatcatttacagggacctcaagccagaaaatctcatcctagatcaccgaggttatgccaaactggttgattttggctttgcaaagaaaataggatttggaaagaaaacatggactttttgtgggactccagagtatgtagccccagagatcatcctgaacaaaggccatgacatttcagccgactactggtcactgggaatcctaatgtatgaactcctgactggcagcccacctttctcaggcccagatcctatgaaaacctataacatcatattgagggggattgacatgatagaatttccaaagaagattgccaaaaatgctgctaatttaattaaaaaactatgcagggacaatccatcagaaagattagggaatttgaaaaatggagtaaaagacattcaaaagcacaaatggtttgagggctttaactgggaaggcttaagaaaaggtaccttgacacctcctataataccaagtgttgcatcacccacagacacaagtaattttgacagtttccctgaggacaacgatgaaccaccacctgatgacaactcaggatgggatatagacttctaatgtatttctcttacctgcttctgccttgctgaagacagctttttctgagacacagctgccagcaaacctgagggaaagagagaagattagtgctcggggtcaccatgatgcctttgatcgatgctgctccagtaactacagtggcattaggacttaccgcttagatgacaatagtgctctttacatgttttctgtttgaacctaaaatagcagttgacatggtggtcctgaagcaaagcctttcaccagtaaaagatgttttctattgttgcaatgaccttgctttgctctgattataatttgaaagactgtaggaaacacttcaatgtagtataagagtctgtaccttgctggaatattcaagaagatgaaagaataatatattgggtacaatagattactatggtacagaaactgggctattccctttcttcaagtgaaggctgtgggatctattactgcaggccggtgtatataccatacaaaagaggaccacacatctgttggtcacagagttcatgtcacaccagtgctagaagtttcatgattttatttcccagcagtgctgatgacaagactgaatgttaccttttctttctgacagattttaaaaattgatatgataaaagcacaactgctatagattctgctgagacctctcatagtaggtatatatgagttttcacagaagactgaaaaataatgcatgatatttgtttgttttttttgataaattggcatgacagagtggggaaaaaaagcaattcacaaaaccatttcatattttttaaaatattgtgcttaaagatggtcctggaagtaaatgactagcagccaattggttttacttaacataccctcaaactgaggcttaaagtattcccttttataaaaataaatgcttggggtagggtggagtggggagggattaaaacccatccaaaaaataaataaaaactatataggtgctatgtatatctttcatctgtaaatgtcagtgtctgaacagacaacacaaattcaaatcattatacgtgtagccagaaactcaagcattttcactaaagttattaaaccaaactcctgtccaatttcacttatacaacatagtcagtctagagttgagagacaaaggtaattataaacctatttgaactagcttcttgtcttaggcctgaaccaaaaaacaacaaacaaacaaaaaacaagaatgaaaaacagaaataaaagaagtagaaaagacaaagaaagaaagcccaaagtcaaagttgttaatatttacaggtttaccagatctggaacattacttatttgaggtcagagaacaaaacaagaacctggccaggtgttgattaccttttagtgaataagctgagtccatatacttgtctaactaagaaagcagtacagaggaaaacaggaacctgatttttttaaaataaattttaaataaaatagaattactacaattctgcaatttcatactacctaaaaaagactagatttgaaaatgtcaagctgatttactttattcacatggagaaaagaatccacaaattaaactgagtccttcactggcatgccagttgactattattagctgtcataagtaactcagccatttggaagcatttcctggacaaaattacattatacctgtgaagaaaaatatagaagctttcaagctgtcattctgttttggccctgtgtgaatttggtatattaaattgacgcttgctttttttttcagtagagttttctttttaatcaatcaaacgcctacatttctggaagaaaaagtccaattagatcattacaccttaactaagaaggcaaatcttataaattttgcttgaattgttcttactcaaaactaccttagaatatggtatcttatgaaaatataatattcttaaaattttggaggataaaatgaaaagggtataaacttcaattagaactttaatcctaaaatattgttattcttgtatttttggagttttccgtcccttacaatttctccaaattggtctattccccaagatatccactgttttctacagattttagaatataaaattaaacatatcaacctaaaatctagctatgaatgttatttcaagagttttatatttttaattggctttttaaaaatatgtaattccaatattatagtgaatgttcagtaacttttgttgaaagataatgtggtttaggcttgctaaagaaaggcttgctagaatactaaatttaccttgttatttggaaagagaatctgctcctataacgttttaaaaatccccaaagtcccagagattagcacttgctatggattttggaactatggttcaagtctaagacaaccaatatgaataagttcaatggagaaggaagaagtagcattcagcacaagaaactgtagattgtttctcccacttgttactgcatctttgttcatttcacccatagcattgcatttgatgtctgaagtaattaccacaaaataaaggtaaactacatcttccaagatgtaccaacagaaaacattcgtctaattttgtcaacattgaatttttaggatttaaatcttgtcttaatgaagactctagggctaaaattcatggtcagttccataaaatgcatctcactttatttctgaatttttcacaacccctctattttcttacattaaagaacatctggataagttagaatagtgccaacttgtttgatttgttatatgattttcttgttaatgtgttgagtatgggaaataagggctttctgtgtgtcttgactcacaggaaaactgaaactgccaagggaagcaacattaaaacaactgggatagattgaatacatttgaaaaaataatttctggaaaaacgctatacatgctttttatgtttatatcttctttcttattaagacatgaatcagatccatgtggcattcaaaacaaatttattttggttatattctttacaagtcataatttttacctaaaattgtggaatatgcatgtgaattacacatgtgtagtaataaactcaactattgaatttttcctgtttcatttctaaatgactgaactgatggtaaacaaatttaatgaagtcagctaccatgttgaaaataaggatattagaactgatttcatacaatagaggtgatctgtgcattatccataacaacgttttctttcactataggaccacagacaaatatttatgtaaataggtatttttgtgtgatattttgtggtacatataactttttttagtgtttcacagcattattatttcattttatttgtattgaataatgtttttaggtccaagtagacttgaattaatgtcataattgtcagtattattgaaaattatgtcaactgtactgttattcatctgtcccatagtttagaacatgacctggctatctggcattgttgcaagtgccttaaattcatggcatcctattaaaaaaacaaatttggtgttatgctgcatgacaaagacaaacacacctcaaaatgttgtcctttcttagcttgctgcgttttacagttctttctgctaacaatttataagcctttattatataatattgatgaattacagaaatgatgaagttgttctcttatttctgttaaatgtaccagagctgtgtatctgttaatgagatacagcgtcatttctgtgaaatgtataaatgtatgtgcaggtcaaattaatatatgacattctatcagtctgtatacaggtattcctgttttgctaagctgtgcagattctgtaaaaataaattagtgcagtcaagttctaacatatctcattttatagactccattgacaatggtccaaccgaaaagaaaaattggaaatgactgctaaccagacctcgttatgaaaccaatgatgaaaaagtcacttggtgcacctctcaacaaaacaggatgctttttccgagttcttgtatatgcaaatcatttacgaggcaagttttcaacagacctagaaagcaaaacattgaaagtgtgttgttagccctcctctctgcccctgaatcaacagacagagctctgggaccttggcaatgactcagaggttggggctttctgagtaaagggacatttctttaagcatcatctatcaaatttatttcaatgtatgatgtttttacaactggtcagttcttttgtattcttacagctatggttatttgattgtcctcttacaatttgttctacatgaaagagttctttgttagtcagaatgcaacaaactgtcatcaaatggtcattgaccacttgcactcttttgatgtagattaaaaactttttcataaatttacctgctttgatttgctctgtatttttcctgcagctgtaattgctgagtgcctgttgtatactttatagagttgaaataaaaaaataattacttttgaa

SEQ ID NO: 24357 - DNA, 6487 bp, Homo sapiens
  source 1..6487: mol_type = unassigned DNA
gcggaggggctcagtgaaaaaatgagcgagctagaggaagactttgccaagattctcatgctcaaggaggagaggatcaaagagctggagaagcggctgtcagagaaggaggaagaaattcaggagctgaagaggaaactccacaaatgccagtcggtgctcccagtgccctcgacccacatcggcccccggaccacccgggcgcagggcatctcggccgagccgcagacgtacaggtccttccacgacctccgacaggcattccggaagttcaccaagtccgaaaggtccaaggatcttataaaggaagctatccttgacaatgactttatgaagaacttggagctgtcgcagatccaggagattgtggattgtatgtacccggtggagtatggcaaggacagttgcatcatcaaagaaggagacgtggggtcactggtgtatgtcatggaagatggtaaggttgaagttacaaaagaaggtgtgaagttgtgtaccatgggtccaggaaaagtgtttggggaattggctattctttacaactgtacccggacagcgaccgtcaagactcttgtaaatgtaaaactctgggccattgatcgacaatgttttcaaacaataatgatgaggacaggactcatcaagcataccgagtatatggaatttttaaaaagcgttccaacattccagagccttcctgaagagatcctcagcaagcttgctgatgtccttgaagagacccactatgaaaatggagaatatattatcaggcaaggtgcaagaggggacaccttctttatcatcagcaaaggaacggtaaatgtcactcgtgaagactcaccgagtgaagacccagtctttcttagaactttaggaaaaggagactggtttggagagaaagccttgcagggggaagatgtgagaacagcaaacgtaattgctgcagaagctgtaacctgccttgtgattgacagagactcttttaaacatttgattggagggctggatgatgtttctaataaagcatatgaagatgcagaagctaaagcaaaatatgaagctgaagcggctttcttcgccaacctgaagctgtctgatttcaacatcattgatacccttggagttggaggtttcggacgagtagaactggtccagttgaaaagtgaagaatccaaaacgtttgcaatgaagattctcaagaaacgtcacattgtggacacaagacagcaggagcacatccgctcagagaagcagatcatgcagggggctcattccgatttcatagtgagactgtacagaacatttaaggacagcaaatatttgtatatgttgatggaagcttgtctaggtggagagctctggaccattctcagggatagaggttcgtttgaagattctacaaccagattttacacagcatgtgtggtagaagcttttgcctatctgcattccaaaggaatcatttacagggacctcaagccagaaaatctcatcctagatcaccgaggttatgccaaactggttgattttggctttgcaaagaaaataggatttggaaagaaaacatggactttttgtgggactccagagtatgtagccccagagatcatcctgaacaaaggccatgacatttcagccgactactggtcactgggaatcctaatgtatgaactcctgactggcagcccacctttctcaggcccagatcctatgaaaacctataacatcatattgagggggattgacatgatagaatttccaaagaagattgccaaaaatgctgctaatttaattaaaaaactatgcagggacaatccatcagaaagattagggaatttgaaaaatggagtaaaagacattcaaaagcacaaatggtttgagggctttaactgggaaggcttaagaaaaggtaccttgacacctcctataataccaagtgttgcatcacccacagacacaagtaattttgacagtttccctgaggacaacgatgaaccaccacctgatgacaactcaggatgggatatagacttctaatgtatttctcttacctgcttctgccttgctgaagacagctttttctgagacacagctgccagcaaacctgagggaaagagagaagattagtgctcggggtcaccatgatgcctttgatcgatgctgctccagtaactacagtggcattaggacttaccgcttagatgacaatagtgctctttacatgttttctgtttgaacctaaaatagcagttgacatggtggtcctgaagcaaagcctttcaccagtaaaagatgttttctattgttgcaatgaccttgctttgctctgattataatttgaaagactgtaggaaacacttcaatgtagtataagagtctgtaccttgctggaatattcaagaagatgaaagaataatatattgggtacaatagattactatggtacagaaactgggctattccctttcttcaagtgaaggctgtgggatctattactgcaggccggtgtatataccatacaaaagaggaccacacatctgttggtcacagagttcatgtcacaccagtgctagaagtttcatgattttatttcccagcagtgctgatgacaagactgaatgttaccttttctttctgacagattttaaaaattgatatgataaaagcacaactgctatagattctgctgagacctctcatagtaggtatatatgagttttcacagaagactgaaaaataatgcatgatatttgtttgttttttttgataaattggcatgacagagtggggaaaaaaagcaattcacaaaaccatttcatattttttaaaatattgtgcttaaagatggtcctggaagtaaatgactagcagccaattggttttacttaacataccctcaaactgaggcttaaagtattcccttttataaaaataaatgcttggggtagggtggagtggggagggattaaaacccatccaaaaaataaataaaaactatataggtgctatgtatatctttcatctgtaaatgtcagtgtctgaacagacaacacaaattcaaatcattatacgtgtagccagaaactcaagcattttcactaaagttattaaaccaaactcctgtccaatttcacttatacaacatagtcagtctagagttgagagacaaaggtaattataaacctatttgaactagcttcttgtcttaggcctgaaccaaaaaacaacaaacaaacaaaaaacaagaatgaaaaacagaaataaaagaagtagaaaagacaaagaaagaaagcccaaagtcaaagttgttaatatttacaggtttaccagatctggaacattacttatttgaggtcagagaacaaaacaagaacctggccaggtgttgattaccttttagtgaataagctgagtccatatacttgtctaactaagaaagcagtacagaggaaaacaggaacctgatttttttaaaataaattttaaataaaatagaattactacaattctgcaatttcatactacctaaaaaagactagatttgaaaatgtcaagctgatttactttattcacatggagaaaagaatccacaaattaaactgagtccttcactggcatgccagttgactattattagctgtcataagtaactcagccatttggaagcatttcctggacaaaattacattatacctgtgaagaaaaatatagaagctttcaagctgtcattctgttttggccctgtgtgaatttggtatattaaattgacgcttgctttttttttcagtagagttttctttttaatcaatcaaacgcctacatttctggaagaaaaagtccaattagatcattacaccttaactaagaaggcaaatcttataaattttgcttgaattgttcttactcaaaactaccttagaatatggtatcttatgaaaatataatattcttaaaattttggaggataaaatgaaaagggtataaacttcaattagaactttaatcctaaaatattgttattcttgtatttttggagttttccgtcccttacaatttctccaaattggtctattccccaagatatccactgttttctacagattttagaatataaaattaaacatatcaacctaaaatctagctatgaatgttatttcaagagttttatatttttaattggctttttaaaaatatgtaattccaatattatagtgaatgttcagtaacttttgttgaaagataatgtggtttaggcttgctaaagaaaggcttgctagaatactaaatttaccttgttatttggaaagagaatctgctcctataacgttttaaaaatccccaaagtcccagagattagcacttgctatggattttggaactatggttcaagtctaagacaaccaatatgaataagttcaatggagaaggaagaagtagcattcagcacaagaaactgtagattgtttctcccacttgttactgcatctttgttcatttcacccatagcattgcatttgatgtctgaagtaattaccacaaaataaaggtaaactacatcttccaagatgtaccaacagaaaacattcgtctaattttgtcaacattgaatttttaggatttaaatcttgtcttaatgaagactctagggctaaaattcatggtcagttccataaaatgcatctcactttatttctgaatttttcacaacccctctattttcttacattaaagaacatctggataagttagaatagtgccaacttgtttgatttgttatatgattttcttgttaatgtgttgagtatgggaaataagggctttctgtgtgtcttgactcacaggaaaactgaaactgccaagggaagcaacattaaaacaactgggatagattgaatacatttgaaaaaataatttctggaaaaacgctatacatgctttttatgtttatatcttctttcttattaagacatgaatcagatccatgtggcattcaaaacaaatttattttggttatattctttacaagtcataatttttacctaaaattgtggaatatgcatgtgaattacacatgtgtagtaataaactcaactattgaatttttcctgtttcatttctaaatgactgaactgatggtaaacaaatttaatgaagtcagctaccatgttgaaaataaggatattagaactgatttcatacaatagaggtgatctgtgcattatccataacaacgttttctttcactataggaccacagacaaatatttatgtaaataggtatttttgtgtgatattttgtggtacatataactttttttagtgtttcacagcattattatttcattttatttgtattgaataatgtttttaggtccaagtagacttgaattaatgtcataattgtcagtattattgaaaattatgtcaactgtactgttattcatctgtcccatagtttagaacatgacctggctatctggcattgttgcaagtgccttaaattcatggcatcctattaaaaaaacaaatttggtgttatgctgcatgacaaagacaaacacacctcaaaatgttgtcctttcttagcttgctgcgttttacagttctttctgctaacaatttataagcctttattatataatattgatgaattacagaaatgatgaagttgttctcttatttctgttaaatgtaccagagctgtgtatctgttaatgagatacagcgtcatttctgtgaaatgtataaatgtatgtgcaggtcaaattaatatatgacattctatcagtctgtatacaggtattcctgttttgctaagctgtgcagattctgtaaaaataaattagtgcagtcaagttctaacatatctcattttatagactccattgacaatggtccaaccgaaaagaaaaattggaaatgactgctaaccagacctcgttatgaaaccaatgatgaaaaagtcacttggtgcacctctcaacaaaacaggatgctttttccgagttcttgtatatgcaaatcatttacgaggcaagttttcaacagacctagaaagcaaaacattgaaagtgtgttgttagccctcctctctgcccctgaatcaacagacagagctctgggaccttggcaatgactcagaggttggggctttctgagtaaagggacatttctttaagcatcatctatcaaatttatttcaatgtatgatgtttttacaactggtcagttcttttgtattcttacagctatggttatttgattgtcctcttacaatttgttctacatgaaagagttctttgttagtcagaatgcaacaaactgtcatcaaatggtcattgaccacttgcactcttttgatgtagattaaaaactttttcataaatttacctgctttgatttgctctgtatttttcctgcagctgtaattgctgagtgcctgttgtatactttatagagttgaaataaaaaaataattacttttgaa

SEQ ID NO: 24358 - DNA, 3824 bp, Homo sapiens
  source 1..3824: mol_type = unassigned DNA
attcagcagaagcggatcgaagcaggaggctccccgcgccgcattaggggcgcactccgccgcgctcgagtacttagcgcccattcactcgctcacccgcgctctccgctgccggctgccgtcccagccgccgccgccgccgccgccgccgccgccgcccgagaaaaagtttcgcggaggggctcagtgaaaaaatgagcgagctagaggaagactttgccaagattctcatgctcaaggaggagaggatcaaagagctggagaagcggctgtcagagaaggaggaagaaattcaggagctgaagaggaaactccacaaatgccagtcggtgctcccagtgccctcgacccacatcggcccccggaccacccgggcgcagggcatctcggccgagccgcagacgtacaggtccttccacgacctccgacaggcattccggaagttcaccaagtccgaaaggtccaaggatcttataaaggaagctatccttgacaatgactttatgaagaacttggagctgtcgcagatccaggagattgtggattgtatgtacccggtggagtatggcaaggacagttgcatcatcaaagaaggagacgtggggtcactggtgtatgtcatggaagatggtaaggttgaagttacaaaagaaggtgtgaagttgtgtaccatgggtccaggaaaagtgtttggggaattggctattctttacaactgtacccggacagcgaccgtcaagactcttgtaaatgtaaaactctgggccattgatcgacaatgttttcaaacaataatgatgaggacaggactcatcaagcataccgagtatatggaatttttaaaaagcgttccaacattccagagccttcctgaagagatcctcagcaagcttgctgatgtccttgaagagacccactatgaaaatggagaatatattatcaggcaaggtgcaagaggggacaccttctttatcatcagcaaaggaacggtaaatgtcactcgtgaagactcaccgagtgaagacccagtctttcttagaactttaggaaaaggagactggtttggagagaaagccttgcagggggaagatgtgagaacagcaaacgtaattgctgcagaagctgtaacctgccttgtgattgacagagactcttttaaacatttgattggagggctggatgatgtttctaataaagcatatgaagatgcagaagctaaagcaaaatatgaagctgaagcggctttcttcgccaacctgaagctgtctgatttcaacatcattgatacccttggagttggaggtttcggacgagtagaactggtccagttgaaaagtgaagaatccaaaacgtttgcaatgaagattctcaagaaacgtcacattgtggacacaagacagcaggagcacatccgctcagagaagcagatcatgcagggggctcattccgatttcatagtgagactgtacagaacatttaaggacagcaaatatttgtatatgttgatggaagcttgtctaggtggagagctctggaccattctcagggatagaggttcgtttgaagattctacaaccagattttacacagcatgtgtggtagaagcttttgcctatctgcattccaaaggaatcatttacagggacctcaagccagaaaatctcatcctagatcaccgaggttatgccaaactggttgattttggctttgcaaagaaaataggatttggaaagaaaacatggactttttgtgggactccagagtatgtagccccagagatcatcctgaacaaaggccatgacatttcagccgactactggtcactgggaatcctaatgtatgaactcctgactggcagcccacctttctcaggcccagatcctatgaaaacctataacatcatattgagggggattgacatgatagaatttccaaagaagattgccaaaaatgctgctaatttaattaaaaaactatgcagggacaatccatcagaaagattagggaatttgaaaaatggagtaaaagacattcaaaagcacaaatggtttgagggctttaactgggaaggcttaagaaaaggtaccttgacacctcctataataccaagtgttgcatcacccacagacacaagtaattttgacagtttccctgaggacaacgatgaaccaccacctgatgacaactcaggatgggatatagacttctaatgtatttctcttacctgcttctgccttgctgaagacagctttttctgagacacagctgccagcaaacctgagggaaagagagaagattagtgctcggggtcaccatgatgcctttgatcgatgctgctccagtaactacagtggcattaggacttaccgcttagatgacaatagtgctctttacatgttttctgtttgaacctaaaatagcagttgacatggtggtcctgaagcaaagcctttcaccagtaaaagatgttttctattgttgcaatgaccttgctttgctctgattataatttgaaagactgtaggaaacacttcaatgtagtataagagtctgtaccttgctggaatattcaagaagatgaaagaataatatattgggtacaatagattactatggtacagaaactgggctattccctttcttcaagtgaaggctgtgggatctattactgcaggccggtgtatataccatacaaaagaggaccacacatctgttggtcacagagttcatgtcacaccagtgctagaagtttcatgattttatttcccagcagtgctgatgacaagactgaatgttaccttttctttctgacagattttaaaaattgatatgataaaagcacaactgctatagattctgctgagacctctcatagtaggtatatatgagttttcacagaagactgaaaaataatgcatgatatttgtttgttttttttgataaattggcatgacagagtggggaaaaaaagcaattcacaaaaccatttcatattttttaaaatattgtgcttaaagatggtcctggaagtaaatgactagcagccaattggttttacttaacataccctcaaactgaggcttaaagtattcccttttataaaaataaatgcttggggtagggtggagtggggagggattaaaacccatccaaaaaataaataaaaactatataggtgctatgtatatctttcatctgtaaatgtcagtgtctgaacagacaacacaaattcaaatcattatacgtgtagccagaaactcaagcattttcactaaagttattaaaccaaactcctgtccaatttcacttatacaacatagtcagtctagagttgagagacaaaggtaattataaacctatttgaactagcttcttgtcttaggcctgaaccaaaaaacaacaaacaaacaaaaaacaagaatgaaaaacagaaataaaagaagtagaaaagacaaagaaagaaagcccaaagtcaaagttgttaatatttacaggtttaccagatctggaacattacttatttgaggtcagagaacaaaacaagaacctggccaggtgttgattaccttttagtgaataagctgagtccatatacttgtctaactaagaaagcagtacagaggaaaacaggaacctgatttttttaaaataaattttaaataaaatagaattactacaattctgcaatttcatactacctaaaaaagactagatttgaaaatgtcaagctgatttactttattcacatggagaaaagaatccacaaattaaactgagtccttcactggcatgccagttgactattattagctgtcataagtaac

SEQ ID NO: 24359 - DNA, 3328 bp, Homo sapiens
  source 1..3328: mol_type = unassigned DNA
ggtccctgagcaaaatgggaaatggttcagtgaaacctaaacattctaagcacccagatggacactctgggaacctcaccactgatgctctgcggaacaaggtgacagagctggagagagagttgaggaggaaggatgctgagatccaggagcgggagtaccatttgaaggagctgcgggagcagctgtcgaagcagactgtggccattgctgaactcacagaggagctccagaacaagtgcatccagctgaacaagctgcaggatgtggtgcatatgcagggaggaagcccgcttcaggcctctccagataaagtgcctcttgaggtccaccggaagacctctggattggtctctctccatagcaggaggggagcaaaggctggcgtgtctgctgagccaacaacccggacctatgacctgaacaaaccccctgaattttcctttgagaaagcaagagtcagaaaagactccagtgagaagaagctcattacagatgcccttaataaaaatcagtttctgaaaagactggatcctcagcagatcaaagacatggtggaatgcatgtatgggagaaactatcagcaagggagttacattattaagcaaggagaaccaggaaaccatatctttgtgctggcagagggtcgactagaggtgttccaaggggagaaattgctgtcctccatccctatgtggaccacatttggggagcttgccattttatacaattgtacaaggactgcctctgtgaaagctattaccaatgttaaaacatgggcactagatcgagaggtattccagaatataatgaggaggacagcccaagctagagatgaacaatacagaaacttcctcagaagtgtatccttgctgaagaatttacctgaagataaattaaccaagatcattgactgcttggaagtggaatactatgacaaaggagattacatcattagagagggcgaggaaggaagtacctttttcattttggcaaaaggaaaggtaaaagtaacacagagcacagaaggccatgatcaaccacagctgataaaaacactgcagaaaggagaatactttggagaaaaagctcttatcagtgatgatgtcaggtcagctaacattattgctgaagaaaatgatgttgcatgcctggttatagatcgagaaacattcaaccaaactgtcggtacatttgaagagctgcaaaaataccttgaaggatatgtggcaaacctgaaccgtgatgatgaaaaaagacatgcgaagcggtccatgtctaactggaagctgtccaaagcactctctctggaaatgattcagctgaaggagaaggtggccagattttcctcatcatccccattccagaaccttgagattattgcaacactgggcgttggtgggttcggaagagttgagcttgttaaagtaaaaaatgagaatgttgcttttgctatgaagtgtataaggaagaagcacatagttgacaccaagcagcaggagcatgtctactcagagaagaggatcctagaggagctgtgctctccattcattgtgaaattatatcgtactttcaaggacaataagtatgtatacatgcttctggaggcctgcttaggtggggagctctggagtatattaagggacagaggcagctttgatgaacccacctccaaattctgcgttgcttgtgtgacagaagcatttgattacctgcatcgactaggtattatctacagagacttgaaaccagaaaacttaattctagatgctgagggttaccttaaattggttgactttggatttgcgaagaaaatagggtctggacagaaaacatggacattctgtgggactccagaatatgtagctcctgaagtcattctcaacaagggacatgacttcagtgtggatttctggtcactgggaattctagtgtatgagctcctaacgggcaacccacccttttctggggttgaccaaatgatgacctacaatttgattctcaaaggaattgaaaaaatggattttcccaggaagataacacgacgacctgaggatttgattcggaggctttgcaggcaaaatccaacagaaaggctgggaaatctgaagaatggaataaatgacattaagaaacacaggtggttaaatggttttaattgggagggactgaaagcacggagccttccatcacctttgcaaagagagctcaagggacccatagatcacagctactttgacaaatatcctcctgaaaagggaatgcctccagatgagctatcaggctgggataaagacttctgacagaagaaaagttgattactgcctgtactctacagaagaggacctcaaggatcaataatccaacacattattttcttttcagagtattataatatctttggaagaccattagggaaaagaaattcctgcacaatgggaagaggagaatggtgtggatatggttctgagttatagtgtcttatttagatgctgtgaattattgatgtattacattatttgcttttctcaactgctagaggctaccccattttcctttccacaatcagagccatttttgttaaagtggcagttttttctgcaatctattgttccattccaatcatatccttctcgtttgagtactactaacgtttaaaaagggtcttgcccttgaataactaagtcatacaaatagaaggaaaaacaatggtgaattttggagagctccccagctctcagcaacttcatataagcatggtggtatcttaaaatggtggtttgcagaaaccatggtagccaacagaacctcctgactttcacctgcttttaacctgaaaatatattaatacgcctctgacatgagtccagggagaggcaagattgagcaatagtcagtggcaccatttcctaaagtaactgaatcaatcaatccagtcaggtaattattttctattggggaacttagaaaaaaaagtaaagcaagaaatattttctctcctttatgatcagtgataccttagagacttttcgaaagtccttgttaaagatagttacaatgtgtggttaaatgatgctaaaatattttcacaaccagagtagaaaacgtgctggaacaaaattgcgaaggcttttgcctcccagtaaatagaaaggaaaatatattctagtaggtaagactgctgactctttgaaaatctgaggtattttgaaaaattctgtgatagttgctattaataaaccaaaattgtatagaatcatcgttaatttttaatataaatcccattgacaaatgttgatgcactgtagtcactgctgagttaatagcg

SEQ ID NO: 24360 - DNA, 3431 bp, Homo sapiens
  source 1..3431: mol_type = unassigned DNA
aggcggctggggagggcggcgtgggagaggacgctgagacgcaggggcggccgcgccgaggtgacaagctgcgcacctggaaagttacccggctgtctggtgaggtccctgagcaaaatgggaaatggttcagtgaaacctaaacattctaagcacccagatggacactctgggaacctcaccactgatgctctgcggaacaaggtgacagagctggagagagagttgaggaggaaggatgctgagatccaggagcgggagtaccatttgaaggagctgcgggagcagctgtcgaagcagactgtggccattgctgaactcacagaggagctccagaacaagtgcatccagctgaacaagctgcaggatgtggtgcatatgcagggaggaagcccgcttcaggcctctccagataaagtgcctcttgaggtccaccggaagacctctggattggtctctctccatagcaggaggggagcaaaggctggcgtgtctgctgagccaacaacccggacctatgacctgaacaaaccccctgaattttcctttgagaaagcaagagtcagaaaagactccagtgagaagaagctcattacagatgcccttaataaaaatcagtttctgaaaagactggatcctcagcagatcaaagacatggtggaatgcatgtatgggagaaactatcagcaagggagttacattattaagcaaggagaaccaggaaaccatatctttgtgctggcagagggtcgactagaggtgttccaaggggagaaattgctgtcctccatccctatgtggaccacatttggggagcttgccattttatacaattgtacaaggactgcctctgtgaaagctattaccaatgttaaaacatgggcactagatcgagaggtattccagaatataatgaggaggacagcccaagctagagatgaacaatacagaaacttcctcagaagtgtatccttgctgaagaatttacctgaagataaattaaccaagatcattgactgcttggaagtggaatactatgacaaaggagattacatcattagagagggcgaggaaggaagtacctttttcattttggcaaaaggaaaggtaaaagtaacacagagcacagaaggccatgatcaaccacagctgataaaaacactgcagaaaggagaatactttggagaaaaagctcttatcagtgatgatgtcaggtcagctaacattattgctgaagaaaatgatgttgcatgcctggttatagatcgagaaacattcaaccaaactgtcggtacatttgaagagctgcaaaaataccttgaaggatatgtggcaaacctgaaccgtgatgatgaaaaaagacatgcgaagcggtccatgtctaactggaagctgtccaaagcactctctctggaaatgattcagctgaaggagaaggtggccagattttcctcatcatccccattccagaaccttgagattattgcaacactgggcgttggtgggttcggaagagttgagcttgttaaagtaaaaaatgagaatgttgcttttgctatgaagtgtataaggaagaagcacatagttgacaccaagcagcaggagcatgtctactcagagaagaggatcctagaggagctgtgctctccattcattgtgaaattatatcgtactttcaaggacaataagtatgtatacatgcttctggaggcctgcttaggtggggagctctggagtatattaagggacagaggcagctttgatgaacccacctccaaattctgcgttgcttgtgtgacagaagcatttgattacctgcatcgactaggtattatctacagagacttgaaaccagaaaacttaattctagatgctgagggttaccttaaattggttgactttggatttgcgaagaaaatagggtctggacagaaaacatggacattctgtgggactccagaatatgtagctcctgaagtcattctcaacaagggacatgacttcagtgtggatttctggtcactgggaattctagtgtatgagctcctaacgggcaacccacccttttctggggttgaccaaatgatgacctacaatttgattctcaaaggaattgaaaaaatggattttcccaggaagataacacgacgacctgaggatttgattcggaggctttgcaggcaaaatccaacagaaaggctgggaaatctgaagaatggaataaatgacattaagaaacacaggtggttaaatggttttaattgggagggactgaaagcacggagccttccatcacctttgcaaagagagctcaagggacccatagatcacagctactttgacaaatatcctcctgaaaagggaatgcctccagatgagctatcaggctgggataaagacttctgacagaagaaaagttgattactgcctgtactctacagaagaggacctcaaggatcaataatccaacacattattttcttttcagagtattataatatctttggaagaccattagggaaaagaaattcctgcacaatgggaagaggagaatggtgtggatatggttctgagttatagtgtcttatttagatgctgtgaattattgatgtattacattatttgcttttctcaactgctagaggctaccccattttcctttccacaatcagagccatttttgttaaagtggcagttttttctgcaatctattgttccattccaatcatatccttctcgtttgagtactactaacgtttaaaaagggtcttgcccttgaataactaagtcatacaaatagaaggaaaaacaatggtgaattttggagagctccccagctctcagcaacttcatataagcatggtggtatcttaaaatggtggtttgcagaaaccatggtagccaacagaacctcctgactttcacctgcttttaacctgaaaatatattaatacgcctctgacatgagtccagggagaggcaagattgagcaatagtcagtggcaccatttcctaaagtaactgaatcaatcaatccagtcaggtaattattttctattggggaacttagaaaaaaaagtaaagcaagaaatattttctctcctttatgatcagtgataccttagagacttttcgaaagtccttgttaaagatagttacaatgtgtggttaaatgatgctaaaatattttcacaaccagagtagaaaacgtgctggaacaaaattgcgaaggcttttgcctcccagtaaatagaaaggaaaatatattctagtaggtaagactgctgactctttgaaaatctgaggtattttgaaaaattctgtgatagttgctattaataaaccaaaattgtatagaatcatcgttaatttttaatataaatcccattgacaaatgttgatgcactgtagtcactgctgagttaatagcg

SEQ ID NO: 24361 - DNA, 2623 bp, Homo sapiens
  source 1..2623: mol_type = unassigned DNA
gagctgacctgcgctgggctccggcgccgcaggcggctggggagggcggcgtgggagaggacgctgagacgcaggggcggccgcgccgaggtgacaagctgcgcacctggaaagttacccggctgtctggtccctgagcaaaatgggaaatggttcagtgaaacctaaacattctaagcacccagatggacactctgggaacctcaccactgatgctctgcggaacaaggtgacagagctggagagagagttgaggaggaaggatgctgagatccaggagcgggagtaccatttgaaggagctgcgggagcagctgtcgaagcagactgtggccattgctgaactcacagaggagctccagaacaagtgcatccagctgaacaagctgcaggatgtggtgcatatgcagggaggaagcccgcttcaggcctctccagataaagtgcctcttgaggtccaccggaagacctctggattggtctctctccatagcaggaggggagcaaaggctggcgtgtctgctgagccaacaacccggacctatgacctgaacaaaccccctgaattttcctttgagaaagcaagagtcagaaaagactccagtgagaagaagctcattacagatgcccttaataaaaatcagtttctgaaaagactggatcctcagcagatcaaagacatggtggaatgcatgtatgggagaaactatcagcaagggagttacattattaagcaaggagaaccaggaaaccatatctttgtgctggcagagggtcgactagaggtgttccaaggggagaaattgctgtcctccatccctatgtggaccacatttggggagcttgccattttatacaattgtacaaggactgcctctgtgaaagctattaccaatgttaaaacatgggcactagatcgagaggtattccagaatataatgaggaggacagcccaagctagagatgaacaatacagaaacttcctcagaagtgtatccttgctgaagaatttacctgaagataaattaaccaagatcattgactgcttggaagtggaatactatgacaaaggagattacatcattagagagggcgaggaaggaagtacctttttcattttggcaaaaggaaaggtaaaagtaacacagagcacagaaggccatgatcaaccacagctgataaaaacactgcagaaaggagaatactttggagaaaaagctcttatcagtgatgatgtcaggtcagctaacattattgctgaagaaaatgatgttgcatgcctggttatagatcgagaaacattcaaccaaactgtcggtacatttgaagagctgcaaaaataccttgaaggatatgtggcaaacctgaaccgtgatgatgaaaaaagacatgcgaagcggtccatgtctaactggaagctgtccaaagcactctctctggaaatgattcagctgaaggagaaggttaaagtaaaaaatgagaatgttgcttttgctatgaagtgtataaggaagaagcacatagttgacaccaagcagcaggagcatgtctactcagagaagaggatcctagaggagctgtgctctccattcattgtgaaattatatcgtactttcaaggacaataagtatgtatacatgcttctggaggcctgcttaggtggggagctctggagtatattaagggacagaggcagctttgatgaacccacctccaaattctgcgttgcttgtgtgacagaagcatttgattacctgcatcgactaggtattatctacagagacttgaaaccagaaaacttaattctagatgctgagggttaccttaaattggttgactttggatttgcgaagaaaatagggtctggacagaaaacatggacattctgtgggactccagaatatgtagctcctgaagtcattctcaacaagggacatgacttcagtgtggatttctggtcactgggaattctagtgtatgagctcctaacgggcaacccacccttttctggggttgaccaaatgatgacctacaatttgattctcaaaggaattgaaaaaatggattttcccaggaagataacacgacgacctgaggatttgattcggaggctttgcaggcaaaatccaacagaaaggctgggaaatctgaagaatggaataaatgacattaagaaacacaggtggttaaatggttttaattgggagggactgaaagcacggagccttccatcacctttgcaaagagagctcaagggacccatagatcacagctactttgacaaatatcctcctgaaaagggaatgcctccagatgagctatcaggctgggataaagacttctgacagaagaaaagttgattactgcctgtactctacagaagaggacctcaaggatcaataatccaacacattattttcttttcagagtattataatatctttggaagaccattagggaaaagaaattcctgcacaatgggaagaggagaatggtgtggatatggttctgagttatagtgtcttatttagatgctgtgaattattgatgtattacattatttgcttttctcaactgctagaggctaccccattttcctttccacaatcagagccatttttgtt

SEQ ID NO: 24362 - DNA, 1729 bp, Homo sapiens
  source 1..1729: mol_type = unassigned DNA
catcccaacaggaatactatgacaaaggagattacatcattagagagggcgaggaaggaagtacctttttcattttggcaaaaggaaaggtcctccactttggacagataaaggagcttctaccagtagagtcccatgcaattctgtttgaacactggctttggagtggaggccacaggaccccctaagaaataataacttcttagtgatgttatgtaaaagtaacacagagcacagaaggccatgatcaaccacagctgataaaaacactgcagaaaggagaatactttggagaaaaagctcttatcagtgatgatgtcaggtcagctaacattattgctgaagaaaatgatgttgcatgcctggttatagatcgagaaacattcaaccaaactgtcggtacatttgaagagctgcaaaaataccttgaaggatatgtggcaaacctgaaccgtgatgatgaaaaaagacatgcgaagcggtccatgtctaactggaagctgtccaaagcactctctctggaaatgattcagctgaaggagaaggtggccagattttcctcatcatccccattccagaaccttgagattattgcaacactgggcgttggtgggttcggaagagttgagcttgttaaagtaaaaaatgagaatgttgcttttgctatgaagtgtataaggaagaagcacatagttgacaccaagcagcaggagcatgtctactcagagaagaggatcctagaggagctgtgctctccattcattgtgaaattatatcgtactttcaaggacaataagtatgtatacatgcttctggaggcctgcttaggtggggagctctggagtatattaagggacagaggcagctttgatgaacccacctccaaattctgcgttgcttgtgtgacagaagcatttgattacctgcatcgactaggtattatctacagagacttgaaaccagaaaacttaattctagatgctgagggttaccttaaattggttgactttggatttgcgaagaaaatagggtctggacagaaaacatggacattctgtgggactccagaatatgtagctcctgaagtcattctcaacaagggacatgacttcagtgtggatttctggtcactgggaattctagtgtatgagctcctaacgggcaacccacccttttctggggttgaccaaatgatgacctacaatttgattctcaaaggaattgaaaaaatggattttcccaggaagataacacgacgacctgaggatttgattcggaggctttgcaggcaaaatccaacagaaaggctgggaaatctgaagaatggaataaatgacattaagaaacacaggtggttaaatggttttaattgggagggactgaaagcacggagccttccatcacctttgcaaagagagctcaagggacccatagatcacagctactttgacaaatatcctcctgaaaagggaatgcctccagatgagctatcaggctgggataaagacttctgacagaagaaaagttgattactgcctgtactctacagaagaggacctcaaggatcaataatccaacacattattttcttttcagagtattataatatctttggaagaccattagggaaaagaaattcctgcacaatgggaagaggagaatggtgtggatatggttctgagttatagtgtcttatttagatgctgtgaattattgatgtattacatta

SEQ ID NO: 24363 - DNA, 1826 bp, Homo sapiens
  source 1..1826: mol_type = unassigned DNA
gcgagggggcgtagccggagctacggcaccaaggctccgcccccaccctgcctgccccctcgctggagcaacgcaagcaggaggcgggggagtcggaggaggtggcggcgctggagctcctcccggggaccagcgacccggggagcgagcacgtcgctccgcaccgctcttcctccagccgctgagccgtcccttctcgccatgtcccagagcaggcaccgcgccgaggccccgccgctggagcgcgaggacagtgggaccttcagtttggggaagatgataacagctaagccagggaaaacaccgattcaggtattacacgaatacggcatgaagaccaagaacatcccagtttatgaatgtgaaagatctgatgtgcaaatacacgtgcccactttcaccttcagagtaaccgttggtgacataacctgcacaggtgaaggtacaagtaagaagctggcgaaacatagagctgcagaggctgccataaacattttgaaagccaatgcaagtatttgctttgcagttcctgaccccttaatgcctgacccttccaagcaaccaaagaaccagcttaatcctattggttcattacaggaattggctattcatcatggctggagacttcctgaatataccctttcccaggagggaggacctgctcataagagagaatatactacaatttgcaggctagagtcatttatggaaactggaaagggggcatcaaaaaagcaagccaaaaggaatgctgctgagaaatttcttgccaaatttagtaatatttctccagagaaccacatttctttaacaaatgtagtaggacattctttaggatgtacttggcattccttgaggaattctcctggtgaaaagatcaacttactgaaaagaagcctccttagtattccaaatacagattacatccagctgcttagtgaaattgccaaggaacaaggttttaatataacatatttggatatagatgaactgagcgccaatggacaatatcaatgtcttgctgaactgtccaccagccccatcacagtctgtcatggctccggtatctcctgtggcaatgcacaaagtgatgcagctcacaatgctttgcagtatttaaagataatagcagaaagaaagtaaatctggagcaacttaaaaaatctttcagtagcacataaaaagttcccctctggccccttcccaagtaaaacttttaccgtagtgtttatgtcttgtttctaaatctcttcatagattccatcaacactccagatttaattatctcctcatagttgttattaagctctttttaatggcttcaactttgtatcagtatactgtatttataaactttgtaccacaagagagagtgtagcacccattttacagtgccatgcacatcagagaaagaaactgcatgtttgttgttgatgatgaaataaaaatgctagcgacagtctttcttactggtgcttaagctcttctttgcacaaagctttataaagggaattcaaaggaagccctttagaattagagtcttgagggacagcactaacaggcctttattaagtatgattgattgttaaatttcagggaacatgattggtctgctgtgtatttgaattcatgtaacaaagaactgttacgatgggattctgctcattttattaaaaagctactgacttgactgtcatcctgttcttgttagccattgtgaataagattttaatgttgataattctgttatttacatatctctaatttactttgaaattcaaaggtgaaaataaaaaatgatggcctaagtaaaatttacaaacata

SEQ ID NO: 24364 - DNA, 1344 bp, Homo sapiens
  source 1..1344: mol_type = unassigned DNA
gcggggcgggcggaggtgacgctcggtcggcgcgcccgggaagggatcgtcaggttttccctgagaggctgcggcgctgctgccagccctgttctgttgagaatctctcctacccgcattcaagtgctctctctaaagacctcgctcaccccgcctgctcctgcggagtgactgccgcagcggggccggaagacaggtgcgccccagcctcgccagctctggccctggcctccggggaactcggcgcctccctcgtcaccgtcggtggcggttaaaactggcctctacgcttctgcttcaatctccaatttggcatgcaaagcacacctttttgtggtttttgcagtttggggaagatgataacagctaagccagggaaaacaccgattcaggtattacacgaatacggcatgaagaccaagaacatcccagtttatgaatgtgaaagatctgatgtgcaaatacacgtgcccactttcaccttcagagtaaccgttggtgacataacctgcacaggtgaaggtacaagtaagaagctggcgaaacatagagctgcagaggctgccataaacattttgaaagccaatgcaagtatttgctttgcagttcctgaccccttaatgcctgacccttccaagcaaccaaagaaccagcttaatcctattggttcattacaggaattggctattcatcatggctggagacttcctgaatataccctttcccaggagggaggacctgctcataagagagaatatactacaatttgcaggctagagtcatttatggaaactggaaagggggcatcaaaaaagcaagccaaaaggaatgctgctgagaaatttcttgccaaatttagtaatatttctccagagaaccacatttctttaacaaatgtagtaggacattctttaggatgtacttggcattccttgaggaattctcctggtgaaaagatcaacttactgaaaagaagcctccttagtattccaaatacagattacatccagctgcttagtgaaattgccaaggaacaaggttttaatataacatatttggatatagatgaactgagcgccaatggacaatatcaatgtcttgctgaactgtccaccagccccatcacagtctgtcatggctccggtatctcctgtggcaatgcacaaagtgatgcagctcacaatgctttgcagtatttaaagataatagcagaaagaaagtaaatctggagcaacttaaaaaatctttcagtagcacataaaaagttcccctctggccccttcccaagtaaaacttttaccgtagtgtttatgtcttgtttctaaatctcttcatagattccat

SEQ ID NO: 24365 - DNA, 1616 bp, Homo sapiens
  source 1..1616: mol_type = unassigned DNA
gaggcgggggagtcggaggaggtggcggcgctggagctcctcccggggaccagcgacccggggagcgagcacgtcgctccgcaccgctcttcctccagccgctgagccgtcccttctcgccatgtcccagagcaggcaccgcgccgaggccccgccgctggagcgcgaggacagtgggaccttcagtttggggaagatgataacagctaagccagggaaaacaccgattcaggtattacacgaatacggcatgaagaccaagaacatcccagtttatgaatgtgaaagatctgatgtgcaaatacacgtgcccactttcaccttcagagtaaccgttggtgacataacctgcacaggtgaaggtacaagtaagaagctggcgaaacatagagctgcagaggctgccataaacattttgaaagccaatgcaagtatttgataaaatgggaattactaagctgtaatcaggcctaaagtggcctgacttaatacagagactttctcacttctccatcacaattatttgggtagcttcggcatgcagcattctttgcagttcctgaccccttaatgcctgacccttccaagcaaccaaagaaccagcttaatcctattggttcattacaggaattggctattcatcatggctggagacttcctgaatataccctttcccaggagggaggacctgctcataagagagaatatactacaatttgcaggctagagtcatttatggaaactggaaagggggcatcaaaaaagcaagccaaaaggaatgctgctgagaaatttcttgccaaatttagtaatatttctccagagaaccacatttctttaacaaatgtagtaggacattctttaggatgtacttggcattccttgaggaattctcctggtgaaaagatcaacttactgaaaagaagcctccttagtattccaaatacagattacatccagctgcttagtgaaattgccaaggaacaaggttttaatataacatatttggatatagatgaactgagcgccaatggacaatatcaatgtcttgctgaactgtccaccagccccatcacagtctgtcatggctccggtatctcctgtggcaatgcacaaagtgatgcagctcacaatgctttgcagtatttaaagataatagcagaaagaaagtaaatctggagcaacttaaaaaatctttcagtagcacataaaaagttcccctctggccccttcccaagtaaaacttttaccgtagtgtttatgtcttgtttctaaatctcttcatagattccatcaacactccagatttaattatctcctcatagttgttattaagctctttttaatggcttcaactttgtatcagtatactgtatttataaactttgtaccacaagagagagtgtagcacccattttacagtgccatgcacatcagagaaagaaactgcatgtttgttgttgatgatgaaataaaaatgctagcgacagtctttcttactggtgcttaagctcttctttgcacaaagctttataaagggaattcaaaggaagccctttagaattagagtcttgagggacagcactaacaggcctttattaagtatgattgattgt

SEQ ID NO: 24366 - DNA, 1211 bp, Homo sapiens
  source 1..1211: mol_type = unassigned DNA
gcggcgcgcggggcgggcggaggtgacgctcggtcggcgcgcccgggaagggatcgtcaggttttccctgagaggctgcggcgctgctgccagccctgttctgttgagaatctctcctacccgcattcaagtgctctctctaaagacctcgctcaccccgcctgctcctgcggagtgactgccgcagcggggccggaagacagtttggggaagatgataacagctaagccagggaaaacaccgattcaggtattacacgaatacggcatgaagaccaagaacatcccagtttatgaatgtgaaagatctgatgtgcaaatacacgtgcccactttcaccttcagagtaaccgttggtgacataacctgcacaggtgaaggtacaagtaagaagctggcgaaacatagagctgcagaggctgccataaacattttgaaagccaatgcaagtatttgctttgcagttcctgaccccttaatgcctgacccttccaagcaaccaaagaaccagcttaatcctattggttcattacaggaattggctattcatcatggctggagacttcctgaatataccctttcccaggagggaggacctgctcataagagagaatatactacaatttgcaggctagagtcatttatggaaactggaaagggggcatcaaaaaagcaagccaaaaggaatgctgctgagaaatttcttgccaaatttagtaatatttctccagagaaccacatttctttaacaaatgtagtaggacattctttaggatgtacttggcattccttgaggaattctcctggtgaaaagatcaacttactgaaaagaagcctccttagtattccaaatacagattacatccagctgcttagtgaaattgccaaggaacaaggttttaatataacatatttggatatagatgaactgagcgccaatggacaatatcaatgtcttgctgaactgtccaccagccccatcacagtctgtcatggctccggtatctcctgtggcaatgcacaaagtgatgcagctcacaatgctttgcagtatttaaagataatagcagaaagaaagtaaatctggagcaacttaaaaaatctttcagtagcacataaaaagttcccctctggccccttcccaagtaaaacttttaccgtagtgtttatgtcttgtttctaaatctcttcatagattccatcaacactcca

SEQ ID NO: 24367 - DNA, 6031 bp, Homo sapiens
  source 1..6031: mol_type = unassigned DNA
gagctggaggaggcggcgggcgcgagacccggaatgcgcagggcccccgcctcgccccccccagcccgggccgcggcccccgccttccccgcagtcgtcccgcactcggtgcccgccccccgaggccggcggctgctcccactcggggccgttgctgcttgtgccgtgagcgccgcccagccattgtccccgtcgctccgtcagccgcgccggaccgcgcaccaggaggcgagagcgcgcatggggagcctctgttgatgccgccgccgcgccgccctccgaggctgcgtcccgggaagcccggctccccgagcgctccggcctggcccggtgccccggacctgagtgcgtccccatggaggcgcccgggctggcccaggcggccgcggcggagagcgactcccgcaaggtggcggaggagacccccgacggggcgcccgcgctctgccccagccctgaggcgctgtcgccggagccgcctgtgtacagcctgcaggactttgacacgctggccaccgtgggcactgggacgttcgggcgggtgcacctggtgaaggagaagacagccaagcatttcttcgccctcaaggtgatgagcattcccgacgtcatccgcctaaagcaggagcaacacgtacacaatgagaagtctgtcctgaaggaagtcagccacccgttcctcatcaggctgttctggacgtggcatgacgagcgcttcctctacatgctcatggagtacgtgccgggcggcgagctcttcagctacctgcgcaaccgggggcgcttctccagcaccacggggctcttctactctgcagagatcatctgtgccatcgagtacctgcactccaaagagatcgtctacagggacttgaagccagagaacatcctgctggatagggatggccacattaagctcacggactttgggttcgccaagaagctggtagacaggacttggaccctctgtggaacacccgagtacctagcccccgaagtcattcagagcaagggccacggaagggccgtggactggtgggccctcggcatcctgatattcgagatgctttcggggtttcctccgttttttgatgacaacccgtttggcatttatcagaaaattcttgcaggcaaaatagatttccccagacatttggatttccatgtaaaagacctcattaagaaactgctcgtggttgacagaacaaggcgattaggaaacatgaagaacggggcgaatgatgtgaagcatcatcggtggttccgctccgtggactgggaagctgttccgcagagaaaactgaagcctcccatcgtgcccaagatagctggtgacggcgacacttccaacttcgaaacttaccctgagaatgactgggacacagccgcgcccgtgccgcagaaggatttagaaatcttcaagaatttctgaggacaggagctcacatctggaagaaacaggaagattggaatctgcctggaacaaagaactgcacctaagcagaccagaagcaaaatgtcttcttcacggcataaggacatctccacttttctctgtacctgtgtgtatagaaatagattagagcacagttgaaattcatggaactggcattatttaagcaactggaattccacactgtaggaaggttttgaaaattgtttggttgtagattttatcttatcctttagtgttgtgttcctactgtgatgtcttggtttttgtcatagacttaagtttataagtttgaactggacttgttcgattataaccacaaattgtgtgtgtgtgtgtgtgtgtgtgtgtgtgtgtgtgtgtgtgtgtatgcctgtgtgtatatatagaagtcattatggcagatgcacagaaattgtgcagtgatgtaaatgttcatactttacagagcctataatttttatttttcaatttgttttttcaaaaatctcttctcggggacaacatctgaagggtatgttgcatgcattaaaaaaaatcatctcacatgcattttatagttttggggaagaaaatatcatggggaggtctaccttcagtatctttagtgcttcttacctggtaacttgagactttaaaagaagaaacaaagaggggaagatatgggagcgaatttattccaagaatctacaatgacattgaagttgttggaggaatgtactgtatttaaaaaaaccttctgtgacacattcaaaaatttcatctgagctggatgcagtggcttgttcctatagtcccagcactttgggaggctgaggtgggtggattgcttgagcccaggagttggagaccagtctgggaaacgtggtgagacctcatctctacaaaatacaaaaaaattagccgggcatggtggcacgtgagtgtagtctcagctactcaggaggctgagatgagaggatcacttgagcctggggaggtccaggccgcagtgatccgagatcacaccactgcattccagcctgggtgacagagtgagaccctgtccaaaaaaaaaaaaaaaaaaaaagaaggcaatggctttgtgcttttgaagatggattgaagagaacgtccaccttaaggctttaaaagacagtgaagctgggtgcggtggtgcactcctgtaaccctgggactttgggaagctgaggcaggaagattgagcctaggagttcgagaccgacctgggcagcatagcgagaccccatctctatataaaaaaaaagatgttaaaacagtgaaattacagaaacagaacatagccaccctttttcatcagtgaccttttcttcacgtggaggtcaactcagtaggtgagaataattagtaggttcagcagaataaactctttacaattaataactcagtggaaaatgatgttcagatggtgaaatgtggaaatgttttagacaactctattttcagcctgtgcttctcactcaccatcctgttgggattaacagttgagggccatcgctgcctaaacatttagcgtgcggtttcccatcagttttaccgtgaatgtgaaaaggtgaaactggtgctgacttcggcagcaggtatactaaaattggaatgacacagaggagattagcatggccccctgcgcgaggaagatctgcagattcatgcagcattccatatttttttaagaaaaggttacactgtgcaccgacatgtggagctagaaggaaaagcttttaagtctcatgtttgctgactataaaaataaatcatagtaataatattgaacattctactttaaaaattattaataaaaccataaatgaaacacttgagcacactttaaaaagtacataaatccatgagtccatatgcctatttttaggttgtctgttttattatccaggatttcatactcagatgagaattagcatcaggaaagcctgaaatgccttaattgtgaactgatatgcaggaaaatgaaatatgcaagcacattggtgaccttgttctttacagacgtcgtgatcagcctccagccatacagaacaaatgagaaattagaagcgattccaagaacgtgtgatggtgtgaaacccactttggaccatcacacacatttcagcatttgaagtgacacaagctacctggtaactgcccatggcggggtcatagtttaaatggcccaatgtcatgtagaggttaatttaatcaaaatgagctataaacatggagcaatcactgtataattttaaaatagtttacctggccaggcatggtggctcacgcctgtaatcccagcactttgggaggccgaggcaggtggatcacctgaggtcaggagttcgagaccagcctggccaacatggcaaaacccccatctctactaaaatacaaaaattaggtgtggtggcgggcacctgtaatcctggctactcgggaggctgaggcaggagaatcgcttgaacccgggaggcagaggctgcagtaagccgagatcgtgccactgcactccagcctgggccacagagcaagactccgtctcaaaacataaaaataaaaaaaatacaaatagctgacccgggtgggcattccaaaatgtccgcatggacgatcacgaaacaatcacggtgcgaaatgtccgcatggatgatcacgaaacaatcacggtgcagaatgtccgtatggatgatcatgacaaacaatcactgcgcaaaatgtggaggaaaattcattaccataatcacaacatttgtatcagaaaaacattacaaatttactttgcttcatgtaattttacgagttggcaatattttcttaaattggaatactctaagagaataggacatggatatgttacaagaagaagtgtattggggcaagtcttgtttttctgaagggaaatgccaccggcctgctttcataggcattgataaagccaggaaggaaataaagtcacaaccaaatagtatacactgtctctactgaattcttctaattccttcgcaacagaagtctaaatcctgcttagcctaaacatatctatagccagcgatgggcaaattatatttgctgtcagcatgatagaataagaagcagaaaccccccagcagtggggtaagattgcgcgcttcatcccctcaaaatgcagttcagccccactccctctccatgcccatcaaacaactgcacaatcacttgttactgaatttcccattcagcgttttgtttctttctgtccatacttaaagaccaaatcatttgtttgctttgaagaaaaagcaaaaacaagaacaaaaacaccaaatcatttgaaatcactgtccattaaaaaaaatcaccagtggaactaaacagttgagtggtttgggatgtgttcgccatttctgtgtttgacctacatggcctctaattctttggaccattgtaactgtgaaactatggcttaatactgttaaagaccccaaggctccactctgtagccaggtgcacctcaggctgcacaaataccccaccagaatgtcacaatcattcattgctccagctactgagtgaacagggtgcaagacagcactggcttgggttgtatttttgcagccagttaactttgcatcaggtctacacagtccttgcagcctttgatttctccagttgtagagatttgaaatggggtgcccgggttcctctcgtttttccttcaatctacctagcatgcattttacacacattggaggagtcgtatgcactgtttttctgttgctgatggaggcaagcaggccttctaattagtctaacttaaacggatgggattcacttaacaaaagcaagaagaaaagcacacgaacaggtgtcttaatgcatttggatagtttctttgcggggtgtgtgtgtgtgtgtgtgtgtgtgtgtgtgtgtgtgtgtgtgtgtgtcttggtgaaggtgaggggctgtattttcaccaagccttttcataatcaagtttgctttgcaaaccttatggccttgcaccccgcagaacagtcccttcctaatagcagggatgctctgtcatggttttctgtaaattatcgtgtgttgggaagttctgttgaggcttagtttgatcttccatggtggacacgtctgttctgtatgtaaaaggcattacaattgtgttttagcagatgagacttgaagcctttccacagtccttgtgctctgagatggctgttgagctctgctcaactgtcgtagctgaattctttctttgcgctgaacactgggcagcctcaccatgttgccaacgtgcttctggggcccctgtcactgccgccggatgccgcgcacacaggcagagtgccttggcaggtttgtgcaccccttggcgagccagaactgggaaccccgcggggtgaccccttctcatggggggtcggggaggggagtgcctatttttaatcctgtctgtttgttgcacaatggaaatcactgtgatttgtacatatgccctaggaaaattttactgctgtctaatttatgtaataatactgttgattccaggtttgtttaataaaactttgtatcttttcagaa

SEQ ID NO: 24368 - DNA, 2728 bp, Homo sapiens
  source 1..2728: mol_type = unassigned DNA
ggccggggcggggccgcaagcggcatggaggaggcggaggccgcggcgagccgggccgagcagtgagggccctagcggggcccgagcggggcccggggcccctaagccattcctgaagtcatgggctggccaggacattggtgacccgccaatccggtatggacgactggaagcccagccccctcatcaagccctttggggctcggaagaagcggagctggtaccttacctggaagtataaactgacaaaccagcgggccctgcggagattctgtcagacaggggccgtgcttttcctgctggtgactgtcattgtcaatatcaagttgatcctggacactcggcgagccatcagtgaagccaatgaagacccagagccagagcaagactatgatgaggccctaggccgcctggagcccccacggcgcagaggcagtggtccccggcgggtcctggacgtagaggtgtattcaagtcgcagcaaagtatatgtggcagtggatggcaccacggtgctggaggatgaggcccgggagcagggccggggcatccatgtcattgtcctcaaccaggccacgggccacgtgatggcaaaacgtgtgtttgacacgtactcacctcatgaggatgaggccatggtgctattcctcaacatggtagcgcccggccgagtgctcatctgcactgtcaaggatgagggctccttccacctcaaggacacagccaaggctctgctgaggagcctgggcagccaggctggccctgccctgggctggagggacacatgggccttcgtgggacgaaaaggaggtcctgtcttcggggagaaacattctaaatcacctgccctctcttcctggggggacccagtcctgctgaagacagatgtgccattgagctcagcagaagaggcagagtgccactgggcagacacagagctgaaccgtcgccgccggcgcttctgcagcaaagttgagggctatggaagtgtatgcagctgcaaggaccccacacccatcgagttcagccctgacccactcccagacaacaaggtcctcaatgtgcctgtggctgtcattgcagggaaccgacccaattacctgtacaggatgctgcgctctctgctttcagcccagggggtgtctcctcagatgataacagttttcattgacggctactatgaggaacccatggatgtggtggcactgtttggtctgaggggcatccagcatactcccatcagcatcaagaatgcccgcgtgtctcagcactacaaggccagcctcactgccactttcaacctgtttccggaggccaagtttgctgtggttctggaagaggacctggacattgctgtggattttttcagtttcctgagccaatccatccacctactggaggaggatgacagcctgtactgcatctctgcctggaatgaccaggggtatgaacacacggctgaggacccagcactactgtaccgtgtggagaccatgcctgggctgggctgggtgctcaggaggtccttgtacaaggaggagcttgagcccaagtggcctacaccggaaaagctctgggattgggacatgtggatgcggatgcctgaacaacgccggggccgagagtgcatcatccctgacgtttcccgatcctaccactttggcatcgtcggcctcaacatgaatggctactttcacgaggcctacttcaagaagcacaagttcaacacggttccaggtgtccagctcaggaatgtggacagtctgaagaaagaagcttatgaagtggaagttcacaggctgctcagtgaggctgaggttctggaccacagcaagaacccttgtgaagactctttcctgccagacacagagggccacacctacgtggcctttattcgaatggagaaagatgatgacttcaccacctggacccagcttgccaagtgcctccatatctgggacctggatgtgcgtggcaaccatcggggcctgtggagattgtttcggaagaagaaccacttcctgatggtgggggtcccggcttccccctactcagtgaagaagccaccctcagtcaccccaattttcctggagccacccccaaaggaggagggagccccaggagccccagaacagacatgagacctcctccaggaccctgcggggctgggtactgtgtacccccaggctggctagcccttccctccatcctgtaggattttgtagatgctggtaggggctggggctaccttgtttttaacatgagacttaattactaactccaaggggagggttcccctgctccaacaccccgttcctgagttaaaagtctatttatttacttccttgttggagaagggcaggagagtacctgggaatcattacgatccctagcagctcatcctgccctttgaataccctcactttccaggcctggctcagaatctaacctatttattgactgtcctgagggccttgaaaacaggccgaacctggagggcctggatttctttttgggctggaatgctgccctgagggtggggctggctcttactcaggaaactgctgtgcccaacccatggacaggcccagctggggcccacatgctgacacagactcactcagagacccttagacactggaccaggcctcctctcagccttctctttgtccagatttccaaagctggataagttggtcattgattaaaaaaggagaagccctctggg

SEQ ID NO: 24369 - DNA, 2388 bp, Homo sapiens
  source 1..2388: mol_type = unassigned DNA
aagcggcatggaggaggcggaggccgcggcgagccgggccgagcagtgagggccctagcggggcccgagcggggcccggggcccctaagccattcctgaagtcatgggctggccaggacattggtgacccgccaatccggtatggacgactggaagcccagccccctcatcaagccctttggggctcggaagaagcggagctggtaccttacctggaagtataaactgacaaaccagcgggccctgcggagattctgtcagacaggggccgtgcttttcctgctggtgactgtcattgtcaatatcaagttgatcctggacactcggcgagccatcagtgaagccaatgaagacccagagccagagcaagactatgatgaggccctaggccgcctggagcccccacggcgcagaggcagtggtccccggcgggtcctggacgtagaggtgtattcaagtcgcagcaaagtatatgtggcagtggatggcaccacggtgctggaggatgaggcccgggagcagggccggggcatccatgtcattgtcctcaaccaggccacgggccacgtgatggcaaaacgtgtgtttgacacgtactcacctcatgaggatgaggccatggtgctattcctcaacatggtagcgcccggccgagtgctcatctgcactgtcaaggatgagggctccttccacctcaaggacacagccaaggctctgctgaggagcctgggcagccaggctggccctgccctgggctggagggacacatgggccttcgtgggacgaaaaggaggtcctgtcttcggggagaaacattctaaatcacctgccctctcttcctggggggacccagtcctgctgaagacagatgtgccattgagctcagcagaagaggcagagtgccactgggcagacacagagctgaaccgtcgccgccggcgcttctgcagcaaagttgagggctatggaagtgtatgcagctgcaaggaccccacacccatcgagttcagccctgacccactcccagacaacaaggtcctcaatgtgcctgtggctgtcattgcagggaaccgacccaattacctgtacaggatgctgcgctctctgctttcagcccagggggtgtctcctcagatgataacagttttcattgacggctactatgaggaacccatggatgtggtggcactgtttggtctgaggggcatccagcatactcccatcagcatcaagaatgcccgcgtgtctcagcactacaaggccagcctcactgccactttcaacctgtttccggaggccaagtttgctgtggttctggaagaggacctggacattgctgtggattttttcagtttcctgagccaatccatccacctactggaggaggatgacagcctgtactgcatctctgcctggaatgaccaggggtatgaacacacggctgaggacccagcactactgtaccgtgtggagaccatgcctgggctgggctgggtgctcaggaggtccttgtacaaggaggagcttgagcccaagtggcctacaccggaaaagctctgggattgggacatgtggatgcggatgcctgaacaacgccggggccgagagtgcatcatccctgacgtttcccgatcctaccactttggcatcgtcggcctcaacatgaatggctactttcacgaggcctacttcaagaagcacaagttcaacacggttccaggtgtccagctcaggaatgtggacagtctgaagaaagaagcttatgaagtggaagttcacaggctgctcagtgaggctgaggttctggaccacagcaagaacccttgtgaagactctttcctgccagacacagagggccacacctacgtggcctttattcgaatggagaaagatgatgacttcaccacctggacccagcttgccaagtgcctccatatctgggacctggatgtgcgtggcaaccatcggggcctgtggagattgtttcggaagaagaaccacttcctgatgagtgaagaagccaccctcagtcaccccaattttcctggagccacccccaaaggaggagggagccccaggagccccagaacagacatgagacctcctccaggaccctgcggggctgggcctggctcagaatctaacctatttattgactgtcctgagggccttgaaaacaggccgaacctggagggcctggatttctttttgggctggaatgctgccctgagggtggggctggctcttactcaggaaactgctgtgcccaacccatggacaggcccagctggggcccacatgctgacacagactcactcagagacccttagacactggaccaggcctcctctcagccttctctttgtccagatttccaaagctggataa

SEQ ID NO: 24370 - DNA, 2934 bp, Homo sapiens
  source 1..2934: mol_type = unassigned DNA
ctcagactgagggagaatcaattttgggggagaccacatctaatggataaaagagccacaggattacaaaagggtggaatagttgttacaagaaggtcacatcatcctggcactgctcccagaaccagtgggcctcgaagcccagcttggcactctcatcctctggtgactcaggtggtccaccttgaagcctctcccctgggggcttccacacagctctcaagctccctagcctggtggctgccacatccacctcagtcctggccctctctccaccagctataacttttgcccagtccatctcggaacgtggagccccaggtgggccctgttcatccagctcgctgggggccactgtgtccaggaagctgccaatagagacactgtccagccggtcggtggtgctggtgtctggcaggctgtcccagctgcctcgccttgagcggcctgggctcccgcctgtcaggctatattgactgctggtgaggctgctgcaatgactggtcaacgtcccccgctcctccaacagccagcgcactgcctcgatgccctcattcaaggtcaccagctgctgcaggatcttcacatcgatggctcgcagattcctgaagtcatgggctggccaggacattggtgacccgccaatccggtatggacgactggaagcccagccccctcatcaagccctttggggctcggaagaagcggagctggtaccttacctggaagtataaactgacaaaccagcgggccctgcggagattctgtcagacaggggccgtgcttttcctgctggtgactgtcattgtcaatatcaagttgatcctggacactcggcgagccatcagtgaagccaatgaagacccagagccagagcaagactatgatgaggccctaggccgcctggagcccccacggcgcagaggcagtggtccccggcgggtcctggacgtagaggtgtattcaagtcgcagcaaagtatatgtggcagtggatggcaccacggtgctggaggatgaggcccgggagcagggccggggcatccatgtcattgtcctcaaccaggccacgggccacgtgatggcaaaacgtgtgtttgacacgtactcacctcatgaggatgaggccatggtgctattcctcaacatggtagcgcccggccgagtgctcatctgcactgtcaaggatgagggctccttccacctcaaggacacagccaaggctctgctgaggagcctgggcagccaggctggccctgccctgggctggagggacacatgggccttcgtgggacgaaaaggaggtcctgtcttcggggagaaacattctaaatcacctgccctctcttcctggggggacccagtcctgctgaagacagatgtgccattgagctcagcagaagaggcagagtgccactgggcagacacagagctgaaccgtcgccgccggcgcttctgcagcaaagttgagggctatggaagtgtatgcagctgcaaggaccccacacccatcgagttcagccctgacccactcccagacaacaaggtcctcaatgtgcctgtggctgtcattgcagggaaccgacccaattacctgtacaggatgctgcgctctctgctttcagcccagggggtgtctcctcagatgataacagttttcattgacggctactatgaggaacccatggatgtggtggcactgtttggtctgaggggcatccagcatactcccatcagcatcaagaatgcccgcgtgtctcagcactacaaggccagcctcactgccactttcaacctgtttccggaggccaagtttgctgtggttctggaagaggacctggacattgctgtggattttttcagtttcctgagccaatccatccacctactggaggaggatgacagcctgtactgcatctctgcctggaatgaccaggggtatgaacacacggctgaggacccagcactactgtaccgtgtggagaccatgcctgggctgggctgggtgctcaggaggtccttgtacaaggaggagcttgagcccaagtggcctacaccggaaaagctctgggattgggacatgtggatgcggatgcctgaacaacgccggggccgagagtgcatcatccctgacgtttcccgatcctaccactttggcatcgtcggcctcaacatgaatggctactttcacgaggcctacttcaagaagcacaagttcaacacggttccaggtgtccagctcaggaatgtggacagtctgaagaaagaagcttatgaagtggaagttcacaggctgctcagtgaggctgaggttctggaccacagcaagaacccttgtgaagactctttcctgccagacacagagggccacacctacgtggcctttattcgaatggagaaagatgatgacttcaccacctggacccagcttgccaagtgcctccatatctgggacctggatgtgcgtggcaaccatcggggcctgtggagattgtttcggaagaagaaccacttcctgatgagtgaagaagccaccctcagtcaccccaattttcctggagccacccccaaaggaggagggagccccaggagccccagaacagacatgagacctcctccaggaccctgcggggctgggcctggctcagaatctaacctatttattgactgtcctgagggccttgaaaacaggccgaacctggagggcctggatttctttttgggctggaatgctgccctgagggtggggctggctcttactcaggaaactgctgtgcccaacccatggacaggcccagctggggcccacatgctgacacagactcactcagagacccttagacactggaccaggcctcctctcagccttctctttgtccagatttccaaagctggataagttggtcattgattaaaaaaggagaagccctctggg

SEQ ID NO: 24371 - DNA, 3480 bp, Homo sapiens
  source 1..3480: mol_type = unassigned DNA
gaatcaattttgggggagaccacatctaatggataaaagagccacaggattacaaaagggtggaatagttgttacaagaaggtcacatcatcctggcactgctcccagaaccagtgggcctcgaagcccagcttggcactctcatcctctggtgactcaggtggtccaccttgaagcctctcccctgggggcttccacacagctctcaagctccctagcctggtggctgccacatccacctcagtcctggccctctctccaccagctataacttttgcccagtccatctcggaacgtggagccccaggtgggccctgttcatccagctcgctgggggccactgtgtccaggaagctgccaatagagacactgtccagccggtcggtggtgctggtgtctggcaggctgtcccagctgcctcgccttgagcggcctgggctcccgcctgtcaggctatattgactgctggtgaggctgctgcaatgactggtcaacgtcccccgctcctccaacagccagcgcactgcctcgatgccctcattcaaggtcaccagctgctgcaggatcttcacatcgatggctcgcagattcctgaagtcatgggctggccaggacattggtgacccgccaatccggtatggacgactggaagcccagccccctcatcaagccctttggggctcggaagaagcggagctggtaccttacctggaagtataaactgacaaaccagcgggccctgcggagattctgtcagacaggggccgtgcttttcctgctggtgactgtcattgtcaatatcaagttgatcctggacactcggcgagccatcagtgaagccaatgaagacccagagccagagcaagactatgatgaggccctaggccgcctggagcccccacggcgcagaggcagtggtccccggcgggtcctggacgtagaggtgtattcaagtcgcagcaaagtatatgtggcagtggatggcaccacggtgctggaggatgaggcccgggagcagggccggggcatccatgtcattgtcctcaaccaggccacgggccacgtgatggcaaaacgtgtgtttgacacgtactcacctcatgaggatgaggccatggtgctattcctcaacatggtagcgcccggccgagtgctcatctgcactgtcaaggtcctgtcttcggggagaaacattctaaatcacctgccctctcttcctggggggacccagtcctgctgaagacagatgtgccattgagctcagcagaagaggcagagtgccactgggcagacacagagctgaaccgtcgccgccggcgcttctgcagcaaagttgagggctatggaagtgtatgcagctgcaaggaccccacacccatcgagttcagccctgacccactcccagacaacaaggtcctcaatgtgcctgtggctgtcattgcagggaaccgacccaattacctgtacaggtaagcctgggaatgggctatacccagcactgaacaggagggtgcttaggtcatctacctccaggaggaactcttgaggtgggcagaaaggcaatagattctagacgcattcacctctgtgggtaagcatagggactctgggcccagctgtaaacacaggggaacctgagttgaggggtgatgaagtgaccctaacctatccctgggctccccaggatgctgcgctctctgctttcagcccagggggtgtctcctcagatgataacagttttcattgacggctactatgaggtgagcaggacttggggggtgcctcgggtggagtacaacatggagcagcagtgattgccagggacgggcaagggagaccgcccaggcaagggctgtgaaatgtgaaggccttggattgcagaggtgggcagagggaaagtgacctcacatggtgagcagtggccatgtcccccaggaacccatggatgtggtggcactgtttggtctgaggggcatccagcatactcccatcagcatcaagaatgcccgcgtgtctcagcactacaaggccagcctcactgccactttcaacctgtttccggaggccaagtttgctgtggttctggaagaggacctggacattgctgtggattttttcagtttcctgagccaatccatccacctactggaggaggatgacagcctgtactgcatctctgcctggaatgaccaggggtatgaacacacggctgaggacccagcactactgtaccgtgtggagaccatgcctgggctgggctgggtgctcaggaggtccttgtacaaggaggagcttgagcccaagtggcctacaccggaaaagctctgggattgggacatgtggatgcggatgcctgaacaacgccggggccgagagtgcatcatccctgacgtttcccgatcctaccactttggcatcgtcggcctcaacatgaatggctactttcacgaggcctacttcaagaagcacaagttcaacacggttccaggtgtccagctcaggaatgtggacagtctgaagaaagaagcttatgaagtggaagttcacaggctgctcagtgaggctgaggttctggaccacagcaagaacccttgtgaagactctttcctgccagacacagagggccacacctacgtggcctttattcgaatggagaaagatgatgacttcaccacctggacccagcttgccaagtgcctccatatctgggacctggatgtgcgtggcaaccatcggggcctgtggagattgtttcggaagaagaaccacttcctgatggtgggggtcccggcttccccctactcagtgaagaagccaccctcagtcaccccaattttcctggagccacccccaaaggaggagggagccccaggagccccagaacagacatgagacctcctccaggaccctgcggggctgggtactgtgtacccccaggctggctagcccttccctccatcctgtaggattttgtagatgctggtaggggctggggctaccttgtttttaacatgagacttaattactaactccaaggggagggttcccctgctccaacaccccgttcctgagttaaaagtctatttatttacttccttgttggagaagggcaggagagtacctgggaatcattacgatccctagcagctcatcctgccctttgaataccctcactttccaggcctggctcagaatctaacctatttattgactgtcctgagggccttgaaaacaggccgaacctggagggcctggatttctttttgggctggaatgctgccctgagggtggggctggctcttactcaggaaactgctgtgcccaacccatggacaggcccagctggggcccacatgctgacacagactcactcagagacccttagacactggaccaggcctcctctcagccttctctttgtccagatttccaaagctggataagttggtcattgattaaaaaaggagaagccctctgggg

SEQ ID NO: 24372 - DNA, 2355 bp, Homo sapiens
  source 1..2355: mol_type = unassigned DNA
ctgatcaggctggctttgcagagaggcacacccctgtgaggcagttagggccaggacccaggtctgatcccccgcttgggtccctgggcctggctccatctctagaaaccaacaatggaggggaccaaggaaatcaaggtctcaaatagaagaatacaggagcactggacaggggccgtgcttttcctgctggtgactgtcattgtcaatatcaagttgatcctggacactcggcgagccatcagtgaagccaatgaagacccagagccagagcaagactatgatgaggccctaggccgcctggagcccccacggcgcagaggcagtggtccccggcgggtcctggacgtagaggtgtattcaagtcgcagcaaagtatatgtggcagtggatggcaccacggtgctggaggatgaggcccgggagcagggccggggcatccatgtcattgtcctcaaccaggccacgggccacgtgatggcaaaacgtgtgtttgacacgtactcacctcatgaggatgaggccatggtgctattcctcaacatggtagcgcccggccgagtgctcatctgcactgtcaaggatgagggctccttccacctcaaggacacagccaaggctctgctgaggagcctgggcagccaggctggccctgccctgggctggagggacacatgggccttcgtgggacgaaaaggaggtcctgtcttcggggagaaacattctaaatcacctgccctctcttcctggggggacccagtcctgctgaagacagatgtgccattgagctcagcagaagaggcagagtgccactgggcagacacagagctgaaccgtcgccgccggcgcttctgcagcaaagttgagggctatggaagtgtatgcagctgcaaggaccccacacccatcgagttcagccctgacccactcccagacaacaaggtcctcaatgtgcctgtggctgtcattgcagggaaccgacccaattacctgtacaggatgctgcgctctctgctttcagcccagggggtgtctcctcagatgataacagttttcattgacggctactatgaggaacccatggatgtggtggcactgtttggtctgaggggcatccagcatactcccatcagcatcaagaatgcccgcgtgtctcagcactacaaggccagcctcactgccactttcaacctgtttccggaggccaagtttgctgtggttctggaagaggacctggacattgctgtggattttttcagtttcctgagccaatccatccacctactggaggaggatgacagcctgtactgcatctctgcctggaatgaccaggggtatgaacacacggctgaggacccagcactactgtaccgtgtggagaccatgcctgggctgggctgggtgctcaggaggtccttgtacaaggaggagcttgagcccaagtggcctacaccggaaaagctctgggattgggacatgtggatgcggatgcctgaacaacgccggggccgagagtgcatcatccctgacgtttcccgatcctaccactttggcatcgtcggcctcaacatgaatggctactttcacgaggcctacttcaagaagcacaagttcaacacggttccaggtgtccagctcaggaatgtggacagtctgaagaaagaagcttatgaagtggaagttcacaggctgctcagtgaggctgaggttctggaccacagcaagaacccttgtgaagactctttcctgccagacacagagggccacacctacgtggcctttattcgaatggagaaagatgatgacttcaccacctggacccagcttgccaagtgcctccatatctgggacctggatgtgcgtggcaaccatcggggcctgtggagattgtttcggaagaagaaccacttcctgatggtgggggtcccggcttccccctactcagtgaagaagccaccctcagtcaccccaattttcctggagccacccccaaaggaggagggagccccaggagccccagaacagacatgagacctcctccaggaccctgcggggctgggcctggctcagaatctaacctatttattgactgtcctgagggccttgaaaacaggccgaacctggagggcctggatttctttttgggctggaatgctgccctgagggtggggctggctcttactcaggaaactgctgtgcccaacccatggacaggcccagctggggcccacatgctgacacagactcactcagagacccttagacactggaccaggcctcctctcagccttctctttgtccagatttccaaagctggataagttggtcattgattaaaaaaggagaagccctctg

SEQ ID NO: 24373 - DNA, 1054 bp, Homo sapiens
  source 1..1054: mol_type = unassigned DNA
cggaaggagagccaggccggaaggaggctgccggagggcgggaggcaggagcgggccaggagctgctgggctggagcggcggcgccgccatgtccgacagcgagaagctcaacctggactcgatcatcgggcgcctgctggaaggtgacatacacggccagtactacgaccttctgcgactatttgagtatggcggtttccctcccgagagcaactacctctttctgggggactatgtggacaggggcaagcagtccttggagaccatctgcctgctgctggcctataagatcaagtaccccgagaacttcttcctgctccgtgggaaccacgagtgtgccagcatcaaccgcatctatggtttctacgatgagtgcaagagacgctacaacatcaaactgtggaaaaccttcactgactgcttcaactgcctgcccatcgcggccatagtggacgaaaagatcttctgctgccacggaggcctgtccccggacctgcagtctatggagcagattcggcggatcatgcggcccacagatgtgcctgaccagggcctgctgtgtgacctgctgtggtctgaccctgacaaggacgtgcagggctggggcgagaacgaccgtggcgtctcttttacctttggagccgaggtggtggccaagttcctccacaagcacgacttggacctcatctgccgagcacaccaggtggtagaagacggctacgagttctttgccaagcggcagctggtgacacttttctcagctcccaactactgtggcgagtttgacaatgctggcgccatgatgagtgtggacgagaccctcatgtgctctttccagatcctcaagcccgccgacaagaacaaggggaagtacgggcagttcagtggcctgaaccctggaggccgacccatcaccccaccccgcaattccgccaaagccaagaaatagcccccgcacaccaccctgtgccccagatgatggattgattgtacagaaatcatgctgccatgctgggggggggtcaccccgacccctcaggcccacctgtcacg

SEQ ID NO: 24374 - DNA, 1808 bp, Homo sapiens
  source 1..1808: mol_type = unassigned DNA
aaagatggcggcgcgagggtctccgccctctgctccgggctgaagcgctctgagagaggcggcagcggcaactcgagccccaacagtaatttagtgttggtagttttggcagcagctgccgaggccggagcaatggcggaactggagcacctaggagggaagcgggcagagtcggcgcgaatgcggcgggcagagcagcttcggcgctggcggggctcgctgacagagcaggagcctgcggagcgacgaggcgcggggcggcagccgctgaccaggcgcgggagccccagggtccgcttcgaggacggtgctgtctttctggccgcctgctctagcggggacaccgacgaggtgagaaagcttctggcaagaggtgctgatatcaacacggtcaacgtggacggcttgacagccctgcaccaggcatgtattgatgaaaatttggacatggtgaagtttctggtggagaacagagccaatgtaaaccagcaagacaacgagggctggacaccccttcatgcagcagcttcctgtggctatctcaacatagcagagtatttcattaatcacggagccagtgtaggtattgtcaatagtgaaggtgaagttccctctgaccttgcagaagagccagccatgaaggatcttcttctggagcaagtaaagaagcaaggagttgatctagagcagtcaagaaaagaagaagagcagcagatgttgcaggatgcccgccagtggctcaacagtgggaaaatagaggatgtgaggcaggctcgctcaggggctacagcccttcatgtggctgctgccaagggctactctgaagtcctcagacttttaattcaggctggctatgaactcaatgttcaggattatgatggctggactcccctccatgctgctgcacactggggagtgaaggaggcttgctccatcctggcagaagcactttgtgacatggatattcgaaataaactgggccagacaccatttgatgtggctgatgagggtctcgtggagcatttggagttgctccagaagaagcagaatgtgcttcgaagtgaaaaggagacacggaataaactcattgagtcagatctgaacagcaagattcagagtgggttctttaagaacaaagagaagatgctctatgaggaggagacacctaagtcccaagaaatggaggaagaaaataaagaatctagtagctccagctcagaggaggaggaaggtgaagatgaagcttctgagtcagaaactgagaaggaggcagataaaaagccagaagcctttgtcaatcattccaactctgaaagcaagagtagtatcacagagcagataccagcaccagctcaaaataccttctctgcctcttctgctaggaggttctcttctggcctttttaacaagccagaagagcccaaagatgaatctccttcttcatggagattgggactgagaaaaactggcagccacaacatgctgagtgaggtggccaattccagggaacctataagggaccgaggctcttccatctatcgctcctcttcaagccctcggatttctgctctactggacaacaaagataaggtgcagtttgggagggtatgggggaattccaaggcagttttttttttccatgaaaattcaatcttaggaacaaatgaaaatattttctagtccttaagttgattttggaaatgcaaagtctttaaagagagagaggcacactgatagtttattcaagtagctatttgcttgctattgtttgcttgaccaaaaaagaaaataaaaaagctttaaaaata

SEQ ID NO: 24375 - DNA, 5369 bp, Homo sapiens
  source 1..5369: mol_type = unassigned DNA
ctctcccgggattttgctgccgggctccctctctctgcggccctagagttaatcccatcagccgagatgaacctctagtcttgctttgaaaaaatcattctgtgtaactcttgactgtgactaagttcctaatacacctgttgggacgatcactgacaccgtataccatttgagaggtacttttcttgacccaatactggtgattagagaagagaggtatcttggtttttggtttttttctttgatcattatgaacattggcttttcacccctgaagtgaaaatgttgaaaactgagtcttcaggtgaacgaaccactctcagaagtgcctctcctcacaggaatgcatatcgaactgagtttcaggcactgaaaagtacctttgacaaacccaagtcagatggggaacaaaaaacaaaagaaggtgagggctcccagcagagcagggggaggaaatatggctccaatgtcaacagaattaaaaacctatttatgcagatgggtatggaacccaacgagaatgctgcagtcattgccaaaacaagggggaaaggtggacattcatctcctcagagaagaatgaagcccaaagaatttctggaaaaaacagatggctcagttgttaagttggagtcttctgtttctgaacgaattagtagatttgacactatgtacgatggcccttcatattccaagttcactgagactcgaaagatgtttgagagaagtgtgcatgaatcaggacagaacaaccgctattccccaaagaaagagaaagctggagggagtgaacctcaggatgaatggggaggttccaagtccaacagaggcagtactgattccttggacagccttagctcccgaactgaggctgtctccccaactgtgagtcaactgagtgcagtatttgagaacactgattctcccagtgccatcatttctgagaaggctgaaaacaatgaatactcagtgactgggcattatcccttgaatttaccatctgttactgttacaaatcttgacacatttggtcacctgaaggattctaattcctggcctccttcaaacaagcgaggtgttgatacagaggatgctcacaagagtaatgcaactccagtaccagaagtggcttctaaaagtacctctctagcttcgatacctggtgaagagatccagcagagcaaggaacccgaggactccacatctaatcaacagactcccgacagcattgacaaagatggtcctgaagaaccttgtgctgaaagtaaggcaatgccaaagtccgaaatcccttcaccacaaagccaactgttagaagatgctgaagctaatttggttggaagggaggcagcaaagcaacagaggaaagaacttgcaggtggtgatttcacctctcctgatgcttctgcatccagttgtggaaaagaagtacctgaagattcaaataattttgatggttcccatgtgtacatgcacagtgactataatgtgtatagggtgagatccaggtataattcagactggggagagacaggcactgagcaggatgaggaggaagatagtgatgagaacagttactatcagcctgatatggagtactcggaaattgttggattgccagaagaagaagaaatcccagcaaataggaaaattaagtttagtagtgctcctattaaggttttcaacacatactccaatgaagactatgacaggagaaatgacgaagttgaccctgtggctgcttcagctgagtatgaacttgaaaaacgtgtagaaaagctggaacttttcccagtggagctagagaaagatgaggatggtcttggtataagtattattggaatgggtgttggagcagatgctggacttgaaaagctgggaatattcgtcaagacagtaacagaaggtggtgctgctcaacgggatggcagaatacaagtcaatgaccagattgtggaagtggatggaatcagcttggtgggtgtgacacagaattttgcagcaacagttctcagaaacaccaagggcaacgtcagatttgttattgggcgggaaaaaccaggacaagtgagcgaggttgcccagttgataagccagacactggaacaggagaggcgccagagagagctgctggaacagcactatgcccagtatgatgccgacgatgacgagaacactgtggctgaattgcaaggaatgtctggcaactgcaataacaataacaactattttcttaagacaggagaatatgccacagatgaagaagaagatgaggtaggacctgtccttcctggcagcgacatggccattgaagtctttgagctgcctgagaatgaggacatgttttccccatcagaactggacacaagcaagctcagtcacaagttcaaagagttgcaaatcaaacatgcagttacagaagcagagattcaaaaattgaagaccaagctgcaggcagcagaaaatgagaaagtgaggtgggaactagaaaaaacccaactccaacaaaacatagaagagaataaggaaagaatgttgaagttggaaagctactggattgaggcccaaacattatgccacacagtgaatgagcatctcaaagagactcaaagccagtatcaggccttggaaaagaaatacaacaaggcaaagaagttgatcaaggattttcaacaaaaagagcttgatttcatcaaaagacaggaagcagaaagaaagaaaatagaagatttggaaaaagctcatcttgtggaagtgcaaggcctccaagtgcggattagagatttggaagctgaggtattcaggctactgaagcaaaatgggactcaagttaacaataataacaacatctttgagagaagaacatctcttggtgaagtctctaaaggggataccatggagaacttggatggcaagcagacatcttgccaagatggcctaagtcaagacttgaatgaagcagtcccagagacagagcgcctggattcaaaagcactgaaaactcgagcccagctctctgtgaagaacagacgccagagaccctctaggacaagactgtatgatagtgttagttccacagatggggaggacagtctagagagaaagccatcaaacagtttctataaccacatgcatattaccaaattacttccacctaagggtttgagaacgtcttctccagaatcagattctggtgttccacccctcaccccggtggatagcaatgtgcccttctcgtctgaccacatagctgaatttcaagaagaaccactggacccagaaatggggcctctctcctctatgtggggagacacttcactgttttctacttcaaagtctgatcatgatgtggaagaatctccttgccatcaccaaaccaccaacaagaaaatattacgagaaaaagatgatgccaaagatcccaaatcactaagggcatccagttcattggcggtgcaaggaggaaaaattaagcggaagtttgtggatctgggggcgcctttgcgaaggaattccagcaagggaaagaagtggaaagaaaaagaaaaagaagccagtaggttttctgcaggtagcaggatcttcagaggcagactggaaaactggacacccaagccatgttcaacagctcagacctccactcgttccccttgcatgcctttctcatggtttaatgacagccggaaaggatcctattccttcaggaacctgcctgcgcctacaagttcccttcagccttctcctgagactctaatttcagataaaaaggggtccaaggtagaaaacacatggattacaaaagcaaacaagagaaacccaaatccctcctcttcttcaatctttggaaggcattctcaacttatgtctgtagtctggatccaagaaaccaataattttaccttcaatgatgacttcagtcccagcagtaccagttcagcagacctcagcggcttaggagcagaacctaaaacaccagggctctctcagtccttagcactgtcatcagatgagatccttgatgatggacagtctcccaaacacagtcagtgtcagaatcgggccgttcaggaatggagtgtgcagcaggtttctcactggttaatgagcctaaatctggagcagtatgtatctgaattcagtgcccaaaacatcactggagaacagctcctgcagttggatggaaataaacttaaggctcttggaatgacagcatcccaggaccgagcagtggtcaaaaagaaactcaaggaaatgaagatgtctctagagaaggctcggaaggcccaagagaaaatggaaaaacaaagagaaaagctaaggagaaaggagcaagagcaaatgcagaggaagtccaaaaagacagaaaagatgacgtcaactacagccgagggtgctggtgagcagtaacacataccctcttacagatgatggagatgctccaagagaagtccccacctcttcctgccctgctctcctccagaggatgaaaaagaaactaaatgataagggtaatgcggctctaggccggctgaggaactgtgtgttgaataactgcattttctgcaatagaatgcactcttaattttaactactaaaataatcccaagccacctttggttcattaacaaaccagagatttcatttaagtagctgtgttttgctcttctctaacttaccaacatcttgtgttgtgttgggtgtgttttgtcacttggagaactagtgtgaccccacccaagagcatgacacaccctggtgttgttaatggagcgccgtgaattttcagtgtgggatcctgaaatggcaattgcacatgtctgcatggcagagagcaccctgccatgagatctgagaccagtacttaacttctaggactgcaacacctactccaatgtgtgggaaagatttgctcttaattctcagtctggacagtgagaccaccccgctgtggaaacatgggtgctctgctctgtagttacctactaagggaaaaggcaagcaagtcattctgcttgctaggcatcaaaaagaaagaaaataaattatagctatttgttaaccactgaaaaaagcaaaagccttaagaatgtggatgtgggtattaccttggggttctgagggtaatatttatcctctagatacggctgaacaagaaagaaaaaaatcagacattaatgcagccatgggatattgggatctgttgaccttgctactgctgtgtgttcagcatttcagcaacactggcaaacacaacacagttcctcttccccctacctaacccaagaaattgaacaggaaattgatttttaaggaaaccaccattttcaggtttcctctcctggggaacattctggctggtcttcagcctg

SEQ ID NO: 24376 - DNA, 1389 bp, Homo sapiens
  source 1..1389: mol_type = unassigned DNA
gcggcgccgccatgtccgacagcgagaagctcaacctggactcgatcatcgggcgcctgctggaagggtccagggtcctgacaccccattgcgccccagtgcagggctcgcggcctggcaagaatgtacagctgacagagaacgagatccgcggtctgtgcctgaaatcccgggagatttttctgagccagcccattcttctggagctggaggcacccctcaagatctgcggtgacatacacggccagtactacgaccttctgcgactatttgagtatggcggtttccctcccgagagcaactacctctttctgggggactatgtggacaggggcaagcagtccttggagaccatctgcctgctgctggcctataagatcaagtaccccgagaacttcttcctgctccgtgggaaccacgagtgtgccagcatcaaccgcatctatggtttctacgatgagtgcaagagacgctacaacatcaaactgtggaaaaccttcactgactgcttcaactgcctgcccatcgcggccatagtggacgaaaagatcttctgctgccacggaggcctgtccccggacctgcagtctatggagcagattcggcggatcatgcggcccacagatgtgcctgaccagggcctgctgtgtgacctgctgtggtctgaccctgacaaggacgtgcagggctggggcgagaacgaccgtggcgtctcttttacctttggagccgaggtggtggccaagttcctccacaagcacgacttggacctcatctgccgagcacaccaggtggtagaagacggctacgagttctttgccaagcggcagctggtgacacttttctcagctcccaactactgtggcgagtttgacaatgctggcgccatgatgagtgtggacgagaccctcatgtgctctttccagatcctcaagcccgccgacaagaacaaggggaagtacgggcagttcagtggcctgaaccctggaggccgacccatcaccccaccccgcaattccgccaaagccaagaaatagcccccgcacaccaccctgtgccccagatgatggattgattgtacagaaatcatgctgccatgctgggggggggtcaccccgacccctcaggcccacctgtcacggggaacatggagccttggtgtatttttcttttctttttttaatgaatcaatagcagcgtccagtcccccagggctgcttcctgcctgcacctgcggtgactgtgagcaggatcctggggccgaggctgcagctcagggcaacggcaggccaggtcgtgggtctccagccgtgcttggcctcagggctggcagccggatcctggggcaacccatctggtctcttgaataaaggtcaaagctggattctc

SEQ ID NO: 24377 - DNA, 1476 bp, Homo sapiens
  source 1..1476: mol_type = unassigned DNA
gcggggcgggcccgggaggcctggaggcggggccgcgggccgggggcggactggggcgggcggaaggagagccaggccggaaggaggctgccggagggcgggaggcaggagcgggccaggagctgctgggctggagcggcggcgccgccatgtccgacagcgagaagctcaacctggactcgatcatcgggcgcctgctggaagtgcagggctcgcggcctggcaagaatgtacagctgacagagaacgagatccgcggtctgtgcctgaaatcccgggagatttttctgagccagcccattcttctggagctggaggcacccctcaagatctgcggtgacatacacggccagtactacgaccttctgcgactatttgagtatggcggtttccctcccgagagcaactacctctttctgggggactatgtggacaggggcaagcagtccttggagaccatctgcctgctgctggcctataagatcaagtaccccgagaacttcttcctgctccgtgggaaccacgagtgtgccagcatcaaccgcatctatggtttctacgatgagtgcaagagacgctacaacatcaaactgtggaaaaccttcactgactgcttcaactgcctgcccatcgcggccatagtggacgaaaagatcttctgctgccacggaggcctgtccccggacctgcagtctatggagcagattcggcggatcatgcggcccacagatgtgcctgaccagggcctgctgtgtgacctgctgtggtctgaccctgacaaggacgtgcagggctggggcgagaacgaccgtggcgtctcttttacctttggagccgaggtggtggccaagttcctccacaagcacgacttggacctcatctgccgagcacaccaggtggtagaagacggctacgagttctttgccaagcggcagctggtgacacttttctcagctcccaactactgtggcgagtttgacaatgctggcgccatgatgagtgtggacgagaccctcatgtgctctttccagatcctcaagcccgccgacaagaacaaggggaagtacgggcagttcagtggcctgaaccctggaggccgacccatcaccccaccccgcaattccgccaaagccaagaaatagcccccgcacaccaccctgtgccccagatgatggattgattgtacagaaatcatgctgccatgctgggggggggtcaccccgacccctcaggcccacctgtcacggggaacatggagccttggtgtatttttcttttctttttttaatgaatcaatagcagcgtccagtcccccagggctgcttcctgcctgcacctgcggtgactgtgagcaggatcctggggccgaggctgcagctcagggcaacggcaggccaggtcgtgggtctccagccgtgcttggcctcagggctggcagccggatcctggggcaacccatctggtctcttgaataaa

SEQ ID NO: 24378 - DNA, 1685 bp, Homo sapiens
  source 1..1685: mol_type = unassigned DNA
cttcttgctgacgccgccagcgccgaccaccagcagctgttttccctccatgaggcagcgcgccgaccgccgaagcatggtctccaccagcggcgccgccaccgcctcgtcggccgccggccccagccgcggcgcggcccacagcccctccagcgcgccgcacgcctccagacacaggccgccgttcagctccagggccactgggcttctccagcagcgccagcactgtgtccaccactgcacccagctctgcccgcgggtgcagacgccatgcctgccgcccccgccagcgccagccactgagcttcacagctacctgcagcaaggaggggaaaggggcctcctggacaccaccccaggtactgcagggtggggcacttccgccacaggagccgtgcagggctcgcggcctggcaagaatgtacagctgacagagaacgagatccgcggtctgtgcctgaaatcccgggagatttttctgagccagcccattcttctggagctggaggcacccctcaagatctgcggtgacatacacggccagtactacgaccttctgcgactatttgagtatggcggtttccctcccgagagcaactacctctttctgggggactatgtggacaggggcaagcagtccttggagaccatctgcctgctgctggcctataagatcaagtaccccgagaacttcttcctgctccgtgggaaccacgagtgtgccagcatcaaccgcatctatggtttctacgatgagtgcaagagacgctacaacatcaaactgtggaaaaccttcactgactgcttcaactgcctgcccatcgcggccatagtggacgaaaagatcttctgctgccacggaggcctgtccccggacctgcagtctatggagcagattcggcggatcatgcggcccacagatgtgcctgaccagggcctgctgtgtgacctgctgtggtctgaccctgacaaggacgtgcagggctggggcgagaacgaccgtggcgtctcttttacctttggagccgaggtggtggccaagttcctccacaagcacgacttggacctcatctgccgagcacaccaggtggtagaagacggctacgagttctttgccaagcggcagctggtgacacttttctcagctcccaactactgtggcgagtttgacaatgctggcgccatgatgagtgtggacgagaccctcatgtgctctttccagatcctcaagcccgccgacaagaacaaggggaagtacgggcagttcagtggcctgaaccctggaggccgacccatcaccccaccccgcaattccgccaaagccaagaaatagcccccgcacaccaccctgtgccccagatgatggattgattgtacagaaatcatgctgccatgctgggggggggtcaccccgacccctcaggcccacctgtcacggggaacatggagccttggtgtatttttcttttctttttttaatgaatcaatagcagcgtccagtcccccagggctgcttcctgcctgcacctgcggtgactgtgagcaggatcctggggccgaggctgcagctcagggcaacggcaggccaggtcgtgggtctccagccgtgcttggcctcagggctggcagccggatcctggggcaacccatctggtctcttgaataaaggtcaaagctggattctc

SEQ ID NO: 24379 - DNA, 3527 bp, Homo sapiens
  source 1..3527: mol_type = unassigned DNA
ggcgctggtgagctttgcggagctgggcggtgccgaggaggaggaggtggcggcctgggtctgacgcggccctgttcgagggggcctctcttgtttatttatttattttccgtgagagaacgccgagccgtcgccgcagcctccgccgccgagaagcccttgttcccgctgctgggaaggagagtctgtgccgacaagatggcggacggggagctgaacgtggacagcctcatcacccggctgctggaggtacgaggatgtcgtccaggaaagattgtgcagatgactgaagcagaagttcgaggcttatgtatcaagtctcgggagatctttctcagccagcctattcttttggaattggaagcaccgctgaaaatttgtggagatattcatggacaatatacagatttactgagattatttgaatatggaggtttcccaccagaagccaactatcttttcttaggagattatgtggacagaggaaagcagtctttggaaaccatttgtttgctattggcttataaaatcaaatatccagagaacttctttctcttaagaggaaaccatgagtgtgctagcatcaatcgcatttatggattctatgatgaatgcaaacgaagatttaatattaaattgtggaagaccttcactgattgttttaactgtctgcctatagcagccattgtggatgagaagatcttctgttgtcatggaggattgtcaccagacctgcaatctatggagcagattcggagaattatgagacctactgatgtccctgatacaggtttgctctgtgatttgctatggtctgatccagataaggatgtgcaaggctggggagaaaatgatcgtggtgtttcctttacttttggagctgatgtagtcagtaaatttctgaatcgtcatgatttagatttgatttgtcgagctcatcaggtggtggaagatggatatgaattttttgctaaacgacagttggtaaccttattttcagccccaaattactgtggcgagtttgataatgctggtggaatgatgagtgtggatgaaactttgatgtgttcatttcagatattgaaaccatctgaaaagaaagctaaataccagtatggtggactgaattctggacgtcctgtcactccacctcgaacagctaatccgccgaagaaaaggtgaagaaaggaattctgtaaagaaaccatcagatttgttaaggacatacttcataatatataagtgtgcactgtaaaaccatccagccatttgacaccctttatgatgtcacacctttaacttaaggagacgggtaaaggatcttaaatttttttctaatagaaagatgtgctacactgtattgtaataagtatactctgttatagtcaacaaagttaaatccaaattcaaaattatccattaaagttacatcttcatgtatcacaatttttaaagttgaaaagcatcccagttaaactagatgtgatagttaaaccagatgaaagcatgatgatccatctgtgtaatgtggttttagtgttgcttggttgtttaattattttgagcttgttttgtttttgtttgttttcactagaataatggcaaatacttctaatttttttccctaaacatttttaaaagtgaaatatgggaagagctttacagacattcaccaactattattttcccttgtttatctacttagatatctgtttaatcttactaagaaaactttcgcctcattacattaaaaaggaattttagagattgattgttttaaaaaaaaatacgcacattgtccaatccagtgattttaatcatacagtttgactgggcaaactttacagctgatagtgaatattttgctttatacaggaattgacactgatttggatttgtgcactctaatttttaacttattgatgctctattgtgcagtagcatttcatttaagataaggctcatatagtattacccaactagttggtaatgtgattatgtggtaccttggctttaggttttcattcgcacggaacaccttttggcatgcttaacttcctggtaacaccttcacctgcattggttttctttttcttttttctttctttttttttttttttttttttttgagttgttgtttgtttttagatccacagtacatgagaatccttttttgacaagccttggaaagctgacactgtctctttttcctccctctatacgaaggatgtatttaaatgaatgctggtcagtgggacattttgtcaactatgggtattgggtgcttaactgtctaatattgccatgtgaatgttgtatacgattgtaaggcttatgtcactaaagatttttattctgattttttcataatcaaaggtcatatgatactgtatagacaagctttgtagtgaagtatagtagcaataatttctgtacctgatcaagtttattgcagcctttcttttcctatttcttttttttaagggttagtattaacaaatggcaatgagtagaaaagttaacatgaagattttagaaggagagaacttacaggacacagatttgtgattctttgactgtgacactattggatgtgattctaaaagcttttattgagcattgtcaaatttgtaagcttcatagggatggacatcatatctataatgcccttctatatgtgctaccatagatgtgacatttttgaccttaatatcgtctttgaaaatgttaaattgagaaacctgttaacttacattttatgaattggcacattgtattacttactgcaagagatatttcattttcagcacagtgcaaaagttctttaaaatgcatatgtctttttttctaattccgttttgttttaaagcacattttaaatgtagttttctcatttagtaaaagttgtctaattgatatgaagcctgactgattttttttttccttacagtgagacatttaagcacacattttattcacatagatactatgtccttgacatattgaaatgattcttttctgaaagtattcatgatctgcatatgatgtattaggttaggtcacaaaggttttatctgaggtgatttaaataacttcctgattggagtgtgtaagctgagcgatttctaataaaattttagttgtacacttttagtagtcatagtgaagcaggtctagaaaataagcctttggcagggaaaaagggcaatgttgattaatctcagtattaaaccacattaatctgtatcccattgtctggcttttgtaaattcatccaggtcaagactaagtatgttggttaataggaatccttttttttttttttaaagactaaatgtgaaaaaataatcactacttaagctaattaatattggtcattaaatttaaaggatggaaatttatcatgtttaaaaattattcaagcactcttaaaaccacttaaacagcctccagtcataaaaatgtgttctttacaaatatttgcttggcaacacgacttgaaataaataaaactttgtttcttagga

SEQ ID NO: 24380 - DNA, 4771 bp, Homo sapiens
  source 1..4771: mol_type = unassigned DNA
gctgcgtgacgcggcggcgcgcaagggacgtgcggagtgagtggcgctgcgggtggggccgtcggcggcgctggtgagagaacgccgagccgtcgccgcagcctccgccgccgagaagcccttgttcccgctgctgggaaggagagtctgtgccgacaagatggcggacggggagctgaacgtggacagcctcatcacccggctgctggaggtacgaggatgtcgtccaggaaagattgtgcagatgactgaagcagaagttcgaggcttatgtatcaagtctcgggagatctttctcagccagcctattcttttggaattggaagcaccgctgaaaatttgtggagatattcatggacaatatacagatttactgagattatttgaatatggaggtttcccaccagaagccaactatcttttcttaggagattatgtggacagaggaaagcagtctttggaaaccatttgtttgctattggcttataaaatcaaatatccagagaacttctttctcttaagaggaaaccatgagtgtgctagcatcaatcgcatttatggattctatgatgaatgcaaacgaagatttaatattaaattgtggaagaccttcactgattgttttaactgtctgcctatagcagccattgtggatgagaagatcttctgttgtcatggaggattgtcaccagacctgcaatctatggagcagattcggagaattatgagacctactgatgtccctgatacaggtttgctctgtgatttgctatggtctgatccagataaggatgtgcaaggctggggagaaaatgatcgtggtgtttcctttacttttggagctgatgtagtcagtaaatttctgaatcgtcatgatttagatttgatttgtcgagctcatcaggtggtggaagatggatatgaattttttgctaaacgacagttggtaaccttattttcagccccaaattactgtggcgagtttgataatgctggtggaatgatgagtgtggatgaaactttgatgtgttcatttcagatattgaaaccatctgaaaagaaagctaaataccagtatggtggactgaattctggacgtcctgtcactccacctcgaacagctaatccgccgaagaaaaggtgaagaaaggaattctgtaaagaaaccatcagatttgttaaggacatacttcataatatataagtgtgcactgtaaaaccatccagccatttgacaccctttatgatgtcacacctttaacttaaggagacgggtaaaggatcttaaatttttttctaatagaaagatgtgctacactgtattgtaataagtatactctgttatagtcaacaaagttaaatccaaattcaaaattatccattaaagttacatcttcatgtatcacaatttttaaagttgaaaagcatcccagttaaactagatgtgatagttaaaccagatgaaagcatgatgatccatctgtgtaatgtggttttagtgttgcttggttgtttaattattttgagcttgttttgtttttgtttgttttcactagaataatggcaaatacttctaatttttttccctaaacatttttaaaagtgaaatatgggaagagctttacagacattcaccaactattattttcccttgtttatctacttagatatctgtttaatcttactaagaaaactttcgcctcattacattaaaaaggaattttagagattgattgttttaaaaaaaaatacgcacattgtccaatccagtgattttaatcatacagtttgactgggcaaactttacagctgatagtgaatattttgctttatacaggaattgacactgatttggatttgtgcactctaatttttaacttattgatgctctattgtgcagtagcatttcatttaagataaggctcatatagtattacccaactagttggtaatgtgattatgtggtaccttggctttaggttttcattcgcacggaacaccttttggcatgcttaacttcctggtaacaccttcacctgcattggttttctttttcttttttctttctttttttttttttttttttttttgagttgttgtttgtttttagatccacagtacatgagaatccttttttgacaagccttggaaagctgacactgtctctttttcctccctctatacgaaggatgtatttaaatgaatgctggtcagtgggacattttgtcaactatgggtattgggtgcttaactgtctaatattgccatgtgaatgttgtatacgattgtaaggcttatgtcactaaagatttttattctgattttttcataatcaaaggtcatatgatactgtatagacaagctttgtagtgaagtatagtagcaataatttctgtacctgatcaagtttattgcagcctttcttttcctatttcttttttttaagggttagtattaacaaatggcaatgagtagaaaagttaacatgaagattttagaaggagagaacttacaggacacagatttgtgattctttgactgtgacactattggatgtgattctaaaagcttttattgagcattgtcaaatttgtaagcttcatagggatggacatcatatctataatgcccttctatatgtgctaccatagatgtgacatttttgaccttaatatcgtctttgaaaatgttaaattgagaaacctgttaacttacattttatgaattggcacattgtattacttactgcaagagatatttcattttcagcacagtgcaaaagttctttaaaatgcatatgtctttttttctaattccgttttgttttaaagcacattttaaatgtagttttctcatttagtaaaagttgtctaattgatatgaagcctgactgattttttttttccttacagtgagacatttaagcacacattttattcacatagatactatgtccttgacatattgaaatgattcttttctgaaagtattcatgatctgcatatgatgtattaggttaggtcacaaaggttttatctgaggtgatttaaataacttcctgattggagtgtgtaagctgagcgatttctaataaaattttagttgtacacttttagtagtcatagtgaagcaggtctagaaaataagcctttggcagggaaaaagggcaatgttgattaatctcagtattaaaccacattaatctgtatcccattgtctggcttttgtaaattcatccaggtcaagactaagtatgttggttaataggaatccttttttttttttttaaagactaaatgtgaaaaaataatcactacttaagctaattaatattggtcattaaatttaaaggatggaaatttatcatgtttaaaaattattcaagcactcttaaaaccacttaaacagcctccagtcataaaaatgtgttctttacaaatatttgcttggcaacacgacttgaaataaataaaactttgtttcttaggagaaaatgattctgtaattccagtgtcactaatttatattgttctttcctctgatttttttcaggttagtgatttttttgtatacaatttaatccaaatgttatgacattcagaaatcatgaaacacagtagatatctgttataatgtggtgtatcacatggattataaagcaaagttatggtcgatttctattcttgaaagaatcaactacagtgaatcctttgcatttgaagccttaacatgcattgctttaattttgcccagggacaaattttaataatcagcaagactggtttgtgcaaagcgttgagtcatcaggtatttagagcctagccagctacccagtatccatgctgccatatcccttcattgtaaaaagtacctaaacattcgtgaaatgattttttttagctgaaaaatgctggcaagaagaattttaaagcttaaaataggtggtaaatttgaagtatgagtgtgttcacgagaaacataggcttttcaaaaaaatttttattcaaggcaaagcaaggaacatcttgagatatgtctcaagaatataaagatgtattattttaagccaaggagctgaaatatatctcagtttataaattcaggtatattctttttgtctccatggcaaccataacttttgaaccaaaaaaaattgtttttacatctttatgctgaaaatgtgtttagattaggaatatggtcgggctgaatttgctgttgctccctaaccaaatccacctcttgttttccttgtgagtccatggctaaatcaaagctgcccctgagaagagacttaatccaagcctgattgtactagtggcatcacttagaagtaggctttccctcttcctagtagatctcaatgttttataattccttaaaacagctgaaaattgggacaacatactttacgcaatgaacagtagttaaataggaaataaactagttccatataagtatacacctagagttttaattacctttataatgtttcttaaaagtgaaacttagatacaattgtgattggatacttagatactaagtgaaacttagtgtaacaattttgatctgttaaattggattttacatgtacatttgaatgccagaatttctaaataaatcccctggttaggaaattttaaaagtcaaagcttgttttcttcaaccactaccttctacattggttgacttagaccgtaagctttttaagtttctcattgtaatttaccttctcatgcagattgctgatgttttattaaaccttattttt

SEQ ID NO: 24381 - DNA, 4893 bp, Homo sapiens
  source 1..4893: mol_type = unassigned DNA
ggaggaggtggcggcctgggtctgacgcggccctgttcgagggggcctctcttgtttatttatttattttccgtgggtgcctccgagtgtgcgcgcgctctcgctacccggcggggagggggtggggggagggcccgggaaaagggggagttggagccggggtcgaaacgccgcgtgacttgtaggtgagagaacgccgagccgtcgccgcagcctccgccgccgagaagcccttgttcccgctgctgggaaggagagtctgtgccgacaagatggcggacggggagctgaacgtggacagcctcatcacccggctgctggaggtacgaggatgtcgtccaggaaagattgtgcagatgactgaagcagaagttcgaggcttatgtatcaagtctcgggagatctttctcagccagcctattcttttggaattggaagcaccgctgaaaatttgtggagatattcatggacaatatacagatttactgagattatttgaatatggaggtttcccaccagaagccaactatcttttcttaggagattatgtggacagaggaaagcagtctttggaaaccatttgtttgctattggcttataaaatcaaatatccagagaacttctttctcttaagaggaaaccatgagtgtgctagcatcaatcgcatttatggattctatgatgaatgcaaacgaagatttaatattaaattgtggaagaccttcactgattgttttaactgtctgcctatagcagccattgtggatgagaagatcttctgttgtcatggaggattgtcaccagacctgcaatctatggagcagattcggagaattatgagacctactgatgtccctgatacaggtttgctctgtgatttgctatggtctgatccagataaggatgtgcaaggctggggagaaaatgatcgtggtgtttcctttacttttggagctgatgtagtcagtaaatttctgaatcgtcatgatttagatttgatttgtcgagctcatcaggtggtggaagatggatatgaattttttgctaaacgacagttggtaaccttattttcagccccaaattactgtggcgagtttgataatgctggtggaatgatgagtgtggatgaaactttgatgtgttcatttcagatattgaaaccatctgaaaagaaagctaaataccagtatggtggactgaattctggacgtcctgtcactccacctcgaacagctaatccgccgaagaaaaggtgaagaaaggaattctgtaaagaaaccatcagatttgttaaggacatacttcataatatataagtgtgcactgtaaaaccatccagccatttgacaccctttatgatgtcacacctttaacttaaggagacgggtaaaggatcttaaatttttttctaatagaaagatgtgctacactgtattgtaataagtatactctgttatagtcaacaaagttaaatccaaattcaaaattatccattaaagttacatcttcatgtatcacaatttttaaagttgaaaagcatcccagttaaactagatgtgatagttaaaccagatgaaagcatgatgatccatctgtgtaatgtggttttagtgttgcttggttgtttaattattttgagcttgttttgtttttgtttgttttcactagaataatggcaaatacttctaatttttttccctaaacatttttaaaagtgaaatatgggaagagctttacagacattcaccaactattattttcccttgtttatctacttagatatctgtttaatcttactaagaaaactttcgcctcattacattaaaaaggaattttagagattgattgttttaaaaaaaaatacgcacattgtccaatccagtgattttaatcatacagtttgactgggcaaactttacagctgatagtgaatattttgctttatacaggaattgacactgatttggatttgtgcactctaatttttaacttattgatgctctattgtgcagtagcatttcatttaagataaggctcatatagtattacccaactagttggtaatgtgattatgtggtaccttggctttaggttttcattcgcacggaacaccttttggcatgcttaacttcctggtaacaccttcacctgcattggttttctttttcttttttctttctttttttttttttttttttttttgagttgttgtttgtttttagatccacagtacatgagaatccttttttgacaagccttggaaagctgacactgtctctttttcctccctctatacgaaggatgtatttaaatgaatgctggtcagtgggacattttgtcaactatgggtattgggtgcttaactgtctaatattgccatgtgaatgttgtatacgattgtaaggcttatgtcactaaagatttttattctgattttttcataatcaaaggtcatatgatactgtatagacaagctttgtagtgaagtatagtagcaataatttctgtacctgatcaagtttattgcagcctttcttttcctatttcttttttttaagggttagtattaacaaatggcaatgagtagaaaagttaacatgaagattttagaaggagagaacttacaggacacagatttgtgattctttgactgtgacactattggatgtgattctaaaagcttttattgagcattgtcaaatttgtaagcttcatagggatggacatcatatctataatgcccttctatatgtgctaccatagatgtgacatttttgaccttaatatcgtctttgaaaatgttaaattgagaaacctgttaacttacattttatgaattggcacattgtattacttactgcaagagatatttcattttcagcacagtgcaaaagttctttaaaatgcatatgtctttttttctaattccgttttgttttaaagcacattttaaatgtagttttctcatttagtaaaagttgtctaattgatatgaagcctgactgattttttttttccttacagtgagacatttaagcacacattttattcacatagatactatgtccttgacatattgaaatgattcttttctgaaagtattcatgatctgcatatgatgtattaggttaggtcacaaaggttttatctgaggtgatttaaataacttcctgattggagtgtgtaagctgagcgatttctaataaaattttagttgtacacttttagtagtcatagtgaagcaggtctagaaaataagcctttggcagggaaaaagggcaatgttgattaatctcagtattaaaccacattaatctgtatcccattgtctggcttttgtaaattcatccaggtcaagactaagtatgttggttaataggaatccttttttttttttttaaagactaaatgtgaaaaaataatcactacttaagctaattaatattggtcattaaatttaaaggatggaaatttatcatgtttaaaaattattcaagcactcttaaaaccacttaaacagcctccagtcataaaaatgtgttctttacaaatatttgcttggcaacacgacttgaaataaataaaactttgtttcttaggagaaaatgattctgtaattccagtgtcactaatttatattgttctttcctctgatttttttcaggttagtgatttttttgtatacaatttaatccaaatgttatgacattcagaaatcatgaaacacagtagatatctgttataatgtggtgtatcacatggattataaagcaaagttatggtcgatttctattcttgaaagaatcaactacagtgaatcctttgcatttgaagccttaacatgcattgctttaattttgcccagggacaaattttaataatcagcaagactggtttgtgcaaagcgttgagtcatcaggtatttagagcctagccagctacccagtatccatgctgccatatcccttcattgtaaaaagtacctaaacattcgtgaaatgattttttttagctgaaaaatgctggcaagaagaattttaaagcttaaaataggtggtaaatttgaagtatgagtgtgttcacgagaaacataggcttttcaaaaaaatttttattcaaggcaaagcaaggaacatcttgagatatgtctcaagaatataaagatgtattattttaagccaaggagctgaaatatatctcagtttataaattcaggtatattctttttgtctccatggcaaccataacttttgaaccaaaaaaaattgtttttacatctttatgctgaaaatgtgtttagattaggaatatggtcgggctgaatttgctgttgctccctaaccaaatccacctcttgttttccttgtgagtccatggctaaatcaaagctgcccctgagaagagacttaatccaagcctgattgtactagtggcatcacttagaagtaggctttccctcttcctagtagatctcaatgttttataattccttaaaacagctgaaaattgggacaacatactttacgcaatgaacagtagttaaataggaaataaactagttccatataagtatacacctagagttttaattacctttataatgtttcttaaaagtgaaacttagatacaattgtgattggatacttagatactaagtgaaacttagtgtaacaattttgatctgttaaattggattttacatgtacatttgaatgccagaatttctaaataaatcccctggttaggaaattttaaaagtcaaagcttgttttcttcaaccactaccttctacattggttgacttagaccgtaagctttttaagtttctcattgtaatttaccttctcatgcagattgctgatgttttattaaaccttatttttacaaaaatga

SEQ ID NO: 24382 - DNA, 570 bp, Homo sapiens
  source 1..570: mol_type = unassigned DNA
agtgcggttgcgcggcggcccaggcgtcgaggggagcctcggcggggagcgcaccgcgcgcctgcgcggagagctgcgtgacgcggcggcgcgcaagggacgtgcggagtgagagaacgccgagccgtcgccgcagcctccgccgccgagaagcccttgttcccgctgctgggaaggagagtctgtgccgacaagatggcggacggggagctgaacgtggacagcctcatcacccggctgctggaggtacgaggatgtcgtccaggaaagattgtgcagatgactgaagcagaagttcgaggcttatgtatcaagtctcgggagatctttctcagccagcctattcttttggaattggaagcaccgctgaaaatttgtggagatattcatggacaatatacagatttactgagattatttgaatatggaggtttcccaccagaagccaactatcttttcttaggagattatgtggacagaggaaagcagtctttggaaaccatttgtttgctattggcttataaaatcaaatatccagagaacttctttctcttaagaggaaaccatgag

SEQ ID NO: 24383 - DNA, 584 bp, Homo sapiens
  source 1..584: mol_type = unassigned DNA
gcgcggagagctgcgtgacgcggcggcgcgcaagggacgtgcggagtgagtggcgctgcgggtggggccgtcggcggcgctggtgagagaacgccgagccgtcgccgcagcctccgccgccgagaagcccttgttcccgctgctgggaaggagagtctgtgccgacaagatggcggacggggagctgaacgtggacagcctcatcacccggctgctggaggtacgaggatgtcgtccaggaaagattgtgcagatgactgaagcagaagttcgaggcttatgtatcaagtctcgggagatctttctcagccagcctattcttttggaattggaagcaccgctgaaaatttgtggagatattcatggacaatatacagatttactgagattatttgaatatggaggtttcccaccagaagccaactatcttttcttaggagattatgtggacagaggaaagcagtctttggaaaccatttgtttgctattggcttataaaatcaaatatccagagaacttctttctcttaagaggaaaccatgagtgtgctagcatcaatcgcatttatggattctatgatgaat

SEQ ID NO: 24384 - DNA, 721 bp, Homo sapiens
  source 1..721: mol_type = unassigned DNA
cacctgcgcgaagacggcagcgggagaagccgctccagtgcggttgcgcggcggcccaggcgtcgaggggagcctcggcggggagcgcaccgcgcgcctgcgcggagagctgcgtgacgcggcggcgcgcaagggacgtgcggagtgagtggcgctgcgggtggggccgtcggcggcgctgtacgaggatgtcgtccaggaaagattgtgcagatgactgaagcagaagttcgaggcttatgtatcaagtctcgggagatctttctcagccagcctattcttttggaattggaagcaccgctgaaaatttgtggagatattcatggacaatatacagatttactgagattatttgaatatggaggtttcccaccagaagccaactatcttttcttaggagattatgtggacagaggaaagcagtctttggaaaccatttgtttgctattggcttataaaatcaaatatccagagaacttctttctcttaagaggaaaccatgagtgtgctagcatcaatcgcatttatggattctatgatgaatgcaaacgaagatttaatattaaattgtggaagaccttcactgattgttttaactgtctgcctatagcagccattgtggatgagaagatcttctgttgtcatggaggattgtcaccagacctgcaatctatggagcagattcggagaattatgagacctactgatgtccctgatacag

SEQ ID NO: 24385 - DNA, 2559 bp, Homo sapiens
  source 1..2559: mol_type = unassigned DNA
ttttgttcttctcgtggttccagtggggagagaaggaggaagtagggagcggggtggcaggggggggacccgccgcggctgctgccaccgccgccaccaccgcctctgctcgtggcgtgggaaaggaggtgtgagtcccgggcgcgagccggcggcggcgccgctgcgggagggtcggcggtgggaaggcgatggcggatttagataaactcaacatcgacagcattatccaacggctgctggaagtgagagggtccaagcctggtaagaatgtccagcttcaggagaatgaaatcagaggactgtgcttaaagtctcgtgaaatctttctcagtcagcctatcctactagaacttgaagcaccactcaaaatatgtggtgacatccatggacaatactatgatttgctgcgactttttgagtacggtggtttcccaccagaaagcaactacctgtttcttggggactatgtggacaggggaaagcagtcattggagacgatctgcctcttactggcctacaaaataaaatatcctgagaatttttttcttctcagagggaaccatgaatgtgccagcatcaacagaatttatggattttatgatgaatgtaaaagaagatacaacattaaactatggaaaactttcacagactgttttaactgtttaccgatagcagccatcgtggatgagaagatattctgctgtcatggaggtttatcaccagatcttcaatctatggagcagattcggcgaattatgcgaccaactgatgtaccagatcaaggtcttctttgtgatcttttgtggtctgaccccgataaagatgtcttaggctggggtgaaaatgacagaggagtgtccttcacatttggtgcagaagtggttgcaaaatttctccataagcatgatttggatcttatatgtagagcccatcaggtggttgaagatggatatgaattttttgcaaagaggcagttggtcactctgttttctgcgcccaattattgcggagagtttgacaatgcaggtgccatgatgagtgtggatgaaacactaatgtgttcttttcagattttaaagcctgcagagaaaaagaagccaaatgccacgagacctgtaacgcctccaaggggtatgatcacaaagcaagcaaagaaatagatgtcgttttgacactgcctagtcgggacttgtaacatagagtatataaccttcatttttaagactgtaatgtgtactggtcagcttgctcagatagatctgtgtttgtgggggcccttccttccatttttgatttagtgaatggcatttgctggttataacagcaaatgaaagactcttcactccaaaaagaaaagtgttttgttttttaattctctgttccttttgcaaacaattttaatgatggtgttaaagctgtacaccccaggacagtttatcctgtctgaggagtaagtgtacaattgatcttttttaattcagtacaacccataatcatgtaaatgctcattttctttaggacataaagagagccctagggtgctctgaatctgtacatgttcttgtcataaaatgcatactgttgatacaaaccactgtgaacattttttatttgagaattttgtttcaaagggattgctttttcctctcattgtcttgttatgtacaaactagtttttatagctatcaacattaggagtaactttcaaccttgccagcatcactggtatgatgtatatttaattaaagcacacttttccccgaccgtatacttaaaatgacaaagccattcttttaaatatttgtgactctttcctaaagccaaagtttctgttgaattatgttttgacacacccctaagtacaaggtggtatggttgtatacacatgctgccttcttggggattcaaaaacaggtttttgattttgaatagcaattagtgatatagtgctgtttaagctactaacgataaaaggtaataacattttatacaatttccatatagtctattcattaagtaatctttttacagttgcatcaggcctgaacccgtccattcagaaagcttcaaattatagaaacaatactgttctatacgagtgaccgattatgctttctttggcctacattctttattctgcggtgaagttgaggcttataagttaaaacaaaggaactaacttactgtccaccagtttatacagaactcacagtacctatgacttttttaaactaagatctgttaaaaaagaaatctgtttcaacagatgaccgtgtacaataccgtgtggtgaaaatgaattcagacttattaaatgatgaacttgttaaatcttctcagtgtctatttatcagcacaatacacacaggagaactgttgatggcatattgaatagattttcctgaataaattgctctggaaaccacacggttgcattttggttttgcttctttcaaatagtctgttttccaaagatggattataatacagatactaatactctttgagttgtaacctggagacatctatttgtgtaatagagtgatgaggtggaac

SEQ ID NO: 24386 - DNA, 1472 bp, Homo sapiens
  source 1..1472: mol_type = unassigned DNA
atccgtgcgccgcccgaggctgtctaaggagtcggcggccattttgttcttctcgtggttccagtggggagagaaggaggaagtagggagcggggtggcaggggggggacccgccgcggctgctgccaccgccgccaccaccgcctctgctcgtggcgtgggaaaggaggtgtgagtcccgggcgcgagccggcggcggcgccgctgcgggagggtcggcggtgggaaggcgatggcggatttagataaactcaacatcgacagcattatccaacggctgctggaagtgagagggtccaagcctggtaagaatgtccagcttcaggagaatgaaatcagaggactgtgcttaaagtctcgtgaaatctttctcagtcagcctatcctactagaacttgaagcaccactcaaaatatgtggtgacatccatggacaatactatgatttgctgcgactttttgagtacggtggtttcccaccagaaagcaactacctgtttcttggggactatgtggacaggggaaagcagtcattggagacgatctgcctcttactggcctacaaaataaaatatcctgagaatttttttcttctcagagggaaccatgaatgtgccagcatcaacagaatttatggattttatgatgaatgtaaaagaagatacaacattaaactatggaaaactttcacagactgttttaactgtttaccgatagcagccatcgtggatgagaagatattctgctgtcatggaggtttatcaccagatcttcaatctatggagcagattcggcgaattatgcgaccaactgatgtaccagatcaaggtcttctttgtgatcttttgtggtctgaccccgataaagatgtcttaggctggggtgaaaatgacagaggagtgtccttcacatttggtgcagaagtggttgcaaaatttctccataagcatgatttggatcttatatgtagagcccatcaggtggttgaagatggatatgaattttttgcaaagaggcagttggtcactctgttttctgcgcccaattattgcggagagtttgacaatgcaggtgccatgatgagtgtggatgaaacactaatgtgttcttttcagattttaaagcctgcagagaaaaagaagccaaatgccacgagacctgtaacgcctccaagggttgcatcaggcctgaacccgtccattcagaaagcttcaaattatagaaacaatactgttctatacgagtgaccgattatgctttctttggcctacattctttattctgcggtgaagttgaggcttataagttaaaacaaaggaactaacttactgtccaccagtttatacagaactcacagtacctatgacttttttaaactaagatctgttaaaaaagaaatctgtttcaacagatgaccgtgtacaataccgtgtggtgaaaatgaattcagacttattaaatgatgaacttgtt

SEQ ID NO: 24387 - DNA, 2154 bp, Homo sapiens
  source 1..2154: mol_type = unassigned DNA
atcagaacgagacttagttacatattttggggtccaaaagtgaactttataactgtaaaattaaggtacatttagcagttccgtgctactttatctgtatctaatgactatccagtctgttacaactggaaccaaaacaaaatttctttcccacaactacctacgtgctgacaagtgagttctgttgcaaagtttgtactttgatagaagaaccctaagtgctctggtggtgtggatgccccatgctgtgcaatgatttctttctcccattattatcttatctgttcaaattattagggaacgtgctttcttacagtatagcacatgactgacatcctttgccctatatagacatgagcataaacacaaatgcaggcccagaaaatgcatggcaaaataagtacaatgaaccaacattttcttaatgaaatgaaaacaacactaacattttttcataggtaaattaaatcagagatcctcaggaggagatacccatggtcctctggaaaacactgatgggggagggttctgagtatttccaatcctgtttcttttcttttcttttctttccttttcttttttttttttgagacggagtctcgctgtgttgccaggctggagtgcagtggcgcgatcttggctcactgcaacctccgcctcccgggtgcaggcgattctcctgagtagctgggattacaggtgcacgccatgttggcgaggatggtctggatctcttgacctcatcatgatctgcccgcctcaccctcccaaagtgctgggattacaagcgtgagccattgcatctggcctgcagtcctgtttctaacagcattcgcacagacaggatggctccttttttggaatactataaaagaagtcttacttggtatcgaagatgcaattaagtcttgtctaagattttaagattctaattagacattaaaaccatgtttattataagtgtcctgaaaatgaagccactcagaaagctagttaaaccatgtttttgcccctttatctaaatctcgtattgtattttgtattttggcttcattggactaattgcgatttttctcttgcagtgagagggtccaagcctggtaagaatgtccagcttcaggagaatgaaatcagaggactgtgcttaaagtctcgtgaaatctttctcagtcagcctatcctactagaacttgaagcaccactcaaaatatgtggtgacatccatggacaatactatgatttgctgcgactttttgagtacggtggtttcccaccagaaagcaactacctgtttcttggggactatgtggacaggggaaagcagtcattggagacgatctgcctcttactggcctacaaaataaaatatcctgagaatttttttcttctcagagggaaccatgaatgtgccagcatcaacagaatttatggattttatgatgaatgtaaaagaagatacaacattaaactatggaaaactttcacagactgttttaactgtttaccgatagcagccatcgtggatgagaagatattctgctgtcatggaggtttatcaccagatcttcaatctatggagcagattcggcgaattatgcgaccaactgatgtaccagatcaaggtcttctttgtgatcttttgtggtctgaccccgataaagatgtcttaggctggggtgaaaatgacagaggagtgtccttcacatttggtgcagaagtggttgcaaaatttctccataagcatgatttggatcttatatgtagagcccatcaggtggttgaagatggatatgaattttttgcaaagaggcagttggtcactctgttttctgcgcccaattattgcggagagtttgacaatgcaggtgccatgatgagtgtggatgaaacactaatgtgttcttttcagattttaaagcctgcagagaaaaagaagccaaatgccacgagacctgtaacgcctccaaggggtatgatcacaaagcaagcaaagaaatagatgtcgttttgacactgcctagtcgggacttgtaacatagagtatataaccttcatttttaagactgtaatgtgtactggtcagcttgctcagatagatctgtgtttgtgggggcccttccttccatttttgatttagtgaatggcatttgctgg

SEQ ID NO: 24388 - DNA, 2797 bp, Homo sapiens
  source 1..2797: mol_type = unassigned DNA
aattttggagcatcttggattaaggatactcatcctgtggtggtagtagtagtagtattgctgttggaaatgggagttggtggtttttggagattgcccttcagcctttcgtaagaaggagtttgcttttttttgagacggagtttcactcttgttgcccatgctggagtgcaatggtgcgatcttggcttactgcaacctctgcctcccaggttcaagcaattttccttcctcagcctggcgggagaagtttgttaaactttccgaaccccctagtgaaggacctctaaagaaatatgcaacagggtgaaccatagtcagtgttagacccagtcattgagaaaccagaaattattaggagaaaagataacactcctctgcagagagaaggcaaacatttgttgaatttacatttcatttcaagccctgtggtaaactccctaagctgcttgatttgcattacagggtgggaggtgtggttcaggtcagttgcttgggctggctctaactctcaaaggagaggtataggtttaaacctttagatgtccctgtattccccaggaaaagagactaaggacaaactcttggtttgttttgtttgttttgttttgttttttgagacggagtttcgctcttgttgcccaagccggagtgcaatggcacaatcaaggctcaccgcaacctccgcctcccaggttcaagtgactcttctgccttagcctcccaagtagctgggattacaggcatgcgccaccacgcccagctaatttttatatttttagtagagacgggatttcttcatgttggtcaggctggtctcaaactcccaacctcagatggtctgcccgcctcggcctcccaaagtgctgggattacaggtgtgagccaccgcgcctggccaaactcctggtttttaaagattgtgcttagtatagtaagtacaggaaacaaaggcatctggacaattggacaatcctcaaccaatccagagaaatttgttcttgcaaggtatgtgactaggttttaaactcagaacatcagtttcctgtagaaacagtgcatagaggcatatttctgtcagaactgcactctgactccagaatgtgtggatgcctgtgctgttgagggaacatgaccatcctgtgacatcaggcctgtgggagcatgtggagtctgtgcagtgttggaaacaaatgccctgtagtgcctgtgagaggcagccactgccgtgtgatcattgtgcctcctgctagagtactgagggctggggatcctctggtgtcagtaggttattgaggggcatatatgggggatgggtgctaactctcaggtttcctcagaaggaaggtcataacgccacatgtgtaagttcgtaattgaattcagaagtaggggactagctgcggtgagattggacagagcagacaatttcaaacagaattgatgctcccagataattcctgggatttgatggcagtccttaatcattatcaaatctggaattctggtttcatgcttctgtggaatttaaaaagatttcatgtgaaaatgtaagtcattgcttttagatcagatatgtgtctctcctaaaccccttccctctaggagagtctttctttaaagagatggggtctcactatgttgcccaagatggtcttgaactcctgggctcaagccatcctcctacctcagcctcccgaagtgctgggattacaggtctgacccaccacgcccagctcttattttaaaagagccttaaaataagatggttttattaagattcttaataaaaacatagtttcatttgcttaaaaggcacccagaatcttgctttgggggaagttaatcctgagagaatgagcctacggaacagtaatactctctttttaatgtaatactctctttttaatcacaggtaaaagaagatacaacattaaactatggaaaactttcacagactgttttaactgtttaccgatagcagccatcgtggatgagaagatattctgctgtcatggaggtttatcaccagatcttcaatctatggagcagattcggcgaattatgcgaccaactgatgtaccagatcaaggtcttctttgtgatcttttgtggtctgaccccgataaagatgtcttaggctggggtgaaaatgacagaggagtgtccttcacatttggtgcagaagtggttgcaaaatttctccataagcatgatttggatcttatatgtagagcccatcaggtggttgaagatggatatgaattttttgcaaagaggcagttggtcactctgttttctgcgcccaattattgcggagagtttgacaatgcaggtgccatgatgagtgtggatgaaacactaatgtgttcttttcagattttaaagcctgcagagaaaaagaagccaaatgccacgagacctgtaacgcctccaaggggtatgatcacaaagcaagcaaagaaatagatgtcgttttgacactgcctagtcgggacttgtaacatagagtatataaccttcatttttaagactgtaatgtgtactggtcagcttgctcagatagatctgtgtttgtgggggcccttccttccatttttgatttagtgaatggcatttgctggttataacagcaaatgaaagactcttcactccaaaaagaaaagtgttttgttttttaattctctgttccttttgcaaacaattttaatgatggtgttaaagctgtacaccccaggacagtttatcctgtctgaggagtaagtgtacaattgatcttttttaattcagtacaacc

SEQ ID NO: 24389 - DNA, 1723 bp, Homo sapiens
  source 1..1723: mol_type = unassigned DNA
ggaaaaaggaagggagatcaaagattaggtgctggggactgaaaaataattttcatgtattaatactaccaaggatgatttggggaggaagacggagaaacagcaaggattatattttcctttgaagagttgctgggacctttcctaggttaggaattgtgtcttctcttatactggtggtataagaacaggaaataatacttattcctcaagggactatctgaggtaaaagacctgttctgttttatcttctgtcagctcctctggtgctatgcctatggtactgattgagctaaagaagaaaagagaggaggttccctgggagggagtgggaaaggttagtaagaggggactagataggtatgctcatccttaaccttctaggagaaccggagccttaccatcaaacttcggaaacggaagccagagaaaaaggtagaatggacaagtgacactgtggacaatgaacacatgggccgccgctcatccaaatgctgctgtatttatgagaaacctcgggcctttggcgagagctccacggaaagtgatgaggaggaagaagagggctgtggtcatacacactgtgtacgtggccaccgcaaaggacggcgtcgtgcaaccctaggaccgacccccaccacccctccccagcctcctgacccttcccagccccctccagggccaatgcagcactaaatccctctctcctccagcattcctgtgtctgtctggccctaaatgtatccatgtggctacttctccagccccctccttccctctcttctgcctgatagagggaagaggaagaggaggacgaacagagatcctgaaattctgacttgctgctattccagaacccagcctcctgggtttccccagtcctcatttttcctcccaatacccacccttctctctcgagggatctaggcaccttggtcccagtgtcttccttttgttctcactgccaaactgcctgtcctgggatctagttatcttggccctgcactctcaacatgagtagcgaacacttaaattgggttttcaacagtcccagctttcactgccagggtcccagtcagattccaggaatttgcgccctaactttgcttgctaatcctggtttagagctatcccactaaaatatttaatcctaattcttagtccttgcctgtgagatatgaggtcttacaggagacctcagagctcccagcccttctcctcctgctaacccttctcacaccctcaagaggagttagaaaagaggtccttgtcattctcacctcttatggaaaatggaataagaaataatcatatcctttcttcccacccttctcctgttatttaggatttctgacaaagctggcttgagattggtcacttagagccgactgtctcctctgccttttgtttttcagcttcagagacagatccaatatagtcccagggacctgggtctctgggagaggaaggaagagggagggagcaaagagattggggtatgtcccctgtagtacactcttacctcttacttcctagactttgatttctccggcagcccagatgttcagttctcttggcccctctctaccccttactgggatccggttttcattttccggtccttttgccatacacagttacagagatcagtcaaatccataccaccactgagatctcatttattgccacagatgcacaaaataaataacccaaaatcacaaaa

SEQ ID NO: 24390 - DNA, 1464 bp, Homo sapiens
  source 1..1464: mol_type = unassigned DNA
gggatatgggaggtgtggggttgaatatctagggctgggagaatcggaaggatgatttggggaggaagacggagaaacagcaaggattatattttcctttgaagagttgctgggacctttcctaggagaaccggagccttaccatcaaacttcggaaacggaagccagagaaaaaggtagaatggacaagtgacactgtggacaatgaacacatgggccgccgctcatccaaatgctgctgtatttatgagaaacctcgggcctttggcgagagctccacggaaagtgatgaggaggaagaagagggctgtggtcatacacactgtgtacgtggccaccgcaaaggacggcgtcgtgcaaccctaggaccgacccccaccacccctccccagcctcctgacccttcccagccccctccagggccaatgcagcactaaatccctctctcctccagcattcctgtgtctgtctggccctaaatgtatccatgtggctacttctccagccccctccttccctctcttctgcctgatagagggaagaggaagaggaggacgaacagagatcctgaaattctgacttgctgctattccagaacccagcctcctgggtttccccagtcctcatttttcctcccaatacccacccttctctctcgagggatctaggcaccttggtcccagtgtcttccttttgttctcactgccaaactgcctgtcctgggatctagttatcttggccctgcactctcaacatgagtagcgaacacttaaattgggttttcaacagtcccagctttcactgccagggtcccagtcagattccaggaatttgcgccctaactttgcttgctaatcctggtttagagctatcccactaaaatatttaatcctaattcttagtccttgcctgtgagatatgaggtcttacaggagacctcagagctcccagcccttctcctcctgctaacccttctcacaccctcaagaggagttagaaaagaggtccttgtcattctcacctcttatggaaaatggaataagaaataatcatatcctttcttcccacccttctcctgttatttaggatttctgacaaagctggcttgagattggtcacttagagccgactgtctcctctgccttttgtttttcagcttcagagacagatccaatatagtcccagggacctgggtctctgggagaggaaggaagagggagggagcaaagagattggggtatgtcccctgtagtacactcttacctcttacttcctagactttgatttctccggcagcccagatgttcagttctcttggcccctctctaccccttactgggatccggttttcattttccggtccttttgccatacacagttacagagatcagtcaaatccataccaccactgagatctcatttattgccacagatgcacaaaataaataacccaaaatcacaaaa

SEQ ID NO: 24391 - DNA, 1536 bp, Homo sapiens
  source 1..1536: mol_type = unassigned DNA
ggattagaagagttgttggaggagctaggcctagggatatgggaggtgtggggttgaatatctagggctgggagaatcggaaggtattggagctatttggagtggcagagatggtgcaggaggatgatttggggaggaagacggagaaacagcaaggattatattttcctttgaagagttgctgggacctttcctaggagaaccggagccttaccatcaaacttcggaaacggaagccagagaaaaaggtagaatggacaagtgacactgtggacaatgaacacatgggccgccgctcatccaaatgctgctgtatttatgagaaacctcgggcctttggcgagagctccacggaaagtgatgaggaggaagaagagggctgtggtcatacacactgtgtacgtggccaccgcaaaggacggcgtcgtgcaaccctaggaccgacccccaccacccctccccagcctcctgacccttcccagccccctccagggccaatgcagcactaaatccctctctcctccagcattcctgtgtctgtctggccctaaatgtatccatgtggctacttctccagccccctccttccctctcttctgcctgatagagggaagaggaagaggaggacgaacagagatcctgaaattctgacttgctgctattccagaacccagcctcctgggtttccccagtcctcatttttcctcccaatacccacccttctctctcgagggatctaggcaccttggtcccagtgtcttccttttgttctcactgccaaactgcctgtcctgggatctagttatcttggccctgcactctcaacatgagtagcgaacacttaaattgggttttcaacagtcccagctttcactgccagggtcccagtcagattccaggaatttgcgccctaactttgcttgctaatcctggtttagagctatcccactaaaatatttaatcctaattcttagtccttgcctgtgagatatgaggtcttacaggagacctcagagctcccagcccttctcctcctgctaacccttctcacaccctcaagaggagttagaaaagaggtccttgtcattctcacctcttatggaaaatggaataagaaataatcatatcctttcttcccacccttctcctgttatttaggatttctgacaaagctggcttgagattggtcacttagagccgactgtctcctctgccttttgtttttcagcttcagagacagatccaatatagtcccagggacctgggtctctgggagaggaaggaagagggagggagcaaagagattggggtatgtcccctgtagtacactcttacctcttacttcctagactttgatttctccggcagcccagatgttcagttctcttggcccctctctaccccttactgggatccggttttcattttccggtccttttgccatacacagttacagagatcagtcaaatccataccaccactgagatctcatttattgccacagatgcacaaaataaataacccaaaatcacaaaa

SEQ ID NO: 24392 - DNA, 1689 bp, Homo sapiens
  source 1..1689: mol_type = unassigned DNA
ccggaagcggcgagccggaagtggggttagccaggttatccccaggggtggagaagcggaggcccaggaggagggggaataaagaaggtggaggatcctggctaccactctgaatccgataccgcttctcttagacctcagcgacagaaaaagggaagggtgtctcatcccccttcctcctctcctccctgtcctgagccttagccatggccgaggcaggggctgggctgagcgagaccgtcactgagacaacggttaccgtgacaaccgagcccgatgatttggggaggaagacggagaaacagcaaggattatattttcctttgaagagttgctgggacctttcctaggagaaccggagccttaccatcaaacttcggaaacggaagccagagaaaaaggtagaatggacaagtgacactgtggacaatgaacacatgggccgccgctcatccaaatgctgctgtatttatgagaaacctcgggcctttggcgagagctccacggaaagtgatgaggaggaagaagagggctgtggtcatacacactgtgtacgtggccaccgcaaaggacggcgtcgtgcaaccctaggaccgacccccaccacccctccccagcctcctgacccttcccagccccctccagggccaatgcagcactaaatccctctctcctccagcattcctgtgtctgtctggccctaaatgtatccatgtggctacttctccagccccctccttccctctcttctgcctgatagagggaagaggaagaggaggacgaacagagatcctgaaattctgacttgctgctattccagaacccagcctcctgggtttccccagtcctcatttttcctcccaatacccacccttctctctcgagggatctaggcaccttggtcccagtgtcttccttttgttctcactgccaaactgcctgtcctgggatctagttatcttggccctgcactctcaacatgagtagcgaacacttaaattgggttttcaacagtcccagctttcactgccagggtcccagtcagattccaggaatttgcgccctaactttgcttgctaatcctggtttagagctatcccactaaaatatttaatcctaattcttagtccttgcctgtgagatatgaggtcttacaggagacctcagagctcccagcccttctcctcctgctaacccttctcacaccctcaagaggagttagaaaagaggtccttgtcattctcacctcttatggaaaatggaataagaaataatcatatcctttcttcccacccttctcctgttatttaggatttctgacaaagctggcttgagattggtcacttagagccgactgtctcctctgccttttgtttttcagcttcagagacagatccaatatagtcccagggacctgggtctctgggagaggaaggaagagggagggagcaaagagattggggtatgtcccctgtagtacactcttacctcttacttcctagactttgatttctccggcagcccagatgttcagttctcttggcccctctctaccccttactgggatccggttttcattttccggtccttttgccatacacagttacagagatcagtcaaatccataccaccactgagatctcatttattgccacagatgcacaaaataaataacccaaaatcacaaaa

SEQ ID NO: 24393 - DNA, 1731 bp, Homo sapiens
  source 1..1731: mol_type = unassigned DNA
ctttctttcagcgcctgcgcgctgtcacgttacggcggaactaatccagcgacgcctgcgctttgacgcatttggtgccgtggaagggaaaaagggggactgcagtatgcgtcacacccggaagcggcgagccggaagtggggttagccaggttatccccaggggtggagaagcggaggcccaggaggagggggaataaagaaggtggaggatcctggctaccactctgaatccgataccgcttctcttagacctcagcgacagaaaaagggaagggtgtctcatcccccttcctcctctcctccctgtcctgagccttagccatggccgaggcaggggctgggctgagcgagaccgtcactgagacaacggttaccgtgacaaccgagcccgagaaccggagccttaccatcaaacttcggaaacggaagccagagaaaaaggtagaatggacaagtgacactgtggacaatgaacacatgggccgccgctcatccaaatgctgctgtatttatgagaaacctcgggcctttggcgagagctccacggaaagtgatgaggaggaagaagagggctgtggtcatacacactgtgtacgtggccaccgcaaaggacggcgtcgtgcaaccctaggaccgacccccaccacccctccccagcctcctgacccttcccagccccctccagggccaatgcagcactaaatccctctctcctccagcattcctgtgtctgtctggccctaaatgtatccatgtggctacttctccagccccctccttccctctcttctgcctgatagagggaagaggaagaggaggacgaacagagatcctgaaattctgacttgctgctattccagaacccagcctcctgggtttccccagtcctcatttttcctcccaatacccacccttctctctcgagggatctaggcaccttggtcccagtgtcttccttttgttctcactgccaaactgcctgtcctgggatctagttatcttggccctgcactctcaacatgagtagcgaacacttaaattgggttttcaacagtcccagctttcactgccagggtcccagtcagattccaggaatttgcgccctaactttgcttgctaatcctggtttagagctatcccactaaaatatttaatcctaattcttagtccttgcctgtgagatatgaggtcttacaggagacctcagagctcccagcccttctcctcctgctaacccttctcacaccctcaagaggagttagaaaagaggtccttgtcattctcacctcttatggaaaatggaataagaaataatcatatcctttcttcccacccttctcctgttatttaggatttctgacaaagctggcttgagattggtcacttagagccgactgtctcctctgccttttgtttttcagcttcagagacagatccaatatagtcccagggacctgggtctctgggagaggaaggaagagggagggagcaaagagattggggtatgtcccctgtagtacactcttacctcttacttcctagactttgatttctccggcagcccagatgttcagttctcttggcccctctctaccccttactgggatccggttttcattttccggtccttttgccatacacagttacagagatcagtcaaatccataccaccactgagatctcatttattgccacagatgcacaaaataaataacccaaaatcacaaaa

SEQ ID NO: 24394 - DNA, 1640 bp, Homo sapiens
  source 1..1640: mol_type = unassigned DNA
ctacaggcacagggcgaggggtagaaccacatcgcttgactcttaagtgtgtttccaactgctcccacttcccgttttctttagagaaacccagaccaaacaaggaaagggaaataggccacggtagggtcattactattgctccttaagcttcctcgccggtccacctacccagacaaggcaaacggaaatctgcagcaggactcagcttggtgcacacaactccgccctcgccacacccactctgcagcgtctggcccggcaatacccatctgggcgcccctcctgcttcctctaggctgagaaccggagccttaccatcaaacttcggaaacggaagccagagaaaaaggtagaatggacaagtgacactgtggacaatgaacacatgggccgccgctcatccaaatgctgctgtatttatgagaaacctcgggcctttggcgagagctccacggaaagtgatgaggaggaagaagagggctgtggtcatacacactgtgtacgtggccaccgcaaaggacggcgtcgtgcaaccctaggaccgacccccaccacccctccccagcctcctgacccttcccagccccctccagggccaatgcagcactaaatccctctctcctccagcattcctgtgtctgtctggccctaaatgtatccatgtggctacttctccagccccctccttccctctcttctgcctgatagagggaagaggaagaggaggacgaacagagatcctgaaattctgacttgctgctattccagaacccagcctcctgggtttccccagtcctcatttttcctcccaatacccacccttctctctcgagggatctaggcaccttggtcccagtgtcttccttttgttctcactgccaaactgcctgtcctgggatctagttatcttggccctgcactctcaacatgagtagcgaacacttaaattgggttttcaacagtcccagctttcactgccagggtcccagtcagattccaggaatttgcgccctaactttgcttgctaatcctggtttagagctatcccactaaaatatttaatcctaattcttagtccttgcctgtgagatatgaggtcttacaggagacctcagagctcccagcccttctcctcctgctaacccttctcacaccctcaagaggagttagaaaagaggtccttgtcattctcacctcttatggaaaatggaataagaaataatcatatcctttcttcccacccttctcctgttatttaggatttctgacaaagctggcttgagattggtcacttagagccgactgtctcctctgccttttgtttttcagcttcagagacagatccaatatagtcccagggacctgggtctctgggagaggaaggaagagggagggagcaaagagattggggtatgtcccctgtagtacactcttacctcttacttcctagactttgatttctccggcagcccagatgttcagttctcttggcccctctctaccccttactgggatccggttttcattttccggtccttttgccatacacagttacagagatcagtcaaatccataccaccactgagatctcatttattgccacagatgcacaaaataaataacccaaaatcacaaaa

SEQ ID NO: 24395 - DNA, 1731 bp, Homo sapiens
  source 1..1731: mol_type = unassigned DNA
ctttctttcagcgcctgcgcgctgtcacgttacggcggaactaatccagcgacgcctgcgctttgacgcatttggtgccgtggaagggaaaaagggggactgcagtatgcgtcacacccggaagcggcgagccggaagtggggttagccaggttatccccaggggtggagaagcggaggcccaggaggagggggaataaagaaggtggaggatcctggctaccactctgaatccgataccgcttctcttagacctcagcgacagaaaaagggaagggtgtctcatcccccttcctcctctcctccctgtcctgagccttagccatggccgaggcaggggctgggctgagcgagaccgtcactgagacaacggttaccgtgacaaccgagcccgagaaccggagccttaccatcaaacttcggaaacggaagccagagaaaaaggtagaatggacaagtgacactgtggacaatgaacacatgggccgccgctcatcaaaatgctgctgtatttatgagaaacctcgggcctttggcgagagctccacggaaagtgatgaggaggaagaagagggctgtggtcatacacactgtgtacgtggccaccgcaaaggacggcgtcgtgcaaccctaggaccgacccccaccacccctccccagcctcctgacccttcccagccccctccagggccaatgcagcactaaatccctctctcctccagcattcctgtgtctgtctggccctaaatgtatccatgtggctacttctccagccccctccttccctctcttctgcctgatagagggaagaggaagaggaggacgaacagagatcctgaaattctgacttgctgctattccagaacccagcctcctgggtttccccagtcctcatttttcctcccaatacccacccttctctctcgagggatctaggcaccttggtcccagtgtcttccttttgttctcactgccaaactgcctgtcctgggatctagttatcttggccctgcactctcaacatgagtagcgaacacttaaattgggttttcaacagtcccagctttcactgccagggtcccagtcagattccaggaatttgcgccctaactttgcttgctaatcctggtttagagctatcccactaaaatatttaatcctaattcttagtccttgcctgtgagatatgaggtcttacaggagacctcagagctcccagcccttctcctcctgctaacccttctcacaccctcaagaggagttagaaaagaggtccttgttattctcacctcttatggaaaatggaacaagaaataatcatatcctttcttcccacccttctcctgttatttaggatttctgacaaagctggcttgagattggtcacttagagccgactgtctcctctgccttttgtttttcagcttcagagacagatccaatatagtcccagggacctgggtctctgggagaggaaggaagagggagggagcaaagagattggggtatgtcccctgtagtacactctttcctcttacttcctagactttgatttctccggcagcccagatgttcagttctcttggcccctctctaccccttactgggatctggttttcattttccggtccttttgccatacacagttacagagatcagtcaaatccataccaccactgagatctcatttattgccacagatgcacaaaataaataacccaaaatcacaaaa

SEQ ID NO: 24396 - DNA, 1723 bp, Homo sapiens
  source 1..1723: mol_type = unassigned DNA
ggaaaaaggaagggagatcaaagattaggtgctggggactgaaaaataattttcatgtattaatactaccaaggatgatttggggaggaagacggagaaaaagcaaggattatattttcctttgaagagttgctgggacctttcctaggttaggaattgtgtcttctcttatactggtggtataagaacaggaaataatacttattcctcaagggactatctgaggtaaaagacctgttctgttttatcttctgtcagctcctctggtgctatgcctatggtactggttgagctaaagaagaaaagagaggaggttccctgggagggagtgggaaaggttagtaagaggggactagataggtatgctcatccttaaccttctaggagaaccggagccttaccatcaaacttcggaaacggaagccagagaaaaaggtagaatggacaagtgacactgtggacaatgaacacatgggccgccgctcatcaaaatgctgctgtatttatgagaaacctcgggcctttggcgagagctccacggaaagtgatgaggaggaagaagagggctgtggtcatacacactgtgtacgtggccaccgcaaaggacggcgtcgtgcaaccctaggaccgacccccaccacccctccccagcctcctgacccttcccagccccctccagggccaatgcagcactaaatccctctctcctccagcattcctgtgtctgtctggccctaaatgtatccatgtggctacttctccagccccctccttccctctcttctgcctgatagagggaagaggaagaggaggacgaacagagatcctgaaattctgacttgctgctattccagaacccagcctcctgggtttccccagtcctcatttttcctcccaatacccacccttctctctcgagggatctaggcaccttggtcccagtgtcttccttttgttctcactgccaaactgcctgtcctgggatctagttatcttggccctgcactctcaacatgagtagcgaacacttaaattgggttttcaacagtcccagctttcactgccagggtcccagtcagattccaggaatttgcgccctaactttgcttgctaatcctggtttagagctatcccactaaaatatttaatcctaattcttagtccttgcctgtgagatatgaggtcttacaggagacctcagagctcccagcccttctcctcctgctaacccttctcacaccctcaagaggagttagaaaagaggtccttgttattctcacctcttatggaaaatggaacaagaaataatcatatcctttcttcccacccttctcctgttatttaggatttctgacaaagctggcttgagattggtcacttagagccgactgtctcctctgccttttgtttttcagcttcagagacagatccaatatagtcccagggacctgggtctctgggagaggaaggaagagggagggagcaaagagattggggtatgtcccctgtagtacactctttcctcttacttcctagactttgatttctccggcagcccagatgttcagttctcttggcccctctctaccccttactgggatctggttttcattttccggtccttttgccatacacagttacagagatcagtcaaatccataccaccactgagatctcatttattgccacagatgcacaaaataaataacccaaaatcacaaaa

SEQ ID NO: 24397 - DNA, 1464 bp, Homo sapiens
  source 1..1464: mol_type = unassigned DNA
gggatatgggaggtgtggggttgaatatctagggctgggagaatcggaaggatgatttggggaggaagacggagaaaaagcaaggattatattttcctttgaagagttgctgggacctttcctaggagaaccggagccttaccatcaaacttcggaaacggaagccagagaaaaaggtagaatggacaagtgacactgtggacaatgaacacatgggccgccgctcatcaaaatgctgctgtatttatgagaaacctcgggcctttggcgagagctccacggaaagtgatgaggaggaagaagagggctgtggtcatacacactgtgtacgtggccaccgcaaaggacggcgtcgtgcaaccctaggaccgacccccaccacccctccccagcctcctgacccttcccagccccctccagggccaatgcagcactaaatccctctctcctccagcattcctgtgtctgtctggccctaaatgtatccatgtggctacttctccagccccctccttccctctcttctgcctgatagagggaagaggaagaggaggacgaacagagatcctgaaattctgacttgctgctattccagaacccagcctcctgggtttccccagtcctcatttttcctcccaatacccacccttctctctcgagggatctaggcaccttggtcccagtgtcttccttttgttctcactgccaaactgcctgtcctgggatctagttatcttggccctgcactctcaacatgagtagcgaacacttaaattgggttttcaacagtcccagctttcactgccagggtcccagtcagattccaggaatttgcgccctaactttgcttgctaatcctggtttagagctatcccactaaaatatttaatcctaattcttagtccttgcctgtgagatatgaggtcttacaggagacctcagagctcccagcccttctcctcctgctaacccttctcacaccctcaagaggagttagaaaagaggtccttgttattctcacctcttatggaaaatggaacaagaaataatcatatcctttcttcccacccttctcctgttatttaggatttctgacaaagctggcttgagattggtcacttagagccgactgtctcctctgccttttgtttttcagcttcagagacagatccaatatagtcccagggacctgggtctctgggagaggaaggaagagggagggagcaaagagattggggtatgtcccctgtagtacactctttcctcttacttcctagactttgatttctccggcagcccagatgttcagttctcttggcccctctctaccccttactgggatctggttttcattttccggtccttttgccatacacagttacagagatcagtcaaatccataccaccactgagatctcatttattgccacagatgcacaaaataaataacccaaaatcacaaaa

SEQ ID NO: 24398 - DNA, 1539 bp, Homo sapiens
  source 1..1539: mol_type = unassigned DNA
cagggattagaagagttgttggaggagctaggcctagggatatgggaggtgtggggttgaatatctagggctgggagaatcggaaggtattggagctatttggagtggcagagatggtgcaggaggatgatttggggaggaagacggagaaaaagcaaggattatattttcctttgaagagttgctgggacctttcctaggagaaccggagccttaccatcaaacttcggaaacggaagccagagaaaaaggtagaatggacaagtgacactgtggacaatgaacacatgggccgccgctcatcaaaatgctgctgtatttatgagaaacctcgggcctttggcgagagctccacggaaagtgatgaggaggaagaagagggctgtggtcatacacactgtgtacgtggccaccgcaaaggacggcgtcgtgcaaccctaggaccgacccccaccacccctccccagcctcctgacccttcccagccccctccagggccaatgcagcactaaatccctctctcctccagcattcctgtgtctgtctggccctaaatgtatccatgtggctacttctccagccccctccttccctctcttctgcctgatagagggaagaggaagaggaggacgaacagagatcctgaaattctgacttgctgctattccagaacccagcctcctgggtttccccagtcctcatttttcctcccaatacccacccttctctctcgagggatctaggcaccttggtcccagtgtcttccttttgttctcactgccaaactgcctgtcctgggatctagttatcttggccctgcactctcaacatgagtagcgaacacttaaattgggttttcaacagtcccagctttcactgccagggtcccagtcagattccaggaatttgcgccctaactttgcttgctaatcctggtttagagctatcccactaaaatatttaatcctaattcttagtccttgcctgtgagatatgaggtcttacaggagacctcagagctcccagcccttctcctcctgctaacccttctcacaccctcaagaggagttagaaaagaggtccttgttattctcacctcttatggaaaatggaacaagaaataatcatatcctttcttcccacccttctcctgttatttaggatttctgacaaagctggcttgagattggtcacttagagccgactgtctcctctgccttttgtttttcagcttcagagacagatccaatatagtcccagggacctgggtctctgggagaggaaggaagagggagggagcaaagagattggggtatgtcccctgtagtacactctttcctcttacttcctagactttgatttctccggcagcccagatgttcagttctcttggcccctctctaccccttactgggatctggttttcattttccggtccttttgccatacacagttacagagatcagtcaaatccataccaccactgagatctcatttattgccacagatgcacaaaataaataacccaaaatcacaaaa

SEQ ID NO: 24399 - DNA, 1689 bp, Homo sapiens
  source 1..1689: mol_type = unassigned DNA
ccggaagcggcgagccggaagtggggttagccaggttatccccaggggtggagaagcggaggcccaggaggagggggaataaagaaggtggaggatcctggctaccactctgaatccgataccgcttctcttagacctcagcgacagaaaaagggaagggtgtctcatcccccttcctcctctcctccctgtcctgagccttagccatggccgaggcaggggctgggctgagcgagaccgtcactgagacaacggttaccgtgacaaccgagcccgatgatttggggaggaagacggagaaaaagcaaggattatattttcctttgaagagttgctgggacctttcctaggagaaccggagccttaccatcaaacttcggaaacggaagccagagaaaaaggtagaatggacaagtgacactgtggacaatgaacacatgggccgccgctcatcaaaatgctgctgtatttatgagaaacctcgggcctttggcgagagctccacggaaagtgatgaggaggaagaagagggctgtggtcatacacactgtgtacgtggccaccgcaaaggacggcgtcgtgcaaccctaggaccgacccccaccacccctccccagcctcctgacccttcccagccccctccagggccaatgcagcactaaatccctctctcctccagcattcctgtgtctgtctggccctaaatgtatccatgtggctacttctccagccccctccttccctctcttctgcctgatagagggaagaggaagaggaggacgaacagagatcctgaaattctgacttgctgctattccagaacccagcctcctgggtttccccagtcctcatttttcctcccaatacccacccttctctctcgagggatctaggcaccttggtcccagtgtcttccttttgttctcactgccaaactgcctgtcctgggatctagttatcttggccctgcactctcaacatgagtagcgaacacttaaattgggttttcaacagtcccagctttcactgccagggtcccagtcagattccaggaatttgcgccctaactttgcttgctaatcctggtttagagctatcccactaaaatatttaatcctaattcttagtccttgcctgtgagatatgaggtcttacaggagacctcagagctcccagcccttctcctcctgctaacccttctcacaccctcaagaggagttagaaaagaggtccttgttattctcacctcttatggaaaatggaacaagaaataatcatatcctttcttcccacccttctcctgttatttaggatttctgacaaagctggcttgagattggtcacttagagccgactgtctcctctgccttttgtttttcagcttcagagacagatccaatatagtcccagggacctgggtctctgggagaggaaggaagagggagggagcaaagagattggggtatgtcccctgtagtacactctttcctcttacttcctagactttgatttctccggcagcccagatgttcagttctcttggcccctctctaccccttactgggatctggttttcattttccggtccttttgccatacacagttacagagatcagtcaaatccataccaccactgagatctcatttattgccacagatgcacaaaataaataacccaaaatcacaaaa

SEQ ID NO: 24400 - DNA, 1640 bp, Homo sapiens
  source 1..1640: mol_type = unassigned DNA
ctacaggcacagggcgaggggtagaaccacatcgcttgactcttaagtgtgtttccaactgctcccacttcccgttttctttagagaaacccagaccaaacaaggaaagggaaataggccacggtagggtcattactattgctccttaagcttcctcgccggtccacctacccagacaaggcaaacggaaatctgcagcaggactcagcttggtgcacacaactccgccctcgccacacccactctgcagcgtctggcccggcaatacccatctgggcgcccctcctgcttcctctaggctgagaaccggagccttaccatcaaacttcggaaacggaagccagagaaaaaggtagaatggacaagtgacactgtggacaatgaacacatgggccgccgctcatcaaaatgctgctgtatttatgagaaacctcgggcctttggcgagagctccacggaaagtgatgaggaggaagaagagggctgtggtcatacacactgtgtacgtggccaccgcaaaggacggcgtcgtgcaaccctaggaccgacccccaccacccctccccagcctcctgacccttcccagccccctccagggccaatgcagcactaaatccctctctcctccagcattcctgtgtctgtctggccctaaatgtatccatgtggctacttctccagccccctccttccctctcttctgcctgatagagggaagaggaagaggaggacgaacagagatcctgaaattctgacttgctgctattccagaacccagcctcctgggtttccccagtcctcatttttcctcccaatacccacccttctctctcgagggatctaggcaccttggtcccagtgtcttccttttgttctcactgccaaactgcctgtcctgggatctagttatcttggccctgcactctcaacatgagtagcgaacacttaaattgggttttcaacagtcccagctttcactgccagggtcccagtcagattccaggaatttgcgccctaactttgcttgctaatcctggtttagagctatcccactaaaatatttaatcctaattcttagtccttgcctgtgagatatgaggtcttacaggagacctcagagctcccagcccttctcctcctgctaacccttctcacaccctcaagaggagttagaaaagaggtccttgttattctcacctcttatggaaaatggaacaagaaataatcatatcctttcttcccacccttctcctgttatttaggatttctgacaaagctggcttgagattggtcacttagagccgactgtctcctctgccttttgtttttcagcttcagagacagatccaatatagtcccagggacctgggtctctgggagaggaaggaagagggagggagcaaagagattggggtatgtcccctgtagtacactctttcctcttacttcctagactttgatttctccggcagcccagatgttcagttctcttggcccctctctaccccttactgggatctggttttcattttccggtccttttgccatacacagttacagagatcagtcaaatccataccaccactgagatctcatttattgccacagatgcacaaaataaataacccaaaatcacaaaa

SEQ ID NO: 24401 - DNA, 1464 bp, Homo sapiens
  source 1..1464: mol_type = unassigned DNA
gggatatgggaggtgtggggttgaatatctagggctgggagaatcggaaggatgatttggggaggaagacggagaaacagcaaggattatattttcctttgaagagttgctgggacctttcctaggagaaccggagccttaccatcaaacttcggaaacggaagccagagaaaaaggtagaatggacaagtgacactgtggacaatgaacacatgggccgccgctcatccaaatgctgctgtatttatgagaaacctcgggcctttggcgagagctccacggaaagtgatgaggaggaagaagagggctgtggtcatacacactgtgtacgtggccaccgcaaaggacggcgtcgtgcaaccctaggaccgacccccaccacccctccccagcctcctgacccttcccagccccctccagggccaatgcagcactaaatccctctctcctccagcattcctgtgtctgtctggccctaaatgtatccatgtggctacttctccagccccctccttccctctcttctgcctgatagagggaagaggaagaggaggacgaacagagatcctgaaattctgacttgctgctattccagaacccagcctcctgggtttccccagtcctcatttttcctcccaatacccacccttctctctcgagggatctaggcaccttggtcccagtgtcttccttttgttctcactgccaaactgcctgtcctgggatctagttatcttggccctgcactctcaacatgagtagcgaacacttaaattgggttttcaacagtcccagctttcactgccagggtcccagtcagattccaggaatttgcgccctaactttgcttgctaatcctggtttagagctatcccactaaaatatttaatcctaattcttagtccttgcctgtgagatatgaggtcttacaggagacctcagagctcccagcccttctcctcctgctaacccttctcacaccctcaagaggagttagaaaagaggtccttgtcattctcacctcttatggaaaatggaataagaaataatcatatcctttcttcccacccttctcctgttatttaggatttctgacaaagctggcttgagattggtcacttagagccgactgtctcctctgccttttgtttttcagcttcagagacagatccaatatagtcccagggacctgggtctctgggagaggaaggaagagggagggagcaaagagattggggtatgtcccctgtagtacactcttacctcttacttcctagactttgatttctccggcagcccagatgttcagttctcttggcccctctctaccccttactgggatctggttttcattttccggtccttttgccatacacagttacagagatcagtcaaatccataccaccactgagatctcatttattgccacagatgcacaaaataaataacccaaaatcacaaaa

SEQ ID NO: 24402 - DNA, 1689 bp, Homo sapiens
  source 1..1689: mol_type = unassigned DNA
ccggaagcggcgagccggaagtggggttagccaggttatccccaggggtggagaagcggaggcccaggaggagggggaataaagaaggtggaggatcctggctaccaatctgaatccgataccgcttctcttagacctcagcgacagaaaaagggaagggtgtctcatcccccttcctcctctcctccctgtcctgagccttagccatggccgaggcaggggctgggctgagcgagaccgtcactgagacaacggttaccgtgacaaccgagcccgatgatttggggaggaagacggagaaacagcaaggattatattttcctttgaagagttgctgggacctttcctaggagaaccggagccttaccatcaaacttcggaaacggaagccagagaaaaaggtagaatggacaagtgacactgtggacaatgaacacatgggccgccgctcatccaaatgctgctgtatttatgagaaacctcgggcctttggcgagagctccacggaaagtgatgaggaggaagaagagggctgtggtcatacacactgtgtacgtggccaccgcaaaggacggcgtcgtgcaaccctaggaccgacccccaccacccctccccagcctcctgacccttcccagccccctccagggccaatgcagcactaaatccctctctcctccagcattcctgtgtctgtctggccctaaatgtatccatgtggctacttctccagccccctccttccctctcttctgcctgatagagggaagaggaagaggaggacgaacagagatcctgaaattctgacttgctgctattccagaacccagcctcctgggtttccccagtcctcatttttcctcccaatacccacccttctctctcgagggatctaggcaccttggtcccagtgtcttccttttgttctcactgccaaactgcctgtcctgggatctagttatcttggccctgcactctcaacatgagtagcgaacacttaaattgggttttcaacagtcccagctttcactgccagggtcccagtcagattccaggaatttgcgccctaactttgcttgctaatcctggtttagagctatcccactaaaatatttaatcctaattcttagtccttgcctgtgagatatgaggtcttacaggagacctcagagctcccagcccttctcctcctgctaacccttctcacaccctcaagaggagttagaaaagaggtccttgtcattctcacctcttatggaaaatggaataagaaataatcatatcctttcttcccacccttctcctgttatttaggatttctgacaaagctggcttgagattggtcacttagagccgactgtctcctctgccttttgtttttcagcttcagagacagatccaatatagtcccagggacctgggtctctgggagaggaaggaagagggagggagcaaagagattggggtatgtcccctgtagtacactcttacctcttacttcctagactttgatttctccggcagcccagatgttcagttctcttggcccctctctaccccttactgggatctggttttcattttccggtccttttgccatacacagttacagagatcagtcaaatccataccaccactgagatctcatttattgccacagatgcacaaaataaataacccaaaatcacaaaa

SEQ ID NO: 24403 - DNA, 1536 bp, Homo sapiens
  source 1..1536: mol_type = unassigned DNA
ggattagaagagttgttggaggagctaggcctagggatatgggaggtgtggggttgaatatctagggctgggagaatcggaaggtattggagctatttggagtggcagagatggtgcaggaggatgatttggggaggaagacggagaaacagcaaggattatattttcctttgaagagttgctgggacctttcctaggagaaccggagccttaccatcaaacttcggaaacggaagccagagaaaaaggtagaatggacaagtgacactgtggacaatgaacacatgggccgccgctcatccaaatgctgctgtatttatgagaaacctcgggcctttggcgagagctccacggaaagtgatgaggaggaagaagagggctgtggtcatacacactgtgtacgtggccaccgcaaaggacggcgtcgtgcaaccctaggaccgacccccaccacccctccccagcctcctgacccttcccagccccctccagggccaatgcagcactaaatccctctctcctccagcattcctgtgtctgtctggccctaaatgtatccatgtggctacttctccagccccctccttccctctcttctgcctgatagagggaagaggaagaggaggacgaacagagatcctgaaattctgacttgctgctattccagaacccagcctcctgggtttccccagtcctcatttttcctcccaatacccacccttctctctcgagggatctaggcaccttggtcccagtgtcttccttttgttctcactgccaaactgcctgtcctgggatctagttatcttggccctgcactctcaacatgagtagcgaacacttaaattgggttttcaacagtcccagctttcactgccagggtcccagtcagattccaggaatttgcgccctaactttgcttgctaatcctggtttagagctatcccactaaaatatttaatcctaattcttagtccttgcctgtgagatatgaggtcttacaggagacctcagagctcccagcccttctcctcctgctaacccttctcacaccctcaagaggagttagaaaagaggtccttgtcattctcacctcttatggaaaatggaataagaaataatcatatcctttcttcccacccttctcctgttatttaggatttctgacaaagctggcttgagattggtcacttagagccgactgtctcctctgccttttgtttttcagcttcagagacagatccaatatagtcccagggacctgggtctctgggagaggaaggaagagggagggagcaaagagattggggtatgtcccctgtagtacactcttacctcttacttcctagactttgatttctccggcagcccagatgttcagttctcttggcccctctctaccccttactgggatctggttttcattttccggtccttttgccatacacagttacagagatcagtcaaatccataccaccactgagatctcatttattgccacagatgcacaaaataaataacccaaaatcacaaaa

SEQ ID NO: 24404 - DNA, 1689 bp, Homo sapiens
  source 1..1689: mol_type = unassigned DNA
ccggaagcggcgagccggaagtggggttagccaggttatccccaggggtggagaagcggaggcccaggaggagggggaataaagaaggtggaggatcctggctaccactctgaatccgataccgcttctcttagacctcagcgacagaaaaagggaagggtgtctcatcccccttcctcctctcctccctgtcctgagccttagccatggccgaggcaggggctgggctgagcgagaccgtcactgagacaacggttaccgtgacaaccgagcccgatgatttggggaggaagacggagaaacagcaaggattatattttcctttgaagagttgctgggacctttcctaggagaaccggagccttaccatcaaacttcggaaacggaagccagagaaaaaggtagaatggacaagtgacactgtggacaatgaacacatgggccgccgctcatccaaatgctgctgtatttatgagaaacctcgggcctttggcgagagctccacggaaagtgatgaggaggaagaagagggctgtggtcatacacactgtgtacgtggccaccgcaaaggacggcgtcgtgcaaccctaggaccgacccccaccacccctccccagcctcctgacccttcccagccccctccagggccaatgcagcactaaatccctctctcctccagcattcctgtgtctgtctggccctaaatgtatccatgtggctacttctccagccccctccttccctctcttctgcctgatagagggaagaggaagaggaggacgaacagagatcctgaaattctgacttgctgctattccagaacccagcctcctgggtttccccagtcctcatttttcctcccaatacccacccttctctctcgagggatctaggcaccttggtcccagtgtcttccttttgttctcactgccaaactgcctgtcctgggatctagttatcttggccctgcactctcaacatgagtagcgaacacttaaattgggttttcaacagtcccagctttcactgccagggtcccagtcagattccaggaatttgcgccctaactttgcttgctaatcctggtttagagctatcccactaaaatatttaatcctaattcttagtccttgcctgtgagatatgaggtcttacaggagacctcagagctcccagcccttctcctcctgctaacccttctcacaccctcaagaggagttagaaaagaggtccttgtcattctcacctcttatggaaaatggaataagaaataatcatatcctttcttcccacccttctcctgttatttaggatttctgacaaagctggcttgagattggtcacttagagccgactgtctcctctgccttttgtttttcagcttcagagacagatccaatatagtcccagggacctgggtctctgggagaggaaggaagagggagggagcaaagagattggggtatgtcccctgtagtacactcttacctcttacttcctagactttgatttctccggcagcccagatgttcagttctcttggcccctctctaccccttactgggatctggttttcattttccggtccttttgccatacacagttacagagatcagtcaaatccataccaccactgagatctcatttattgccacagatgcacaaaataaataacccaaaatcacaaaa

SEQ ID NO: 24405 - DNA, 1536 bp, Homo sapiens; identical to SEQ ID NO: 24403
  source 1..1536: mol_type = unassigned DNA

SEQ ID NO: 24406 - DNA, 1723 bp, Homo sapiens
  source 1..1723: mol_type = unassigned DNA
ggaaaaaggaagggagatcaaagattaggtgctggggactgaaaaataattttcatgtattaatactaccaaggatgatttggggaggaagacggagaaacagcaaggattatattttcctttgaagagttgctgggacctttcctaggttaggaattgtgtcttctcttatactggtggtataagaacaggaaataatacttattcctcaagggactatctgaggtaaaagacctgttctgttttatcttctgtcagctcctctggtgctatgcctatggtactgattgagctaaagaagaaaagagaggaggttccctgggagggagtgggaaaggttagtaagaggggactagataggtatgctcatccttaaccttctaggagaaccggagccttaccatcaaacttcggaaacggaagccagagaaaaaggtagaatggacaagtgacactgtggacaatgaacacatgggccgccgctcatccaaatgctgctgtatttatgagaaacctcgggcctttggcgagagctccacggaaagtgatgaggaggaagaagagggctgtggtcatacacactgtgtacgtggccaccgcaaaggacggcgtcgtgcaaccctaggaccgacccccaccacccctccccagcctcctgacccttcccagccccctccagggccaatgcagcactaaatccctctctcctccagcattcctgtgtctgtctggccctaaatgtatccatgtggctacttctccagccccctccttccctctcttctgcctgatagagggaagaggaagaggaggacgaacagagatcctgaaattctgacttgctgctattccagaacccagcctcctgggtttccccagtcctcatttttcctcccaatacccacccttctctctcgagggatctaggcaccttggtcccagtgtcttccttttgttctcactgccaaactgcctgtcctgggatctagttatcttggccctgcactctcaacatgagtagcgaacacttaaattgggttttcaacagtcccagctttcactgccagggtcccagtcagattccaggaatttgcgccctaactttgcttgctaatcctggtttagagctatcccactaaaatatttaatcctaattcttagtccttgcctgtgagatatgaggtcttacaggagacctcagagctcccagcccttctcctcctgctaacccttctcacaccctcaagaggagttagaaaagaggtccttgtcattctcacctcttatggaaaatggaataagaaataatcatatcctttcttcccacccttctcctgttatttaggatttctgacaaagctggcttgagattggtcacttagagccgactgtctcctctgccttttgtttttcagcttcagagacagatccaatatagtcccagggacctgggtctctgggagaggaaggaagagggagggagcaaagagattggggtatgtcccctgtagtacactcttacctcttacttcctagactttgatttctccggcagcccagatgttcagttctcttggcccctctctaccccttactgggatctggttttcattttccggtccttttgccatacacagttacagagatcagtcaaatccataccaccactgagatctcatttattgccacagatgcacaaaataaataacccaaaatcacaaaa

SEQ ID NO: 24407 - DNA, 1464 bp, Homo sapiens; identical to SEQ ID NO: 24401
  source 1..1464: mol_type = unassigned DNA

SEQ ID NO: 24408 - DNA, 1689 bp, Homo sapiens; identical to SEQ ID NO: 24404
  source 1..1689: mol_type = unassigned DNA

SEQ ID NO: 24409 - DNA, 1640 bp, Homo sapiens
  source 1..1640: mol_type = unassigned DNA
ctacaggcacagggcgaggggtagaaccacatcgcttgactcttaagtgtgtttccaactgctcccacttcccgttttctttagagaaacccagaccaaacaaggaaagggaaataggccacggtagggtcattactattgctccttaagcttcctcgccggtccacctacccagacaaggcaaacggaaatctgcagcaggactcagcttggtgcacacaactccgccctcgccacacccactctgcagcgtctggcccggcaatacccatctgggcgcccctcctgcttcctctaggctgagaaccggagccttaccatcaaacttcggaaacggaagccagagaaaaaggtagaatggacaagtgacactgtggacaatgaacacatgggccgccgctcatccaaatgctgctgtatttatgagaaacctcgggcctttggcgagagctccacggaaagtgatgaggaggaagaagagggctgtggtcatacacactgtgtacgtggccaccgcaaaggacggcgtcgtgcaaccctaggaccgacccccaccacccctccccagcctcctgacccttcccagccccctccagggccaatgcagcactaaatccctctctcctccagcattcctgtgtctgtctggccctaaatgtatccatgtggctacttctccagccccctccttccctctcttctgcctgatagagggaagaggaagaggaggacgaacagagatcctgaaattctgacttgctgctattccagaacccagcctcctgggtttccccagtcctcatttttcctcccaatacccacccttctctctcgagggatctaggcaccttggtcccagtgtcttccttttgttctcactgccaaactgcctgtcctgggatctagttatcttggccctgcactctcaacatgagtagcgaacacttaaattgggttttcaacagtcccagctttcactgccagggtcccagtcagattccaggaatttgcgccctaactttgcttgctaatcctggtttagagctatcccactaaaatatttaatcctaattcttagtccttgcctgtgagatatgaggtcttacaggagacctcagagctcccagcccttctcctcctgctaacccttctcacaccctcaagaggagttagaaaagaggtccttgtcattctcacctcttatggaaaatggaataagaaataatcatatcctttcttcccacccttctcctgttatttaggatttctgacaaagctggcttgagattggtcacttagagccgactgtctcctctgccttttgtttttcagcttcagagacagatccaatatagtcccagggacctgggtctctgggagaggaaggaagagggagggagcaaagagattggggtatgtcccctgtagtacactcttacctcttacttcctagactttgatttctccggcagcccagatgttcagttctcttggcccctctctaccccttactgggatctggttttcattttccggtccttttgccatacacagttacagagatcagtcaaatccataccaccactgagatctcatttattgccacagatgcacaaaataaataacccaaaatcacaaaa

SEQ ID NO: 24410 - DNA, 1723 bp, Homo sapiens; identical to SEQ ID NO: 24406
  source 1..1723: mol_type = unassigned DNA

SEQ ID NO: 24411 - DNA, 1614 bp, Homo sapiens
  source 1..1614: mol_type = unassigned DNA
ccggaagcggcgagccggaagtggggttagccaggttatccccaggggtggagaagcggaggcccaggaggagggggaataaagaaggtggaggatcctggctaccaatctgaatccgataccgcttctcttagacctcagcgacagaaaaagggaagggtgtctcatcccccttcctcctctcctccctgtcctgagccttagccatggccgaggcaggggctgggctgagcgagaccgtcactgagacaacggttaccgtgacaaccgagcccgagaaccggagccttaccatcaaacttcggaaacggaagccagagaaaaaggtagaatggacaagtgacactgtggacaatgaacacatgggccgccgctcatccaaatgctgctgtatttatgagaaacctcgggcctttggcgagagctccacggaaagtgatgaggaggaagaagagggctgtggtcatacacactgtgtacgtggccaccgcaaaggacggcgtcgtgcaaccctaggaccgacccccaccacccctccccagcctcctgacccttcccagccccctccagggccaatgcagcactaaatccctctctcctccagcattcctgtgtctgtctggccctaaatgtatccatgtggctacttctccagccccctccttccctctcttctgcctgatagagggaagaggaagaggaggacgaacagagatcctgaaattctgacttgctgctattccagaacccagcctcctgggtttccccagtcctcatttttcctcccaatacccacccttctctctcgagggatctaggcaccttggtcccagtgtcttccttttgttctcactgccaaactgcctgtcctgggatctagttatcttggccctgcactctcaacatgagtagcgaacacttaaattgggttttcaacagtcccagctttcactgccagggtcccagtcagattccaggaatttgcgccctaactttgcttgctaatcctggtttagagctatcccactaaaatatttaatcctaattcttagtccttgcctgtgagatatgaggtcttacaggagacctcagagctcccagcccttctcctcctgctaacccttctcacaccctcaagaggagttagaaaagaggtccttgtcattctcacctcttatggaaaatggaataagaaataatcatatcctttcttcccacccttctcctgttatttaggatttctgacaaagctggcttgagattggtcacttagagccgactgtctcctctgccttttgtttttcagcttcagagacagatccaatatagtcccagggacctgggtctctgggagaggaaggaagagggagggagcaaagagattggggtatgtcccctgtagtacactcttacctcttacttcctagactttgatttctccggcagcccagatgttcagttctcttggcccctctctaccccttactgggatctggttttcattttccggtccttttgccatacacagttacagagatcagtcaaatccataccaccactgagatctcatttattgccacagatgcacaaaataaataacccaaaatcacaaaa

SEQ ID NO: 24412 - DNA, 1607 bp, Homo sapiens
  source 1..1607: mol_type = unassigned DNA
cggcgagccggaagtggggttagccaggttatccccaggggtggagaagcggaggcccaggaggagggggaataaagaaggtggaggatcctggctaccactctgaatccgataccgcttctcttagacctcagcgacagaaaaagggaagggtgtctcatcccccttcctcctctcctccctgtcctgagccttagccatggccgaggcaggggctgggctgagcgagaccgtcactgagacaacggttaccgtgacaaccgagcccgagaaccggagccttaccatcaaacttcggaaacggaagccagagaaaaaggtagaatggacaagtgacactgtggacaatgaacacatgggccgccgctcatccaaatgctgctgtatttatgagaaacctcgggcctttggcgagagctccacggaaagtgatgaggaggaagaagagggctgtggtcatacacactgtgtacgtggccaccgcaaaggacggcgtcgtgcaaccctaggaccgacccccaccacccctccccagcctcctgacccttcccagccccctccagggccaatgcagcactaaatccctctctcctccagcattcctgtgtctgtctggccctaaatgtatccatgtggctacttctccagccccctccttccctctcttctgcctgatagagggaagaggaagaggaggacgaacagagatcctgaaattctgacttgctgctattccagaacccagcctcctgggtttccccagtcctcatttttcctcccaatacccacccttctctctcgagggatctaggcaccttggtcccagtgtcttccttttgttctcactgctaaactgcctgtcctgggatctagttatcttggccctgcactctcaacatgagtagcgaacacttaaattgggttttcaacagtcccagctttcactgccagggtcccagtcagattccaggaatttgcgccctaactttgcttgctaatcctggtttagagctatcccactaaaatatttaatcctaattcttagtccttgcctgtgagatatgaggtcttacaggagacctcagagctcccagcccttctcctcctgctaaaccttctcacaccctcaagaggagttagaaaagaggtccttgtcattctcacctcttatggaaaatggaataagaaataatcatatcctttcttcccacccttctcctgttatttaggatttctgacaaagctggcttgagattggtcacttagagccgactgtctcctctgccttttgtttttcagcttcagagacagatccaatatagtcccagggacctgggtctctgggagaggaaggaagagggagggagcaaagagattggggtatgtcccctgtagtacactcttacctcttacttcctagactttgatttctccggcagcccagatgttcagttctcttggcccctctctaccccttactgggatctggttttcattttccggtccttttgccatacacagttacagagatcagtcaaatccataccaccactgagatctcatttattgccacagatgcacaaaataaataacccaaaatcacaaaa

SEQ ID NO: 24413 - DNA, 1536 bp, Homo sapiens
  source 1..1536: mol_type = unassigned DNA
ggattagaagagttgttggagaagctaggcctagggatatgggaggtgtggggttgaatatctagggctgggagaatcggaaggtattggagctatttggagtggcagagatggtgcaggaggatgatttggggaggaagacggagaaacagcaaggattatattttcctttgaagagttgctgggacctttcctaggagaaccggagccttaccatcaaacttcggaaacggaagccagagaaaaaggtagaatggacaagtgacactgtggacaatgaacacatgggccgccgctcatccaaatgctgctgtatttatgagaaacctcgggcctttggcgagagctccacggaaagtgatgaggaggaagaagagggctgtggtcatacacactgtgtacgtggccaccgcaaaggacggcgtcgtgcaaccctaggaccgacccccaccacccctccccagcctcctgacccttcccagccccctccagggccaatgcagcactaaatccctctctcctccagcattcctgtgtctgtctggccctaaatgtatccatgtggctacttctccagccccctccttccctctcttctgcctgatagagggaagaggaagaggaggacgaacagagatcctgaaattctgacttgctgctattccagaacccagcctcctgggtttccccagtcctcatttttcctcccaatacccacccttctctctcgagggatctaggcaccttggtcccagtgtcttccttttgttctcactgctaaactgcctgtcctgggatctagttatcttggccctgcactctcaacatgagtagcgaacacttaaattgggttttcaacagtcccagctttcactgccagggtcccagtcagattccaggaatttgcgccctaactttgcttgctaatcctggtttagagctatcccactaaaatatttaatcctaattcttagtccttgcctgtgagatatgaggtcttacaggagacctcagagctcccagcccttctcctcctgctaaaccttctcacaccctcaagaggagttagaaaagaggtccttgtcattctcacctcttatggaaaatggaataagaaataatcatatcctttcttcccacccttctcctgttatttaggatttctgacaaagctggcttgagattggtcacttagagccgactgtctcctctgccttttgtttttcagcttcagagacagatccaatatagtcccagggacctgggtctctgggagaggaaggaagagggagggagcaaagagattggggtatgtcccctgtagtacactcttacctcttacttcctagactttgatttctccggcagcccagatgttcagttctcttggcccctctctaccccttactgggatctggttttcattttccggtccttttgccatacacagttacagagatcagtcaaatccataccaccactgagatctcatttattgccacagatgcacaaaataaataacccaaaatcacaaaa

SEQ ID NO: 24414 - DNA, 1640 bp, Homo sapiens; identical to SEQ ID NO: 24409
  source 1..1640: mol_type = unassigned DNA

SEQ ID NO: 24415 - DNA, 1464 bp, Homo sapiens; identical to SEQ ID NO: 24401
  source 1..1464: mol_type = unassigned DNA

SEQ ID NO: 24416 - DNA, 1731 bp, Homo sapiens
  source 1..1731: mol_type = unassigned DNA
ctttctttcagcgcctgcgcgctgtcacgttacggcggaactaatccagcgacgcctgcgctttgacgcatttggtgccgtggaagggaaaaagggggactgcagtatgcgtcacacccggaagcggcgagccggaagtggggttagccaggttatccccaggggtggagaagcggaggcccaggaggagggggaataaagaaggtggaggatcctggctaccactctgaatccgataccgcttctcttagacctcagcgacagaaaaagggaagggtgtctcatcccccttcctcctctcctccctgtcctgagccttagccatggccgaggcaggggctgggctgagcgagaccgtcactgagacaacggttaccgtgacaaccgagcccgagaaccggagccttaccatcaaacttcggaaacggaagccagagaaaaaggtagaatggacaagtgacactgtggacaatgaacacatgggccgccgctcatccaaatgctgctgtatttatgagaaacctcgggcctttggcgagagctccacggaaagtgatgaggaggaagaagagggctgtggtcatacacactgtgtacgtggccaccgcaaaggacggcgtcgtgcaaccctaggaccgacccccaccacccctccccagcctcctgacccttcccagccccctccagggccaatgcagcactaaatccctctctcctccagcattcctgtgtctgtctggccctaaatgtatccatgtggctacttctccagccccctccttccctctcttctgcctgatagagggaagaggaagaggaggacgaacagagatcctgaaattctgacttgctgctattccagaacccagcctcctgggtttccccagtcctcatttttcctcccaatacccacccttctctctcgagggatctaggcaccttggtcccagtgtcttccttttgttctcactgccaaactgcctgtcctgggatctagttatcttggccctgcactctcaacatgagtagcgaacacttaaattgggttttcaacagtcccagctttcactgccagggtcccagtcagattccaggaatttgcgccctaactttgcttgctaatcctggtttagagctatcccactaaaatatttaatcctaattcttagtccttgcctgtgagatatgaggtcttacaggagacctcagagctcccagcccttctcctcctgctaacccttctcacaccctcaagaggagttagaaaagaggtccttgtcattctcacctcttatggaaaatggaataagaaataatcatatcctttcttcccacccttctcctgttatttaggatttctgacaaagctggcttgagattggtcacttagagccgactgtctcctctgccttttgtttttcagcttcagagacagatccaatatagtcccagggacctgggtctctgggagaggaaggaagagggagggagcaaagagattggggtatgtcccctgtagtacactcttacctcttacttcctagactttgatttctccggcagcccagatgttcagttctcttggcccctctctaccccttactgggatctggttttcattttccggtccttttgccatacacagttacagagatcagtcaaatccataccaccactgagatctcatttattgccacagatgcacaaaataaataacccaaaatcacaaaa

SEQ ID NO: 24417 - DNA, 1536 bp, Homo sapiens; identical to SEQ ID NO: 24403
  source 1..1536: mol_type = unassigned DNA

SEQ ID NO: 24418 - DNA, 1640 bp, Homo sapiens
  source 1..1640: mol_type = unassigned DNA
ctacaggcacagggcgaggggtagaaccacatcgcttgactcttaagtgtgtttccaactgctcccacttcccgttttctttagagaaacccagaccaaacaaggaaagggaaataggccacggtagggtcattactattgctccttaagcttcctcgccggtccacctacccagacaaggcaaacggaaatctgcagcaggactcagcttggtgcacacaactccgccctcgccacacccactctgcagcgtctggcccggcaatacccatctgggcgcccctcctgcttcctctaggctgagaaccggagccttaccatcaaacttcggaaacggaagccagagaaaaaggtagaatggacaagtgacactgtggacaatgaacacatgggccgccgctcatccaaatgctgctgtatttatgagaaacctcgggcctttggcgagagctccacggaaagtgatgaggaggaagaagagggctgtggtcatacacactgtgtacgtggccaccgcaaaggacggcgtcgtgcaaccctaggaccgacccccaccacccctccccagcctcctgacccttcccagccccctccagggccaatgcagcactaaatccctctctcctccagcattcctgtgtctgtctggccctaaatgtatccatgtggctacttctccagccccctccttccctctcttctgcctgatagagggaagaggaagaggaggacgaacagagatcctgaaattctgacttgctgctattccagaacccagcctcctgggtttccccagtcctcatttttcctcccaatacccacccttctctctcgagggatctaggcaccttggtcccagtgtcttccttttgttctcactgctaaactgcctgtcctgggatctagttatcttggccctgcactctcaacatgagtagcgaacacttaaattgggttttcaacagtcccagctttcactgccagggtcccagtcagattccaggaatttgcgccctaactttgcttgctaatcctggtttagagctatcccactaaaatatttaatcctaattcttagtccttgcctgtgagatatgaggtcttacaggagacctcagagctcccagcccttctcctcctgctaaaccttctcacaccctcaagaggagttagaaaagaggtccttgtcattctcacctcttatggaaaatggaataagaaataatcatatcctttcttcccacccttctcctgttatttaggatttctgacaaagctggcttgagattggtcacttagagccgactgtctcctctgccttttgtttttcagcttcagagacagatccaatatagtcccagggacctgggtctctgggagaggaaggaagagggagggagcaaagagattggggtatgtcccctgtagtacactcttacctcttacttcctagactttgatttctccggcagcccagatgttcagttctcttggcccctctctaccccttactgggatctggttttcattttccggtccttttgccatacacagttacagagatcagtcaaatccataccaccactgagatctcatttattgccacagatgcacaaaataaataacccaaaatcacaaaa

SEQ ID NO: 24419 - DNA, 1731 bp, Homo sapiens; identical to SEQ ID NO: 24416
  source 1..1731: mol_type = unassigned DNA

SEQ ID NO: 24420 - DNA, 1536 bp, Homo sapiens; identical to SEQ ID NO: 24403
  source 1..1536: mol_type = unassigned DNA

SEQ ID NO: 24421 - DNA, 1640 bp, Homo sapiens; identical to SEQ ID NO: 24409
  source 1..1640: mol_type = unassigned DNA

SEQ ID NO: 24422 - DNA, 1464 bp, Homo sapiens; identical to SEQ ID NO: 24401
  source 1..1464: mol_type = unassigned DNA

SEQ ID NO: 24423 - DNA, 1536 bp, Homo sapiens; identical to SEQ ID NO: 24403
  source 1..1536: mol_type = unassigned DNA

SEQ ID NO: 24424 - DNA, 1689 bp, Homo sapiens; identical to SEQ ID NO: 24404
  source 1..1689: mol_type = unassigned DNA

SEQ ID NO: 24425 - DNA, 1689 bp, Homo sapiens; identical to SEQ ID NO: 24404
  source 1..1689: mol_type = unassigned DNA

SEQ ID NO: 24426 - DNA, 1731 bp, Homo sapiens; identical to SEQ ID NO: 24416
  source 1..1731: mol_type = unassigned DNA

SEQ ID NO: 24427 - DNA, 1640 bp, Homo sapiens; identical to SEQ ID NO: 24409
  source 1..1640: mol_type = unassigned DNA

SEQ ID NO: 24428 - DNA, 1689 bp, Homo sapiens
  source 1..1689: mol_type = unassigned DNA
ccggaagcggcgagccggaagtggggttagccaggttatccccaggggtggagaagcggaggcccaggaggagggggaataaagaaggtggaggatcctggctaccactctgaatccgataccgcttctcttagacctcagcgacagaaaaagggaagggtgtctcatcccccttcctcctctcctccctgtcctgagccttagccatggccgaggcaggggctgggctgagcgagaccgtcactgagacaacggttaccgtgacaaccgagcccgatgatttggggaggaagacggagaaacagcaaggattatattttcctttgaagagttgctgggacctttcctaggagaaccggagccttaccatcaaacttcggaaacggaagccagagaaaaaggtagaatggacaagtgacactgtggacaatgaacacatgggccgccgctcatccaaatgctgctgtatttatgagaaacctcgggcctttggcgagagctccacggaaagtgatgaggaggaagaagagggctgtggtcatacacactgtgtacgtggccaccgcaaaggacggcgtcgtgcaaccctaggaccgacccccaccacccctccccagcctcctgacccttcccagccccctccagggccaatgcagcactaaatccctctctcctccagcattcctgtgtctgtctggccctaaatgtatccatgtggctacttctccagccccctccttccctctcttctgcctgatagagggaagaggaagaggaggacgaacagagatcctgaaattctgacttgctgctattccagaacccagcctcctgggtttccccagtcctcatttttcctcccaatacccacccttctctctcgagggatctaggcaccttggtcccagtgtcttccttttgttctcactgctaaactgcctgtcctgggatctagttatcttggccctgcactctcaacatgagtagcgaacacttaaattgggttttcaacagtcccagctttcactgccagggtcccagtcagattccaggaatttgcgccctaactttgcttgctaatcctggtttagagctatcccactaaaatatttaatcctaattcttagtccttgcctgtgagatatgaggtcttacaggagacctcagagctcccagcccttctcctcctgctaaaccttctcacaccctcaagaggagttagaaaagaggtccttgtcattctcacctcttatggaaaatggaataagaaataatcatatcctttcttcccacccttctcctgttatttaggatttctgacaaagctggcttgagattggtcacttagagccgactgtctcctctgccttttgtttttcagcttcagagacagatccaatatagtcccagggacctgggtctctgggagaggaaggaagagggagggagcaaagagattggggtatgtcccctgtagtacactcttacctcttacttcctagactttgatttctccggcagcccagatgttcagttctcttggcccctctctaccccttactgggatctggttttcattttccggtccttttgccatacacagttacagagatcagtcaaatccataccaccactgagatctcatttattgccacagatgcacaaaataaataacccaaaatcacaaaa

SEQ ID NO: 24429 - DNA, 1723 bp, Homo sapiens; identical to SEQ ID NO: 24406
  source 1..1723: mol_type = unassigned DNA

SEQ ID NO: 24430 - DNA, 1723 bp, Homo sapiens; identical to SEQ ID NO: 24406
  source 1..1723: mol_type = unassigned DNA

SEQ ID NO: 24431 - DNA, 1464 bp, Homo sapiens; identical to SEQ ID NO: 24401
  source 1..1464: mol_type = unassigned DNA

SEQ ID NO: 24432 - DNA, 1723 bp, Homo sapiens; identical to SEQ ID NO: 24406
  source 1..1723: mol_type = unassigned DNA

SEQ ID NO: 24433 - DNA, 1731 bp, Homo sapiens; identical to SEQ ID NO: 24416
  source 1..1731: mol_type = unassigned DNA

SEQ ID NO: 24434 - DNA, 1640 bp, Homo sapiens; identical to SEQ ID NO: 24409
  source 1..1640: mol_type = unassigned DNA

SEQ ID NO: 24435 - DNA, 1723 bp, Homo sapiens
  source 1..1723: mol_type = unassigned DNA
ggaaaaaggaagggagatcaaagattaggtgctggggactgaaaaataattttcatgtattaatactaccaaggatgatttggggaggaagacggagaaacagcaaggattatattttcctttgaagagttgctgggacctttcctaggttaggaattgtgtcttctcttatactggtggtataagaacaggaaataatacttattcctcaagggactatctgaggtaaaagacctgttctgttttatcttctgtcagctcctctggtgctatgcctatggtactgattgagctaaagaagaaaagagaggaggttccctgggagggagtgggaaaggttagtaagaggggactagataggtatgctcatccttaaccttctaggagaaccggagccttaccatcaaacttcggaaacggaagccagagaaaaaggtagaatggacaagtgacactgtggacaatgaacacatgggccgccgctcatccaaatgctgctgtatttatgagaaacctcgggcctttggcgagagctccacggaaagtgatgaggaggaagaagagggctgtggtcatacacactgtgtacgtggccaccgcaaaggacggcgtcgtgcaaccctaggaccgacccccaccacccctccccagcctcctgacccttcccagccccctccagggccaatgcagcactaaatccctctctcctccagcattcctgtgtctgtctggccctaaatgtatccatgtggctacttctccagccccctccttccctctcttctgcctgatagagggaagaggaagaggaggacgaacagagatcctgaaattctgacttgctgctattccagaacccagcctcctgggtttccccagtcctcatttttcctcccaatacccacccttctctctcgagggatctaggcaccttggtcccagtgtcttccttttgttctcactgctaaactgcctgtcctgggatctagttatcttggccctgcactctcaacatgagtagcgaacacttaaattgggttttcaacagtcccagctttcactgccagggtcccagtcagattccaggaatttgcgccctaactttgcttgctaatcctggtttagagctatcccactaaaatatttaatcctaattcttagtccttgcctgtgagatatgaggtcttacaggagacctcagagctcccagcccttctcctcctgctaaaccttctcacaccctcaagaggagttagaaaagaggtccttgtcattctcacctcttatggaaaatggaataagaaataatcatatcctttcttcccacccttctcctgttatttaggatttctgacaaagctggcttgagattggtcacttagagccgactgtctcctctgccttttgtttttcagcttcagagacagatccaatatagtcccagggacctgggtctctgggagaggaaggaagagggagggagcaaagagattggggtatgtcccctgtagtacactcttacctcttacttcctagactttgatttctccggcagcccagatgttcagttctcttggcccctctctaccccttactgggatctggttttcattttccggtccttttgccatacacagttacagagatcagtcaaatccataccaccactgagatctcatttattgccacagatgcacaaaataaataacccaaaatcacaaaa

SEQ ID NO: 24436 - DNA, 1464 bp, Homo sapiens
  source 1..1464: mol_type = unassigned DNA
gggatatgggaggtgtggggttgaatatctagggctgggagaatcggaaggatgatttggggaggaagacggagaaacagcaaggattatattttcctttgaagagttgctgggacctttcctaggagaaccggagccttaccatcaaacttcggaaacggaagccagagaaaaaggtagaatggacaagtgacactgtggacaatgaacacatgggccgccgctcatccaaatgctgctgtatttatgagaaacctcgggcctttggcgagagctccacggaaagtgatgaggaggaagaagagggctgtggtcatacacactgtgtacgtggccaccgcaaaggacggcgtcgtgcaaccctaggaccgacccccaccacccctccccagcctcctgacccttcccagccccctccagggccaatgcagcactaaatccctctctcctccagcattcctgtgtctgtctggccctaaatgtatccatgtggctacttctccagccccctccttccctctcttctgcctgatagagggaagaggaagaggaggacgaacagagatcctgaaattctgacttgctgctattccagaacccagcctcctgggtttccccagtcctcatttttcctcccaatacccacccttctctctcgagggatctaggcaccttggtcccagtgtcttccttttgttctcactgctaaactgcctgtcctgggatctagttatcttggccctgcactctcaacatgagtagcgaacacttaaattgggttttcaacagtcccagctttcactgccagggtcccagtcagattccaggaatttgcgccctaactttgcttgctaatcctggtttagagctatcccactaaaatatttaatcctaattcttagtccttgcctgtgagatatgaggtcttacaggagacctcagagctcccagcccttctcctcctgctaaaccttctcacaccctcaagaggagttagaaaagaggtccttgtcattctcacctcttatggaaaatggaataagaaataatcatatcctttcttcccacccttctcctgttatttaggatttctgacaaagctggcttgagattggtcacttagagccgactgtctcctctgccttttgtttttcagcttcagagacagatccaatatagtcccagggacctgggtctctgggagaggaaggaagagggagggagcaaagagattggggtatgtcccctgtagtacactcttacctcttacttcctagactttgatttctccggcagcccagatgttcagttctcttggcccctctctaccccttactgggatctggttttcattttccggtccttttgccatacacagttacagagatcagtcaaatccataccaccactgagatctcatttattgccacagatgcacaaaataaataacccaaaatcacaaaa

SEQ ID NO: 24437 - DNA, 982 bp, Homo sapiens
  source 1..982: mol_type = unassigned DNA
gacagagaaagcgcttcggcggctgcagctcgggcggcggccgcgggggacaaagggcgggcggatcggcggggagggggcggggcgcggccaggccaagcccgggggctccgcatgctgcagctgcccccgggcgcccccgccgccgccctcgccgcggagccgcgcggagcggagccggcgagctaacccgagccagccggcgggcgtcccggaggcggtggcgcagggaggggcccgacgctcgcacgtggccccggcggccgccatggcggacagcggcaccgcggggggcgcggcgttggcggccccggcccccgggccgggcagtggcggcccaggaccacgcgtctactttcagagcccccccggggccgcaggagagggcccgggcggggcggacgatgagggcccagtgaggcgccaagggaaggtcaccgtcaagtatgaccgcaaggagctacggaagcgcctcaacctagaggagtggatcctggagcagctcacgcgcctctacgactgccaggaagaggagatcccagaactggagattgacgtggatgagctcctggacatggagagtgacgatgcccgggctgccagggtcaaggagctgctggttgactgttacaaacccacagaggccttcatttctggcctgctggacaagatccggggcatgcagaagctgagcacaccccagaagaagtgacggtccccgacccaggagaacggtggctcccacaggacaatcgctgccccccaacctcgtagcaacagcaataccgggggaccctgcggccaggcctggtgccatgagcagggctcctcgtgcccctggcccaggggtctcttcccctgccccctcagttttccacttttggggttttttattgttattaaactgatgggactttttgtgtttttatattgactctgcggcgcgggccctttaataaagctaggatacgcctttggtgca

SEQ ID NO: 24438 - DNA, 2152 bp, Homo sapiens
  source 1..2152: mol_type = unassigned DNA
agagcaggtgccggggagcccttcgcatgcggctgccgggccggaggtggtagcggcgccgggcgcgctccgcccgcccctcctccgggccgcactgaggctcgggcgcgcggggacatgtcggtggcgacgggcagcagcgagacggccggcggggccagcggcggcggcgcacgggttttcttccaaagcccccggggtggcgccggtggcagccccggctccagcagcggctcaggctcctcccgggaggactcggcgcccgtggccacggcggccgctgcagggcaggttcagcagcaacagcagcggcgacaccagcagggaaaagtgacagtgaaatacgatcgtaaggagcttcggaagcggctggtgctggaggaatggatcgtggagcagctgggtcagctctacggctgcgaggaagaagaaatgccagaggtagaaattgacattgatgatcttcttgatgcagacagtgatgaagagagagcttcaaaattacaggaagctcttgtagactgctacaaaccaacagaggaatttatcaaagagctgctttctcggataagaggcatgaggaaactgagccctccgcagaagaagagtgtatgattctggaacagggtgaaactctcccagagacgaagaaagagtcctgggatttgtacttcatgaagacttttgtgaaagaataggtgtccttatgaacaacgtttttgtttttttttttttcttttttggtgtgaaggtgggggggtctattagacatttattcaagagcgttctttttttggttttaaaggtttttgttaatgtaatattttaatagcaaagatatcatgactctagccacagcctaaccaaggattatcaaaggaggtggacactcaaggaagggccacgccaggctgcgtttcctgcaaggactcagatgttcagtaccttatgatacagggaagatagttttcttacaagtagtttggtaatattttttttcttaagttgtacatttgactcagctgtcaaatttctcacacttgtatatatctacacacaactaagttaaaatgttgatgtgagttttatttcacatggatggaataaacttgtggttgtcctttaactggaggtcccagcacatgtgttttcaagaggccactaggcattcttcactgagtgctgctgacttcaacgttcactttatgcaccaaagtgaaagaattcagtgtatccgttattttaatgcactacaccacagaaatgttaagttggtcaagggcttaatttatggaatttctattatttcattggttgggatgctttgccaggtcatgtgcttattgtctcattttgtagtcttttaaagttgtatgaacccttaatttgaagaactaacttgatttctagagaaatatccacactatctcagtggtattttgcattggaaaaaggaagcactgtgtagcagtgaattgtctgctttccaccgagtactgtgtttattctctctccaggaaagcagatcaaaagaaagttagcagatcgagtgtcttcttccttagaaataggttctggtagcttctgtgcctgggtagtatcagaccagtgggagtaaaccgagtgttaagtgtcaaggtgagaaagcctcacattctctcaagacagttgctctaggagctgagttgctggtttggaagtgtggagattgcatttctggcttctctcaatggcttgtgttgaggactctgggtgctcctggccctaattgtgcaccctgatccccgtgcttggagctaggcctggtggcgtgctctagccctctcagttaccagctctttggagaaggatcaaaattcagatggaatgtgggatgggtaataggtgagagtagaaacccttccctccaggaggcccccgctgactcccacagaaacccacctaccataagatgtcttcaggtggccttgtccaaggatgggggtcaggcattttatatcaagggtgctctgaacatattttattttttaaaaaaactatgtttgtgaattttgcgtatactggcaagcttttgaaaatgtatttaattttgtattgtttaccaatgatttatttacaagatatttactcaaataaatggagctgcttacaa

SEQ ID NO: 24439 - DNA, 757 bp, Homo sapiens
  source 1..757: mol_type = unassigned DNA
cacttccctctgtggctctgctcagaactggcggtttttcccagctccttgcccagaccaatacttccatgctgtcttcaagccctgcttcctgcacatctcccagcccagatggggagaacccatgtaagaaggtccactgggcttctgggaggagaaggacatcatccacagactcagagtccaagtcccacccggactcctccaagatacccaggtcccggagacccagccgcctgacagtgaagtatgaccggggccagctccagcgctggctggagatggagcaatgggtggatgctcaagttcaggagctcttccaggatcaagcaaccccttctgagcctgagattgacctggaagctctcatggatctatccacagaggagcagaagactcagctggaggccattcttgggaactgcccccgccccacagaggcttttatctctgagctgctcagtcaactcaagaaactccggagactcagccggcctcagaaataagcctgagagaccatctttagcagcctcagcactgccaggcctgccctgaaactccagatcctggctaagagggaaatagctccttgggacacaaacaagaaatgtggacaaggagggacatttgcatactcctactgtctgtgtggtcacagctagtttctgtcagctgggctctctgggagaaagctggctgttgtccaatgccttccttggcagccaagtggataaaacctttaggagccccagctcaa

SEQ ID NO: 24440 - DNA, 871 bp, Homo sapiens
  source 1..871: mol_type = unassigned DNA
cacttccctctgtggctctgctcagaactggcggtttttcccagctccttgcccagaccaatacttccatgctgtcttcaagccctgcttcctgcacatctcccagcccagatggggagaacccatgtaagaaggtccactgggcttctgggaggagaaggacatcatccacagactcagagtccaagtcccacccggactcctccaagatacccaggtcccggagacccagccgcctgacagtgaagtatgaccggggccagctccagcgctggctggagatggagcaatgggtggatgctcaagttcaggagctcttccagagtcttgctctgtcacccaggctggagtgcagtggtgtgatccattctctgcaacttctgcctcccgggttcaatcgattctcctgcctcagctcctggagtagctgggattacgggatcaagcaaccccttctgagcctgagattgacctggaagctctcatggatctatccacagaggagcagaagactcagctggaggccattcttgggaactgcccccgccccacagaggcttttatctctgagctgctcagtcaactcaagaaactccggagactcagccggcctcagaaataagcctgagagaccatctttagcagcctcagcactgccaggcctgccctgaaactccagatcctggctaagagggaaatagctccttgggacacaaacaagaaatgtggacaaggagggacatttgcatactcctactgtctgtgtggtcacagctagtttctgtcagctgggctctctgggagaaagctggctgttgtccaatgccttccttggcagccaagtggataaaacctttaggagccccagctc

SEQ ID NO: 24441 - DNA, 1826 bp, Homo sapiens
  source 1..1826: mol_type = unassigned DNA
agagtccccggagccgcgagctgggagcgctgtgccgggagccgggagccgagcgcgccgggctggggccggggccggagcggagcggagagggagcgcgcccgccccagccccgagtcccgccgccttccctcccgccgcagcgcgggcccaccggccgccgccccagccatggagcaagacaacagcccccgaaagatccagttcacggtcccgctgctggagccgcaccttgaccccgaggcggcggagcagattcggaggcgccgccccacccctgccaccctcgtgctgaccagtgaccagtcatccccagagatagatgaagaccggatccccaacccacatctcaagtccactttggcaatgtctccacggcaacggaagaagatgacaaggatcacacccacaatgaaagagctccagatgatggttgaacatcacctggggcaacagcagcaaggagaggaacctgagggggccgctgagagcacagaaacccaggagtcccgcccacctgggatcccagacacagaagtggagtcaaggctgggcacctctgggacagcaaaaaaaactgcagaatgcatccctaaaactcacgagagaggcagtaaggaacccagcacaaaagaaccctcaacccatataccaccactggattccaagggagccaactcggtctgagagaggaggaggtatcttgggatcaagactgcagtttgggaatgcatggacaccggatttgtttcttattccttcacttttggggaaaatctcttgtttttaaaaagtgataaatttggtgttaggtccttggcactttccttcttttccaactgggagaatcctttctccctgccttcttgccctgccctctctgtagcccccaccctcctgccaagctgcctctgggaaggaagaaacaggagctaggcagaagccttgagcagggaagagttcttcccttagccctgactttacttgctgtgggaagagagatgagggtcagataggtgggaggactaacttccagggtgccaagaaggaagaaaagccccaggttctcttttcttattgaggaacgatccgaccacctcacaggcctgccctgcagctggaagactcggcgctctaaggcctgtgccgtgtccagctgtgactgtgcggtgggctccatctgctggacaaaaggggaactgcaccatggcacttggcccatgggaaagagggtatggtggtgtgccgatacctcctcgcctgccctccaagccccagctgccttccttttggattcccaagcttcaggatgtgttccctcttccagctgtgggaccgctgtcccttatttcaacccgttagcaacaatggatagagaacacagtggctattaatgaagaggcccatgctggagactggaagggttcccttgtcctagacattgaggggcccagataagaccaaaaccaagcataagagaagaaactgtctcagatctcacggccaggcctctctcctgctgctgtttttgattttcccaggtagtgggagagaggaaaggagggaaggcaagattctttccccctccctgctgaagcatgtggtacagaggcaagagcagagcctgagaagcgtcaggtcccacttctgccatgcagctactatgagccctcggggcctcctcctgggcctcagcttgcccagatacatacctaaatatatatatatatatatatgagggagaacgcctcacccagattttatcatgctggaaagagtgtatgtatgtgaagatgcttggtcaacttgtacccagtgaacacaca

SEQ ID NO: 24442 - DNA, 633 bp, Homo sapiens
  source 1..633: mol_type = unassigned DNA
agagtccccggagccgcgagctgggagcgctgtgccgggagccgggagccgagcgcgccgggctggggccggggccggagcggagcggagagggagcgcgcccgccccagccccgagtcccgccgccttccctcccgccgcagcgcgggcccaccggccgccgccccagccatggagcaagacaacagcccccgaaagatccagttcacggtcccgctgctggagccgcaccttgaccccgaggcggcggagcagattcggaggcgccgccccacccctgccaccctcgtgctgaccagtgaccagtcatccccagagatagatgaagaccggatccccaacccacatctcaagaaactgcagaatgcatccctaaaactcacgagagaggcagtaaggaacccagcacaaaagaaccctcaacccatataccaccactggattccaagggagccaactcggtgtcataggagaggagggactgggggacagaagagcgtgggaggatttccctgctccacccacactttggctccattctatgtcttcactcgctccattttactgctcaaaaggggagagagaatgtcgcatccactggagcccagagacgacccaacaaagatgccatga

SEQ ID NO: 24443 - DNA, 3004 bp, Homo sapiens
  source 1..3004: mol_type = unassigned DNA
attgtgctgagaggatccaagggattggtgggggaacaggcaagccaggcatcaccgtggatgttgaagaagggggttactcaaacctcggcatcttcacttgctcgatctggaattacagctatttattacgaagcactctgtgtggcttagtggagtgtgtctgaggaaacacatcccggacaccacttagggttagtctttctgagctcttcacatctctgactaattatcatcattaccatggagcccaacagtcccaaaaagatacagtttgccgtgcctgtattccagagtcagattgcacctgaagcagcagagcagatcaggaaaagaagacctacaccagcatcacttgtgattctcaatgagcataaccccccagaaatagatgacaagagggggcccaacacacaaggggaattacagaatgcatcccctaagcaaaggaagcagagtgtgtacacaccacccaccataaaaggggttaagcatctgaaaggccagaatgaatcagcattccctgaagaagaagaaggcaccaatgaaagagaggagcagcgggaccattaattactggtgcaaaatgagttgataacaaccagaagttgacttgttagtgctgtgcttctactcgagcttggaaaaatcccaacacaaaacaaacaccacctccgattccatcatgatgccacgttgctttctactggattacctcctgaagcactttagatattttatacataagtattgacatgtttttcagaagctgtttcttcacttattgcttttttctaataatttttattacaccatttgccaagtccttccctttggttttagtttattcctctctacaactaaaaaagggatcttgagtttaggtacattttaagtgattcatttttagtttttctaattctggaatctgagccttctcttacaacagggagtctttcaaaaacatttttttgtttctttttcaaattccactgtgtttatttattgccttgtttctttttcaaattccattggtcttgatttaatttagttccacagattttactgatagtctactacctgccaactactgaattatgcagcagacttataaaaataaaaaggctattttattgttattgccatcctgctagtaaagatttattcaattatttataattaattaagtggcttcacctatatttctgttaataatcacattaattatgtatgacaggtaggatttatgttatagataagaaaactagagtccaaagaaaataagtgtccccaaatgaaccaataatccaacaaacgcttccactaactagcttctgacctgtttgagttgtgatagattttagaataaaaaagcctatcctccttaggagccatagacttttattctttcttatactgtcttatatattgacttagagctaaacttcctccaattcagacataaagcataggcagatacttttgctaatgaggctaagctgggaagaaaaccctgagttctactttaattcttgggcattgacttcaaactaagatgacttataagaaataaaagaagtaaatttgaaactttaataaaaaaagtacatggttcatttaaaaatgtttcctatgtctaaatctatattttaaaaataacctttatcatgtaaaatgagagaattgctgagtttatgacaatcttaggtataaccttttcttaaagaacaaggcatcaatctttaatttgtttccctttcttgatttctcataagttgcaaaataaaaataaaaataatttcacaaattgttcattattattatcctccctacttgccccaggatttaagtactaacttttacttcctactcttagactttgtattgccaaagaaataaaatatgaaaaagcataatcacccagacctacctgcggaattgtggattatgctgtagatattagatcattgaaaggaacaatatactacttaatgaggagccaaagacaacattctacctgctgctcccttcaagctgaggaatgagtttaattgacttcaaagtcccattattctcaaaagtagcaaaggtacaacatggctttgcatgaatcaaaggaagggaacaacaagaacttaaaaaaatagtttgcagatggttgaacatctctttaataattagagaagaatatcttttctttctttattgtttacagataccaacatttttcaaagccttgcagtagatgagtgagtctcctgttacatttctcctgcagcatatattctgtggatgtgttttcctaagcagactaattatatgttgctctcttcttttaccctaatgaaacatagatttttctgttttgaatttgtcacttgtttgttacatttgtcaagtgttttaaatattacattggtcctttatttgcttttgagaacacccaatagtttaaaaattaaaatgacatgaaggtcaattctaagacaggaatgatactactaaatcctggacttgcctatgataacaagctcgagctacacacttttattgtcagaataaatggaatatataggaaggagttaattggaactggttagtacctaaataagatttttcaaagtaagttttttgtcgtattggcagaacagtgttaaaaaatagacattgtcatcataaacacccacaactatatctgtagaagataatttaatgcaatattctggggaaaatacagttgccaaaattaatctccttgttttctttcattgtgcaatgtggagttaaattttttttctattgagcagtgtgtgtgtgtgtttgtgtctataatttatatatgtgcttgtatacatttctatatacacatgtatgtgtatgcaaaatatgtatatatacacatatatataaaatgtacactaaatatgtatatatgtatattcataaaatgttttgctgtatggaaataaaaaagaaggtttctaaaggaaagatagagaagaaa

SEQ ID NO: 24444 - DNA, 1157 bp, Homo sapiens
  source 1..1157: mol_type = unassigned DNA
ggagtgtgtctgaggaaacacatcccggacaccacttagggttagtctttctgagctcttcacatctctgactaattatcatcattaccatggagcccaacagtcccaaaaagatacagtttgccgtgcctgtattccagagtcagattgcacctgaagcagcagagcagatcaggaaaagaagacctacaccagcatcacttgtgattctcaatgagcataaccccccagaaatagatgacaagagggggcccaacacacaaggggaattacagaatgcatcccctaagcaaaggaagcagagtgtgtacacaccacccaccataaaaggggttaagcatctgaaaggccagaatgaatcagcattccctgaagaagaagaaggcaccaatgaaagagaggagcagcgggaccattaattactggtctgcagcaagaaggcttcttggaaataactgaactattaacttttctgagtataccatggaattccactgcttgacttccagaagcatcctccatctctgcaccccacactcatacagtagctatgcacatcctggaagtctccttgactgaactttagaactaagtgcaaaatgagttgataacaaccagaagttgacttgttagtgctgtgcttctactcgagcttggaaaaatcccaacacaaaacaaacaccacctccgattccatcatgatgccacgttgctttctactggattacctcctgaagcactttagatattttatacataagtattgacatgtttttcagaagctgtttcttcacttattgcttttttctaataatttttattacaccatttgccaagtccttccctttggttttagtttattcctctctacaactaaaaaagggatcttgagtttaggtacattttaagtgattcatttttagtttttctaattctggaatctgagccttctcttacaacagggagtctttcaaaaacatttttttgtttctttttcaaattccactgtgtttatttattgccttgtttctttttcaaattccattggtcttgatttaatttagttccacagattttactgatagtctactacctgccaactactgaattatgcagcagacttataaaaataaaaaggctattttattgttattgcc

SEQ ID NO: 24445 - DNA, 1014 bp, Homo sapiens
  source 1..1014: mol_type = unassigned DNA
gtattagtgaagaggcacacaattagcgtattgttcctttctgtattgtgctgagaggatccaagggattggtgggggaacaggcaagccaggcatcaccgtggatgttgaagaagggggttactcaaacctcggcatcttcacttgctcgatctggaattacagctatttattacgaagcactctgtgtggcttagtggagtgtgtctgaggaaacacatcccggacaccacttagggttagtctttctgagctcttcacatctctgactaattatcatcattaccatggagcccaacagtcccaaaaagatacagtttgccgtgcctgtattccagagtcagattgcacctgaagcagcagagcagatcaggaaaagaagacctacaccagcatcacttgtgattctcaatgagcataaccccccagaaatagatgacaagagggggcccaacacacaaggggaattacagaatgcatcccctaagcaaaggaagcagagtgtgtacacaccacccaccataaaaggggttaagcatctgaaaggccagaatgaatcagcattccctgaagaagaagaaggcaccaatgaaagagaggagcagcgggaccattaattactggtctgcagcaagaaggcttcttggaaataactgaactattaacttttctgagtataccatggaattccactgcttgacttccagaagcatcctccatctctgcaccccacactcatacagtagctatgcacatcctggaagtctccttgactgaactttagaactaagtacacattgttccacatcacttataattaaagaataagcatttattttacagtgattcttctttttaactatgtaaaaatttgcatacatgtgactgttctaactttaatactgccagagcttaatccttgatgtcctactgataaggtttgcattctaacaacacatgtaaataacatcactttaagagtaaaaaataaatagtaaacacatttagacatga

SEQ ID NO: 24446 - DNA, 3452 bp, Homo sapiens
  source 1..3452: mol_type = unassigned DNA
gttctcgccccgccctctccccgcctcctccctagatatcgcgagagggcgggtccgcttggcttcggcgtcgcgtcgctcctgcgctggagctctaggccggcgtctctccgcgagccgcgggtcaagtggcagtggctaagggtgcgcgagtagccgccacccgttcggcgttggctctggcgtcggggtcgttgtgtcgtgacaaccgctgcggtagccgtttccgaggcagcagttgcggccgctttagccctgagcgggatctgcggctgcctgcgagtctctgctgtgccgacccttctcttcgcggaccccacgccaagcagcgaccctgagccgacagccggagcgcccggcaatggcggcctcgacggcctcgcaccggcccatcaaggggatcttgaagaacaagacctctacgacttcctctatggtggcgtcggccgaacagccccgcgggaatgtcgacgaggagctgagcaaaaaatcccagaagtgggatgaaatgaacatcttggcgacgtatcatccagcagacaaagactatggtttaatgaaaatagatgaaccaagcactccttaccatagtatgatgggggatgatgaagatgcctgtagtgacaccgaggccactgaagccatggcgccagacatcttagccaggaaattagctgcagctgaaggcttggagccaaagtatcggattcaggaacaagaaagcagtggagaggaggatagtgacctctcacctgaagaacgagaaaaaaagcgacaatttgaaatgaaaaggaagcttcactacaatgaaggactcaatatcaaactagccagacaattaatttcaaaagacctacatgatgatgatgaagatgaagaaatgttagagactgcagatggagaaagcatgaatacggaagaatcaaatcaaggatctactccaagtgaccaacagcaaaacaaattacgaagttcatagacgagatttgttcaacactgcaattgtttgttagatgtaaaccctgtgactatagtacgttgcttcttgttcttcacaattcatgacttaagtaccaaaatgcataccagttattatatattgccaagaattaaatgataaacttagagactgattagactgaaaatgcctaatcgatatatatattcttgtgcctagtactttaccacaaatacagtgtaatatcatcagtccaaaactgcattacttttgtaaaaacactggttaatttgtataagatattatagagctttttatgctttagaagttaaacaatatctttgggggggaactaatttattttcatcacttgaaatgtggtagctcttacaaagtttattgatttgatttttttaaaaatcaaaagccaattgaacaacaggatatatagactgataaatatttaggctgaatagtattttaacacttgtcttcaacttgatttgtctgtttaattgaaaagaattataagagttactgttgcattttctgacctactatttttaaaattcctgttgagtttctttgtgtttacaaggaaaggactgaactttttctcatcaaaactagcttttttccccacaaataaattatcaggttaaactttcaccaatgtctgctctgttttttgtttttggggggttttttgtttgtttttgttttttaatgtttttggtacactgggcagacttcagagcagttttttaaaaaaataaatattctaatgtagctatctcgccattccctttaaatacctgtcttaacctcctgcttttctttcctactcctttccacacatacgcacacaatcttctaccttttaaaggatcattaagactgtcaccacattaggagctctttctctcactcttctgtcatttgctgctatgttgaaattcttattttgaccatcaatgcctatgaattcttctaatacgtgaagaaaatagtttgagtagcagcagtgctataggtgggaaatacagtttagctgctgaatttctatacctctctgatttacagattgctaattaaatggctattattagtttggattaattagacttaagaaaacaactaactgagggttttttttgtttgttttttgagggttttctttgcatgagagttgtatgtaaccagtgatatgattattcctgaatgtacagacagaagtaagcctggacattgttaaatagtccctgctttaagggactacgataatgtgtactatgacaaacgtgctttattcttctaacgcagtaagaattaggtggaattttttccttcaaccaagtgcaggaaagccctgtgtgtcttggtttagttatggtttcatttctagccatacaattgatgaattgtgtacaacttttgttagtaccaaaataatctgttatatgaacagacttctaaaataacgtctgtatattttatatatagatacatatatgaaagaaggcttttattgaacagcttatcttccacttgcaggtttatggaaacagcagtatttgaaaataaataaaaagtgggagaattccttgctgttagaagaatgtggccattattttgattttttgaatgagatatataatcaaagtactgctgaactgtgagtgcagtattctaaacatttcagctaggaataccactgatttagaaacaaaactgtttgtctctggtttctgaatttaaaatgttgggattacctgtttaaatctgtcttgggggatgtagagattaagtctgtacatgtgcgtgcacatatattcatgcaccctctgattttggttttcttgtttctgagttcttagaaagtacccacatactcttttttttttttttgtagaagtagctgtcatagagtgaagaaaaggataagactttaaacagttgattctttttgtgttttctacaaactattttttgaaatttaaatcacaaactcattttctggtttttagaaagtagatgatgatttcagaggagtaaggcatgccaagcagcatgctcagtggggttttaggctgtcacatgcagctgagaaaaggtatgttcaagtcataagtaggtaattgatagggtatgaactagtcaaaatatgaaccattatgattcaagttagattttcctctggagagacagatctgaatgttcagttctagccaaggtagattttactttcaactttttaatcagtatcactttctgtgcttaactatttggtgttaccttgtctgttttcatttgtctaaaattctgcagagatgactaaaatttgacataatggtgtaaatggattgttaaggtaactttcagttgaagattaaagcaagatgccattttccccatgactttggttttgtttacatttttccctttcagttagtatacactacacgtactgtaataaaatacaataatatgacaa

SEQ ID NO: 24447 - DNA, 5582 bp, Homo sapiens
  source 1..5582: mol_type = unassigned DNA
agatctgccctgtagagccttgcggttccactgctggcctccggattcccgggagcccccagcccgacaggacaaccttccttccccgcttcctcctttccagacccggcggcaggagaggggatgaagatggcggacgcgaagcagaagcggaacgagcagctgaaacgctggatcggctccgagacggacctcgagcctccggtggtgaagcgccagaagaccaaggtgaagttcgacgatggcgccgtcttcctggctgcttgctccagcggcgacacggacgaggtcctcaagctgctgcaccgcggcgccgacatcaattacgccaatgtggacggactcactgccctgcaccaggcttgcattgatgacaatgttgatatggtgaagtttctggtagaaaatggagcaaatattaatcaacctgataatgaaggctggataccactacatgcagcagcttcctgtggatatcttgatattgcagagtttttgattggtcaaggagcacatgtaggggctgtcaacagtgaaggagatacacctttagatattgcggaggaggaggcaatggaagagctacttcaaaatgaagttaatcggcaaggggttgatatagaagcagctcgaaaggaagaagaacggatcatgcttagagatgccaggcagtggctaaatagtggtcatataaatgatgtccggcatgcaaaatctggaggtacagcacttcacgttgcagctgctaaaggctatacggaagttttaaaacttttaatacaggcaggctatgatgttaatattaaagactatgatggctggacacctcttcatgctgcagctcattggggtaaagaagaagcatgtcgaattttagtggacaatctgtgtgatatggagatggtcaacaaagtgggccaaacagcctttgatgtagcagatgaagacattttaggatatttagaagagttgcaaaagaaacaaaatctgctccatagtgaaaaacgggacaagaaatctccactaattgaatcaacagcaaatatggacaataatcagtcacagaagacctttaaaaacaaagagacgttgattattgaaccagagaaaaatgcatcccgtattgaatctctggaacaagaaaaggttgatgaagaagaagaaggaaagaaggatgagtctagctgctctagtgaagaagatgaggaagatgactcggaatcagaagctgaaacagataagacaaaacccctggcttctgtaactaatgccaacacttctagtacacaagcagctcctgtagctgttacaacacctactgtgtcatcaggtcaagcaacacctacatcacctattaaaaagtttccaaccacagctacaaaaatttctcccaaagaagaagagagaaaagatgagtctcctgcaacttggaggttaggacttagaaagacgggcagctatggtgcacttgctgaaatcacagcatctaaagagggtcagaaagaaaaagatactgcaggtgttacacgttcagcttcaagtcccagactttcctcctctttggataataaagaaaaggagaaagatagtaaaggaactaggcttgcatatgttgcacctacaataccaagacgactagccagtacatctgacattgaagagaaagaaaacagagattcttcaagtttgcgaacaagtagttcatatacaaggagaaaatgggaagatgatcttaaaaaaaatagctcagttaatgaaggatcaacgtatcataaaagttgctcctttggtagaagacaagatgatttgattagttctagtgttccaagcaccacatcaacaccaacagttacctctgcagctgggcttcagaaaagcctgctttccagcacaagcactactacaaagattacaacgggttcttcctcagcaggcacacaaagcagtacctcaaatcgtttgtgggctgaggatagtactgagaaagaaaaggacagtgttcctacggcagtgaccattcctgttgctccaactgttgtaaatgctgcagcttctaccacaaccctgactacaactactgctggcactgtctcctccacaacagaggtcagggagagacgcagatcatacctcactcctgttagggatgaagagtctgaatcccaaagaaaagcaagatctagacaagcaagacaatctagaagatcaacacagggagtgacattaactgatcttcaagaagctgagaaaacaataggaagaagtcgttctacccgaaccagagaacaagaaaatgaagaaaaagaaaaagaggaaaaagagaaacaagataaagagaaacaagaagaaaagaaggagtcagaaacatctagagaagatgaatataaacaaaagtactccagaacgtatgatgagacttaccagcgttataggccagtatcaacttcaagttcaaccactccatcctcttcactttctactatgagcagttcactgtatgcttcaagtcaactaaacaggccaaatagtcttgtaggcataacttctgcttactccagaggaataacaaaagaaaatgaaagagagggagaaaaaagagaagaggagaaagaaggagaagataaatcacaacctaaatcaatcagagaacgacgacgaccaagagagaaaagaagatctacaggagtttcattttggacacaagatagtgatgaaaatgaacaagaacaacaatcagacacagaagagggatccaataagaaagaaactcagacggattccatttctagatatgaaaccagttctacatcagctggtgatcgatatgattccttgctgggtcgctctggatcatacagttacttagaagaaagaaaaccttacagcagcaggctagaaaaggatgactcaactgactttaaaaagctttatgaacaaattctagctgaaaatgaaaagctgaaggcacagctacatgatacaaatatggaactaacagatcttaaattacagttggaaaaggccacccagagacaagaaagatttgctgatagatcactgttggaaatggaaaaaagggaacgaagagctctagaaagaagaatatctgaaatggaagaagagctcaaaatgttaccagacctaaaagcagacaaccagaggctaaaggatgaaaatggggccttgatcagagttataagcaaactttccaaataaaaaaaaaaaaagcagcaagtaatggaattgcacatattagtaacccagtggaccataattggcagtcactggaagtctgggaagaatccttggagactgtcattttcggatatcctgccaaatgccctcttatctagaatttttgtttcattttgtttaattttctggggtgtttttgttgttgttggtttgttttttgttttttttttttaatcaagaccattgtttcatgttaatgcagctgctgagaagatttttttttaatgactgagaaaacttgtttacagctccagcatataaggaaagtgttcaaggccagatatgcctcagatatttaaccagtaagccttagttgtacataaatacttttgtgtcaacaaaaactttcagctctcacagaagacagttactcaacattttttgatgtgccacagtttcgagtttttcgatatttaaattttttggcttttcatctaagtttgggtttgtattttttccttctaaactcttcatgtggcagagtcttctatgttttcacagctttttcattacagaaaagaacacttgctcttctgtgattattgtcatgtattaggctaatgctgtgttgtctcccacctggaactgaattgcttggtggaacatatgctttcactgtttgtgcaatatgcatttatttcttatatgaatgctttaaagtcatttgaggttagatcttttaattcctattttctgcttcattggtcactttttttttattgtagtataagatgttagattctgtaatcttcacattcattttagcaggtactgagtgatgctgtatatacaaataagtgtattgttttgatttttagaccaccacatggcatgcttgactatttcttatttcaaatgtctgctaatgcagagtaggctactccatgatagtgttaaaaaacaaaatttgctaacaatgtgatataaagactttaaaagttacacattatgtggagccctatctttacaaaagtttcctactgtaaagtgcttttattttcagttttcacttgatagtactcaaccataattaaagttgcataagataattgctttacatttcacatacctatatttatctgagtgctgtctaaaactgttgtgctagccaaagtaatgctatgaaatcatttgcagaattaacccgtgagttaatgttaaatgcactgttattgccatgtgaagaggcatcgactttgataccaccatcatgttcagaccattttatacatttcagtggcctttttttttttttaaggaaaaaaaagcgcaaaaccaagtacatagtgacgatggcttttatttggacaaatagcttttatattttcattaaaccatgcaaaaaatactacatctttctggcacataactgtctccttaaccactgaacagttcagccatttgaataaattgtacattgtaaagcttatagtagctgattgtattattgattgtattgtatactatattaaatgtgaatttgtaccccttcattttaaaaggtcattgtgttctactgcctattttagattactttggggttggggaagggtgttttggtaagcaggattttaagtcctctctctctcgattggttttatgaagatataaggttatgctcttactaccaagctcaggattcttgattttaaaggtacaaggatagttgtgggagttttatttttggttatatttgaactgtatgaatggtaggtctgaatattgagaatttccatggtcttatgtggaggtaaaatatacagataactgatcagtttgagtgactgcaacatgttctggttgcacaacagttaggcatgctatggtttatatttgtgaagtttggatgcctgtgaagaatgattaaatacatgtttctaatattttagtgttttgtatttaggttatttattctttgtatctaaaactgaacagctactgtgctatattgattttattggtagtattgagcagaccttgtttctgcatgaaactagttgcaaaacccactattttggaaataaaaatgtattttgacatatacaaataaaatgaataaaactattttaaatgtgtgaacttttaatgaagacattttaaattttgttctgagatatttaaattctgcatgggtattttttcactaattgctttacttggataccaatttgaataatttctgaaattgtaatattgtgataatttgcacagcattgtacatgcacatctgtaaatgcaatcttaattgccatatttatgcaatctgtgtaccaatttggacaaatgtttatatattttacataaagctgtctgtatgcagaatctga

SEQ ID NO: 24448 - DNA, 5405 bp, Homo sapiens
  source 1..5405: mol_type = unassigned DNA
agatctgccctgtagagccttgcggttccactgctggcctccggattcccgggagcccccagcccgacaggacaaccttccttccccgcttcctcctttccagacccggcggcaggagaggggatgaagatggcggacgcgaagcagaagcggaacgagcagctgaaacgctggatcggctccgagacggacctcgagcctccggtggtgaagcgccagaagaccaaggtgaagttcgacgatggcgccgtcttcctggctgcttgctccagcggcgacacggacgaggtcctcaagctgctgcaccgcggcgccgacatcaattacgccaatgtggacggactcactgccctgcaccaggcttgcattgatgacaatgttgatatggtgaagtttctggtagaaaatggagcaaatattaatcaacctgataatgaaggctggataccactacatgcagcagcttcctgtggatatcttgatattgcagagtttttgattggtcaaggagcacatgtaggggctgtcaacagtgaaggagatacacctttagatattgcggaggaggaggcaatggaagagctacttcaaaatgaagttaatcggcaaggggttgatatagaagcagctcgaaaggaagaagaacggatcatgcttagagatgccaggcagtggctaaatagtggtcatataaatgatgtccggcatgcaaaatctggaggtacagcacttcacgttgcagctgctaaaggctatacggaagttttaaaacttttaatacaggcaggctatgatgttaatattaaagactatgatggctggacacctcttcatgctgcagctcattggggtaaagaagaagcatgtcgaattttagtggacaatctgtgtgatatggagatggtcaacaaagtgggccaaacagcctttgatgtagcagatgaagacattttaggatatttagaagagttgcaaaagaaacaaaatctgctccatagtgaaaaacgggacaagaaatctccactaattgaatcaacagcaaatatggacaataatcagtcacagaagacctttaaaaacaaagagacgttgattattgaaccagagaaaaatgcatcccgtattgaatctctggaacaagaaaaggttgatgaagaagaagaaggaaagaaggatgagtctagctgctctagtgaagaagatgaggaagatgactcggaatcagaagctgaaacagataagacaaaacccctggcttctgtaactaatgccaacacttctagtacacaagcagctcctgtagctgttacaacacctactgtgtcatcaggtcaagcaacacctacatcacctattaaaaagtttccaaccacagctacaaaaatttctcccaaagaagaagagagaaaagatgagtctcctgcaacttggaggttaggacttagaaagacgggcagctatggtgcacttgctgaaatcacagcatctaaagagggtcagaaagaaaaagatactgcaggtgttacacgttcagcttcaagtcccagactttcctcctctttggataataaagaaaaggagaaagatagtaaaggaactaggcttgcatatgttgcacctacaataccaagacgactagccagtacatctgacattgaagagaaagaaaacagagattcttcaagtttgcgaacaagtagttcatatacaaggagaaaatgggaagatgatcttaaaaaaaatagctcagttaatgaaggatcaacgtatcataaaagttgctcctttggtagaagacaagatgatttgattagttctagtgttccaagcaccacatcaacaccaacagttacctctgcagctgggcttcagaaaagcctgctttccagcacaagcactactacaaagattacaacgggttcttcctcagcaggcacacaaagcagatcatacctcactcctgttagggatgaagagtctgaatcccaaagaaaagcaagatctagacaagcaagacaatctagaagatcaacacagggagtgacattaactgatcttcaagaagctgagaaaacaataggaagaagtcgttctacccgaaccagagaacaagaaaatgaagaaaaagaaaaagaggaaaaagagaaacaagataaagagaaacaagaagaaaagaaggagtcagaaacatctagagaagatgaatataaacaaaagtactccagaacgtatgatgagacttaccagcgttataggccagtatcaacttcaagttcaaccactccatcctcttcactttctactatgagcagttcactgtatgcttcaagtcaactaaacaggccaaatagtcttgtaggcataacttctgcttactccagaggaataacaaaagaaaatgaaagagagggagaaaaaagagaagaggagaaagaaggagaagataaatcacaacctaaatcaatcagagaacgacgacgaccaagagagaaaagaagatctacaggagtttcattttggacacaagatagtgatgaaaatgaacaagaacaacaatcagacacagaagagggatccaataagaaagaaactcaggtaaataccattactttatatgaaaccagttctacatcagctggtgatcgatatgattccttgctgggtcgctctggatcatacagttacttagaagaaagaaaaccttacagcagcaggctagaaaaggatgactcaactgactttaaaaagctttatgaacaaattctagctgaaaatgaaaagctgaaggcacagctacatgatacaaatatggaactaacagatcttaaattacagttggaaaaggccacccagagacaagaaagatttgctgatagatcactgttggaaatggaaaaaagggaacgaagagctctagaaagaagaatatctgaaatggaagaagagctcaaaatgttaccagacctaaaagcagacaaccagaggctaaaggatgaaaatggggccttgatcagagttataagcaaactttccaaataaaaaaaaaaaaagcagcaagtaatggaattgcacatattagtaacccagtggaccataattggcagtcactggaagtctgggaagaatccttggagactgtcattttcggatatcctgccaaatgccctcttatctagaatttttgtttcattttgtttaattttctggggtgtttttgttgttgttggtttgttttttgttttttttttttaatcaagaccattgtttcatgttaatgcagctgctgagaagatttttttttaatgactgagaaaacttgtttacagctccagcatataaggaaagtgttcaaggccagatatgcctcagatatttaaccagtaagccttagttgtacataaatacttttgtgtcaacaaaaactttcagctctcacagaagacagttactcaacattttttgatgtgccacagtttcgagtttttcgatatttaaattttttggcttttcatctaagtttgggtttgtattttttccttctaaactcttcatgtggcagagtcttctatgttttcacagctttttcattacagaaaagaacacttgctcttctgtgattattgtcatgtattaggctaatgctgtgttgtctcccacctggaactgaattgcttggtggaacatatgctttcactgtttgtgcaatatgcatttatttcttatatgaatgctttaaagtcatttgaggttagatcttttaattcctattttctgcttcattggtcactttttttttattgtagtataagatgttagattctgtaatcttcacattcattttagcaggtactgagtgatgctgtatatacaaataagtgtattgttttgatttttagaccaccacatggcatgcttgactatttcttatttcaaatgtctgctaatgcagagtaggctactccatgatagtgttaaaaaacaaaatttgctaacaatgtgatataaagactttaaaagttacacattatgtggagccctatctttacaaaagtttcctactgtaaagtgcttttattttcagttttcacttgatagtactcaaccataattaaagttgcataagataattgctttacatttcacatacctatatttatctgagtgctgtctaaaactgttgtgctagccaaagtaatgctatgaaatcatttgcagaattaacccgtgagttaatgttaaatgcactgttattgccatgtgaagaggcatcgactttgataccaccatcatgttcagaccattttatacatttcagtggcctttttttttttttaaggaaaaaaaagcgcaaaaccaagtacatagtgacgatggcttttatttggacaaatagcttttatattttcattaaaccatgcaaaaaatactacatctttctggcacataactgtctccttaaccactgaacagttcagccatttgaataaattgtacattgtaaagcttatagtagctgattgtattattgattgtattgtatactatattaaatgtgaatttgtaccccttcattttaaaaggtcattgtgttctactgcctattttagattactttggggttggggaagggtgttttggtaagcaggattttaagtcctctctctctcgattggttttatgaagatataaggttatgctcttactaccaagctcaggattcttgattttaaaggtacaaggatagttgtgggagttttatttttggttatatttgaactgtatgaatggtaggtctgaatattgagaatttccatggtcttatgtggaggtaaaatatacagataactgatcagtttgagtgactgcaacatgttctggttgcacaacagttaggcatgctatggtttatatttgtgaagtttggatgcctgtgaagaatgattaaatacatgtttctaatattttagtgttttgtatttaggttatttattctttgtatctaaaactgaacagctactgtgctatattgattttattggtagtattgagcagaccttgtttctgcatgaaactagttgcaaaacccactattttggaaataaaaatgtattttgacatatacaaataaaatgaataaaactattttaaatgtgtgaacttttaatgaagacattttaaattttgttctgagatatttaaattctgcatgggtattttttcactaattgctttacttggataccaatttgaataatttctgaaattgtaatattgtgataatttgcacagcattgtacatgcacatctgtaaatgcaatcttaattgccatatttatgcaatctgtgtaccaatttggacaaatgtttatatattttacataaagctgtctgtatgcagaatctga

SEQ ID NO: 24449 - DNA, 5414 bp, Homo sapiens
  source 1..5414: mol_type = unassigned DNA
agatctgccctgtagagccttgcggttccactgctggcctccggattcccgggagcccccagcccgacaggacaaccttccttccccgcttcctcctttccagacccggcggcaggagaggggatgaagatggcggacgcgaagcagaagcggaacgagcagctgaaacgctggatcggctccgagacggacctcgagcctccggtggtgaagcgccagaagaccaaggtgaagttcgacgatggcgccgtcttcctggctgcttgctccagcggcgacacggacgaggtcctcaagctgctgcaccgcggcgccgacatcaattacgccaatgtggacggactcactgccctgcaccaggcttgcattgatgacaatgttgatatggtgaagtttctggtagaaaatggagcaaatattaatcaacctgataatgaaggctggataccactacatgcagcagcttcctgtggatatcttgatattgcagagtttttgattggtcaaggagcacatgtaggggctgtcaacagtgaaggagatacacctttagatattgcggaggaggaggcaatggaagagctacttcaaaatgaagttaatcggcaaggggttgatatagaagcagctcgaaaggaagaagaacggatcatgcttagagatgccaggcagtggctaaatagtggtcatataaatgatgtccggcatgcaaaatctggaggtacagcacttcacgttgcagctgctaaaggctatacggaagttttaaaacttttaatacaggcaggctatgatgttaatattaaagactatgatggctggacacctcttcatgctgcagctcattggggtaaagaagaagcatgtcgaattttagtggacaatctgtgtgatatggagatggtcaacaaagtgggccaaacagcctttgatgtagcagatgaagacattttaggatatttagaagagttgcaaaagaaacaaaatctgctccatagtgaaaaacgggacaagaaatctccactaattgaatcaacagcaaatatggacaataatcagtcacagaagacctttaaaaacaaagagacgttgattattgaaccagagaaaaatgcatcccgtattgaatctctggaacaagaaaaggttgatgaagaagaagaaggaaagaaggatgagtctagctgctctagtgaagaagatgaggaagatgactcggaatcagaagctgaaacagataagacaaaacccctggcttctgtaactaatgccaacacttctagtacacaagcagctcctgtagctgttacaacacctactgtgtcatcaggtcaagcaacacctacatcacctattaaaaagtttccaaccacagctacaaaaatttctcccaaagaagaagagagaaaagatgagtctcctgcaacttggaggttaggacttagaaagacgggcagctatggtgcacttgctgaaatcacagcatctaaagagggtcagaaagaaaaagatactgcaggtgttacacgttcagcttcaagtcccagactttcctcctctttggataataaagaaaaggagaaagatagtaaaggaactaggcttgcatatgttgcacctacaataccaagacgactagccagtacatctgacattgaagagaaagaaaacagagattcttcaagtttgcgaacaagtagttcatatacaaggagaaaatgggaagatgatcttaaaaaaaatagctcagttaatgaaggatcaacgtatcataaaagtacctcaaatcgtttgtgggctgaggatagtactgagaaagaaaaggacagtgttcctacggcagtgaccattcctgttgctccaactgttgtaaatgctgcagcttctaccacaaccctgactacaactactgctggcactgtctcctccacaacagaggtcagggagagacgcagatcatacctcactcctgttagggatgaagagtctgaatcccaaagaaaagcaagatctagacaagcaagacaatctagaagatcaacacagggagtgacattaactgatcttcaagaagctgagaaaacaataggaagaagtcgttctacccgaaccagagaacaagaaaatgaagaaaaagaaaaagaggaaaaagagaaacaagataaagagaaacaagaagaaaagaaggagtcagaaacatctagagaagatgaatataaacaaaagtactccagaacgtatgatgagacttaccagcgttataggccagtatcaacttcaagttcaaccactccatcctcttcactttctactatgagcagttcactgtatgcttcaagtcaactaaacaggccaaatagtcttgtaggcataacttctgcttactccagaggaataacaaaagaaaatgaaagagagggagaaaaaagagaagaggagaaagaaggagaagataaatcacaacctaaatcaatcagagaacgacgacgaccaagagagaaaagaagatctacaggagtttcattttggacacaagatagtgatgaaaatgaacaagaacaacaatcagacacagaagagggatccaataagaaagaaactcaggtaaataccattactttatatgaaaccagttctacatcagctggtgatcgatatgattccttgctgggtcgctctggatcatacagttacttagaagaaagaaaaccttacagcagcaggctagaaaaggatgactcaactgactttaaaaagctttatgaacaaattctagctgaaaatgaaaagctgaaggcacagctacatgatacaaatatggaactaacagatcttaaattacagttggaaaaggccacccagagacaagaaagatttgctgatagatcactgttggaaatggaaaaaagggaacgaagagctctagaaagaagaatatctgaaatggaagaagagctcaaaatgttaccagacctaaaagcagacaaccagaggctaaaggatgaaaatggggccttgatcagagttataagcaaactttccaaataaaaaaaaaaaaagcagcaagtaatggaattgcacatattagtaacccagtggaccataattggcagtcactggaagtctgggaagaatccttggagactgtcattttcggatatcctgccaaatgccctcttatctagaatttttgtttcattttgtttaattttctggggtgtttttgttgttgttggtttgttttttgttttttttttttaatcaagaccattgtttcatgttaatgcagctgctgagaagatttttttttaatgactgagaaaacttgtttacagctccagcatataaggaaagtgttcaaggccagatatgcctcagatatttaaccagtaagccttagttgtacataaatacttttgtgtcaacaaaaactttcagctctcacagaagacagttactcaacattttttgatgtgccacagtttcgagtttttcgatatttaaattttttggcttttcatctaagtttgggtttgtattttttccttctaaactcttcatgtggcagagtcttctatgttttcacagctttttcattacagaaaagaacacttgctcttctgtgattattgtcatgtattaggctaatgctgtgttgtctcccacctggaactgaattgcttggtggaacatatgctttcactgtttgtgcaatatgcatttatttcttatatgaatgctttaaagtcatttgaggttagatcttttaattcctattttctgcttcattggtcactttttttttattgtagtataagatgttagattctgtaatcttcacattcattttagcaggtactgagtgatgctgtatatacaaataagtgtattgttttgatttttagaccaccacatggcatgcttgactatttcttatttcaaatgtctgctaatgcagagtaggctactccatgatagtgttaaaaaacaaaatttgctaacaatgtgatataaagactttaaaagttacacattatgtggagccctatctttacaaaagtttcctactgtaaagtgcttttattttcagttttcacttgatagtactcaaccataattaaagttgcataagataattgctttacatttcacatacctatatttatctgagtgctgtctaaaactgttgtgctagccaaagtaatgctatgaaatcatttgcagaattaacccgtgagttaatgttaaatgcactgttattgccatgtgaagaggcatcgactttgataccaccatcatgttcagaccattttatacatttcagtggcctttttttttttttaaggaaaaaaaagcgcaaaaccaagtacatagtgacgatggcttttatttggacaaatagcttttatattttcattaaaccatgcaaaaaatactacatctttctggcacataactgtctccttaaccactgaacagttcagccatttgaataaattgtacattgtaaagcttatagtagctgattgtattattgattgtattgtatactatattaaatgtgaatttgtaccccttcattttaaaaggtcattgtgttctactgcctattttagattactttggggttggggaagggtgttttggtaagcaggattttaagtcctctctctctcgattggttttatgaagatataaggttatgctcttactaccaagctcaggattcttgattttaaaggtacaaggatagttgtgggagttttatttttggttatatttgaactgtatgaatggtaggtctgaatattgagaatttccatggtcttatgtggaggtaaaatatacagataactgatcagtttgagtgactgcaacatgttctggttgcacaacagttaggcatgctatggtttatatttgtgaagtttggatgcctgtgaagaatgattaaatacatgtttctaatattttagtgttttgtatttaggttatttattctttgtatctaaaactgaacagctactgtgctatattgattttattggtagtattgagcagaccttgtttctgcatgaaactagttgcaaaacccactattttggaaataaaaatgtattttgacatatacaaataaaatgaataaaactattttaaatgtgtgaacttttaatgaagacattttaaattttgttctgagatatttaaattctgcatgggtattttttcactaattgctttacttggataccaatttgaataatttctgaaattgtaatattgtgataatttgcacagcattgtacatgcacatctgtaaatgcaatcttaattgccatatttatgcaatctgtgtaccaatttggacaaatgtttatatattttacataaagctgtctgtatgcagaatctga

SEQ ID NO: 24450 - DNA, 5477 bp, Homo sapiens
  source 1..5477: mol_type = unassigned DNA
agatctgccctgtagagccttgcggttccactgctggcctccggattcccgggagcccccagcccgacaggacaaccttccttccccgcttcctcctttccagacccggcggcaggagaggggatgaagatggcggacgcgaagcagaagcggaacgagcagctgaaacgctggatcggctccgagacggacctcgagcctccggtggtgaagcgccagaagaccaaggtgaagttcgacgatggcgccgtcttcctggctgcttgctccagcggcgacacggacgaggtcctcaagctgctgcaccgcggcgccgacatcaattacgccaatgtggacggactcactgccctgcaccaggcttgcattgatgacaatgttgatatggtgaagtttctggtagaaaatggagcaaatattaatcaacctgataatgaaggctggataccactacatgcagcagcttcctgtggatatcttgatattgcagagtttttgattggtcaaggagcacatgtaggggctgtcaacagtgaaggagatacacctttagatattgcggaggaggaggcaatggaagagctacttcaaaatgaagttaatcggcaaggggttgatatagaagcagctcgaaaggaagaagaacggatcatgcttagagatgccaggcagtggctaaatagtggtcatataaatgatgtccggcatgcaaaatctggaggtacagcacttcacgttgcagctgctaaaggctatacggaagttttaaaacttttaatacaggcaggctatgatgttaatattaaagactatgatggctggacacctcttcatgctgcagctcattggggtaaagaagaagcatgtcgaattttagtggacaatctgtgtgatatggagatggtcaacaaagtgggccaaacagcctttgatgtagcagatgaagacattttaggatatttagaagagttgcaaaagaaacaaaatctgctccatagtgaaaaacgggacaagaaatctccactaattgaatcaacagcaaatatggacaataatcagtcacagaagacctttaaaaacaaagagacgttgattattgaaccagagaaaaatgcatcccgtattgaatctctggaacaagaaaaggttgatgaagaagaagaaggaaagaaggatgagtctagctgctctagtgaagaagatgaggaagatgactcggaatcagaagctgaaacagataagacaaaacccctggcttctgtaactaatgccaacacttctagtacacaagcagctcctgtagctgttacaacacctactgtgtcatcaggtcaagcaacacctacatcacctattaaaaagtttccaaccacagctacaaaaatttctcccaaagaagaagagagaaaagatgagtctcctgcaacttggaggttaggacttagaaagacgggcagctatggtgcacttgctgaaatcacagcatctaaagagggtcagaaagaaaaagatactgcaggtgttacacgttcagcttcaagtcccagactttcctcctctttggataataaagaaaaggagaaagatagtaaaggaactaggcttgcatatgttgcacctacaataccaagacgactagccagtacatctgacattgaagagaaagaaaacagagattcttcaagtttgcgaacaagtagttcatatacaaggagaaaatgggaagatgatcttaaaaaaaatagctcagttaatgaaggatcaacgtatcataaaagttgctcctttggtagaagacaagatgatttgattagttctagtgttccaagcaccacatcaacaccaacagttacctctgcagctgggcttcagaaaagcctgctttccagcacaagcactactacaaagattacaacgggttcttcctcagcaggcacacaaagcagtacctcaaatcgtttgtgggctgaggatagtactgagaaagaaaaggacagtgttcctacggcagtgaccattcctgttgctccaactgttgtaaatgctgcagcttctaccacaaccctgactacaactactgctggcactgtctcctccacaacagaggtcagggagagacgcagatcatacctcactcctgttagggatgaagagtctgaatcccaaagaaaagcaagatctagacaagcaagacaatctagaagatcaacacagggagtgacattaactgatcttcaagaagctgagaaaacaataggaagaagtcgttctacccgaaccagagaacaagaaaatgaagaaaaagaaaaagaggaaaaagagaaacaagataaagagaaacaagaagaaaagaaggagtcagaaacatctagagaagatgaatataaacaaaagtactccagaacgtatgatgagacttaccagcgttataggccagtatcaacttcaagttcaaccactccatcctcttcactttctactatgagcagttcactgtatgcttcaagtcaactaaacaggccaaatagtcttgtaggcataacttctgcttactccagaggaataacaaaagaaaatgaaagagagggagaaaaaagagaagaggagaaagaaggagaagataaatcacaacctaaatcaatcagagaacgacgacgaccaagagagaaaagaagatctacaggagtttcattttggacacaagatagtgatgaaaatgaacaagaacaacaatcagacacagaagagggatccaataagaaagaaactcaggtaaataccattactttatatgaaaccagttctacatcagctggtgatcgatatgattccttgctgggtcgctctggatcatacagttacttagaagaaagaaaaccttacagcagcaggctagaaaaggatgactcaactgactttaaaaagagacaagaaagatttgctgatagatcactgttggaaatggaaaaaagggaacgaagagctctagaaagaagaatatctgaaatggaagaagagctcaaaatgttaccagacctaaaagcagacaaccagaggctaaaggatgaaaatggggccttgatcagagttataagcaaactttccaaataaaaaaaaaaaaagcagcaagtaatggaattgcacatattagtaacccagtggaccataattggcagtcactggaagtctgggaagaatccttggagactgtcattttcggatatcctgccaaatgccctcttatctagaatttttgtttcattttgtttaattttctggggtgtttttgttgttgttggtttgttttttgttttttttttttaatcaagaccattgtttcatgttaatgcagctgctgagaagatttttttttaatgactgagaaaacttgtttacagctccagcatataaggaaagtgttcaaggccagatatgcctcagatatttaaccagtaagccttagttgtacataaatacttttgtgtcaacaaaaactttcagctctcacagaagacagttactcaacattttttgatgtgccacagtttcgagtttttcgatatttaaattttttggcttttcatctaagtttgggtttgtattttttccttctaaactcttcatgtggcagagtcttctatgttttcacagctttttcattacagaaaagaacacttgctcttctgtgattattgtcatgtattaggctaatgctgtgttgtctcccacctggaactgaattgcttggtggaacatatgctttcactgtttgtgcaatatgcatttatttcttatatgaatgctttaaagtcatttgaggttagatcttttaattcctattttctgcttcattggtcactttttttttattgtagtataagatgttagattctgtaatcttcacattcattttagcaggtactgagtgatgctgtatatacaaataagtgtattgttttgatttttagaccaccacatggcatgcttgactatttcttatttcaaatgtctgctaatgcagagtaggctactccatgatagtgttaaaaaacaaaatttgctaacaatgtgatataaagactttaaaagttacacattatgtggagccctatctttacaaaagtttcctactgtaaagtgcttttattttcagttttcacttgatagtactcaaccataattaaagttgcataagataattgctttacatttcacatacctatatttatctgagtgctgtctaaaactgttgtgctagccaaagtaatgctatgaaatcatttgcagaattaacccgtgagttaatgttaaatgcactgttattgccatgtgaagaggcatcgactttgataccaccatcatgttcagaccattttatacatttcagtggcctttttttttttttaaggaaaaaaaagcgcaaaaccaagtacatagtgacgatggcttttatttggacaaatagcttttatattttcattaaaccatgcaaaaaatactacatctttctggcacataactgtctccttaaccactgaacagttcagccatttgaataaattgtacattgtaaagcttatagtagctgattgtattattgattgtattgtatactatattaaatgtgaatttgtaccccttcattttaaaaggtcattgtgttctactgcctattttagattactttggggttggggaagggtgttttggtaagcaggattttaagtcctctctctctcgattggttttatgaagatataaggttatgctcttactaccaagctcaggattcttgattttaaaggtacaaggatagttgtgggagttttatttttggttatatttgaactgtatgaatggtaggtctgaatattgagaatttccatggtcttatgtggaggtaaaatatacagataactgatcagtttgagtgactgcaacatgttctggttgcacaacagttaggcatgctatggtttatatttgtgaagtttggatgcctgtgaagaatgattaaatacatgtttctaatattttagtgttttgtatttaggttatttattctttgtatctaaaactgaacagctactgtgctatattgattttattggtagtattgagcagaccttgtttctgcatgaaactagttgcaaaacccactattttggaaataaaaatgtattttgacatatacaaataaaatgaataaaactattttaaatgtgtgaacttttaatgaagacattttaaattttgttctgagatatttaaattctgcatgggtattttttcactaattgctttacttggataccaatttgaataatttctgaaattgtaatattgtgataatttgcacagcattgtacatgcacatctgtaaatgcaatcttaattgccatatttatgcaatctgtgtaccaatttggacaaatgtttatatattttacataaagctgtctgtatgcagaatctga

SEQ ID NO: 24451 - DNA, 4639 bp, Homo sapiens
  source 1..4639: mol_type = unassigned DNA
gaggcagatctgccctgtagagccttgcggttccactgctggcctccggattcccgggagcccccagcccgacaggacaaccttccttccccgcttcctcctttccagacccggcggcaggagaggggatgaagatggcggacgcgaagcagaagcggaacgagcagctgaaacgctggatcggctccgagacggacctcgagcctccggtggtgaagcgccagaagaccaaggtgaagttcgacgatggcgccgtcttcctggctgcttgctccagcggcgacacggacgaggtcctcaagctgctgcaccgcggcgccgacatcaattacgccaatgtggacggactcactgccctgcaccaggcttgcattgatgacaatgttgatatggtgaagtttctggtagaaaatggagcaaatattaatcaacctgataatgaaggctggataccactacatgcagcagcttcctgtggatatcttgatattgcagagtttttgattggtcaaggagcacatgtaggggctgtcaacagtgaaggagatacacctttagatattgcggaggaggaggcaatggaagagctacttcaaaatgaagttaatcggcaaggggttgatatagaagcagctcgaaaggaagaagaacggatcatgcttagagatgccaggcagtggctaaatagtggtcatataaatgatgtccggcatgcaaaatctggaggtacagcacttcacgttgcagctgctaaaggctatacggaagttttaaaacttttaatacaggcaggctatgatgttaatattaaagactatgatggctggacacctcttcatgctgcagctcattggggtaaagaagaagcatgtcgaattttagtggacaatctgtgtgatatggagatggtcaacaaagtgggccaaacagcctttgatgtagcagatgaagacattttaggatatttagaagagttgcaaaagaaacaaaatctgctccatagtgaaaaacgggacaagaaatctccactaattgaatcaacagcaaatatggacaataatcagtcacagaagacctttaaaaacaaagagacgttgattattgaaccagagaaaaatgcatcccgtattgaatctctggaacaagaaaaggttgatgaagaagaagaaggaaagaaggatgagtctagctgctctagtgaagaagatgaggaagatgactcggaatcagaagctgaaacagataagacaaaacccctggcttctgtaactaatgccaacacttctagtacacaagcagctcctgtagctgttacaacacctactgtgtcatcaggtcaagcaacacctacatcacctattaaaaagtttccaaccacagctacaaaaatttctcccaaagaagaagagagaaaagatgagtctcctgcaacttggaggttaggacttagaaagacgggcagctatggtgcacttgctgaaatcacagcatctaaagagggtcagaaagaaaaagatactgcaggtgttacacgttcagcttcaagtcccagactttcctcctctttggataataaagaaaaggagaaagatagtaaaggaactaggcttgcatatgttgcacctacaataccaagacgactagccagtacatctgacattgaagagaaagaaaacagagattcttcaagtttgcgaacaagtagttcatatacaaggagaaaatgggaagatgatcttaaaaaaaatagctcagttaatgaaggatcaacgtatcataaaagttgctcctttggtagaagacaagatgatttgattagttctagtgttccaagcaccacatcaacaccaacagttacctctgcagctgggcttcagaaaagcctgctttccagcacaagcactactacaaagattacaacgggttcttcctcagcaggcacacaaagcagtacctcaaatcgtttgtgggctgaggatagtactgagaaagaaaaggacagtgttcctacggcagtgaccattcctgttgctccaactgttgtaaatgctgcagcttctaccacaaccctgactacaactactgctggcactgtctcctccacaacagaggtcagggagagacgcagatcatacctcactcctgttagggatgaagagtctgaatcccaaagaaaagcaagatctagacaagcaagacaatctagaagatcaacacagggagtgacattaactgatcttcaagaagctgagaaaacaataggaagaagtcgttctacccgaaccagagaacaagaaaatgaagaaaaagaaaaagaggaaaaagagaaacaagataaagagaaacaagaagaaaagaaggagtcagaaacatctagagaagatgaatataaacaaaagtactccagaacgtatgatgagacttaccagcgttataggccagtatcaacttcaagttcaaccactccatcctcttcactttctactatgagcagttcactgtatgcttcaagtcaactaaacaggccaaatagtcttgtaggcataacttctgcttactccagaggaataacaaaagaaaatgaaagagagggagaaaaaagagaagaggagaaagaaggagaagataaatcacaacctaaatcaatcagagaacgacgacgaccaagagagaaaagaagatctacaggagtttcattttggacacaagatagtgatgaaaatgaacaagaacaacaatcagacacagaagagggatccaataagaaagaaactcagacggattccatttctagatatgaaaccagttctacatcagctggtgatcgatatgattccttgctgggtcgctctggatcatacagttacttagaagaaagaaaaccttacagcagcaggctagaaaaggatgactcaactgactttaaaaagagacaagaaagatttgctgatagatcactgttggaaatggaaaaaagggaacgaagagctctagaaagaagaatatctgaaatggaagaagagctcaaaatgttaccagacctaaaagcagacaaccagaggctaaaggatgaaaatggggccttgatcagagttataagcaaactttccaaataaaaaaaaaaaaagcagcaagtaatggaattgcacatattagtaacccagtggaccataattggcagtcactggaagtctgggaagaatccttggagactgtcattttcggatatcctgccaaatgccctcttatctagaatttttgtttcattttgtttaattttctggggtgtttttgttgttgttggtttgttttttgttttttttttttaatcaagaccattgtttcatgttaatgcagctgctgagaagatttttttttaatgactgagaaaacttgtttacagctccagcatataaggaaagtgttcaaggccagatatgcctcagatatttaaccagtaagccttagttgtacataaatacttttgtgtcaacaaaaactttcagctctcacagaagacagttactcaacattttttgatgtgccacagtttcgagtttttcgatatttaaattttttggcttttcatctaagtttgggtttgtattttttccttctaaactcttcatgtggcagagtcttctatgttttcacagctttttcattacagaaaagaacacttgctcttctgtgattattgtcatgtattaggctaatgctgtgttgtctcccacctggaactgaattgcttggtggaacatatgctttcactgtttgtgcaatatgcatttatttcttatatgaatgctttaaagtcatttgaggttagatcttttaattcctattttctgcttcattggtcactttttttttattgtagtataagatgttagattctgtaatcttcacattcattttagcaggtactgagtgatgctgtatatacaaataagtgtattgttttgatttttagaccaccacatggcatgcttgactatttcttatttcaaatgtctgctaatgcagagtaggctactccatgatagtgttaaaaaacaaaatttgctaacaatgtgatataaagactttaaaagttacacattatgtggagccctatctttacaaaagtttcctactgtaaagtgcttttattttcagttttcacttgatagtactcaaccataattaaagttgcataagataattgctttacatttcacatacctatatttatctgagtgctgtctaaaactgttgtgctagccaaagtaatgctatgaaatcatttgcagaattaacccgtgagttaatgttaaatgcactgttattgccatgtgaagaggcatcgactttgataccaccatcatgttcagaccattttatacatttcagtggcctttttttttttttaaggaaaaaaaagcgcaaaaccaagtacatagtgacgatggcttttatttggacaaatagcttttatattttcattaaaccatgcaaaaaatactacatctttctggcacataactgtctccttaaccactgaacagttcagccatttgaataaattgtacattgtaaagcttatagtagctgattgtattattgattgtattgtatactatattaaatgtgaatttgt

SEQ ID NO: 24452 - DNA, 5721 bp, Homo sapiens
  source 1..5721: mol_type = unassigned DNA
gaagttacgttagattggccgccggtgacgggtggccgtgctgggggcgggagggcttctgtggtaggaagggaggtccgctcggccgggtgcgccgccccagtgctctgtgggatactggaagtctcgagcgtcggctccgggttcccagccctcctctggcccgcactcatagaaacattcacacaccccctgcctcccctctcttccctctccgcctcccccttccccccctcgcgataagaagacccggcggcaggagaggggatgaagatggcggacgcgaagcagaagcggaacgagcagctgaaacgctggatcggctccgagacggacctcgagcctccggtggtgaagcgccagaagaccaaggtgaagttcgacgatggcgccgtcttcctggctgcttgctccagcggcgacacggacgaggtcctcaagctgctgcaccgcggcgccgacatcaattacgccaatgtggacggactcactgccctgcaccaggcttgcattgatgacaatgttgatatggtgaagtttctggtagaaaatggagcaaatattaatcaacctgataatgaaggctggataccactacatgcagcagcttcctgtggatatcttgatattgcagagtttttgattggtcaaggagcacatgtaggggctgtcaacagtgaaggagatacacctttagatattgcggaggaggaggcaatggaagagctacttcaaaatgaagttaatcggcaaggggttgatatagaagcagctcgaaaggaagaagaacggatcatgcttagagatgccaggcagtggctaaatagtggtcatataaatgatgtccggcatgcaaaatctggaggtacagcacttcacgttgcagctgctaaaggctatacggaagttttaaaacttttaatacaggcaggctatgatgttaatattaaagactatgatggctggacacctcttcatgctgcagctcattggggtaaagaagaagcatgtcgaattttagtggacaatctgtgtgatatggagatggtcaacaaagtgggccaaacagcctttgatgtagcagatgaagacattttaggatatttagaagagttgcaaaagaaacaaaatctgctccatagtgaaaaacgggacaagaaatctccactaattgaatcaacagcaaatatggacaataatcagtcacagaagacctttaaaaacaaagagacgttgattattgaaccagagaaaaatgcatcccgtattgaatctctggaacaagaaaaggttgatgaagaagaagaaggaaagaaggatgagtctagctgctctagtgaagaagatgaggaagatgactcggaatcagaagctgaaacagataagacaaaacccctggcttctgtaactaatgccaacacttctagtacacaagcagctcctgtagctgttacaacacctactgtgtcatcaggtcaagcaacacctacatcacctattaaaaagtttccaaccacagctacaaaaatttctcccaaagaagaagagagaaaagatgagtctcctgcaacttggaggttaggacttagaaagacgggcagctatggtgcacttgctgaaatcacagcatctaaagagggtcagaaagaaaaagatactgcaggtgttacacgttcagcttcaagtcccagactttcctcctctttggataataaagaaaaggagaaagatagtaaaggaactaggcttgcatatgttgcacctacaataccaagacgactagccagtacatctgacattgaagagaaagaaaacagagattcttcaagtttgcgaacaagtagttcatatacaaggagaaaatgggaagatgatcttaaaaaaaatagctcagttaatgaaggatcaacgtatcataaaagttgctcctttggtagaagacaagatgatttgattagttctagtgttccaagcaccacatcaacaccaacagttacctctgcagctgggcttcagaaaagcctgctttccagcacaagcactactacaaagattacaacgggttcttcctcagcaggcacacaaagcagtacctcaaatcgtttgtgggctgaggatagtactgagaaagaaaaggacagtgttcctacggcagtgaccattcctgttgctccaactgttgtaaatgctgcagcttctaccacaaccctgactacaactactgctggcactgtctcctccacaacagaggtcagggagagacgcagatcatacctcactcctgttagggatgaagagtctgaatcccaaagaaaagcaagatctagacaagcaagacaatctagaagatcaacacagggagtgacattaactgatcttcaagaagctgagaaaacaataggaagaagtcgttctacccgaaccagagaacaagaaaatgaagaaaaagaaaaagaggaaaaagagaaacaagataaagagaaacaagaagaaaagaaggagtcagaaacatctagagaagatgaatataaacaaaagtactccagaacgtatgatgagacttaccagcgttataggccagtatcaacttcaagttcaaccactccatcctcttcactttctactatgagcagttcactgtatgcttcaagtcaactaaacaggccaaatagtcttgtaggcataacttctgcttactccagaggaataacaaaagaaaatgaaagagagggagaaaaaagagaagaggagaaagaaggagaagataaatcacaacctaaatcaatcagagaacgacgacgaccaagagagaaaagaagatctacaggagtttcattttggacacaagatagtgatgaaaatgaacaagaacaacaatcagacacagaagagggatccaataagaaagaaactcagacggattccatttctagatatgaaaccagttctacatcagctggtgatcgatatgattccttgctgggtcgctctggatcatacagttacttagaagaaagaaaaccttacagcagcaggctagaaaaggatgactcaactgactttaaaaagctttatgaacaaattctagctgaaaatgaaaagctgaaggcacagctacatgatacaaatatggaactaacagatcttaaattacagttggaaaaggccacccagagacaagaaagatttgctgatagatcactgttggaaatggaaaaaagggaacgaagagctctagaaagaagaatatctgaaatggaagaagagctcaaaatgttaccagacctaaaagcagacaaccagaggctaaaggatgaaaatggggccttgatcagagttataagcaaactttccaaataaaaaaaaaaaaagcagcaagtaatggaattgcacatattagtaacccagtggaccataattggcagtcactggaagtctgggaagaatccttggagactgtcattttcggatatcctgccaaatgccctcttatctagaatttttgtttcattttgtttaattttctggggtgtttttgttgttgttggtttgttttttgttttttttttttaatcaagaccattgtttcatgttaatgcagctgctgagaagatttttttttaatgactgagaaaacttgtttacagctccagcatataaggaaagtgttcaaggccagatatgcctcagatatttaaccagtaagccttagttgtacataaatacttttgtgtcaacaaaaactttcagctctcacagaagacagttactcaacattttttgatgtgccacagtttcgagtttttcgatatttaaattttttggcttttcatctaagtttgggtttgtattttttccttctaaactcttcatgtggcagagtcttctatgttttcacagctttttcattacagaaaagaacacttgctcttctgtgattattgtcatgtattaggctaatgctgtgttgtctcccacctggaactgaattgcttggtggaacatatgctttcactgtttgtgcaatatgcatttatttcttatatgaatgctttaaagtcatttgaggttagatcttttaattcctattttctgcttcattggtcactttttttttattgtagtataagatgttagattctgtaatcttcacattcattttagcaggtactgagtgatgctgtatatacaaataagtgtattgttttgatttttagaccaccacatggcatgcttgactatttcttatttcaaatgtctgctaatgcagagtaggctactccatgatagtgttaaaaaacaaaatttgctaacaatgtgatataaagactttaaaagttacacattatgtggagccctatctttacaaaagtttcctactgtaaagtgcttttattttcagttttcacttgatagtactcaaccataattaaagttgcataagataattgctttacatttcacatacctatatttatctgagtgctgtctaaaactgttgtgctagccaaagtaatgctatgaaatcatttgcagaattaacccgtgagttaatgttaaatgcactgttattgccatgtgaagaggcatcgactttgataccaccatcatgttcagaccattttatacatttcagtggcctttttttttttttaaggaaaaaaaagcgcaaaaccaagtacatagtgacgatggcttttatttggacaaatagcttttatattttcattaaaccatgcaaaaaatactacatctttctggcacataactgtctccttaaccactgaacagttcagccatttgaataaattgtacattgtaaagcttatagtagctgattgtattattgattgtattgtatactatattaaatgtgaatttgtaccccttcattttaaaaggtcattgtgttctactgcctattttagattactttggggttggggaagggtgttttggtaagcaggattttaagtcctctctctctcgattggttttatgaagatataaggttatgctcttactaccaagctcaggattcttgattttaaaggtacaaggatagttgtgggagttttatttttggttatatttgaactgtatgaatggtaggtctgaatattgagaatttccatggtcttatgtggaggtaaaatatacagataactgatcagtttgagtgactgcaacatgttctggttgcacaacagttaggcatgctatggtttatatttgtgaagtttggatgcctgtgaagaatgattaaatacatgtttctaatattttagtgttttgtatttaggttatttattctttgtatctaaaactgaacagctactgtgctatattgattttattggtagtattgagcagaccttgtttctgcatgaaactagttgcaaaacccactattttggaaataaaaatgtattttgacatatacaaataaaatgaataaaactattttaaatgtgtgaacttttaatgaagacattttaaattttgttctgagatatttaaattctgcatgggtattttttcactaattgctttacttggataccaatttgaataatttctgaaattgtaatattgtgataatttgcacagcattgtacatgcacatctgtaaatgcaatcttaattgccatatttatgcaatctgtgtaccaatttggacaaatgtttatatattttacataaagctgtctgtatgcagaa

SEQ ID NO: 24453 - DNA, 5582 bp, Homo sapiens
  source 1..5582: mol_type = unassigned DNA
agatctgccctgtagagccttgcggttccactgctggcctccggattcccgggagcccccagcccgacaggacaaccttccttccccgcttcctcctttccagacccggcggcaggagaggggatgaagatggcggacgcgaagcagaagcggaacgagcagctgaaacgctggatcggctccgagacggacctcgagcctccggtggtgaagcgccagaagaccaaggtgaagttcgacgatggcgccgtcttcctggctgcttgctccagcggcgacacggacgaggtcctcaagctgctgcaccgcggcgccgacatcaattacgccaatgtggacggactcactgccctgcaccaggcttgcattgatgacaatgttgatatggtgaagtttctggtagaaaatggagcaaatattaatcaacctgataatgaaggctggataccactacatgcagcagcttcctgtggatatcttgatattgcagagtttttgattggtcaaggagcacatgtaggggctgtcaacagtgaaggagatacacctttagatattgcggaggaggaggcaatggaagagctacttcaaaatgaagttaatcggcaaggggttgatatagaagcagctcgaaaggaagaagaacggatcatgcttagagatgccaggcagtggctaaatagtggtcatataaatgatgtccggcatgcaaaatctggaggtacagcacttcacgttgcagctgctaaaggctatacggaagttttaaaacttttaatacaggcaggctatgatgttaatattaaagactatgatggctggacacctcttcatgctgcagctcattggggtaaagaagaagcatgtcgaattttagtggacaatctgtgtgatatggagatggtcaacaaagtgggccaaacagcctttgatgtagcagatgaagacattttaggatatttagaagagttgcaaaagaaacaaaatctgctccatagtgaaaaacgggacaagaaatctccactaattgaatcaacagcaaatatggacaataatcagtcacagaagacctttaaaaacaaagagacgttgattattgaaccagagaaaaatgcatcccgtattgaatctctggaacaagaaaaggttgatgaagaagaagaaggaaagaaggatgagtctagctgctctagtgaagaagatgaggaagatgactcggaatcagaagctgaaacagataagacaaaacccctggcttctgtaactaatgccaacacttctagtacacaagcagctcctgtagctgttacaacacctactgtgtcatcaggtcaagcaacacctacatcacctattaaaaagtttccaaccacagctacaaaaatttctcccaaagaagaagagagaaaagatgagtctcctgcaacttggaggttaggacttagaaagacgggcagctatggtgcacttgctgaaatcacagcatctaaagagggtcagaaagaaaaagatactgcaggtgttacacgttcagcttcaagtcccagactttcctcctctttggataataaagaaaaggagaaagatagtaaaggaactaggcttgcatatgttgcacctacaataccaagacgactagccagtacatctgacattgaagagaaagaaaacagagattcttcaagtttgcgaacaagtagttcatatacaaggagaaaatgggaagatgatcttaaaaaaaatagctcagttaatgaaggatcaacgtatcataaaagttgctcctttggtagaagacaagatgatttgattagttctagtgttccaagcaccacatcaacaccaacagttacctctgcagctgggcttcagaaaagcctgctttccagcacaagcactactacaaagattacaacgggttcttcctcagcaggcacacaaagcagtacctcaaatcgtttgtgggctgaggatagtactgagaaagaaaaggacagtgttcctacggcagtgaccattcctgttgctccaactgttgtaaatgctgcagcttctaccacaaccctgactacaactactgctggcactgtctcctccacaacagaggtcagggagagacgcagatcatacctcactcctgttagggatgaagagtctgaatcccaaagaaaagcaagatctagacaagcaagacaatctagaagatcaacacagggagtgacattaactgatcttcaagaagctgagaaaacaataggaagaagtcgttctacccgaaccagagaacaagaaaatgaagaaaaagaaaaagaggaaaaagagaaacaagataaagagaaacaagaagaaaagaaggagtcagaaacatctagagaagatgaatataaacaaaagtactccagaacgtatgatgagacttaccagcgttataggccagtatcaacttcaagttcaaccactccatcctcttcactttctactatgagcagttcactgtatgcttcaagtcaactaaacaggccaaatagtcttgtaggcataacttctgcttactccagaggaataacaaaagaaaatgaaagagagggagaaaaaagagaagaggagaaagaaggagaagataaatcacaacctaaatcaatcagagaacgacgacgaccaagagagaaaagaagatctacaggagtttcattttggacacaagatagtgatgaaaatgaacaagaacaacaatcagacacagaagagggatccaataagaaagaaactcaggtaaataccattactttatatgaaaccagttctacatcagctggtgatcgatatgattccttgctgggtcgctctggatcatacagttacttagaagaaagaaaaccttacagcagcaggctagaaaaggatgactcaactgactttaaaaagctttatgaacaaattctagctgaaaatgaaaagctgaaggcacagctacatgatacaaatatggaactaacagatcttaaattacagttggaaaaggccacccagagacaagaaagatttgctgatagatcactgttggaaatggaaaaaagggaacgaagagctctagaaagaagaatatctgaaatggaagaagagctcaaaatgttaccagacctaaaagcagacaaccagaggctaaaggatgaaaatggggccttgatcagagttataagcaaactttccaaataaaaaaaaaaaaagcagcaagtaatggaattgcacatattagtaacccagtggaccataattggcagtcactggaagtctgggaagaatccttggagactgtcattttcggatatcctgccaaatgccctcttatctagaatttttgtttcattttgtttaattttctggggtgtttttgttgttgttggtttgttttttgttttttttttttaatcaagaccattgtttcatgttaatgcagctgctgagaagatttttttttaatgactgagaaaacttgtttacagctccagcatataaggaaagtgttcaaggccagatatgcctcagatatttaaccagtaagccttagttgtacataaatacttttgtgtcaacaaaaactttcagctctcacagaagacagttactcaacattttttgatgtgccacagtttcgagtttttcgatatttaaattttttggcttttcatctaagtttgggtttgtattttttccttctaaactcttcatgtggcagagtcttctatgttttcacagctttttcattacagaaaagaacacttgctcttctgtgattattgtcatgtattaggctaatgctgtgttgtctcccacctggaactgaattgcttggtggaacatatgctttcactgtttgtgcaatatgcatttatttcttatatgaatgctttaaagtcatttgaggttagatcttttaattcctattttctgcttcattggtcactttttttttattgtagtataagatgttagattctgtaatcttcacattcattttagcaggtactgagtgatgctgtatatacaaataagtgtattgttttgatttttagaccaccacatggcatgcttgactatttcttatttcaaatgtctgctaatgcagagtaggctactccatgatagtgttaaaaaacaaaatttgctaacaatgtgatataaagactttaaaagttacacattatgtggagccctatctttacaaaagtttcctactgtaaagtgcttttattttcagttttcacttgatagtactcaaccataattaaagttgcataagataattgctttacatttcacatacctatatttatctgagtgctgtctaaaactgttgtgctagccaaagtaatgctatgaaatcatttgcagaattaacccgtgagttaatgttaaatgcactgttattgccatgtgaagaggcatcgactttgataccaccatcatgttcagaccattttatacatttcagtggcctttttttttttttaaggaaaaaaaagcgcaaaaccaagtacatagtgacgatggcttttatttggacaaatagcttttatattttcattaaaccatgcaaaaaatactacatctttctggcacataactgtctccttaaccactgaacagttcagccatttgaataaattgtacattgtaaagcttatagtagctgattgtattattgattgtattgtatactatattaaatgtgaatttgtaccccttcattttaaaaggtcattgtgttctactgcctattttagattactttggggttggggaagggtgttttggtaagcaggattttaagtcctctctctctcgattggttttatgaagatataaggttatgctcttactaccaagctcaggattcttgattttaaaggtacaaggatagttgtgggagttttatttttggttatatttgaactgtatgaatggtaggtctgaatattgagaatttccatggtcttatgtggaggtaaaatatacagataactgatcagtttgagtgactgcaacatgttctggttgcacaacagttaggcatgctatggtttatatttgtgaagtttggatgcctgtgaagaatgattaaatacatgtttctaatattttagtgttttgtatttaggttatttattctttgtatctaaaactgaacagctactgtgctatattgattttattggtagtattgagcagaccttgtttctgcatgaaactagttgcaaaacccactattttggaaataaaaatgtattttgacatatacaaataaaatgaataaaactattttaaatgtgtgaacttttaatgaagacattttaaattttgttctgagatatttaaattctgcatgggtattttttcactaattgctttacttggataccaatttgaataatttctgaaattgtaatattgtgataatttgcacagcattgtacatgcacatctgtaaatgcaatcttaattgccatatttatgcaatctgtgtaccaatttggacaaatgtttatatattttacataaagctgtctgtatgcagaatctga

SEQ ID NO: 24454 - DNA, 2977 bp, Homo sapiens
  source 1..2977: mol_type = unassigned DNA
atcatatgcttgtaagagaatgagagtattaaccttgtagacttctgtaaggggctaagagaaacactgagctaaataattgaggggatatactatgttcatggcttgaaagactgcttgcattgatgacaatgttgatatggtgaagtttctggtagaaaatggagcaaatattaatcaacctgataatgaaggctggataccactacatgcagcagcttcctgtggatatcttgatattgcagagtttttgattggtcaaggagcacatgtaggggctgtcaacagtgaaggagatacacctttagatattgcggaggaggaggcaatggaagagctacttcaaaatgaagttaatcggcaaggggttgatatagaagcagctcgaaaggaagaagaacggatcatgcttagagatgccaggcagtggctaaatagtggtcatataaatgatgtccggcatgcaaaatctggaggtacagcacttcacgttgcagctgctaaaggctatacggaagttttaaaacttttaatacaggcaggctatgatgttaatattaaagactatgatggctggacacctcttcatgctgcagctcattggggtaaagaagaagcatgtcgaattttagtggacaatctgtgtgatatggagatggtcaacaaagtgggccaaacagcctttgatgtagcagatgaagacattttaggatatttagaagagttgcaaaagaaacaaaatctgctccatagtgaaaaacgggacaagaaatctccactaattgaatcaacagcaaatatggacaataatcagtcacagaagacctttaaaaacaaagagacgttgattattgaaccagagaaaaatgcatcccgtattgaatctctggaacaagaaaaggttgatgaagaagaagaaggaaagaaggatgagtctagctgctctagtgaagaagatgaggaagatgactcggaatcagaagctgaaacagataagacaaaacccctggcttctgtaactaatgccaacacttctagtacacaagcagctcctgtagctgttacaacacctactgtgtcatcaggtcaagcaacacctacatcacctattaaaaagtttccaaccacagctacaaaaatttctcccaaagaagaagagagaaaagatgagtctcctgcaacttggaggttaggacttagaaagacgggcagctatggtgcacttgctgaaatcacagcatctaaagagggtcagaaagaaaaagatactgcaggtgttacacgttcagcttcaagtcccagactttcctcctctttggataataaagaaaaggagaaagatagtaaaggaactaggcttgcatatgttgcacctacaataccaagacgactagccagtacatctgacattgaagagaaagaaaacagagattcttcaagtttgcgaacaagtagttcatatacaaggagaaaatgggaagatgatcttaaaaaaaatagctcagttaatgaaggatcaacgtatcataaaagttgctcctttggtagaagacaagatgatttgattagttctagtgttccaagcaccacatcaacaccaacagttacctctgcagctgggcttcagaaaagcctgctttccagcacaagcactactacaaagattacaacgggttcttcctcagcaggcacacaaagcagtacctcaaatcgtttgtgggctgaggatagtactgagaaagaaaaggacagtgttcctacggcagtgaccattcctgttgctccaactgttgtaaatgctgcagcttctaccacaaccctgactacaactactgctggcactgtctcctccacaacagaggtcagggagagacgcagatcatacctcactcctgttagggatgaagagtctgaatcccaaagaaaagcaagatctagacaagcaagacaatctagaagatcaacacagggagtgacattaactgatcttcaagaagctgagaaaacaataggaagaagtcgttctacccgaaccagagaacaagaaaatgaagaaaaagaaaaagaggaaaaagagaaacaagataaagagaaacaagaagaaaagaaggagtcagaaacatctagagaagatgaatataaacaaaagtactccagaacgtatgatgagacttaccagcgttataggccagtatcaacttcaagttcaaccactccatcctcttcactttctactatgagcagttcactgtatgcttcaagtcaactaaacaggccaaatagtcttgtaggcataacttctgcttactccagaggaataacaaaagaaaatgaaagagagggagaaaaaagagaagaggagaaagaaggagaagataaatcacaacctaaatcaatcagagaacgacgacgaccaagagagaaaagaagatctacaggagtttcattttggacacaagatagtgatgaaaatgaacaagaacaacaatcagacacagaagagggatccaataagaaagaaactcagacggattccatttctagatatgaaaccagttctacatcagctggtgatcgatatgattccttgctgggtcgctctggatcatacagttacttagaagaaagaaaaccttacagcagcaggctagaaaaggatgactcaactgactttaaaaagctttatgaacaaattctagctgaaaatgaaaagctgaaggcacagctacatgatacaaatatggaactaacagatcttaaattacagttggaaaaggccacccagagacaagaaagatttgctgatagatcactgttggaaatggaaaaaagggaacgaagagctctagaaagaagaatatctgaaatggaagaagagctcaaaatgttaccagacctaaaagcagacaaccagaggctaaaggatgaaaatggggccttgatcagagttataagcaaactttccaaataaaaaaaa

SEQ ID NO: 24455 - DNA, 2925 bp, Homo sapiens
  source 1..2925: mol_type = unassigned DNA
atgaagatggcggacgcgaagcagaagcggaacgagcagctgaaacgctggatcggctccgagacggacctcgagcctccggtggtgaagcgccagaagaccaaggtgaagttcgacgatggcgccgtcttcctggctgcttgctccagcggcgacacggacgaggtcctcaagctgctgcaccgcggcgccgacatcaattacgccaatgtggacggactcactgccctgcaccaggcttgcattgatgacaatgttgatatggtgaagtttctggtagaaaatggagcaaatattaatcaacctgataatgaaggctggataccactacatgcagcagcttcctgtggatatcttgatattgcagagtttttgattggtcaaggagcacatgtaggggctgtcaacagtgaaggagatacacctttagatattgcggaggaggaggcaatggaagagctacttcaaaatgaagttaatcggcaaggggttgatatagaagcagctcgaaaggaagaagaacggatcatgcttagagatgccaggcagtggctaaatagtggtcatataaatgatgtccggcatgcaaaatctggaggtacagcacttcacgttgcagctgctaaaggctatacggaagttttaaaacttttaatacaggcaggctatgatgttaatattaaagactatgatggctggacacctcttcatgctgcagctcattggggtaaagaagaagcatgtcgaattttagtggacaatctgtgtgatatggagatggtcaacaaagtgggccaaacagcctttgatgtagcagatgaagacattttaggatatttagaagagttgcaaaagaaacaaaatctgctccatagtgaaaaacgggacaagaaatctccactaattgaatcaacagcaaatatggacaataatcagtcacagaagacctttaaaaacaaagagacgttgattattgaaccagagaaaaatgcatcccgtattgaatctctggaacaagaaaaggttgatgaagaagaagaaggaaagaaggatgagtctagctgctctagtgaagaagatgaggaagatgactcggaatcagaagctgaaacagataagacaaaacccctggcttctgtaactaatgccaacacttctagtacacaagcagctcctgtagctgttacaacacctactgtgtcatcaggtcaagcaacacctacatcacctattaaaaagtttccaaccacagctacaaaaatttctcccaaagaagaagagagaaaagatgagtctcctgcaacttggaggttaggacttagaaagacgggcagctatggtgcacttgctgaaatcacagcatctaaagagggtcagaaagaaaaagatactgcaggtgttacacgttcagcttcaagtcccagactttcctcctctttggataataaagaaaaggagaaagatagtaaaggaactaggcttgcatatgttgcacctacaataccaagacgactagccagtacatctgacattgaagagaaagaaaacagagattcttcaagtttgcgaacaagtagttcatatacaaggagaaaatgggaagatgatcttaaaaaaaatagctcagttaatgaaggatcaacgtatcataaaagtacctcaaatcgtttgtgggctgaggatagtactgagaaagaaaaggacagtgttcctacggcagtgaccattcctgttgctccaactgttgtaaatgctgcagcttctaccacaaccctgactacaactactgctggcactgtctcctccacaacagaggtcagggagagacgcagatcatacctcactcctgttagggatgaagagtctgaatcccaaagaaaagcaagatctagacaagcaagacaatctagaagatcaacacagggagtgacattaactgatcttcaagaagctgagaaaacaataggaagaagtcgttctacccgaaccagagaacaagaaaatgaagaaaaagaaaaagaggaaaaagagaaacaagataaagagaaacaagaagaaaagaaggagtcagaaacatctagagaagatgaatataaacaaaagtactccagaacgtatgatgagacttaccagcgttataggccagtatcaacttcaagttcaaccactccatcctcttcactttctactatgagcagttcactgtatgcttcaagtcaactaaacaggccaaatagtcttgtaggcataacttctgcttactccagaggaataacaaaagaaaatgaaagagagggagaaaaaagagaagaggagaaagaaggagaagataaatcacaacctaaatcaatcagagaacgacgacgaccaagagagaaaagaagatctacaggagtttcattttggacacaagatagtgatgaaaatgaacaagaacaacaatcagacacagaagagggatccaataagaaagaaactcagacggattccatttctagatatgaaaccagttctacatcagctggtgatcgatatgattccttgctgggtcgctctggatcatacagttacttagaagaaagaaaaccttacagcagcaggctagaaaaggatgactcaactgactttaaaaagctttatgaacaaattctagctgaaaatgaaaagctgaaggcacagctacatgatacaaatatggaactaacagatcttaaattacagttggaaaaggccacccagagacaagaaagatttgctgatagatcactgttggaaatggaaaaaagggaacgaagagctctagaaagaagaatatctgaaatggaagaagagctcaaaatgttaccagacctaaaagcagacaaccagaggctaaaggatgaaaatggggccttgatcagagttataagcaaactttccaaataa

SEQ ID NO: 24456 - DNA, 11108 bp, Homo sapiens
  source 1..11108: mol_type = unassigned DNA
actactggcgggaggagtaaagatggcggcgcgagggtctccgccctctgctccgggctgaagcgctctgagagaggcggcagcggcaactcgagccccaacagtaatttagtgttggtagttttggcagcagctgccgaggccggagcaatggcggaactggagcacctaggagggaagcgggcagagtcggcgcgaatgcggcgggcagagcagcttcggcgctggcggggctcgctgacagagcaggagcctgcggagcgacgaggcgcggggcggcagccgctgaccaggcgcgggagccccagggtccgcttcgaggacggtgctgtctttctggccgcctgctctagcggggacaccgacgaggtgagaaagcttctggcaagaggtgctgatatcaacacggtcaacgtggacggcttgacagccctgcaccaggcatgtattgatgaaaatttggacatggtgaagtttctggtggagaacagagccaatgtaaaccagcaagacaacgagggctggacaccccttcatgcagcagcttcctgtggctatctcaacatagcagagtatttcattaatcacggagccagtgtaggtattgtcaatagtgaaggtgaagttccctctgaccttgcagaagagccagccatgaaggatcttcttctggagcaagtaaagaagcaaggagttgatctagagcagtcaagaaaagaagaagagcagcagatgttgcaggatgcccgccagtggctcaacagtgggaaaatagaggatgtgaggcaggctcgctcaggggctacagcccttcatgtggctgctgccaagggctactctgaagtcctcagacttttaattcaggctggctatgaactcaatgttcaggattatgatggctggactcccctccatgctgctgcacactggggagtgaaggaggcttgctccatcctggcagaagcactttgtgacatggatattcgaaataaactgggccagacaccatttgatgtggctgatgagggtctcgtggagcatttggagttgctccagaagaagcagaatgtgcttcgaagtgaaaaggagacacggaataaactcattgagtcagatctgaacagcaagattcagagtgggttctttaagaacaaagagaagatgctctatgaggaggagacacctaagtcccaagaaatggaggaagaaaataaagaatctagtagctccagctcagaggaggaggaaggtgaagatgaagcttctgagtcagaaactgagaaggaggcagataaaaagccagaagcctttgtcaatcattccaactctgaaagcaagagtagtatcacagagcagataccagcaccagctcaaaataccttctctgcctcttctgctaggaggttctcttctggcctttttaacaagccagaagagcccaaagatgaatctccttcttcatggagattgggactgagaaaaactggcagccacaacatgctgagtgaggtggccaattccagggaacctataagggaccgaggctcttccatctatcgctcctcttcaagccctcggatttctgctctactggacaacaaagataaggagagagaaaacaaaagctatattagttcactagcaccccggaagctcaacagcacaagtgatattgaagaaaaggagaacagagaatcagctgttaatctagtgaggagtggctcctatacccggcagctatggagggatgaagcaaaaggaaatgaaatcccacagacaattgctccctccacctatgtatcaacttacttgaaaaggactcctcacaaatcccaggccgacacaacagcagagaaaacagcagacaatgtctcttctagcaccccgctctgtgtgatcaccaatcgccctcttcctagcactgccaatggggttacagctactcctgtgctctccattactggaacagattcctctgtggaagccagggagaagaggaggtcctatctgactcctgtacgggatgaggaagcagagtctttacggaaagcacgctccagacaagctcggcagacacgaaggtctactcaaggtgtcaccctaacagaccttcaagaagcagaaaggacattcagccggtcgagggcagagaggcaagctcaggagcagcctcgtgagaagcccacagacactgaagggcttgaggggagccctgagaagcatgagccctcagcagttccagcaacagaagctggggagggccagcagccctggggcaggagtctggatgaagagcctatctgtcatcgcctgaggtgcccagctcagccagacaaacccaccacgccagcatctccttctacgtcaagaccctcactctacaccagttcccacctgctatggacaaatagattttcagtccctgattctgagagttcagagactaccacaaacactacaactgcaaaggaaatggacaaaaatgagaatgaagaagcagatttggatgagcagtcctctaagaggctgtccatccgagagaggaggcggcccaaggaacgacgaagaggcacaggcatcaatttctggacaaaggatgaggatgaaactgatggctctgaagaggtcaaagaaacgtgggcagagagattgaagaggttggaatcgggaggtagtaatcctacaaccagtgattcttacggtgaccgggcttcagcaagagcccgtcgggaggcccgggaggcccgcctagccaccctgaccagccgtgtagaagaagacagcaacagagattataaaaaactctatgagagtgctctgactgaaaaccaaaaactgaaaacaaaacttcaggaagcccagctagagctagcagatataaagtccaagcttgagaaggtggcccagcagaaacaagaaaagacctctgaccgatcatcagtgctggagatggagaaacgggagaggcgagccttggagcgcaaaatgtcagaaatggaggaagaaatgaaggtgttaacagaactgaaatccgacaaccagaggctgaaagatgaaaatggtgccctcatcagagtcatcagcaaactgtccaagtaggctaggctccagatttatgaggaaagaaagggacagcatttgctgcccccacccctcttttccagtccttgccttccaaccaaaagaaatggatgttttggtggaaggacacttctttctatcaccctcttcagtcacctctatacactctacattttctctgcactttcaatgccctgttcttccaaacccctatcccaagttttatgacagttttaattgaagcatgattgtggtaattcgagccatctggagaatgctctggggagtacaccaggctcagctgtggacccctcaacttcctgctgctcagctactttgtccacattggatttggtccaaacatgtaagacttctaccctaatcagtatccttcagctttttacattaacccagtgtcctctgatataggtgagtcttgtggtagccactccaggatcctgattggggtgccaagagaaacagcaggatgttgaattgatcatcagatgccctctggaatggttagcatccaaggtgacagtgactgcattgaggcgctctattcttcttcacctctcaggaactgacttttattttttctgtcaacacccagtaatctccctaactagttttaacccttattcctccctcatacctagccatttctccaaggcgcaaatggccctggcttcatttattcctttcctttctatccttttatatttttcccttccccaccccctcactcaatggtataaaagctaggacagagcacctgacctcagttgtctttggccattgtgggaagtcattattctggagacaagaaaatcatcactctggtgccttggtggcagcaccactgcctgctccctggaaggtagactatggcataagtgtcagctcattgttttcgtctcccacttatcttcccccttcaaagtgattttctttataagaaaatttgggctctgaatactccattctgcctcacttccttgaccttgttttcctctcttcgccctgacacctgcttctaatgagaaatgaagtcagtgcaaggaggaatgagaggtggggaggggagattgttgagagatggactaggaagtggaagcaggctggaaagacacatatggcgaaagtcaagtatctgaggccacttgcaacattgtgacaaagaagatggaagatagcagcctactgggctgtgagaatagtggtgaatttgattatttccagtggttagatttagcagagagatttactttcttagaaattaataggggaaatggcacttaatagaggtttaatggaatgaagtactttcaacccattgatgagagtcatggaagtttagagtggcaagacccagaggtcattaggtccagctttctattattgtgtcacagggacccctgctaccacagctttcacccatgggcatggtcaggtagcctctggtggctatgcatttattactcaaaagttgggcaactctaataacgagagagtttttcctcatatcagctgaagtctgcctgtggattctccttgtagtccagatctactatctgcaactctttaacggcacttgagatatgtgcagtgggtggtctccccctcagtcttactttgagctgctgttactctagtcctttaagtcattcctcatatggcatgcttttcttacctgtcacatcttggccatcctcctctagacaaaaccagcctttaaaatatcatgtccaggcctggaaagaatacaaatccagtgcaaaattaaaccattagttcttgatgataacctagcattaatacttacagtattttctttttgtaggagttttatcccttggttcacttgagtgtgcaagtcattaaatcctcatcattttagggttgccagtgatattcagtgtttagagtggttcattcccttaatatatactacctctgtctgttaattctttcctaacatgacatgtagctctccatggtcctccctctgaaacaccacatgctgtttaaactagaagctgtaattcaagatcccaattccaccaggtgcagtggctcatgcctgtaatcccagcacttcaggaggccgaggtggacagatcacgaggtcaggagttcgagaccatcctggctaacacggtgaaacccaatctctactaaaaatacaaaaaattagccaggcgtggtggcaggcgcctgtagtcccagctactcaggaggctgaggcaggagaatggcgtgaacccgggaggcggagcttgcagtgagccttgatcacgccactgcactccagcctgggtgacagagcaagactccatctcaaaaaaaataataataataaataaataaaaaatcccaattacagaacaggagatatgtttcctctgacaaaaccccatttttagagtgtataaaattctgtctttcatttccaaccatttttcaagagaagctgctactatcttgagacttcgtattatcatgggagtactgtaagttcagttctcagggaatgctaaattagagtaataagttttatatccttcattctgggagaggaaatcaacataaggtgttgactaattgattatcctggaacattttgaatattggggaaggaagatgatacttctttctcaagaaaagaaaattggattattaggaatacatcttgacccttttccactcaatagaccagggaaaggggttacagagagcctcctcagatctgtttgtgcctttcaaaagtactgggggcagattctcaaaactcttagattggtgttgcatccctgccacttcacatgacccttccatgttaaagctgacttttcttgccagaaagttttccttgtgacaagaaatttgcaagcttttcaatctcaggaatactggattctatagccaagaactcatgaaagtaagtgtaaactatcctaggtaatttcaggtactttctcttatgcaattaattttattaactgatttctggtctatctccagagataaaataccattccttcacaactgtattgtctggaagccccatgagatggtaattataggccttctactagccagcagttctctctggatactggcatcagcaggtctcctttttcttgtgctgcttggacaggtacctactgctggcctcttcagtggccacaatcctcagtcctcacctgctggtttggagactcatgagcaccccaggcagctcaagctgaataaatagctgcagacatggccaacaacatggggctcaggtctgtcacttaacttagagtctttacatgaaatatcagaatgggaaagagaatgttcctggtaaaactctgttttcattaatttgttatttttcaaaaaccgagccacacctttggaagtaatgatttggccattccagagattctggggctaaagtttgtttttccagggctgctgatccttttccagatagctccagagtatgatgaccccagccccatcccaatctctagcgaaagggttatgcaaatctcagggtgttgcctctaaagaatctaaagaatagacatgctttgggcttactcagtgtaccagattctctagtgggccattctcatttgatgttccctagaacctccctgtcttccaactgcaggatgtgtttacttctcttctgggcttcccctggtttctgtcctagttcccaccccaagtttaagaagacttagattcatttattgctatctgaggccactagtgagatttcagatctctcttttgcaacattttacccatttcccttccccaaaccatgtgcttattagatggttccactcaggaagcaaggaagctaaaactcaagttaatggtctgtggatcccacgaaagtgtgtgtaaactactgactgtttctccactagaggcatttaattgagccaaagatgatggaagaagaaactctcaaagccatgtactttgttaggtgtctggatttttggcctgtttgcagcctctcctagccacagacagacactgtctcctctcagagaaaggccagtgtttcggtccaggccactggtgagtgtcggcacccttgaggtgggcatggagtgagcagaagaagcctggagaagagagaactatttaaaagtgttgccagttattcagcttccaggcggctttgcacctccaaaggtgcaaaaaggaaaaagaaagcagaaaggattcagcatttaagcagaaagaaaagggaaattctactctaccagatgagccactggttccactggagcttatcagtgaagtaacactgcaggagccctggtatccttccctcagagatatcatcaggggccctcaaaccccattgtttatgccagcactgaccgcactttaagcacacacttaccaatcagaggtcgtgtaattggcctaaatctaggcccagttattactacaaatcttagtcaccatactctctcgcccaggctggagtgcagtggtgtgatctcagctcactgcaacctccacctcccaggctcaagggatcctctcacctcagctcccgagcagctaggactgcaggtgtgcaccaccatgcccagctaatttttgaatttttttgtagagatggggttttgccatgttgcccaggctggtctgaagctgctgggctcaagcaatccacctggctgggcctcccaaagcgataggattacaggcgtaagggcccacgcccagcctaccatactgattttcaaggcagggtctaacccttcataagatgtgagttcttccaacccaataagcaggcagctttgaggacaaaaaggcaacattaaaagataagaccctagaagtcagaacatctgtattccaaggccaccccttctccttttagtcatgtgactttgggcaggtcaccctccctgtctgtaaaatgaggttggactggataatctttatgtgccctttccttttggcttaaaattctgtgatttattcattcttaggaagatcagcatatttattgggatttctgcttcaaaaattctttctaacctcaaaaatccaagtccagaattttttgttttcttctggatttaaactgtttaatatgagcacatcaaggttgacttctcatcctttttgggaagtgaatttaatattgagggtaattgaatgatgttgcaatggctttccctcctgctggcttggtaagaatattaaagcctgcagaggtggaaattggagctcatggagaaatggatagaaagcaatttgttgcaggcagcctttggacaagttgttttaataggaaatagacctgctgcttcataggtttcctcaaccacctttcctcagctttcttaaaatgggatctacattggctcttcacacccaaatagcagactaatcgtttttctgcttagcaccgtctggttcattgtcttgaactctgccttacagcagcaagaaaattttcctcgacaagaacctcaatctttagttccattgagctccccctctggattttggacttaccagaagtaggaggttctgataccattcaagatggtctttccttcaaagcaggtctgaagaggagactaccaaagcagtgtttacaaacccagagtccacacaaccatattgcatagaacagcacttggctttcacaagcctcctacaggacctggtgtaattggagtgaaagggcagagaccctggaagtggaggtggctgtgtgctgcgatgggaagaaggcagaaggcccaggggctttggacatagagcagggtggaagctgcaagtactgggaaggaagagagtttcacagaaacaaagctttgtcacacagaaatgagttctgtctcactggtgacttcatccctcaggctccagctgagcagagattttaatcagcttccttaatgggtattgacactgctcaggaagcagtagaccctgtcagggacagctattgatcttttgtgttctgattagattggaaaatagatcaacttcattgtagtccaggaactgttggtcacagctactaggaatgaggtgatttctgagggctgagaaaaaacacagaatcttggccagcagccagcagctgcatggtgaaagatgcattcacttctcctttgagagttggggttgagggcaaacatagaacccaggtttggcttacaacccagtgtcccggaagccctccttcgggagaactgtaagtaagaggtgggtgtgtctaaagacaataccattaatgaatgttctggccttacctaaaaaggtttagcaatttggggataactcttggatctagcttatgtgcgttcacatgcacatttgctagcccagagcttttaaaatgaggtctggcatatacttgattacaaatgaaaactcagaaaccaattttatttattaaatcatatcttttgtttttccccctcccttctaatcccccaaaggacctatttgagctgttccccaattcatctgcttattttggaccatgaatctgccagagtgatattttctgttatttctcctccaaatttttccctgatgtttccaataaagatttacttgggtggccccttaaggtgacatcaggatgctcttatgtccttccagaataagcatacacttcactcctctccctttcatctccctctgcattcttaattccttgcttttctcacttggagccgagggtgctttagagaggtggttttccatgaatcagccaagattcctgtagaagttgggtataccaaccaccaccaccaccgccccctattccagtttcaaagctcctcggctatgctaatgtcccctcagagatgaggtttgacttttaggcccgtatgactcctccatagcctggccaaggagaccatgagtagccatgtctggtttactctttatcctgagactgtttatagcttaaaacagaagtgtgtcttcccagcacaaacctaatcaatcagtgtatcagtgcatctggtggcaacagctcagcccattcaaagagcaaggattcaggaaaggcacactgatggtggggagcctcttaagagcctctaatgttctcccaaaaccagagttgagagtcggagtgccagtcgtcggggcccactattcctgaataagggacatgcaagggccagaagtagcttgactctcgcctaaatatctgtgcctttgcctgtcctttctcccactctactgaaacccggaacagattcccgcttgccttctgatgaagagaggttaggtaaagagagtttggaggaaaaaagacaccaggaggcaggctgcggggtaggagagggttctgagaggaggcagcaatccagaatacctccttttctagccagcatcccttgaacttttgaaaggttgtgcctaccactggctggcacaccagggcaatgatttccctgcagaaggaaggaaagaatgtttcacccttgcatccttcttggagaagctacagcctgtgctcagttgagtggttcacactcagactttggctttatggttttccttcctccttgtctttgccctgaccttgatcaacaggggtgaaaagaaccaccctgaggtttccatgcctctcccattttagtggtagcattttgtgtctttactccacccttcaccctagttccaccaaggttcacacaccagatgtaactgtttttcagctgagttgtatggattaacttcagtccactgtaaatacacctgggatggggtggggttggggttgtttagggagaagcagccagacttgctttgtgaactgaatgtatttttatgcaattttgagtggcctttcaaccctaagatgaatggttttgttttactggttgttgttatatagttttgagtattctgtgtttgaaagtttgggaataataatattcacttctatatgatgcctgtaaacacaacagtatttataaatgagtaaataaaactgtgttttaactttg

SEQ ID NO: 24457 - DNA, 1687 bp, Homo sapiens
  source 1..1687: mol_type = unassigned DNA
cggcgcgagggtctccgccctctgctccgggctgaagcgctctgagagaggcggcagcggcaactcgagccccaacagtaatttagtgttggtagttttggcagcagctgccgaggccggagcaatggcggaactggagcacctaggagggaagcgggcagagtcggcgcgaatgcggcgggcagagcagcttcggcgctggcggggctcgctgacagagcaggagcctgcggagcgacgaggcgcggggcggcagccgctgaccaggcgcgggagccccagggtccgcttcgaggacggtgctgtctttctggccgcctgctctagcggggacaccgacgaggtgagaaagcttctggcaagaggtgctgatatcaacacggtcaacgtggacggcttgacagccctgcaccaggcatgtattgatgaaaatttggacatggtgaagtttctggtggagaacagagccaatgtaaaccagcaagacaacgagggctggacaccccttcatgcagcagcttcctgtggctatctcaacatagcagagtatttcattaatcacggagccagtgtaggtattgtcaatagtgaaggtgaagttccctctgaccttgcagaagagccagccatgaaggatcttcttctggagcaagtaaagaagcaaggagttgatctagagcagtcaagaaaagaagaagagcagcagatgttgcaggatgcccgccagtggctcaacagtgggaaaatagaggatgtgaggcaggctcgctcaggggctacagcccttcatgtggctgctgccaagggctactctgaagtcctcagacttttaattcaggctggctatgaactcaatgttcaggattatgatggctggactcccctccatgctgctgcacactggggagtgaaggaggcttgctccatcctggcagaagcactttgtgacatggatattcgaaataaactgggccagacaccatttgatgtggctgatgagggtctcgtggagcatttggagttgctccagaagaagcagaatgtgcttcgaagtgaaaaggagacacggaataaactcattgagtcagatctgaacagcaagattcagagtgggttctttaagaacaaagagaagatgctctatgaggaggagacacctaagtcccaagaaatggaggaagaaaataaagaatctagtagctccagctcagaggaggaggaaggtgaagatgaagcttctgagtcagaaactgagaaggaggcagttctcttctggcctttttaacaagccagaagagcccaaagatgaatctccttcttcatggagattgggactgagaaaaactggcagccacaacatgctgagtgaggtggccaattccagggaacctataagggaccgaggctcttccatctatcgctcctcttcaagccctcggatttctgctctactggacaacaaagataaggtgcagtttgggagggtatgggggaattccaaggcagttttttttttccatgaaaattcaatcttaggaacaaatgaaaatattttctagtccttaagttgattttggaaatgcaaagtctttaaagagagagaggcacactgatagtttattcaagtagctatttgcttgctattgtttgcttgaccaaaaaagaaaataaaaaagctttaaaaata

SEQ ID NO: 24458 - DNA, 9644 bp, Homo sapiens
  source 1..9644: mol_type = unassigned DNA
gttgctggtacaatctcataaaatgggctccagtgtttagagaaggacagtcagaggagtggccacctgtttgttgaaaattgggcttctgggaaagttgctgcacaagtgtgtggcaaggtgtgtctgagatagcttgacctgctttcacctggaatgatttgatctggcaatagagttccttgccattcctggttttatggaaatcagaggcacaggaagttgatctgggtgttctggggaattgagacaagcctctgccatagtttgttagtactctgtgtttggatgctaactccagtgtgctgagttgagacatcagcaagtgctgggcctggaatgtcagaagcagcaggtcctatctgactcctgtacgggatgaggaagcagagtctttacggaaagcacgctccagacaagctcggcagacacgaaggtctactcaaggtgtcaccctaacagaccttcaagaagcagaaaggacattcagccggtcgagggcagagaggcaagctcaggagcagcctcgtgagaagcccacagacactgaagggcttgaggggagccctgagaagcatgagccctcagcagttccagcaacagaagctggggagggccagcagccctggggcaggagtctggatgaagagcctatctgtcatcgcctgaggtgcccagctcagccagacaaacccaccacgccagcatctccttctacgtcaagaccctcactctacaccagttcccacctgctatggacaaatagattttcagtccctgattctgagagttcagagactaccacaaacactacaactgcaaaggaaatggacaaaaatgagaatgaagaagcagatttggatgagcagtcctctaagaggctgtccatccgagagaggaggcggcccaaggaacgacgaagaggcacaggcatcaatttctggacaaaggatgaggatgaaactgatggctctgaagaggtcaaagaaacgtggcatgaaagactttctaggttggaatcgggaggtagtaatcctacaaccagtgattcttacggtgaccgggcttcagcaagagcccgtcgggaggcccgggaggcccgcctagccaccctgaccagccgtgtagaagaagacagcaacagagattataaaaaactctatgagagtgctctgactgaaaaccaaaaactgaaaacaaaacttcaggaagcccagctagagctagcagatataaagtccaagcttgagaaggtggcccagcagaaacaagaaaagacctctgaccgatcatcagtgctggagatggagaaacgggagaggcgagccttggagcgcaaaatgtcagaaatggaggaagaaatgaagaacctccaccagctaaaacagattcaaaccttgaagcagatgaacgagcaactgcaggctgagaacagggccctgacccgagtggtggccagactctcggagtccatcgagtcctcggacacccaggagctctagttcttgcccctactctccaactcacttccctcctccactactccaggtgttaacagaactgaaatccgacaaccagaggctgaaagatgaaaatggtgccctcatcagagtcatcagcaaactgtccaagtaggctaggctccagatttatgaggaaagaaagggacagcatttgctgcccccacccctcttttccagtccttgccttccaaccaaaagaaatggatgttttggtggaaggacacttctttctatcaccctcttcagtcacctctatacactctacattttctctgcactttcaatgccctgttcttccaaacccctatcccaagttttatgacagttttaattgaagcatgattgtggtaattcgagccatctggagaatgctctggggagtacaccaggctcagctgtggacccctcaacttcctgctgctcagctactttgtccacattggatttggtccaaacatgtaagacttctaccctaatcagtatccttcagctttttacattaacccagtgtcctctgatataggtgagtcttgtggtagccactccaggatcctgattggggtgccaagagaaacagcaggatgttgaattgatcatcagatgccctctggaatggttagcatccaaggtgacagtgactgcattgaggcgctctattcttcttcacctctcaggaactgacttttattttttctgtcaacacccagtaatctccctaactagttttaacccttattcctccctcatacctagccatttctccaaggcgcaaatggccctggcttcatttattcctttcctttctatccttttatatttttcccttccccaccccctcactcaatggtataaaagctaggacagagcacctgacctcagttgtctttggccattgtgggaagtcattattctggagacaagaaaatcatcactctggtgccttggtggcagcaccactgcctgctccctggaaggtagactatggcataagtgtcagctcattgttttcgtctcccacttatcttcccccttcaaagtgattttctttataagaaaatttgggctctgaatactccattctgcctcacttccttgaccttgttttcctctcttcgccctgacacctgcttctaatgagaaatgaagtcagtgcaaggaggaatgagaggtggggaggggagattgttgagagatggactaggaagtggaagcaggctggaaagacacatatggcgaaagtcaagtatctgaggccacttgcaacattgtgacaaagaagatggaagatagcagcctactgggctgtgagaatagtggtgaatttgattatttccagtggttagatttagcagagagatttactttcttagaaattaataggggaaatggcacttaatagaggtttaatggaatgaagtactttcaacccattgatgagagtcatggaagtttagagtggcaagacccagaggtcattaggtccagctttctattattgtgtcacagggacccctgctaccacagctttcacccatgggcatggtcaggtagcctctggtggctatgcatttattactcaaaagttgggcaactctaataacgagagagtttttcctcatatcagctgaagtctgcctgtggattctccttgtagtccagatctactatctgcaactctttaacggcacttgagatatgtgcagtgggtggtctccccctcagtcttactttgagctgctgttactctagtcctttaagtcattcctcatatggcatgcttttcttacctgtcacatcttggccatcctcctctagacaaaaccagcctttaaaatatcatgtccaggcctggaaagaatacaaatccagtgcaaaattaaaccattagttcttgatgataacctagcattaatacttacagtattttctttttgtaggagttttatcccttggttcacttgagtgtgcaagtcattaaatcctcatcattttagggttgccagtgatattcagtgtttagagtggttcattcccttaatatatactacctctgtctgttaattctttcctaacatgacatgtagctctccatggtcctccctctgaaacaccacatgctgtttaaactagaagctgtaattcaagatcccaattccaccaggtgcagtggctcatgcctgtaatcccagcacttcaggaggccgaggtggacagatcacgaggtcaggagttcgagaccatcctggctaacacggtgaaacccaatctctactaaaaatacaaaaaattagccaggcgtggtggcaggcgcctgtagtcccagctactcaggaggctgaggcaggagaatggcgtgaacccgggaggcggagcttgcagtgagccttgatcacgccactgcactccagcctgggtgacagagcaagactccatctcaaaaaaaataataataataaataaataaaaaatcccaattacagaacaggagatatgtttcctctgacaaaaccccatttttagagtgtataaaattctgtctttcatttccaaccatttttcaagagaagctgctactatcttgagacttcgtattatcatgggagtactgtaagttcagttctcagggaatgctaaattagagtaataagttttatatccttcattctgggagaggaaatcaacataaggtgttgactaattgattatcctggaacattttgaatattggggaaggaagatgatacttctttctcaagaaaagaaaattggattattaggaatacatcttgacccttttccactcaatagaccagggaaaggggttacagagagcctcctcagatctgtttgtgcctttcaaaagtactgggggcagattctcaaaactcttagattggtgttgcatccctgccacttcacatgacccttccatgttaaagctgacttttcttgccagaaagttttccttgtgacaagaaatttgcaagcttttcaatctcaggaatactggattctatagccaagaactcatgaaagtaagtgtaaactatcctaggtaatttcaggtactttctcttatgcaattaattttattaactgatttctggtctatctccagagataaaataccattccttcacaactgtattgtctggaagccccatgagatggtaattataggccttctactagccagcagttctctctggatactggcatcagcaggtctcctttttcttgtgctgcttggacaggtacctactgctggcctcttcagtggccacaatcctcagtcctcacctgctggtttggagactcatgagcaccccaggcagctcaagctgaataaatagctgcagacatggccaacaacatggggctcaggtctgtcacttaacttagagtctttacatgaaatatcagaatgggaaagagaatgttcctggtaaaactctgttttcattaatttgttatttttcaaaaaccgagccacacctttggaagtaatgatttggccattccagagattctggggctaaagtttgtttttccagggctgctgatccttttccagatagctccagagtatgatgaccccagccccatcccaatctctagcgaaagggttatgcaaatctcagggtgttgcctctaaagaatctaaagaatagacatgctttgggcttactcagtgtaccagattctctagtgggccattctcatttgatgttccctagaacctccctgtcttccaactgcaggatgtgtttacttctcttctgggcttcccctggtttctgtcctagttcccaccccaagtttaagaagacttagattcatttattgctatctgaggccactagtgagatttcagatctctcttttgcaacattttacccatttcccttccccaaaccatgtgcttattagatggttccactcaggaagcaaggaagctaaaactcaagttaatggtctgtggatcccacgaaagtgtgtgtaaactactgactgtttctccactagaggcatttaattgagccaaagatgatggaagaagaaactctcaaagccatgtactttgttaggtgtctggatttttggcctgtttgcagcctctcctagccacagacagacactgtctcctctcagagaaaggccagtgtttcggtccaggccactggtgagtgtcggcacccttgaggtgggcatggagtgagcagaagaagcctggagaagagagaactatttaaaagtgttgccagttattcagcttccaggcggctttgcacctccaaaggtgcaaaaaggaaaaagaaagcagaaaggattcagcatttaagcagaaagaaaagggaaattctactctaccagatgagccactggttccactggagcttatcagtgaagtaacactgcaggagccctggtatccttccctcagagatatcatcaggggccctcaaaccccattgtttatgccagcactgaccgcactttaagcacacacttaccaatcagaggtcgtgtaattggcctaaatctaggcccagttattactacaaatcttagtcaccatactctctcgcccaggctggagtgcagtggtgtgatctcagctcactgcaacctccacctcccaggctcaagggatcctctcacctcagctcccgagcagctaggactgcaggtgtgcaccaccatgcccagctaatttttgaatttttttgtagagatggggttttgccatgttgcccaggctggtctgaagctgctgggctcaagcaatccacctggctgggcctcccaaagcgataggattacaggcgtaagggcccacgcccagcctaccatactgattttcaaggcagggtctaacccttcataagatgtgagttcttccaacccaataagcaggcagctttgaggacaaaaaggcaacattaaaagataagaccctagaagtcagaacatctgtattccaaggccaccccttctccttttagtcatgtgactttgggcaggtcaccctccctgtctgtaaaatgaggttggactggataatctttatgtgccctttccttttggcttaaaattctgtgatttattcattcttaggaagatcagcatatttattgggatttctgcttcaaaaattctttctaacctcaaaaatccaagtccagaattttttgttttcttctggatttaaactgtttaatatgagcacatcaaggttgacttctcatcctttttgggaagtgaatttaatattgagggtaattgaatgatgttgcaatggctttccctcctgctggcttggtaagaatattaaagcctgcagaggtggaaattggagctcatggagaaatggatagaaagcaatttgttgcaggcagcctttggacaagttgttttaataggaaatagacctgctgcttcataggtttcctcaaccacctttcctcagctttcttaaaatgggatctacattggctcttcacacccaaatagcagactaatcgtttttctgcttagcaccgtctggttcattgtcttgaactctgccttacagcagcaagaaaattttcctcgacaagaacctcaatctttagttccattgagctccccctctggattttggacttaccagaagtaggaggttctgataccattcaagatggtctttccttcaaagcaggtctgaagaggagactaccaaagcagtgtttacaaacccagagtccacacaaccatattgcatagaacagcacttggctttcacaagcctcctacaggacctggtgtaattggagtgaaagggcagagaccctggaagtggaggtggctgtgtgctgcgatgggaagaaggcagaaggcccaggggctttggacatagagcagggtggaagctgcaagtactgggaaggaagagagtttcacagaaacaaagctttgtcacacagaaatgagttctgtctcactggtgacttcatccctcaggctccagctgagcagagattttaatcagcttccttaatgggtattgacactgctcaggaagcagtagaccctgtcagggacagctattgatcttttgtgttctgattagattggaaaatagatcaacttcattgtagtccaggaactgttggtcacagctactaggaatgaggtgatttctgagggctgagaaaaaacacagaatcttggccagcagccagcagctgcatggtgaaagatgcattcacttctcctttgagagttggggttgagggcaaacatagaacccaggtttggcttacaacccagtgtcccggaagccctccttcgggagaactgtaagtaagaggtgggtgtgtctaaagacaataccattaatgaatgttctggccttacctaaaaaggtttagcaatttggggataactcttggatctagcttatgtgcgttcacatgcacatttgctagcccagagcttttaaaatgaggtctggcatatacttgattacaaatgaaaactcagaaaccaattttatttattaaatcatatcttttgtttttccccctcccttctaatcccccaaaggacctatttgagctgttccccaattcatctgcttattttggaccatgaatctgccagagtgatattttctgttatttctcctccaaatttttccctgatgtttccaataaagatttacttgggtggccccttaaggtgacatcaggatgctcttatgtccttccagaataagcatacacttcactcctctccctttcatctccctctgcattcttaattccttgcttttctcacttggagccgagggtgctttagagaggtggttttccatgaatcagccaagattcctgtagaagttgggtataccaaccaccaccaccaccgccccctattccagtttcaaagctcctcggctatgctaatgtcccctcagagatgaggtttgacttttaggcccgtatgactcctccatagcctggccaaggagaccatgagtagccatgtctggtttactctttatcctgagactgtttatagcttaaaacagaagtgtgtcttcccagcacaaacctaatcaatcagtgtatcagtgcatctggtggcaacagctcagcccattcaaagagcaaggattcaggaaaggcacactgatggtggggagcctcttaagagcctctaatgttctcccaaaaccagagttgagagtcggagtgccagtcgtcggggcccactattcctgaataagggacatgcaagggccagaagtagcttgactctcgcctaaatatctgtgcctttgcctgtcctttctcccactctactgaaacccggaacagattcccgcttgccttctgatgaagagaggttaggtaaagagagtttggaggaaaaaagacaccaggaggcaggctgcggggtaggagagggttctgagaggaggcagcaatccagaatacctccttttctagccagcatcccttgaacttttgaaaggttgtgcctaccactggctggcacaccagggcaatgatttccctgcagaaggaaggaaagaatgtttcacccttgcatccttcttggagaagctacagcctgtgctcagttgagtggttcacactcagactttggctttatggttttccttcctccttgtctttgccctgaccttgatcaacaggggtgaaaagaaccaccctgaggtttccatgcctctcccattttagtggtagcattttgtgtctttactccacccttcaccctagttccaccaaggttcacacaccagatgtaactgtttttcagctgagttgtatggattaacttcagtccactgtaaatacacctgggatggggtggggttggggttgtttagggagaagcagccagacttgctttgtgaactgaatgtatttttatgcaattttgagtggcctttcaaccctaagatgaatggttttgttttactggttgttgttatatagttttgagtattctgtgtttgaaagtttgggaataataatattcacttctatatgatgcctgtaaacacaacagtatttataaatgagtaaataaaactgtgttttaactttg

SEQ ID NO: 24459 - DNA, 9463 bp, Homo sapiens
  source 1..9463: mol_type = unassigned DNA
gttgctggtacaatctcataaaatgggctccagtgtttagagaaggacagtcagaggagtggccacctgtttgttgaaaattgggcttctgggaaagttgctgcacaagtgtgtggcaaggtgtgtctgagatagcttgacctgctttcacctggaatgatttgatctggcaatagagttccttgccattcctggttttatggaaatcagaggcacaggaagttgatctgggtgttctggggaattgagacaagcctctgccatagtttgttagtactctgtgtttggatgctaactccagtgtgctgagttgagacatcagcaagtgctgggcctggaatgtcagaagcagcaggtcctatctgactcctgtacgggatgaggaagcagagtctttacggaaagcacgctccagacaagctcggcagacacgaaggtctactcaaggtgtcaccctaacagaccttcaagaagcagaaaggacattcagccggtcgagggcagagaggcaagctcaggagcagcctcgtgagaagcccacagacactgaagggcttgaggggagccctgagaagcatgagccctcagcagttccagcaacagaagctggggagggccagcagccctggggcaggagtctggatgaagagcctatctgtcatcgcctgaggtgcccagctcagccagacaaacccaccacgccagcatctccttctacgtcaagaccctcactctacaccagttcccacctgctatggacaaatagattttcagtccctgattctgagagttcagagactaccacaaacactacaactgcaaaggaaatggacaaaaatgagaatgaagaagcagatttggatgagcagtcctctaagaggctgtccatccgagagaggaggcggcccaaggaacgacgaagaggcacaggcatcaatttctggacaaaggatgaggatgaaactgatggctctgaagaggtcaaagaaacgtggcatgaaagactttctaggttggaatcgggaggtagtaatcctacaaccagtgattcttacggtgaccgggcttcagcaagagcccgtcgggaggcccgggaggcccgcctagccaccctgaccagccgtgtagaagaagacagcaacagagattataaaaaactctatgagagtgctctgactgaaaaccaaaaactgaaaacaaaacttcaggaagcccagctagagctagcagatataaagtccaagcttgagaaggtggcccagcagaaacaagaaaagacctctgaccgatcatcagtgctggagatggagaaacgggagaggcgagccttggagcgcaaaatgtcagaaatggaggaagaaatgaaggtgttaacagaactgaaatccgacaaccagaggctgaaagatgaaaatggtgccctcatcagagtcatcagcaaactgtccaagtaggctaggctccagatttatgaggaaagaaagggacagcatttgctgcccccacccctcttttccagtccttgccttccaaccaaaagaaatggatgttttggtggaaggacacttctttctatcaccctcttcagtcacctctatacactctacattttctctgcactttcaatgccctgttcttccaaacccctatcccaagttttatgacagttttaattgaagcatgattgtggtaattcgagccatctggagaatgctctggggagtacaccaggctcagctgtggacccctcaacttcctgctgctcagctactttgtccacattggatttggtccaaacatgtaagacttctaccctaatcagtatccttcagctttttacattaacccagtgtcctctgatataggtgagtcttgtggtagccactccaggatcctgattggggtgccaagagaaacagcaggatgttgaattgatcatcagatgccctctggaatggttagcatccaaggtgacagtgactgcattgaggcgctctattcttcttcacctctcaggaactgacttttattttttctgtcaacacccagtaatctccctaactagttttaacccttattcctccctcatacctagccatttctccaaggcgcaaatggccctggcttcatttattcctttcctttctatccttttatatttttcccttccccaccccctcactcaatggtataaaagctaggacagagcacctgacctcagttgtctttggccattgtgggaagtcattattctggagacaagaaaatcatcactctggtgccttggtggcagcaccactgcctgctccctggaaggtagactatggcataagtgtcagctcattgttttcgtctcccacttatcttcccccttcaaagtgattttctttataagaaaatttgggctctgaatactccattctgcctcacttccttgaccttgttttcctctcttcgccctgacacctgcttctaatgagaaatgaagtcagtgcaaggaggaatgagaggtggggaggggagattgttgagagatggactaggaagtggaagcaggctggaaagacacatatggcgaaagtcaagtatctgaggccacttgcaacattgtgacaaagaagatggaagatagcagcctactgggctgtgagaatagtggtgaatttgattatttccagtggttagatttagcagagagatttactttcttagaaattaataggggaaatggcacttaatagaggtttaatggaatgaagtactttcaacccattgatgagagtcatggaagtttagagtggcaagacccagaggtcattaggtccagctttctattattgtgtcacagggacccctgctaccacagctttcacccatgggcatggtcaggtagcctctggtggctatgcatttattactcaaaagttgggcaactctaataacgagagagtttttcctcatatcagctgaagtctgcctgtggattctccttgtagtccagatctactatctgcaactctttaacggcacttgagatatgtgcagtgggtggtctccccctcagtcttactttgagctgctgttactctagtcctttaagtcattcctcatatggcatgcttttcttacctgtcacatcttggccatcctcctctagacaaaaccagcctttaaaatatcatgtccaggcctggaaagaatacaaatccagtgcaaaattaaaccattagttcttgatgataacctagcattaatacttacagtattttctttttgtaggagttttatcccttggttcacttgagtgtgcaagtcattaaatcctcatcattttagggttgccagtgatattcagtgtttagagtggttcattcccttaatatatactacctctgtctgttaattctttcctaacatgacatgtagctctccatggtcctccctctgaaacaccacatgctgtttaaactagaagctgtaattcaagatcccaattccaccaggtgcagtggctcatgcctgtaatcccagcacttcaggaggccgaggtggacagatcacgaggtcaggagttcgagaccatcctggctaacacggtgaaacccaatctctactaaaaatacaaaaaattagccaggcgtggtggcaggcgcctgtagtcccagctactcaggaggctgaggcaggagaatggcgtgaacccgggaggcggagcttgcagtgagccttgatcacgccactgcactccagcctgggtgacagagcaagactccatctcaaaaaaaataataataataaataaataaaaaatcccaattacagaacaggagatatgtttcctctgacaaaaccccatttttagagtgtataaaattctgtctttcatttccaaccatttttcaagagaagctgctactatcttgagacttcgtattatcatgggagtactgtaagttcagttctcagggaatgctaaattagagtaataagttttatatccttcattctgggagaggaaatcaacataaggtgttgactaattgattatcctggaacattttgaatattggggaaggaagatgatacttctttctcaagaaaagaaaattggattattaggaatacatcttgacccttttccactcaatagaccagggaaaggggttacagagagcctcctcagatctgtttgtgcctttcaaaagtactgggggcagattctcaaaactcttagattggtgttgcatccctgccacttcacatgacccttccatgttaaagctgacttttcttgccagaaagttttccttgtgacaagaaatttgcaagcttttcaatctcaggaatactggattctatagccaagaactcatgaaagtaagtgtaaactatcctaggtaatttcaggtactttctcttatgcaattaattttattaactgatttctggtctatctccagagataaaataccattccttcacaactgtattgtctggaagccccatgagatggtaattataggccttctactagccagcagttctctctggatactggcatcagcaggtctcctttttcttgtgctgcttggacaggtacctactgctggcctcttcagtggccacaatcctcagtcctcacctgctggtttggagactcatgagcaccccaggcagctcaagctgaataaatagctgcagacatggccaacaacatggggctcaggtctgtcacttaacttagagtctttacatgaaatatcagaatgggaaagagaatgttcctggtaaaactctgttttcattaatttgttatttttcaaaaaccgagccacacctttggaagtaatgatttggccattccagagattctggggctaaagtttgtttttccagggctgctgatccttttccagatagctccagagtatgatgaccccagccccatcccaatctctagcgaaagggttatgcaaatctcagggtgttgcctctaaagaatctaaagaatagacatgctttgggcttactcagtgtaccagattctctagtgggccattctcatttgatgttccctagaacctccctgtcttccaactgcaggatgtgtttacttctcttctgggcttcccctggtttctgtcctagttcccaccccaagtttaagaagacttagattcatttattgctatctgaggccactagtgagatttcagatctctcttttgcaacattttacccatttcccttccccaaaccatgtgcttattagatggttccactcaggaagcaaggaagctaaaactcaagttaatggtctgtggatcccacgaaagtgtgtgtaaactactgactgtttctccactagaggcatttaattgagccaaagatgatggaagaagaaactctcaaagccatgtactttgttaggtgtctggatttttggcctgtttgcagcctctcctagccacagacagacactgtctcctctcagagaaaggccagtgtttcggtccaggccactggtgagtgtcggcacccttgaggtgggcatggagtgagcagaagaagcctggagaagagagaactatttaaaagtgttgccagttattcagcttccaggcggctttgcacctccaaaggtgcaaaaaggaaaaagaaagcagaaaggattcagcatttaagcagaaagaaaagggaaattctactctaccagatgagccactggttccactggagcttatcagtgaagtaacactgcaggagccctggtatccttccctcagagatatcatcaggggccctcaaaccccattgtttatgccagcactgaccgcactttaagcacacacttaccaatcagaggtcgtgtaattggcctaaatctaggcccagttattactacaaatcttagtcaccatactctctcgcccaggctggagtgcagtggtgtgatctcagctcactgcaacctccacctcccaggctcaagggatcctctcacctcagctcccgagcagctaggactgcaggtgtgcaccaccatgcccagctaatttttgaatttttttgtagagatggggttttgccatgttgcccaggctggtctgaagctgctgggctcaagcaatccacctggctgggcctcccaaagcgataggattacaggcgtaagggcccacgcccagcctaccatactgattttcaaggcagggtctaacccttcataagatgtgagttcttccaacccaataagcaggcagctttgaggacaaaaaggcaacattaaaagataagaccctagaagtcagaacatctgtattccaaggccaccccttctccttttagtcatgtgactttgggcaggtcaccctccctgtctgtaaaatgaggttggactggataatctttatgtgccctttccttttggcttaaaattctgtgatttattcattcttaggaagatcagcatatttattgggatttctgcttcaaaaattctttctaacctcaaaaatccaagtccagaattttttgttttcttctggatttaaactgtttaatatgagcacatcaaggttgacttctcatcctttttgggaagtgaatttaatattgagggtaattgaatgatgttgcaatggctttccctcctgctggcttggtaagaatattaaagcctgcagaggtggaaattggagctcatggagaaatggatagaaagcaatttgttgcaggcagcctttggacaagttgttttaataggaaatagacctgctgcttcataggtttcctcaaccacctttcctcagctttcttaaaatgggatctacattggctcttcacacccaaatagcagactaatcgtttttctgcttagcaccgtctggttcattgtcttgaactctgccttacagcagcaagaaaattttcctcgacaagaacctcaatctttagttccattgagctccccctctggattttggacttaccagaagtaggaggttctgataccattcaagatggtctttccttcaaagcaggtctgaagaggagactaccaaagcagtgtttacaaacccagagtccacacaaccatattgcatagaacagcacttggctttcacaagcctcctacaggacctggtgtaattggagtgaaagggcagagaccctggaagtggaggtggctgtgtgctgcgatgggaagaaggcagaaggcccaggggctttggacatagagcagggtggaagctgcaagtactgggaaggaagagagtttcacagaaacaaagctttgtcacacagaaatgagttctgtctcactggtgacttcatccctcaggctccagctgagcagagattttaatcagcttccttaatgggtattgacactgctcaggaagcagtagaccctgtcagggacagctattgatcttttgtgttctgattagattggaaaatagatcaacttcattgtagtccaggaactgttggtcacagctactaggaatgaggtgatttctgagggctgagaaaaaacacagaatcttggccagcagccagcagctgcatggtgaaagatgcattcacttctcctttgagagttggggttgagggcaaacatagaacccaggtttggcttacaacccagtgtcccggaagccctccttcgggagaactgtaagtaagaggtgggtgtgtctaaagacaataccattaatgaatgttctggccttacctaaaaaggtttagcaatttggggataactcttggatctagcttatgtgcgttcacatgcacatttgctagcccagagcttttaaaatgaggtctggcatatacttgattacaaatgaaaactcagaaaccaattttatttattaaatcatatcttttgtttttccccctcccttctaatcccccaaaggacctatttgagctgttccccaattcatctgcttattttggaccatgaatctgccagagtgatattttctgttatttctcctccaaatttttccctgatgtttccaataaagatttacttgggtggccccttaaggtgacatcaggatgctcttatgtccttccagaataagcatacacttcactcctctccctttcatctccctctgcattcttaattccttgcttttctcacttggagccgagggtgctttagagaggtggttttccatgaatcagccaagattcctgtagaagttgggtataccaaccaccaccaccaccgccccctattccagtttcaaagctcctcggctatgctaatgtcccctcagagatgaggtttgacttttaggcccgtatgactcctccatagcctggccaaggagaccatgagtagccatgtctggtttactctttatcctgagactgtttatagcttaaaacagaagtgtgtcttcccagcacaaacctaatcaatcagtgtatcagtgcatctggtggcaacagctcagcccattcaaagagcaaggattcaggaaaggcacactgatggtggggagcctcttaagagcctctaatgttctcccaaaaccagagttgagagtcggagtgccagtcgtcggggcccactattcctgaataagggacatgcaagggccagaagtagcttgactctcgcctaaatatctgtgcctttgcctgtcctttctcccactctactgaaacccggaacagattcccgcttgccttctgatgaagagaggttaggtaaagagagtttggaggaaaaaagacaccaggaggcaggctgcggggtaggagagggttctgagaggaggcagcaatccagaatacctccttttctagccagcatcccttgaacttttgaaaggttgtgcctaccactggctggcacaccagggcaatgatttccctgcagaaggaaggaaagaatgtttcacccttgcatccttcttggagaagctacagcctgtgctcagttgagtggttcacactcagactttggctttatggttttccttcctccttgtctttgccctgaccttgatcaacaggggtgaaaagaaccaccctgaggtttccatgcctctcccattttagtggtagcattttgtgtctttactccacccttcaccctagttccaccaaggttcacacaccagatgtaactgtttttcagctgagttgtatggattaacttcagtccactgtaaatacacctgggatggggtggggttggggttgtttagggagaagcagccagacttgctttgtgaactgaatgtatttttatgcaattttgagtggcctttcaaccctaagatgaatggttttgttttactggttgttgttatatagttttgagtattctgtgtttgaaagtttgggaataataatattcacttctatatgatgcctgtaaacacaacagtatttataaatgagtaaataaaactgtgttttaactttg

SEQ ID NO: 24460 - DNA, 11111 bp, Homo sapiens
  source 1..11111: mol_type = unassigned DNA
ggtactactggcgggaggagtaaagatggcggcgcgagggtctccgccctctgctccgggctgaagcgctctgagagaggcggcagcggcaactcgagccccaacagtaatttagtgttggtagttttggcagcagctgccgaggccggagcaatggcggaactggagcacctaggagggaagcgggcagagtcggcgcgaatgcggcgggcagagcagcttcggcgctggcggggctcgctgacagagcaggagcctgcggagcgacgaggcgcggggcggcagccgctgaccaggcgcgggagccccagggtccgcttcgaggacggtgctgtctttctggccgcctgctctagcggggacaccgacgaggtgagaaagcttctggcaagaggtgctgatatcaacacggtcaacgtggacggcttgacagccctgcaccaggcatgtattgatgaaaatttggacatggtgaagtttctggtggagaacagagccaatgtaaaccagcaagacaacgagggctggacaccccttcatgcagcagcttcctgtggctatctcaacatagcagagtatttcattaatcacggagccagtgtaggtattgtcaatagtgaaggtgaagttccctctgaccttgcagaagagccagccatgaaggatcttcttctggagcaagtaaagaagcaaggagttgatctagagcagtcaagaaaagaagaagagcagcagatgttgcaggatgcccgccagtggctcaacagtgggaaaatagaggatgtgaggcaggctcgctcaggggctacagcccttcatgtggctgctgccaagggctactctgaagtcctcagacttttaattcaggctggctatgaactcaatgttcaggattatgatggctggactcccctccatgctgctgcacactggggagtgaaggaggcttgctccatcctggcagaagcactttgtgacatggatattcgaaataaactgggccagacaccatttgatgtggctgatgagggtctcgtggagcatttggagttgctccagaagaagcagaatgtgcttcgaagtgaaaaggagacacggaataaactcattgagtcagatctgaacagcaagattcagagtgggttctttaagaacaaagagaagatgctctatgaggaggagacacctaagtcccaagaaatggaggaagaaaataaagaatctagtagctccagctcagaggaggaggaaggtgaagatgaagcttctgagtcagaaactgagaaggaggcagataaaaagccagaagcctttgtcaatcattccaactctgaaagcaagagtagtatcacagagcagataccagcaccagctcaaaataccttctctgcctcttctgctaggaggttctcttctggcctttttaacaagccagaagagcccaaagatgaatctccttcttcatggagattgggactgagaaaaactggcagccacaacatgctgagtgaggtggccaattccagggaacctataagggaccgaggctcttccatctatcgctcctcttcaagccctcggatttctgctctactggacaacaaagataaggagagagaaaacaaaagctatattagttcactagcaccccggaagctcaacagcacaagtgatattgaagaaaaggagaacagagaatcagctgttaatctagtgaggagtggctcctatacccggcagctatggagggatgaagcaaaaggaaatgaaatcccacagacaattgctccctccacctatgtatcaacttacttgaaaaggactcctcacaaatcccaggccgacacaacagcagagaaaacagcagacaatgtctcttctagcaccccgctctgtgtgatcaccaatcgccctcttcctagcactgccaatggggttacagctactcctgtgctctccattactggaacagattcctctgtggaagccagggagaagaggaggtcctatctgactcctgtacgggatgaggaagcagagtctttacggaaagcacgctccagacaagctcggcagacacgaaggtctactcaaggtgtcaccctaacagaccttcaagaagcagaaaggacattcagccggtcgagggcagagaggcaagctcaggagcagcctcgtgagaagcccacagacactgaagggcttgaggggagccctgagaagcatgagccctcagcagttccagcaacagaagctggggagggccagcagccctggggcaggagtctggatgaagagcctatctgtcatcgcctgaggtgcccagctcagccagacaaacccaccacgccagcatctccttctacgtcaagaccctcactctacaccagttcccacctgctatggacaaatagattttcagtccctgattctgagagttcagagactaccacaaacactacaactgcaaaggaaatggacaaaaatgagaatgaagaagcagatttggatgagcagtcctctaagaggctgtccatccgagagaggaggcggcccaaggaacgacgaagaggcacaggcatcaatttctggacaaaggatgaggatgaaactgatggctctgaagaggtcaaagaaacgtggcatgaaagactttctaggttggaatcgggaggtagtaatcctacaaccagtgattcttacggtgaccgggcttcagcaagagcccgtcgggaggcccgggaggcccgcctagccaccctgaccagccgtgtagaagaagacagcaacagagattataaaaaactctatgagagtgctctgactgaaaaccaaaaactgaaaacaaaacttcaggaagcccagctagagctagcagatataaagtccaagcttgagaaggtggcccagcagaaacaagaaaagacctctgaccgatcatcagtgctggagatggagaaacgggagaggcgagccttggagcgcaaaatgtcagaaatggaggaagaaatgaaggtgttaacagaactgaaatccgacaaccagaggctgaaagatgaaaatggtgccctcatcagagtcatcagcaaactgtccaagtaggctaggctccagatttatgaggaaagaaagggacagcatttgctgcccccacccctcttttccagtccttgccttccaaccaaaagaaatggatgttttggtggaaggacacttctttctatcaccctcttcagtcacctctatacactctacattttctctgcactttcaatgccctgttcttccaaacccctatcccaagttttatgacagttttaattgaagcatgattgtggtaattcgagccatctggagaatgctctggggagtacaccaggctcagctgtggacccctcaacttcctgctgctcagctactttgtccacattggatttggtccaaacatgtaagacttctaccctaatcagtatccttcagctttttacattaacccagtgtcctctgatataggtgagtcttgtggtagccactccaggatcctgattggggtgccaagagaaacagcaggatgttgaattgatcatcagatgccctctggaatggttagcatccaaggtgacagtgactgcattgaggcgctctattcttcttcacctctcaggaactgacttttattttttctgtcaacacccagtaatctccctaactagttttaacccttattcctccctcatacctagccatttctccaaggcgcaaatggccctggcttcatttattcctttcctttctatccttttatatttttcccttccccaccccctcactcaatggtataaaagctaggacagagcacctgacctcagttgtctttggccattgtgggaagtcattattctggagacaagaaaatcatcactctggtgccttggtggcagcaccactgcctgctccctggaaggtagactatggcataagtgtcagctcattgttttcgtctcccacttatcttcccccttcaaagtgattttctttataagaaaatttgggctctgaatactccattctgcctcacttccttgaccttgttttcctctcttcgccctgacacctgcttctaatgagaaatgaagtcagtgcaaggaggaatgagaggtggggaggggagattgttgagagatggactaggaagtggaagcaggctggaaagacacatatggcgaaagtcaagtatctgaggccacttgcaacattgtgacaaagaagatggaagatagcagcctactgggctgtgagaatagtggtgaatttgattatttccagtggttagatttagcagagagatttactttcttagaaattaataggggaaatggcacttaatagaggtttaatggaatgaagtactttcaacccattgatgagagtcatggaagtttagagtggcaagacccagaggtcattaggtccagctttctattattgtgtcacagggacccctgctaccacagctttcacccatgggcatggtcaggtagcctctggtggctatgcatttattactcaaaagttgggcaactctaataacgagagagtttttcctcatatcagctgaagtctgcctgtggattctccttgtagtccagatctactatctgcaactctttaacggcacttgagatatgtgcagtgggtggtctccccctcagtcttactttgagctgctgttactctagtcctttaagtcattcctcatatggcatgcttttcttacctgtcacatcttggccatcctcctctagacaaaaccagcctttaaaatatcatgtccaggcctggaaagaatacaaatccagtgcaaaattaaaccattagttcttgatgataacctagcattaatacttacagtattttctttttgtaggagttttatcccttggttcacttgagtgtgcaagtcattaaatcctcatcattttagggttgccagtgatattcagtgtttagagtggttcattcccttaatatatactacctctgtctgttaattctttcctaacatgacatgtagctctccatggtcctccctctgaaacaccacatgctgtttaaactagaagctgtaattcaagatcccaattccaccaggtgcagtggctcatgcctgtaatcccagcacttcaggaggccgaggtggacagatcacgaggtcaggagttcgagaccatcctggctaacacggtgaaacccaatctctactaaaaatacaaaaaattagccaggcgtggtggcaggcgcctgtagtcccagctactcaggaggctgaggcaggagaatggcgtgaacccgggaggcggagcttgcagtgagccttgatcacgccactgcactccagcctgggtgacagagcaagactccatctcaaaaaaaataataataataaataaataaaaaatcccaattacagaacaggagatatgtttcctctgacaaaaccccatttttagagtgtataaaattctgtctttcatttccaaccatttttcaagagaagctgctactatcttgagacttcgtattatcatgggagtactgtaagttcagttctcagggaatgctaaattagagtaataagttttatatccttcattctgggagaggaaatcaacataaggtgttgactaattgattatcctggaacattttgaatattggggaaggaagatgatacttctttctcaagaaaagaaaattggattattaggaatacatcttgacccttttccactcaatagaccagggaaaggggttacagagagcctcctcagatctgtttgtgcctttcaaaagtactgggggcagattctcaaaactcttagattggtgttgcatccctgccacttcacatgacccttccatgttaaagctgacttttcttgccagaaagttttccttgtgacaagaaatttgcaagcttttcaatctcaggaatactggattctatagccaagaactcatgaaagtaagtgtaaactatcctaggtaatttcaggtactttctcttatgcaattaattttattaactgatttctggtctatctccagagataaaataccattccttcacaactgtattgtctggaagccccatgagatggtaattataggccttctactagccagcagttctctctggatactggcatcagcaggtctcctttttcttgtgctgcttggacaggtacctactgctggcctcttcagtggccacaatcctcagtcctcacctgctggtttggagactcatgagcaccccaggcagctcaagctgaataaatagctgcagacatggccaacaacatggggctcaggtctgtcacttaacttagagtctttacatgaaatatcagaatgggaaagagaatgttcctggtaaaactctgttttcattaatttgttatttttcaaaaaccgagccacacctttggaagtaatgatttggccattccagagattctggggctaaagtttgtttttccagggctgctgatccttttccagatagctccagagtatgatgaccccagccccatcccaatctctagcgaaagggttatgcaaatctcagggtgttgcctctaaagaatctaaagaatagacatgctttgggcttactcagtgtaccagattctctagtgggccattctcatttgatgttccctagaacctccctgtcttccaactgcaggatgtgtttacttctcttctgggcttcccctggtttctgtcctagttcccaccccaagtttaagaagacttagattcatttattgctatctgaggccactagtgagatttcagatctctcttttgcaacattttacccatttcccttccccaaaccatgtgcttattagatggttccactcaggaagcaaggaagctaaaactcaagttaatggtctgtggatcccacgaaagtgtgtgtaaactactgactgtttctccactagaggcatttaattgagccaaagatgatggaagaagaaactctcaaagccatgtactttgttaggtgtctggatttttggcctgtttgcagcctctcctagccacagacagacactgtctcctctcagagaaaggccagtgtttcggtccaggccactggtgagtgtcggcacccttgaggtgggcatggagtgagcagaagaagcctggagaagagagaactatttaaaagtgttgccagttattcagcttccaggcggctttgcacctccaaaggtgcaaaaaggaaaaagaaagcagaaaggattcagcatttaagcagaaagaaaagggaaattctactctaccagatgagccactggttccactggagcttatcagtgaagtaacactgcaggagccctggtatccttccctcagagatatcatcaggggccctcaaaccccattgtttatgccagcactgaccgcactttaagcacacacttaccaatcagaggtcgtgtaattggcctaaatctaggcccagttattactacaaatcttagtcaccatactctctcgcccaggctggagtgcagtggtgtgatctcagctcactgcaacctccacctcccaggctcaagggatcctctcacctcagctcccgagcagctaggactgcaggtgtgcaccaccatgcccagctaatttttgaatttttttgtagagatggggttttgccatgttgcccaggctggtctgaagctgctgggctcaagcaatccacctggctgggcctcccaaagcgataggattacaggcgtaagggcccacgcccagcctaccatactgattttcaaggcagggtctaacccttcataagatgtgagttcttccaacccaataagcaggcagctttgaggacaaaaaggcaacattaaaagataagaccctagaagtcagaacatctgtattccaaggccaccccttctccttttagtcatgtgactttgggcaggtcaccctccctgtctgtaaaatgaggttggactggataatctttatgtgccctttccttttggcttaaaattctgtgatttattcattcttaggaagatcagcatatttattgggatttctgcttcaaaaattctttctaacctcaaaaatccaagtccagaattttttgttttcttctggatttaaactgtttaatatgagcacatcaaggttgacttctcatcctttttgggaagtgaatttaatattgagggtaattgaatgatgttgcaatggctttccctcctgctggcttggtaagaatattaaagcctgcagaggtggaaattggagctcatggagaaatggatagaaagcaatttgttgcaggcagcctttggacaagttgttttaataggaaatagacctgctgcttcataggtttcctcaaccacctttcctcagctttcttaaaatgggatctacattggctcttcacacccaaatagcagactaatcgtttttctgcttagcaccgtctggttcattgtcttgaactctgccttacagcagcaagaaaattttcctcgacaagaacctcaatctttagttccattgagctccccctctggattttggacttaccagaagtaggaggttctgataccattcaagatggtctttccttcaaagcaggtctgaagaggagactaccaaagcagtgtttacaaacccagagtccacacaaccatattgcatagaacagcacttggctttcacaagcctcctacaggacctggtgtaattggagtgaaagggcagagaccctggaagtggaggtggctgtgtgctgcgatgggaagaaggcagaaggcccaggggctttggacatagagcagggtggaagctgcaagtactgggaaggaagagagtttcacagaaacaaagctttgtcacacagaaatgagttctgtctcactggtgacttcatccctcaggctccagctgagcagagattttaatcagcttccttaatgggtattgacactgctcaggaagcagtagaccctgtcagggacagctattgatcttttgtgttctgattagattggaaaatagatcaacttcattgtagtccaggaactgttggtcacagctactaggaatgaggtgatttctgagggctgagaaaaaacacagaatcttggccagcagccagcagctgcatggtgaaagatgcattcacttctcctttgagagttggggttgagggcaaacatagaacccaggtttggcttacaacccagtgtcccggaagccctccttcgggagaactgtaagtaagaggtgggtgtgtctaaagacaataccattaatgaatgttctggccttacctaaaaaggtttagcaatttggggataactcttggatctagcttatgtgcgttcacatgcacatttgctagcccagagcttttaaaatgaggtctggcatatacttgattacaaatgaaaactcagaaaccaattttatttattaaatcatatcttttgtttttccccctcccttctaatcccccaaaggacctatttgagctgttccccaattcatctgcttattttggaccatgaatctgccagagtgatattttctgttatttctcctccaaatttttccctgatgtttccaataaagatttacttgggtggccccttaaggtgacatcaggatgctcttatgtccttccagaataagcatacacttcactcctctccctttcatctccctctgcattcttaattccttgcttttctcacttggagccgagggtgctttagagaggtggttttccatgaatcagccaagattcctgtagaagttgggtataccaaccaccaccaccaccgccccctattccagtttcaaagctcctcggctatgctaatgtcccctcagagatgaggtttgacttttaggcccgtatgactcctccatagcctggccaaggagaccatgagtagccatgtctggtttactctttatcctgagactgtttatagcttaaaacagaagtgtgtcttcccagcacaaacctaatcaatcagtgtatcagtgcatctggtggcaacagctcagcccattcaaagagcaaggattcaggaaaggcacactgatggtggggagcctcttaagagcctctaatgttctcccaaaaccagagttgagagtcggagtgccagtcgtcggggcccactattcctgaataagggacatgcaagggccagaagtagcttgactctcgcctaaatatctgtgcctttgcctgtcctttctcccactctactgaaacccggaacagattcccgcttgccttctgatgaagagaggttaggtaaagagagtttggaggaaaaaagacaccaggaggcaggctgcggggtaggagagggttctgagaggaggcagcaatccagaatacctccttttctagccagcatcccttgaacttttgaaaggttgtgcctaccactggctggcacaccagggcaatgatttccctgcagaaggaaggaaagaatgtttcacccttgcatccttcttggagaagctacagcctgtgctcagttgagtggttcacactcagactttggctttatggttttccttcctccttgtctttgccctgaccttgatcaacaggggtgaaaagaaccaccctgaggtttccatgcctctcccattttagtggtagcattttgtgtctttactccacccttcaccctagttccaccaaggttcacacaccagatgtaactgtttttcagctgagttgtatggattaacttcagtccactgtaaatacacctgggatggggtggggttggggttgtttagggagaagcagccagacttgctttgtgaactgaatgtatttttatgcaattttgagtggcctttcaaccctaagatgaatggttttgttttactggttgttgttatatagttttgagtattctgtgtttgaaagtttgggaataataatattcacttctatatgatgcctgtaaacacaacagtatttataaatgagtaaataaaactgtgttttaactttg

SEQ ID NO: 24461 - DNA, 2922 bp, Homo sapiens
  source 1..2922: mol_type = unassigned DNA
gcgggcgggcggtgcgatgtccggagaggatggcccggcggctggcccgggggcggcggcggcggctgcccgggagcggcgacgggagcagctgcggcagtggggggcgcgggcgggcgccgagcctggccccggagagcgccgcgcccgcaccgtccgcttcgagcgcgccgccgagttcctggcggcctgtgcgggcggcgacctggacgaggcgcgtctgatgctgcgcgccgccgaccctggccccggcgccgagctcgaccccgccgcgccgccgcccgcccgcgccgtgctggactccaccaacgccgacggtatcagcgccctgcaccaggcctgcattgatgagaacctggaggtggtgcgcttcttggtggagcagggcgccactgtgaaccaggcagacaacgagggctggacgccactgcacgtggccgcctcctgtggctacctagatatcgccaggtacctcctgagccacggggccaacatcgccgccgtcaacagtgacggggacctgcccctggacctggccgagtcggacgccatggaggggctgctgaaggcggagatcgcccgccgaggtgtggatgtggaagcagccaagcgggcagaagaggaattgctccttcatgacacgaggtgctggctgaatgggggcgccatgccagaggcccggcacccccgcacaggcgcctctgccctgcacgtggctgctgccaagggctacattgaggtgatgaggttgctccttcaggctggctacgacccagagctccgggacggggacggctggactcccctgcacgcagcggcacactggggcgtggaggatgcctgccgcctgctggccgagcatggcgggggcatggactcactgacccatgcggggcagcgtccctgtgacctggccgatgaggaagtactgagcctgttggaggaactggcccggaaacaggaggaccttcggaaccaaaaagaagcttcccagagccggggccaggagccccaagcgccctctagcagcaaacacagaaggagctctgtgtgtcgtctgagcagtcgcgagaagatttccctccaggacttgtccaaggagcgccggcctggtggggctggggggccccccatccaggacgaggatgagggggaagaaggtcccaccgaaccaccccctgcagaacccagaaccctcaatggcgtctcctccccgccgcaccccagccctaagagtcccgtgcagcttgaagaggcccccttctccaggcgctttggcctcctgaagacagggagttctggtgccctgggtccccctgaaaggcggacagcggagggagcccctggggctgggctgcagcgctcggcttcctcctcctggctggaagggacctccactcaggccaaggagctccgtcttgccagaattaccccgaccccctccccgaagctgccggagccctctgtcctgtctgaggtcaccaagcctcctccttgcttggagaactcctcgcctccctccaggattccggagcctgaatccccagcgaagccaaacgtccccacagcctccacggcgcccccagcggactcccgggaccgacggaggtcctaccagatgcctgtgcgggatgaggagtcggaatcccagagaaaagctcgctcccgtctcatgcgccagtctcggaggtccacacagggtgtgactcttacagacctgaaggaggcagagaaggctgcagggaaggccccagagtcagagaagccggcgcagagcctggacccttcccgaaggccccgcgtccctggagtggagaactctgacagccctgcccagagagcagaggcgcccgacgggcagggtccgggaccgcaggcggccagggagcaccgcaaggtcggaaaggagtggagggggcctgcggagggggaggaggcggagccggctgaccgcagccaggagtccagcaccctggagggcggcccctcggcccgcaggcagcggtggcagcgggacctcaacccagaacctgagccagaatcggaagagccagacggaggctttaggacgctgtatgcagagctgcgcagggagaacgagcggcttcgcgaggccctgaccgagaccacgctgcggctggcgcagctcaaggtggagctggagcgggccacgcagaggcaagaacgcttcgctgagaggccagccctcctggaactggagagattcgagcgcagggccctggaacgcaaggccgcagagctggaggaggagctgaaggccctgtctgacctccgcgctgacaaccagcgcctcaaggatgagaatgcagcgttgatccgcgtcatcagcaaactctccaagtgacccggagggactttcccgcacccgtatttatacagctgcttctgccacacgcaccccttcccccgtgtgaacacgagtgacagggctccgggggaagtctcagagaagccatagcccccctgggacctccggactgggaggggagcagagtccccaggagccgagggggccacccgaggccaggatggaggtgggaggccgagccaagcagggggacgttgccagaggggaccagggccagagacgggaccaggaaggaactgaggaccaagaagtgcaaggatcagtagccaggaccagagtggccgcctggaggtccccatctcacgtgtgatgccaccccgtcacccctcccctcctgagcagggatccaagaatgtgccaagagtcccgccagcctcagccaggtgggcctgtatatagggtccatgtgcaatagggagggacgtcttctattttttgctgccccctccccgcccactgtctggggcagggggagaaggtattttcgagataaagcacaggcaccacaaataaaagtcgtgaagttgccactc

SEQ ID NO: 24462 - DNA, 2733 bp, Homo sapiens
  source 1..2733: mol_type = unassigned DNA
gcgggcgggcggtgcgatgtccggagaggatggcccggcggctggcccgggggcggcggcggcggctgcccgggagcggcgacgggagcagctgcggcagtggggggcgcgggcgggcgccgagcctggccccggagagcgccgcgcccgcaccgtccgcttcgagcgcgccgccgagttcctggcggcctgtgcgggcggcgacctggacgaggcgcgtctgatgctgcgcgccgccgaccctggccccggcgccgagctcgaccccgccgcgccgccgcccgcccgcgccgtgctggactccaccaacgccgacggtatcagcgccctgcaccaggcctgcattgatgagaacctggaggtggtgcgcttcttggtggagcagggcgccactgtgaaccaggcagacaacgagggctggacgccactgcacgtggccgcctcctgtggctacctagatatcgccaggtacctcctgagccacggggccaacatcgccgccgtcaacagtgacggggacctgcccctggacctggccgagtcggacgccatggaggggctgctgaaggcggagatcgcccgccgaggtgtggatgtggaagcagccaagcgggcagaagaggaattgctccttcatgacacgaggtgctggctgaatgggggcgccatgccagaggcccggcacccccgcacaggcgcctctgccctgcacgtggctgctgccaagggctacattgaggtgatgaggttgctccttcaggctggctacgacccagagctccgggacggggacggctggactcccctgcacgcagcggcacactggggcgtggaggatgcctgccgcctgctggccgagcatggcgggggcatggactcactgacccatgcggggcagcgtccctgtgacctggccgatgaggaagtactgagcctgttggaggaactggcccggaaacaggaggaccttcggaaccaaaaagaagcttcccagagccggggccaggagccccaagcgccctctagcagcaaacacagaaggagctctgtgtgtcgtctgagcagtcgcgagaagatttccctccaggacttgtccaaggagcgccggcctggtggggctggggggccccccatccaggacgaggatgagggggaagaaggtcccaccgaaccaccccctgcagaacccagaaccctcaatggcgtctcctccccgccgcaccccagccctaagagtcccgtgcagcttgaagaggcccccttctccaggcgctttggcctcctgaagacagggagttctggtgccctgggtccccctgaaaggcggacagcggagggagcccctggggctgggctgcagcgctcggcttcctcctcctggctggaagggacctccactcaggccaaggagctccgtcttgccagaattaccccgaccccctccccgaagctgccggagccctctgtcctgtctgaggtcaccaagcctcctccttgcttggagaactcctcgcctccctccaggattccggagcctgaatccccagcgaagccaaacgtccccacagcctccacggcgcccccagcggactcccgggaccgacggaggtcctaccagatgcctgtgcgggatgaggagtcggaatcccagagaaaagctcgctcccgtctcatgcgccagtctcggaggtccacacagggtgtgactcttacagacctgaaggaggcagagaaggctggggaggaggcggagccggctgaccgcagccaggagtccagcaccctggagggcggcccctcggcccgcaggcagcggtggcagcgggacctcaacccagaacctgagccagaatcggaagagccagacggaggctttaggacgctgtatgcagagctgcgcagggagaacgagcggcttcgcgaggccctgaccgagaccacgctgcggctggcgcagctcaaggtggagctggagcgggccacgcagaggcaagaacgcttcgctgagaggccagccctcctggaactggagagattcgagcgcagggccctggaacgcaaggccgcagagctggaggaggagctgaaggccctgtctgacctccgcgctgacaaccagcgcctcaaggatgagaatgcagcgttgatccgcgtcatcagcaaactctccaagtgacccggagggactttcccgcacccgtatttatacagctgcttctgccacacgcaccccttcccccgtgtgaacacgagtgacagggctccgggggaagtctcagagaagccatagcccccctgggacctccggactgggaggggagcagagtccccaggagccgagggggccacccgaggccaggatggaggtgggaggccgagccaagcagggggacgttgccagaggggaccagggccagagacgggaccaggaaggaactgaggaccaagaagtgcaaggatcagtagccaggaccagagtggccgcctggaggtccccatctcacgtgtgatgccaccccgtcacccctcccctcctgagcagggatccaagaatgtgccaagagtcccgccagcctcagccaggtgggcctgtatatagggtccatgtgcaatagggagggacgtcttctattttttgctgccccctccccgcccactgtctggggcagggggagaaggtattttcgagataaagcacaggcaccacaaataaaagtcgtgaagttgccactc

SEQ ID NO: 24463 - DNA, 2363 bp, Homo sapiens
  source 1..2363: mol_type = unassigned DNA
actccttcctcagctccagttcaggtcccggagcccacccagtgtccacaaggcctggggcaagtccctcctccgaccccctggacttcggcttttgtccccccaagttttggacccctaagggaagaatgagaaacggtggcccgtgtcagcccctggctgcagggccccgtgcagagggggcctcagtgaactggagtgtgacagcctggggcccaggcacacaggcctgcattgatgagaacctggaggtggtgcgcttcttggtggagcagggcgccactgtgaaccaggcagacaacgagggctggacgccactgcacgtggccgcctcctgtggctacctagatatcgccaggtacctcctgagccacggggccaacatcgccgccgtcaacagtgacggggacctgcccctggacctggccgagtcggacgccatggaggggctgctgaaggcggagatcgcccgccgaggtgtggatgtggaagcagccaagcgggcagaagaggaattgctccttcatgacacgaggtgctggctgaatgggggcgccatgccagaggcccggcacccccgcacaggcgcctctgccctgcacgtggctgctgccaagggctacattgaggtgatgaggttgctccttcaggctggctacgacccagagctccgggacggggacggctggactcccctgcacgcagcggcacactggggcgtggaggatgcctgccgcctgctggccgagcatggcgggggcatggactcactgacccatgcggggcagcgtccctgtgacctggccgatgaggaagtactgagcctgttggaggaactggcccggaaacaggaggaccttcggaaccaaaaagaagcttcccagagccggggccaggagccccaagcgccctctagcagcaaacacagaaggagctctgtgtgtcgtctgagcagtcgcgagaagatttccctccaggacttgtccaaggagcgccggcctggtggggctggggggccccccatccaggacgaggatgagggggaagaaggtcccaccgaaccaccccctgcagaacccagaaccctcaatggcgtctcctccccgccgcaccccagccctaagagtcccgtgcagcttgaagaggcccccttctccaggcgctttggcctcctgaagacagggagttctggtgccctgggtccccctgaaaggcggacagcggagggagcccctggggctgggctgcagcgctcggcttcctcctcctggctggaagggacctccactcaggccaaggagctccgtcttgccagaattaccccgaccccctccccgaagctgccggagccctctgtcctgtctgaggtcaccaagcctcctccttgcttggagaactcctcgcctccctccaggattccggagcctgaatccccagcgaagccaaacgtccccacagcctccacggcgcccccagcggactcccgggaccgacggaggtcctaccagatgcctgtgcgggatgaggagtcggaatcccagagaaaagctcgctcccgtctcatgcgccagtctcggaggtccacacagggtgtgactcttacagacctgaaggaggcagagaaggctgcagggaaggccccagagtcagagaagccggcgcagagcctggacccttcccgaaggccccgcgtccctggagtggagaactctgacagccctgcccagagagaggcgcccgacgggcagggtccgggaccgcaggcggccagggagcaccgcaaggtcggaaaggagtggagggggcctgcggagggggaggaggcggagccggctgaccgcagccaggagtccagcaccctggagggcggcccctcggcccgcaggcagcggtggcagcgggacctcaacccagaacctgagccagaatcggaagagccagacggaggctttaggacgctgtatgcagagctgcgcagggagaacgagcggcttcgcgaggccctgaccgagaccacgctgcggctggcgcagctcaaggtggagctggagcgggccacgcagaggcaagaacgcttcgctgagaggccagccctcctggaactggagagattcgagcgcagggccctggaacgcaaggccgcagagctggaggaggagctgaaggccctgtctgacctccgcgctgacaaccagcgcctcaaggatgagaatgcagcgttgatccgcgtcatcagcaaactctccaagtgacccggagggactttcccgcacccgtatttatacagctgcttctgccacacgcaccccttcccccgtgtgaacacgagtgacagggctccgggggaagtctcagagaagcca

SEQ ID NO: 24464 - DNA, 5227 bp, Homo sapiens
  source 1..5227: mol_type = unassigned DNA
agccggcctacccagtccttccggtatcgcgttgctcaggggcttttcaaccctctgtcagtcggaaaaccatcgccgaggccgtggggggactcctatccatggtgttgaagcgtcgagccgactagggaacctccttccccgccaggatggaagtcgcatcagtcgccgcctattgcgcgggctgttcttccctgtgttctgccgcccgctgccgcattcgctgccctctgtggcttttctgctggctcgaagatcggcctggagcagcgacgccaccgctgggcaaggccgagactctgtaggcttcctccgaatcccgtcgacctccagccgctgagcgccgcggccctacctgagagactgtcaagaaaaaggagatggagccggggacaggcggatcgcggaaacggcttggccctcgggcgggcttccggttctggccaccctttttccctcggcgatcgcaagcaggctcttctaagttcccgacgcctcttggcccggaaaactccgggaaccccacactgctttcctctgcccagcccgagactcgggtcagttactggacgaaactgctctcccagctccttgcgccgctccccggattgcttcagaaggtgctaatttggagccaacttttcggtggaatgtttccgaccagatggctagattttgctggagtctacagcgccctgagagccctgaagggacgggagaaaccagccgcccccacagcgcagaaatctttgagttcgctgcagctcgactcctcagacccctcggtcaccagtccccttgattggctagaggaggggatccactggcaatactcgcccccagacctaaaattggagcttaaggccaagggaagtgctttggaccctgcagcacaggcttttctcttagagcagcagctgtggggagtggagctgttgcccagtagccttcaatcccgtctgtactctaaccgggaacttggctcttcgccctctgggcctctaaacattcaacgcatagacaatttcagtgtggtatcctatttgctgaacccttcctacctggactgctttcctaggctagaagtcagctatcagaacagtgatggaaatagcgaggtagtcggcttccagacactaaccccagagagcagctgcctgagagaggaccattgtcatccccagccgctgagtgcagaactcattccggcctcgtggcagggatgtccacctctttctacggaaggcctaccagaaattcaccatcttcgcatgaaacggctggaattccttcaacaggctaacaaggggcaagatttacccacccctgaccaggataatggctaccacagcctggaggaggaacacagccttctccggatggatccaaaacactgcagagataacccaacacagtttgttcctgctgctggagacattcctggaaacacccaggaatccactgaagaaaaaatagaattattaactacagaggttccacttgctttggaagaagagagcccttctgagggctgtccatctagtgagatacctatggaaaaggagcctggagagggccgaataagtgtagttgattactcatacctagaaggtgaccttcccatttctgccagaccagcttgtagtaacaaactgatagattatattttgggaggtgcatccagtgacctggaaacaagttctgatccagaaggtgaggattgggatgaggaagctgaggatgatggttttgatagtgatagctcactgtcagactcagaccttgaacaagaccctgaagggcttcacctttggaactctttctgcagtgtagatccttataatccccagaactttacagcaacaattcagactgctgccagaattgttcctgaagagccttctgattcagagaaggatttgtctggcaagtctgatctagagaattcctcccagtctggaagccttcctgagacccctgagcatagttctggggaggaagatgactgggaatctagtgcagatgaagcagagagtctcaaactgtggaactcattctgtaattctgatgacccctacaaccctttaaattttaaggctccttttcaaacatcaggggaaaatgagaaaggctgtcgtgactcaaagaccccatctgagtccattgtggccatttctgagtgtcacaccttactttcttgtaaggtgcagctgttggggagccaagaaagtgaatgtccagactcggtacagcgtgacgttctttctggaggaagacacacacatgtcaaaagaaaaaaggtaaccttccttgaagaagttactgagtattatataagtggtgatgaggatcgcaaaggaccatgggaagaatttgcaagggatggatgcaggttccagaaacgaattcaagaaacagaagatgctattggatattgcttgacatttgaacacagagaaagaatgtttaatagactccagggaacatgcttcaaaggacttaatgttctcaagcaatgttgagttggcagcctgtagtcctagctagcatacactacctcttacctgagaggtgtcttttaaaaacaaatcttggcagctgtcctttgacatttttttttttagaggaaatgtaacttggatctagtttaatttttttttttgcaacatatcccactcagaaacattcaggtttgaagccagccctgataatgaaggatgaactagtgtgatttctaatcctcccttttttgatttagttggatgtgcttttaaatgtcctttgcctgcatgaggtggaaaggggacctttttgagttgtcattttgcactttcaaaacttattttcttggaaaacaatatttatagggcttaaagcccattttcatttctaatctaaattatgtgtgcctatctgaaaactttgggctctttcttgtttctttcccaaaattcagaagttaatgggcttttatgtttttctatattttttttatttcaatgatttggcctgtctatgttaggctaaaaaataaccttgtgtatgctaccaacttaaagtgcattattttgtgtcacttttttttttcttgtaaaaatgacttggattgaaaatatgtggtagcctttttatttctacattaagttctacctaggatatttccaaggactgccacaaaacccatatgtgcagtactttactactttgggaaagctgcatctttctaccacattttaacatctaatatatttaatttctttgaagagggttctgtgtacgttattgtagttcccagtttaatatagttctttgtatctcttaacaggttgaagttattgcaaaacactctggaaagtaataattacatcataatcatttattttttaaacttaaaagcctagaaatttcctagaaagaaaataggagacatctcagagcaatttggttttggtgtatatgttctcaacagaaaaccagtgttaatgaatatcatgcctcagcactgtcacttttaaaacctgtcaggatcccactgtaaaattggaaatgggcagttctgaattttcacgtttgaaatgtaaaatataaacttcagtcaatatccaggtttattgtgtcctactatttaataatgagagaagtaatggcaaggcctttactttcaggaaaggatagaagtatagattaatgactggaaagttttaatatatttagcccaaaggttactttgaattgaagtctttgcattgactgtttgtgtttggtttatttgtttagctttacaaggtacacataagttaggttgaggggttgttaacccttccgtggtctgctttcattccgtgtgcttcctgtcacaggtaatggaaaacataagtagaataggtgacctcttagttttgaacttatttaagtgtggggatgaatttttcatcagaagtgcttacagggttactacctcagtttacaatctacctggtcattattttatttctatccagttctaagaactgcctccactgtttatatattcataattaaacacattgagaatgcaacactataaaagctggtcaaatttttgcagagcccttattctgtgtgttttttgtttttttcttttttttttgagacagagtctcgttcggtcccccagcttggagtgcagtggcgcgatctcggctcactgcaacctccgcctcctgggttcacgcgattctcctgcctcagcctcccgagtagctgggattacaggcacacaccaccacgcccggctaattttttgtgtctttttagtagagacggggtttcgctatgttggccagactggtcttgaactgctgacctcgtgatccgcccgcctcggcctctcaaagtgctgggattctgtgtgttttgtgcacctccactttaggtaatcatagggagcacatttacaggatggtctaataacatgaaaacaggctagtttcaagcaacagcaatgtcggttggaaagcaggcgtcatttgccttgaaaaaagccttttgacaacatacaggcattcttttaaaaccaggctgaaacattttatttccgagacttaacgttgtgtttcctgtttcttaaacctagcacctctgtgtatttgaaaataatgagacatctttcattggattttggaaaattgttccccatgggattctaacctcactaccaaatgagtgaaagcttgattaagagttcttccatatactagcctccttggaagaagtgatcagaaggtgataagaaggacagaaaggactattttaaagttggactgaaggagaaaaaagcaaaattcttgtttcatcccaattctagttagaacaaagttaaacccccgtaatcttaaagagaaaatctttggaggttttaattaaacattttatacatttaaagtcttgttaatggtgctttaagtgtcaatgtagcatgtaaaaggctttgtacagacaggtaaaagttccatttctgagtgatgaaatgtaacacttcttcatctttaacttgaaatcaaaactatcagattttatttttgtataatttaaggaaggtaaagttaggggactagaagactctaaattggcttctacagatcaataatttaaatgtaactagttgggattttatagttaaaattatatttgtgtatataacataactaatctgtaaattgtaataaatatatttgcaattattaaa

SEQ ID NO: 24465 - DNA, 2245 bp, Homo sapiens
  source 1..2245: mol_type = unassigned DNA
attttgggcttcgcttccaccgcaccagccggcctacccagtccttccggtatcgcgttgctcaggggcttttcaaccctctgtcagtcggaaaaccatcgccgaggccgtggggggactcctatccatggtgttgaagcgtcgagccgactagggaacctccttccccgctccttgcgccgctccccggattgcttcagaaggtgctaatttggagccaacttttcggtggaatgtttccgaccagatggctagattttgctggagtctacagcgccctgagagccctgaagggacgggagaaaccagccgcccccacagcgcagaaatctttgagttcgctgcagctcgactcctcagacccctcggtcaccagtccccttgattggctagaggaggggatccactggcaatactcgcccccagacctaaaattggagcttaaggccaagggaagtgctttggaccctgcagcacaggcttttctcttagagcagcagctgtggggagtggagctgttgcccagtagccttcaatcccgtctgtactctaaccgggaacttggctcttcgccctctgggcctctaaacattcaacgcatagacaatttcagtgtggtatcctatttgctgaacccttcctacctggactgctttcctaggctagaagtcagctatcagaacagtgatggaaatagcgaggtagtcggcttccagacactaaccccagagagcagctgcctgagagaggaccattgtcatccccagccgctgagtgcagaactcattccggcctcgtggcagggatgtccacctctttctacggaaggcctaccagaaattcaccatcttcgcatgaaacggctggaattccttcaacaggctaacaaggggcaagatttacccacccctgaccaggataatggctaccacagcctggaggaggaacacagccttctccggatggatccaaaacactgcagagataacccaacacagtttgttcctgctgctggagacattcctggaaacacccaggaatccactgaagaaaaaatagaattattaactacagaggttccacttgctttggaagaagagagcccttctgagggctgtccatctagtgagatacctatggaaaaggagcctggagagggccgaataagtgtagttgattactcatacctagaaggtgaccttcccatttctgccagaccagcttgtagtaacaaactgatagattatattttgggaggtgcatccagtgacctggaaacaagttctgatccagaaggtgaggattgggatgaggaagctgaggatgatggttttgatagtgatagctcactgtcagactcagaccttgaacaagaccctgaagggcttcacctttggaactctttctgcagtgtagatccttataatccccagaactttacagcaacaattcagactgctgccagaattgttcctgaagagccttctgattcagagaaggatttgtctggcaagtctgatctagagaattcctcccagtctggaagccttcctgagacccctgagcatagttctggggaggaagatgactgggaatctagtgcagatgaagcagagagtctcaaactgtggaactcattctgtaattctgatgacccctacaaccctttaaattttaaggctccttttcaaacatcaggggaaaatgagaaaggctgtcgtgactcaaagaccccatctgagtccattgtggccatttctgagtgtcacaccttactttcttgtaaggtgcagctgttggggagccaagaaagtgaatgtccagactcggtacagcgtgacgttctttctggaggaagacacacacatgtcaaaagaaaaaaggtaaccttccttgaagaagttactgagtattatataagtggtgatgaggatcgcaaaggaccatgggaagaatttgcaagggatggatgcaggttccagaaacgaattcaagaaacagaagatgctattggatattgcttgacatttgaacacagagaaagaatgtttaatagactccagggaacatgcttcaaaggacttaatgttctcaagcaatgttgagttggcagcctgtagtcctagctagcatacactacctcttacctgagaggtgtcttttaaaaacaaatcttggcagctgtcctttgacatttttttttttagaggaaatgtaacttggatctagtttaattttttttttt

SEQ ID NO: 24466 - DNA, 6251 bp, Homo sapiens
  source 1..6251: mol_type = unassigned DNA
ctctgtcgccgctggagcagctgcggctcggggacccacagacacagccggggtcgggagccgcccggggcagggctcgggagagcgggccacaccatgaggccccagccccaccagaggccccgcgctgccctggcccccggtgcaccgtgctagcccccagccagggcgttggggagggcggtggccatggccagtcacgtggacctgctgacggagctgcagctgctggagaaggtgcccacgctggagcggctgcgggctgcccagaagcgccgggcccagcagctgaagaaatgggcacagtacgagcaggacttgcagcaccgcaagcgaaagcatgagcggaagcgcagcacgggcggccgccgcaagaaagtgtccttcgaggccagcgtggccctgctggaggcctcgctgaggaacgacgccgaggaagtacgctacttcctgaagaataaggtcagccctgatttgtgcaatgaggacggactcacagccctacaccagtgctgcatcgacaactttgaggaaattgtgaagctgctcctctcccatggtgccaatgtgaacgccaaggacaacgagctgtggacacctctccatgctgcagccacctgcggccacatcaacctggtgaagatcctcgttcagtatggggccgacttgcttgctgtcaactcggatgggaacatgccatatgacctctgcgaggatgaacccaccctggatgtcatcgagacctgcatggcataccagggcatcacccaagagaaaatcaacgagatgcgggtggctcctgagcagcagatgattgcggacatccactgcatgatcgcagcgggccaggacctggactggatagatgcccagggtgccacactgctgcacatagctggagccaatggatacctgcgggcagctgagctcctcctggaccatggagtgcgtgtggatgtgaaggactgggatggctgggagcccctgcatgcagctgccttctggggacagatgcagatggcagagctattggtgtcccatggagctagtctcagtgcaaggacatccatggatgagatgccaatagacctgtgcgaggaggaagagttcaaggtcctgctgctggagctaaaacacaagcatgatgtgatcatgaagtcacagctgaggcacaagtcatccttgagccggaggacctccagcgcaggcagccgtgggaaggtggtgcggcgagccagcctgtcggacaggaccaacctgtataggaaggagtatgagggagaggccatcctgtggcagcggagtgcagctgaggatcagcggacctccacctacaacggggacatcagggagaccaggacagaccaagagaataaggaccctaaccccaggctggagaagcccgtgctactctccgaatttcctaccaagatcccacgaggtgaactggacatgcctgttgagaatggcctccgggctccggtcagtgcctaccagtatgcgctggccaacggggatgtctggaaggtgcatgaggtgcctgactacagcatggcctatggcaaccctggcgtggccgacgccaccccgccctggagcagctacaaggaacagagccctcagacgcttctggagctgaagcggcagcgggctgcagccaagctgctcagccaccccttccttagcacacacctgggcagcagcatggccaggacgggcgagagtagcagtgaaggcaaggcccccttgatcggaggcagaacttcaccgtacagcagcaatgggacctcggtatattacacggtcaccagcggagatcccccactcttaaagttcaaggcccccatagaggagatggaggagaaggtgcatggctgttgccgtatctcctagtctccgtgtgatggaggagggagatgcctggggaggggctcctggaatccaggccagcccaacagccctggctggggaggtgtcagggcagctggggagaggtgggctctgcttttcagaggaactcagaccccagccctcagctggctgcccatagcatcccatgtcccacgtcccgtggttctgcttcctgctgcatcgtctgccatctgacacaaggcctgtcgtggcctcctggttcactctgctgtctgatcttgggagggtgggcttgagatcccagctctattcttggtataaaggcttctccggatcagtacatgcatgtcacattaacacacacacacacacacatatacacacacacacaagctcgatcagtgtgtgtaggaatgacatacctgggctcaggggaagcaagggggcttagaatttgtggggtattcccaaaaggatggaagttaagactcagagtctcattaccactgccaatgtggttttagcaggggaggggacctgctaagctgagacccatagtcctgctcagagttatcccaaagtctgagccaccagccacacctgacaggggtgagaagtcctcgctgtgttcagagggagccaggaatctacatgggtagatgagatagacacagacctgctccccgcagccttgttgagagccacacttctgcccatgccaggagccagctgtgtgaccatccaggggtggagggggaaaaccaggcaatttcgttcctggaatcaaccaaatcatgttttcctcttggatggaagtgtcaaaggcagaagggtgtgggagggggacaaggtcagtatttaccaaagtgtatctgattttaaaaattcctttagtctgtaaaactcctagagggagggaggtaactgaattcacttctttttgtggatcgtatcaaggtcactgggttttactggctggtgctgggaaaatgaagctaagtgaggagcttccattggaatgcttttccagggagagaggccagttaatttaaaaaaaacagtcgctagttaacagcgacagagcccagcaccctggggtctttgtgaatatccagactgtttcagcccagcccatctcagccaaccctccttagactgagctgtcagagcaagcaattaggggccagcctgcctccacctcccacccccttccacctccatcagtcatgtgtgcagagtcagtgctcgggatcccgggcccagcttttgcctttttggggatgcttggtgagacagatttgccagtcagcccttttgagttcccgcctcacccaggggctcccagcctgcacttgcaggagtggtgatgccccaagtctgcgaatccagggtgcacgtggtcaatatcccctcctgcattcaggagagccatggtagggctagagttgggtcttgcccagccctgcagtttcatagtcccagccttcctggtgctggggagggaggactgtgaatggctgttctcccctcactgctgagtctcccaggaccccctttggagatgcccatggcatgggcactgcccacaggctcagccagaacctcttggtgtacccgataagctgcaggttatcccttgctctgtgcgccttttatttgtccttaaactacctccttagagctctgaaggggtctcctagttccagattttaatttggggaacagatctgggttctttttaaccctcttctttctcagtctatgagaaacttgccctgaggggcacctgggctaggggcttgggactggaagaccatccccgccttgtgccacaactttggtcatgggatctgctctttgtcattcttagccccctactgtggcccccatagccccataacccagagagggagctggacttcagggagcctgagtgatgctttcccaggagcagggcagctggctggaccagaaagtagagggcccatgggagtgactgcacccttggtggctgctggaaggggagaggttctcagcatcaggccacctccaccccaatgccaggatagatgtattctagagtaggggtggaggcggcccaggaggctgaagacaggtgcacagatgcttcccacgaccttgccatttggggtgggctcttcaacatctcaggctgtggctggaacaggacaggatgatctaaaacacacgtaccattggctgtaaaacagtatgagcccagactgacgctgaaatccctcatgagccaaccttagctacaaggtagggagttctgagggaagccgcgtgctcctcaggagagagctgtttaggttttccgatctttttgctcaggggccaaacactgaaggcacgtactgcccaacccactgagcgcctgaggccattccctccttttccgcatgcctcctgcctcctgggctattcctctccacccagaaggctgggaatcccagctgattccctgacaggagccgacttcacacacaggtgactctcaggcattggctcatgttttcagccagggataaaccatcccttcttggggctttaagtccctggggagctttccctgtaggtctcctgggtgttgagagacaagttggagaccaacctccaatgaatgagccgcggtcattcattaattcactcacgtaatttactgagtagctgcaacatgccagcctctacgttaggttctgcggataaaggaggaataagacagagtcaggagaactgttccttgtggtttccgtcccttggggaccacaggcatcagcagtcccattcaagtcacctgaggcaaagtgtctgcatcttcgtccagcgaccctttgcttttcggctcctagaatccttagagtctgaattcctttagctgggaacagctgtcatggtcacccctggataacatttgccaccaagtatagatgctggatcttgggttccaggcagacatcatccaggtccatctggaactttcagtgatagctgccttcagccagcatctttgggggactctataatagcagcttgagatcagtgtctagaagactgttctgcaatttgctgccaaatgcatctcaggtttttaaagtcattgtttcttgctcatggtggctcatttattacatagtcccctcaccccactaatggataatgggaggaaaagttgctgcttccttcagcatcaaagcctttccttgggaatctgcctccctccatggcaggggtggattcgggagctgggagtaaccaggcaaagtcaaccagatgcctagctcctgctgagacccaggtcctatggcagctcctcattagattaaaggagaccacttccaaagcaggtgctgcatggctcaccatcatatgccccaaacaactgaaagttggcggttatcaccagactgtgagtttctggcaagtagcttggggaagctgaataaactctaggcccagggctactaaagacttcaggatagaattctccatcaaatatacagcataagtaaaactgctctgcactgtttaatccatttccaaggggcttagaaaagctaacaagggtgtgtcccctgtcctgccccaccggtttgctggctttgtaataacataagaccattgtggttgttggtgtcagataccttcccatcctgagctctctcacctacctgctctctctcctagagcaggatactggggtacttttaagaagggtgctccttttaagatgcccagaaaagctgtatttaactcttgctatttgtaacttggggatggtctcccctgccccagggcacataagagcaaaggctccaatggtcagtggatgactctgcaaaagtgaccccctgtgccagaagctatagccctctccccaacaggtctctcttgttggccagagggcctgcttcccatgggcattgcaagtgccaccgtgcggggcctggctctgcacacccaggaaaagtctgcagacccccagccctccgcaataattcaccagaccagaagccactggtgtacagagaacacttaaaaaaatgtattttatgtgaaaaaaaattaaaactctgtatactgtatcagcagctttgtgtaaaaatggcaatcaagagagtctaatatatttaaaacttttttaaaaaaaatcttcgcagatctttgatatcgtactgaggtaacttccacgtagccccttgccacgcggcaccggtgggccttgggtccaaaactgtggctcagccacatcccaaagggggcacatgtccctggagttgcttccagctgccaaggcctgtgacagaattcgctgttaagagtttttaattaaaattattaaattccttttaataaca

SEQ ID NO: 24467 - DNA, 6125 bp, Homo sapiens
  source 1..6125: mol_type = unassigned DNA
ctctgtcgccgctggagcagctgcggctcggggacccacagacacagccggggtcgggagccgcccggggcagggctcgggagagcgggccacaccatgaggccccagccccaccagaggccccgcgctgccctggcccccggtgcaccgtgctagcccccagccagggcgttggggagggcggtggccatggccagtcacgtggacctgctgacggagctgcagctgctggagaaggtgcccacgctggagcggctgcgggctgcccagaagcgccgggcccagcagctgaagaaatgggcacagtacgagcaggacttgcagcaccgcaagcgaaagcatgagcggaagcgcagcacgggcggccgccgcaagaaagtgtccttcgaggccagcgtggccctgctggaggcctcgctgaggaacgacgccgaggaagtacgctacttcctgaagaataaggtcagccctgatttgtgcaatgaggacggactcacagccctacaccagtgctgcatcgacaactttgaggaaattgtgaagctgctcctctcccatggtgccaatgtgaacgccaaggacaacgagctgtggacacctctccatgctgcagccacctgcggccacatcaacctggtgaagatcctcgttcagtatggggccgacttgcttgctgtcaactcggatgggaacatgccatatgacctctgcgaggatgaacccaccctggatgtcatcgagacctgcatggcataccagggcatcacccaagagaaaatcaacgagatgcgggtggctcctgagcagcagatgattgcggacatccactgcatgatcgcagcgggccaggacctggactggatagatgcccagggtgccacactgatgcagatggcagagctattggtgtcccatggagctagtctcagtgcaaggacatccatggatgagatgccaatagacctgtgcgaggaggaagagttcaaggtcctgctgctggagctaaaacacaagcatgatgtgatcatgaagtcacagctgaggcacaagtcatccttgagccggaggacctccagcgcaggcagccgtgggaaggtggtgcggcgagccagcctgtcggacaggaccaacctgtataggaaggagtatgagggagaggccatcctgtggcagcggagtgcagctgaggatcagcggacctccacctacaacggggacatcagggagaccaggacagaccaagagaataaggaccctaaccccaggctggagaagcccgtgctactctccgaatttcctaccaagatcccacgaggtgaactggacatgcctgttgagaatggcctccgggctccggtcagtgcctaccagtatgcgctggccaacggggatgtctggaaggtgcatgaggtgcctgactacagcatggcctatggcaaccctggcgtggccgacgccaccccgccctggagcagctacaaggaacagagccctcagacgcttctggagctgaagcggcagcgggctgcagccaagctgctcagccaccccttccttagcacacacctgggcagcagcatggccaggacgggcgagagtagcagtgaaggcaaggcccccttgatcggaggcagaacttcaccgtacagcagcaatgggacctcggtatattacacggtcaccagcggagatcccccactcttaaagttcaaggcccccatagaggagatggaggagaaggtgcatggctgttgccgtatctcctagtctccgtgtgatggaggagggagatgcctggggaggggctcctggaatccaggccagcccaacagccctggctggggaggtgtcagggcagctggggagaggtgggctctgcttttcagaggaactcagaccccagccctcagctggctgcccatagcatcccatgtcccacgtcccgtggttctgcttcctgctgcatcgtctgccatctgacacaaggcctgtcgtggcctcctggttcactctgctgtctgatcttgggagggtgggcttgagatcccagctctattcttggtataaaggcttctccggatcagtacatgcatgtcacattaacacacacacacacacacatatacacacacacacaagctcgatcagtgtgtgtaggaatgacatacctgggctcaggggaagcaagggggcttagaatttgtggggtattcccaaaaggatggaagttaagactcagagtctcattaccactgccaatgtggttttagcaggggaggggacctgctaagctgagacccatagtcctgctcagagttatcccaaagtctgagccaccagccacacctgacaggggtgagaagtcctcgctgtgttcagagggagccaggaatctacatgggtagatgagatagacacagacctgctccccgcagccttgttgagagccacacttctgcccatgccaggagccagctgtgtgaccatccaggggtggagggggaaaaccaggcaatttcgttcctggaatcaaccaaatcatgttttcctcttggatggaagtgtcaaaggcagaagggtgtgggagggggacaaggtcagtatttaccaaagtgtatctgattttaaaaattcctttagtctgtaaaactcctagagggagggaggtaactgaattcacttctttttgtggatcgtatcaaggtcactgggttttactggctggtgctgggaaaatgaagctaagtgaggagcttccattggaatgcttttccagggagagaggccagttaatttaaaaaaaacagtcgctagttaacagcgacagagcccagcaccctggggtctttgtgaatatccagactgtttcagcccagcccatctcagccaaccctccttagactgagctgtcagagcaagcaattaggggccagcctgcctccacctcccacccccttccacctccatcagtcatgtgtgcagagtcagtgctcgggatcccgggcccagcttttgcctttttggggatgcttggtgagacagatttgccagtcagcccttttgagttcccgcctcacccaggggctcccagcctgcacttgcaggagtggtgatgccccaagtctgcgaatccagggtgcacgtggtcaatatcccctcctgcattcaggagagccatggtagggctagagttgggtcttgcccagccctgcagtttcatagtcccagccttcctggtgctggggagggaggactgtgaatggctgttctcccctcactgctgagtctcccaggaccccctttggagatgcccatggcatgggcactgcccacaggctcagccagaacctcttggtgtacccgataagctgcaggttatcccttgctctgtgcgccttttatttgtccttaaactacctccttagagctctgaaggggtctcctagttccagattttaatttggggaacagatctgggttctttttaaccctcttctttctcagtctatgagaaacttgccctgaggggcacctgggctaggggcttgggactggaagaccatccccgccttgtgccacaactttggtcatgggatctgctctttgtcattcttagccccctactgtggcccccatagccccataacccagagagggagctggacttcagggagcctgagtgatgctttcccaggagcagggcagctggctggaccagaaagtagagggcccatgggagtgactgcacccttggtggctgctggaaggggagaggttctcagcatcaggccacctccaccccaatgccaggatagatgtattctagagtaggggtggaggcggcccaggaggctgaagacaggtgcacagatgcttcccacgaccttgccatttggggtgggctcttcaacatctcaggctgtggctggaacaggacaggatgatctaaaacacacgtaccattggctgtaaaacagtatgagcccagactgacgctgaaatccctcatgagccaaccttagctacaaggtagggagttctgagggaagccgcgtgctcctcaggagagagctgtttaggttttccgatctttttgctcaggggccaaacactgaaggcacgtactgcccaacccactgagcgcctgaggccattccctccttttccgcatgcctcctgcctcctgggctattcctctccacccagaaggctgggaatcccagctgattccctgacaggagccgacttcacacacaggtgactctcaggcattggctcatgttttcagccagggataaaccatcccttcttggggctttaagtccctggggagctttccctgtaggtctcctgggtgttgagagacaagttggagaccaacctccaatgaatgagccgcggtcattcattaattcactcacgtaatttactgagtagctgcaacatgccagcctctacgttaggttctgcggataaaggaggaataagacagagtcaggagaactgttccttgtggtttccgtcccttggggaccacaggcatcagcagtcccattcaagtcacctgaggcaaagtgtctgcatcttcgtccagcgaccctttgcttttcggctcctagaatccttagagtctgaattcctttagctgggaacagctgtcatggtcacccctggataacatttgccaccaagtatagatgctggatcttgggttccaggcagacatcatccaggtccatctggaactttcagtgatagctgccttcagccagcatctttgggggactctataatagcagcttgagatcagtgtctagaagactgttctgcaatttgctgccaaatgcatctcaggtttttaaagtcattgtttcttgctcatggtggctcatttattacatagtcccctcaccccactaatggataatgggaggaaaagttgctgcttccttcagcatcaaagcctttccttgggaatctgcctccctccatggcaggggtggattcgggagctgggagtaaccaggcaaagtcaaccagatgcctagctcctgctgagacccaggtcctatggcagctcctcattagattaaaggagaccacttccaaagcaggtgctgcatggctcaccatcatatgccccaaacaactgaaagttggcggttatcaccagactgtgagtttctggcaagtagcttggggaagctgaataaactctaggcccagggctactaaagacttcaggatagaattctccatcaaatatacagcataagtaaaactgctctgcactgtttaatccatttccaaggggcttagaaaagctaacaagggtgtgtcccctgtcctgccccaccggtttgctggctttgtaataacataagaccattgtggttgttggtgtcagataccttcccatcctgagctctctcacctacctgctctctctcctagagcaggatactggggtacttttaagaagggtgctccttttaagatgcccagaaaagctgtatttaactcttgctatttgtaacttggggatggtctcccctgccccagggcacataagagcaaaggctccaatggtcagtggatgactctgcaaaagtgaccccctgtgccagaagctatagccctctccccaacaggtctctcttgttggccagagggcctgcttcccatgggcattgcaagtgccaccgtgcggggcctggctctgcacacccaggaaaagtctgcagacccccagccctccgcaataattcaccagaccagaagccactggtgtacagagaacacttaaaaaaatgtattttatgtgaaaaaaaattaaaactctgtatactgtatcagcagctttgtgtaaaaatggcaatcaagagagtctaatatatttaaaacttttttaaaaaaaatcttcgcagatctttgatatcgtactgaggtaacttccacgtagccccttgccacgcggcaccggtgggccttgggtccaaaactgtggctcagccacatcccaaagggggcacatgtccctggagttgcttccagctgccaaggcctgtgacagaattcgctgttaagagtttttaattaaaattattaaattccttttaataaca

SEQ ID NO: 24468 - DNA, 4384 bp, Homo sapiens
  source 1..4384: mol_type = unassigned DNA
gcctcagtatctcaaatgtcagcctctactagtcgtacagttctctcttatttgatatcagagagcccaatggagccttctgaagtacctagtcagattagcaaagataattttttagaagttcctaatttatctgactctctttgtgaagatgaagaagttactttccaacctggtttctcccctcaaccaagtagacgaggttctgattcttctgaagacatatacctggataccccatcttcaggtactagaagagtttcatttgctgattcctttggattcaatcttgtgtctgttaaagaatttgattgctgggaattaccgagtgcttcaaccacttttgacttagggacggacattttccacacagaagaatatgttttagccccactgtttgacttgccttcttcaaaagaagatcttatgcaacaactccaaatacagaaagcaatactggagtcaactgagtctcttcttgggtctacaagtatcaagggtattattcgagttttgaatgtttcttttgagaagttagtatatgtaagaatgtctttagatgactggcagacacattatgacattttagcagaatatgttcctaattcatgtgatggtgaaactgaccagttctcctttaagattgtattggttcctccttatcaaaaagatggcagtaaagttgagttttgtatacgttatgaaacttctgttggtacattttggtcaaataataatggcacaaattatacattcatttgtcaaaagaaagaacaagagccggagcctgtaaaaccatggaaagaagttcctaacagacaaataaaaggctgcttaaaggtaaaatcaagtaaagaagaatcatcagtaacatcagaagaaaataactttgagaatccaaagaatacagatacctatatcccaacaatcatttgttctcatgaggacaaggaagatttggaagccagtaatcgaaatgtaaaagatgtaaacagggaacatgatgaacataatgaaaaagaattagagttgatgataaatcaacacttaataagaaccagaagtactgcttccagagatgaaaggaatacattttcaacagatccagtcaattttccaaataaagcagaggggttagagaagaagcaaatccatggtgaaatatgtactgacttgttccaaaggtctctgtctccaagttcatcagcagaaagctccgtaaagggagatttttactgcaatgaaaaatattcctcaggagatgactgtacacatcaaccttcagaggaaactacttcaaatatgggagaaatcaagccatcattgggagatactagtagtgatgaactagtgcaattacatactggcagcaaagaagtcctggatgataatgctaatccagcccatggcaatggcacagtgcaaataccttgcccctcttcagatcaactaatggcaggaaaccttaataaaaaacatgaaggaggagctaaaaatattgaagtaaaagatttgggatgtttacgaagagatttccattcagatacgtcggcatgtctcaaagaatcaacagaagaaggatcttctaaggaagattattatggcaatggtaaggatgatgaagaacaaagaatatatttaggtgttaatgaaaaacaaagaaaaaatttccaaacaatcttacatgaccaagaaaggaagatgggtaaccctaaaataagtgtggcagggattggagctagtaacagagacctggctactctgctgagcgaacataccgcaatccccacccgggcaatcacagcagatgtgtctcattcaccaaggacaaatttaagttgggaagaagctgtgttaaccccagagcatcatcatttgactagtgaaggcagcgctttaggagggataactggtcaagtttgttcatcaagaactggaaatgttttgaggaatgattatcttttccaagttgaagaaaaatcaggtgggattaattctgaagatcaggataatagcccacagcataaacaaagttggaatgttctggaaagtcagggaaaatcaagagagaataagacaaacataacagagcatatcaaaggacaaacagattgtgaagacgtgtggggaaaaagagataatacgaggagtttgaaagctactacagaagaattgtttacctgccaagaaacagtgtgctgtgaactgtcttctctagctgatcatggcattactgagaaagcagaagctggtacagcctatataattaagacaacatcagaaagtactccagaaagcatgtctgctagagaaaaagcaataattgctaagctacctcaagagacagcacgaagtgacaggcccatcgaggtaaaggaaacagcgtttgatccacatgaagggagaaatgatgattcacattataccctttgtcaacgagatacagtaggtgtaatctatgacaatgattttgaaaaggaatcacgtttaggtatttgtaatgtacgtgtagatgaaatggagaaggaagaaaccatgtctatgtacaatcctaggaagacacatgacagggagaaatgtggcactggaaatataacatctgtggaagaatcctcatgggtcattacagaatatcaaaaagcaacttcaaaactggatttacagttgggaatgttaccaacagacaaaactgtattttcagaaaacagagatcttaggcaggttcaagaattatcaaagaaaacagactcggatgccattgtgcattctgcttttaactcagacactaatagagctcctcagaatagctctcctttttccaaacatcatactgaaatttcagtgtcaactaatgagcaggcaattgctgtagagaatgcagttactaccatggctagccaacctatttctacgaaatcagaaaatatttgtaattcaacaagagaaatccagggtattgagaagcacccttatcctgagtctaaacctgaagaagtttccagaagttcaggaatagtgacatcaggtagtagaaaagaaagatgcataggccagattttccaaacagaagagtatagtgtggaaaaatctctagggccaatgattttaatcaacaaacctcttgagaatatggaagaagcaaggcatgaaaatgaaggattagtaagctctgggcaatcactatacacttcaggtgaaaaggaatctgacagctctgcttctactagtcttcctgttgaggaaagtcaagctcaaggcaacgaatctttgttttcaaaatataccaactctaaaataccttatttccttttgtttctgatatttcttataactgtctaccattatgacttaatgattggcttgacattctacgttttgtcattgtcctggctatcctgggaagagggtagacaaaaagagtctgtcaaaaagaagtaacctcagcactactattctctcttaaaagataagctatttaaccccaaacatttggattggtgaatgggactattcattgttcaaagatccagtgcagtttttctcttgaaggatcatttaaaaagggacgcgaataagtttgctccttcatataagtaattattctatataggaccattatgtttggatcattaaatacctatatgaatatgagatctgaagcacgtcaagttgaaattaggtacagctgttgctccttagcaggctatgaagttgcaatgcttcacatctcttcactacttaaagtgctatttcttgcattcatttctcttgcaataaagcttcatttttttttccccttgagagtatatattttcccctacggttttaaaaaacagataaaacatggacaatggcagaggacttttttggtcttttagtattgaacatgaaatttgttcaatttatcatttatcaggattcattgatcaaatatttcaacctttcatatttttaagaaaacacccatatatattgaaatgcaaacttaaacatattctgttcacttgagtgtaatacttgatgcatgcacacacacacacacataccttctttatagctacaaagtcagggcgttcataggcaaaatctgacaagactgaaacaattgggagattatctttcaattctgaaaaattctgtgggtggcctgtctttaagcaatgcttttctcttgtgagggaagactgtaacacagctgaactatttcagtgtcaactattcagaattgaaaatgtaaattaaaatttccacaagcattgcttcagaatgaatttgtacctataaagcataaggcattaaatgacaataaaaattccaaatggactatttgttccacattgtatttttgtcttcaaatattttctaagagaatgaattatccccc

SEQ ID NO: 24469 - DNA, 2524 bp, Homo sapiens
  source 1..2524: mol_type = unassigned DNA
gccgcgggggcaaggcctggagctgtggttcgaatttgtgcaggcagcgggtgctggcttttagggtccgccgcctctctgcctaatgagctgcaccagaatgatccaggttttagatccacgtcctttgacaagttcggtcatgcccgtggatgtggccatgaggctttgcttggcacattcaccacctgtgaagagtttcctgggcccgtacgatgaatttcaacgacgacattttgtgaataaattaaagcccctgaaatcatgtctcaatataaaacacaaagccaaatcacagaatgactggaagtgctcacacaaccaagccaagaagcgcgttgtgtttgctgactccaagggcctctctctcactgcgatccatgtcttctccgacctcccagaagaaccagcgtgggatctgcagtttgatctcttggaccttaatgatatctcctctgccttaaaacaccacgaggagaaaaacttgattttagatttccctcagccttcaaccgattacttaagtttccggagccactttcagaagaactttgtctgtctggagaactgctcgttgcaagagcgaacagtgacagggactgttaaagtcaaaaatgtgagttttgagaagaaagttcagatccgtatcactttcgattcttggaaaaactacactgacgtagactgtgtctatatgaaaaatgtgtatggtggcacagatagtgataccttctcatttgccattgacttaccccctgtcattccaactgagcagaaaattgagttctgcatttcttaccatgctaatgggcaagtcttttgggacaacaatgatggtcagaattatagaattgttcatgttcaatggaagcctgatggggtgcagacacagatggcaccccaggactgtgcattccaccagacgtctcctaagacagagttagagtcaacaatctttggcagtccgaggctggctagtgggctcttcccagagtggcagagctgggggagaatggagaacttggcctcttatcgatgaattaagcaacaatgtaactggtcttgacttgtcatattcccccatgcaatcctaggtctgtattgctcaattttaggaagcctttgctactccatcagtaggtttagatttgagcttttgagacctggctatggaaaagaaagacacttgagaatttagtgttggggtctgtacagatgatgctacccaatttggctttgaaggatcaagtaacaggttgaaaactatttttataaaggtaatactttttcagttcccttcttccttccctctcaatccactagctttcatgttgggcaaggaaaagttgaggaaggatggctgatggtgatggaaagctgtgttaatggtatgaggaatgtgtgaaaagtatacacaaagggctctgaagctcaagtcagaggagtgggaggtctgatcattgttggtggaaaaacgtaaggttattttgtgtttttaagttggttttacaattctttcctggggaaattatttctggaggggaaaaagatccattctacgtatccttgtggagaaaagctaaataacctttaagaatgtgggtggtattggagaaagaagatgaattatagctccggagaatcaagatcttaagtgaagcctttctgttcagatgtgatctataaaaaatcataatttggggaaagtttaagcaaatctggctttgtagtcctgatgttataagtgactttgtgatcaaactgtcaggcttgggttcttgttatagaatgcttggtatagaaaaaccatgccatcattaatggctaacaacacgtagggacttcatgtcatgtcaaagatagctctttgcaagtgccttgattaaaccagaaaactgtcatcgtttaacccaaatatctgaatggtcatctggtaactcatgggtttttggcctcataagatggtccactctgtacacaggcattcctcctgcaataatgttgtatctttgagaccgttgtcagtgtacacaactcacatccttcatattgaaggtgactcatttttctgcacacttttttgatgtgatgcttgacgtgaggcccgacactaggattctcaatgcaagaatccagtaccttgcacatagaagtagcaacccatcccttgcctattttcatcttgctgttttcttttttttaaaaaaatggatgtgacttgttttgaatgttttgtattatacttgtttttgtgtgtgcataaattcattctgtaggatcttaagaaaaagagtcccagaatgttgcttctattattgtgcacaaccattgagaggtgttacaagaatgcagttaattttaacatgtgtgatgtgccatggtggaaaagtactatcggaataactctgcagtgacagaatttgaagtttggctagcatccatacttttctactgtaaatatttcactctcctctagctatccttgatgagcttctcactttaagaataaatgtgtttgatataa

SEQ ID NO: 24470 - DNA, 1375 bp, Homo sapiens
  source 1..1375: mol_type = unassigned DNA
agggtccgccgcctctctgcctaatgagctgcaccagaatgatccaggttttagatccacgtcctttgacaagttcggtcatgcccgtggatgtggccatgaggctttgcttggcacattcaccacctgtgaagagtttcctgggcccgtacgatgaatttcaacgacgacattttgtgaataaattaaagcccctgaaatcatgtctcaatataaaacacaaagccaaatcacagaatgactggaagtgctcacacaaccaagccaagaagcgcgttgtgtttgctgactccaagggcctctctctcactgcgatccatgtcttctccgacctcccagaagaaccagcgtgggatctgcagtttgatctcttggaccttaatgatatctcctctgccttaagtttccggagccactttcagaagaactttgtctgtctggagaactgctcgttgcaagagcgaacagtgacagggactgttaaagtcaaaaatgtgagttttgagaagaaagttcagatccgtatcactttcgattcttggaaaaactacactgacgtagactgtgtctatatgaaaaatgtgtatggtggcacagatagtgataccttctcatttgccattgacttaccccctgtcattccaactgagcagaaaattgagttctgcatttcttaccatgctaatgggcaagtcttttgggacaacaatgatggtcagaattatagaattgttcatgttcaatggaagcctgatggggtgcagacacagatggcaccccaggactgtgcattccaccagacgtctcctaagacagagttagagtcaacaatctttggcagtccgaggctggctagtgggctcttcccagagtggcagagctgggggagaatggagaacttggcctcttatcgatgaattaagcaacaatgtaactggtcttgacttgtcatattcccccatgcaatcctaggtctgtattgctcaattttaggaagcctttgctactccatcagtaggtttagatttgagcttttgagacctggctatggaaaagaaagacacttgagaatttagtgttggggtctgtacagatgatgctacccaatttggctttgaaggatcaagtaacaggttgaaaactatttttataaaggtaatactttttcagttcccttcttccttccctctcaatccactagctttcatgttgggcaaggaaaagttgaggaaggatggctgatggtgatggaaagctgtgttaatggtatgaggaatgtgtgaaaagtatacacaaagggctctgaagctcaagtcagaggagtgggaggtctgatcattgttggtggaaaaacgtaaggttattttgtgttttt

SEQ ID NO: 24471 - DNA, 1285 bp, Homo sapiens
  source 1..1285: mol_type = unassigned DNA
agtctctcccagcgaccgccgcgggggcaaggcctggagctgtggttcgaatttgtgcaggcagcgggtgctggcttttagggtccgccgcctctctgcctaatgagctgcaccagaatgatccaggttttagatccacgtcctttgacaagttcggtcatgcccgtggatgtggccatgaggctttgcttggcacattcaccacctgtgaagagtttcctgggcccgtacgatgtcttctccgacctcccccttaaaacaccacgaggagaaaaacttgattttagatttccctcagccttcaaccgattacttaagtttccggagccactttcagaagaactttgtctgtctggagaactgctcgttgcaagagcgaacagtgacagggactgttaaagtcaaaaatgtgagttttgagaagaaagttcagatccgtatcactttcgattcttggaaaaactacactgacgtagactgtgtctatatgaaaaatgtgtatggtggcacagatagtgataccttctcatttgccattgacttaccccctgtcattccaactgagcagaaaattgagttctgcatttcttaccatgctaatgggcaagtcttttgggacaacaatgatggtcagaattatagaattgttcatgttcaatggaagcctgatggggtgcagacacagatggcaccccaggactgtgcattccaccagacgtctcctaagacagagttagagtcaacaatctttggcagtccgaggctggctagtgggctcttcccagagtggcagagctgggggagaatggagaacttggcctcttatcgatgaattaagcaacaatgtaactggtcttgacttgtcatattcccccatgcaatcctaggtctgtattgctcaattttaggaagcctttgctactccatcagtaggtttagatttgagcttttgagacctggctatggaaaagaaagacacttgagaatttagtgttggggtctgtacagatgatgctacccaatttggctttgaaggatcaagtaacaggttgaaaactatttttataaaggtaatactttttcagttcccttcttccttccctctcaatccactagctttcatgttgggcaaggaaaagttgaggaaggatggctgatggtgatggaaagctgtgttaatggtatgaggaatgtgtgaaaagtatacacaaagggctctgaagctcaagtcagaggagtgggaggtctgatcattgttggtggaaaaacgtaaggttattttgtg

SEQ ID NO: 24472 - DNA, 3459 bp, Homo sapiens
  source 1..3459: mol_type = unassigned DNA
aagtaacgccgcggaccgggaaagtgggaggggccgctcccggaacgcagccttcttgtaagaacctccaaggaagcaagaagaaaaaagaggcgctaccctgcgctcccgggaggcctctgaaagcttccactagagaaaaactccccactcttacaatttctttaaccgcaagaagcggaggacctggacaaggactcgaggagcaaggtggcgaaccaagggtagggcgcaccgggcccgagaggtcccccgcaggttgcagatacggtggactctctgcggcttctgagcacggagggagctgtcgcggggtcgggaggtcgtctctcatccctgcctcatcttccgacggccggcggggccatgtccagaggcccgagctccgcggtcctgcctagcgccctgggatcccggaagctcggcccccggagcctcagctgcctgtcggacctggacggcggcgtggccctggagccgcgggcctgtaggccccctgggagcccgggccgcgcgccgccgccaacgccagcgccgtcgggctgcgacccccgcctgcggcccatcatcctgcggcgggcgcgctcactgcccagctcccccgagcgccgccagaaggccgcgggcgcgccgggcgctgcgtgtcggccgggctgcagccagaagctccgcgtgcgcttcgccgacgccctgggcttggagctggcacaggtcaaggtgttcaacgcgggagacgacccgtccgtgccgctgcacgtgctgtcgcggctcgcaatcaactcggacctgtgctgcagcagccaggacctggagttcaccctgcattgcctggtgcccgatttcccgccgcccgtcgaggccgccgactttggcgagcgcctgcagcggcagctcgtgtgcctggagcgtgtcacttgctcggaccttggcatcagcggtacggtgcgcgtgtgcaacgtggccttcgagaagcaggtggctgtgcgctacactttctcgggctggcgcagtacccacgaggcggtggcgcggtggcgcgggcccgcaggccccgagggcacggaggacgttttcaccttcggctttccagtaccgcccttcctgctggagctcggctcccgcgtgcacttcgcggtgcgctaccaagtggcgggtgccgagtactgggacaacaacgaccaccgagactacagcctcacatgtcgcaaccacgcgctgcacatgcctcgcggggagtgcgaagagagctggatccacttcatctgagccgcgcggggaccggccacctggagcctccacacctaagctgcgcctcctgtcatttccctgctgggctctcacatctatctggttgttcttcaccaccctccaagtcctctgacctaattttctgctgcaaggtcccctggcagtggcccatcctgtcttctacttgaaacgtctgagtcacttggtctaaaaagtagcctcaggtggccagaaggccgagttgtgtaatgagttggggcagggtggtggggtaggtgcatgggagggtgggccctctggggaggcccaagcagcttgttttgcaaaggcccaagtcctcctgctaggaaaagcttttgcatgtgtcctgaatgtgtctctgtaaacatagctgttatttattattgtgatgttgggacctttagcccatagcggatgcctcctcaggaatattctcgatttaataagctaaaaaaaaaaagttctgtgtttgtgcccacagtaaacagaatgtacagtgtgacccacatcgtggtccctccaggcattcctgccccaggataaggaaaacctgagcccacatctgattgccaacggctgtagccttctaacagtgggaaactattaataggcaagaaatttctgctttatcagtcatcacacaaccattcctgggcattgagactgtcctggttaggctgtgtgtctcctacattaacagctggggaggagggaaaagcttcagacttttaaactagcaaaacagttatttctctgcattcacaattctgatttcatgtatttctctgtacatgtttgatcattatcaggccattctgtttaagtttgaaactaagcattttaagaagtcttgcctcagttatttcagttttcaggtgactagagaatttcaggcaacagtgccctttgcaattacctttttgatgattaaggtgactatttttatttcttgttaagcatcagaagatgtcagcattcatcttttgggagtccagttacaaggtggaactagaaggtgttttcagcaatagccagagcactggaggaaaaataattgacaaatatttatacttttaaattgttttgaactgtatttacatacatcatgttttatcaggtacccaccaactttatactttctgccttcagatagagtttctaacattttctagtttgtcagttttaaaatataaaattcttttatgtttttaaaccgtcaaccaagaagtcaagaccactgtcccctgctgagttaggcaatcacttaaaactccaaagaactccaggctgaggagttcttttggtgctgaacagtggtctgacaacaggtgctagaattaaggtgtgggaaaaaaaaaaaaacagccaggaaggacaagatctccaatttgtgaagcttatgatacagctgaaaccagtctgatcaattttatgctacctgtcaccaagaaattaactctaaatttttgaatgcttgttggcatctgtcaaatcaatactgaaaggatgcatttcggcttttaaccagtttggttctgatcattgcaacctctgtgcttttataattcaaagaacaaggatagctttcttcggtatcttttaatataagaacactgaattttggcttgaaatattgtgactaaattgcacaatctctggctattagcactgttcactacattaacatgcaagagagagagaagccttgttacatttcctgctatttaacaaactgtccaattaggtcagcaagcctgttagggccttcactgctacgcccctggccccaaaacagagagcaagacagttgtccagagaatttagatatgagttaagagctgccagatttattttaaggcatgtagagaatctcataatctatgtgaaagtcacttgccaaaaaggttttggttatgaaagtgaatgttatatatttaatattaagtgaacctcccgtgccttttaaaaaataccaacattatgaaatttaaaagcttaaatatatttgcctagttgataaagaggctgtggaacaactgaaggagaactttcagaccctaaaacagttatattacttagatgttaaaattttctagtgggctgtgcaattgctgggttgtccccccaaacatattttaatatgttatttaaaatgattttacccaagcctaagtattaaagtatatgtgc

SEQ ID NO: 24473 - DNA, 2386 bp, Homo sapiens
  source 1..2386: mol_type = unassigned DNA
agacgcagccagcgaggctcgcagaggtcagggatgcacgtaggactggcccgcaccttgcagccacggaaagatccgcctggcccgcggcccctccacgcctccgaggtcgagacagtgacataagtcaactctcaagcccagggcgtctctccactctgcctagacgtccactccgtctgcctgcagctacggctctgtgcgtcccgcttcgactccctctgctttccttcccagcttctcgcctccagactgttccggctccgccgcctgaaattacctgctctgggggaggcgcggcgcgcggcctcatgacggaactacaactcccatgaggcgctgggcccacgcaggcgcggcgcggctgaagtcgccgcgccggaatcccattggcagggccggctctgaggcgggagccctgattggctgaggggtctgaggcgacagattccggaaaggggaagagcagccaacatggcggcggaacgcggcgcggggcagcaacagtcgcaggagatgatggaggttgacaggcgggtcgagtctgaagaatccggcgatgaagaagggaagaaacacagcagtggcatcgtggccgacctcagtgaacagagcctgaaggatggggaggagcggggggaggaggacccagaagaagaacatgagctgcctgtggacatggaaaccatcaacctggacagagatgcagaggatgttgatttgaatcactatcgcatagggaagattgaaggatttgaggtactgaagaaagtgaagactctctgcctccgccaaaatttaattaaatgcattgagaatctggaggagctacagagtcttcgagagctggatctttacgacaaccagatcaagaagattgagaatctggaggcgctaacagagctggagattctagatatttcttttaatctgctgagaaacatcgaaggggttgacaagttgacacgactgaaaaaactcttcttggtcaacaataaaatcagtaaaattgagaacttaagcaacttacatcaactacagatgctagagctgggatctaaccgcatccgggcaatcgaaaatatcgacaccttaaccaacctggagagtttgtttttggggaaaaacaaaattactaaacttcagaacctggatgcgctcaccaacctgacagtcctcagtatgcagagcaaccggctgaccaagatcgagggtctgcagaacctggtgaacctgcgggagctgtaccttagccacaatggcatcgaggtcatcgagggcctggagaacaataacaaactcacgatgttggacattgcatcaaatagaatcaaaaagattgaaaatatcagccatctaacagagctgcaagagttctggatgaacgacaatctccttgagagctggagcgacctcgacgagctgaagggagccaggagcctggagacagtgtacctggagcggaaccccttgcagaaggacccccagtaccggcggaaggtcatgctcgccctcccctccgtgcggcagatcgatgccacgttcgtcaggttctgagtccttcttggctcctcatgtggtccctctcctcggaagaactgcccagccacgggtttttaacccacctgttgctcctgaggtcgtcactatatcaacagtcacaaacccaatggcaataaaggcactgacgatagctggcgcgcgcgacgtcacacaccattttcagatgccgttgcaattaaatcttgccacactgtcctcctgggtgattgttgacagttattgtagccacagagagaacataagacacgttgcgttcattcgctagaaatccctgtttccttctctcagaaggcagtcacagtccctacctgagtcgtgtgaaacacagggcctgagagtgctttacaggcattcacgtgctgtccgagtggcattcgggggctggcctagctggccctagtcctggtgtgcagggttcaggcagtcttgacctgcaacaaccgaggttttttagtcttttaacccagccattttcaattttttaaaaattaggtaagttaaaaaagctgggtaaaagctgactcagccctgtgtgcttgtgttccttagagctctccttcaaagagcgccgggcagggctgactgttttcacgtgtgcccgtcagttctcgccacatcccttgcctgtgggtgaaagctcaggtgtggggagggtgtcctgtgtcccacacggtgctgtgctgctgccagaatacgagtcccattgagcctctccaaagacggcctccaaggatctgaactcttggccactggtatagtggcctcctgttctcaccccattgttattttggcttttttaatataaaatgtacattgacagaca

SEQ ID NO: 24474 - DNA, 1954 bp, Homo sapiens
  source 1..1954: mol_type = unassigned DNA
cgcccccgggccgggcagatgcggtttcctcccgactcgcgatcaaaatgggtgagtagcgcagagctcgcctcttggaggcctctttctgaaggcggaggacgcggggcggctcgttcatgggccgggtggctccgcagggtagacgaaggctgcagcgtccgcactgggctgggaacgacttgcaaggggagcccagctggcgccccggagccagccagctggctagcggccccaccagcgcaagtgccccgcacctgcccgcctgctccgagcgtcaagagaaggcggcatttcgcatgggtaaaatccgcgcggggacgccgggagaatgttgttgctcttgccgttcggcccattgtacagacgcagccagcgaggctcgcagaggtcagggatgcacgtaggactggcccgcaccttgcagccacggaaagatccgcctggcccgcggcccctccacgcctccgaggtcgagacagtgacataagtcaactctcaagcccagggcgtctctccactctgcctagacgtccactccgtctgcctgcagctacggctctgtgcgtcccgcttcgactccctctgctttccttcccagcttctcgcctccagactgttccggctccgccgcctgaaattacctgctctgggggaggcgcggcgcgcggcctcatgacggaactacaactcccatgaggcgctgggcccacgcaggcgcggcgcggctgaagtcgccgcgccggaatcccattggcagggccggctctgaggcgggagccctgattggctgaggggtctgaggcgacagattccggaaaggggaagagcagccaacatggcggcggaacgcggcgcggggcagcaacagtcgcaggagatgatggaggaagaacatgagctgcctgtggacatggaaaccatcaacctggacagagatgcagaggatgttgatttgaatcactatcgcatagggaagattgaaggatttgaggtactgaagaaagtgaagactctctgcctccgccaaaatttaattaaatgcattgagaatctggaggagctacagagtcttcgagagctggatctttacgacaaccagatcaagaagattgagaatctggaggcgctaacagagctggagattctagatatttcttttaatctgctgagaaacatcgaaggggttgacaagttgacacgactgaaaaaactcttcttggtcaacaataaaatcagtaaaattgagaacttaagcaacttacatcaactacagatgctagagctgggatctaaccgcatccgggcaatcgaaaatatcgacaccttaaccaacctggagagtttgtttttggggaaaaacaaaattactaaacttcagaacctggatgcgctcaccaacctgacagtcctcagtatgcagagcaaccggctgaccaagatcgagggtctgcagaacctggtgaacctgcgggagctgtaccttagccacaatggcatcgaggtcatcgagggcctggagaacaataacaaactcacgatgttggacattgcatcaaatagaatcaaaaagattgaaaatatcagccatctaacagagctgcaagagttctggatgaacgacaatctccttgagagctggagcgacctcgacgagctgaagggagccaggagcctggagacagtgtacctggagcggaaccccttgcagaaggacccccagtaccggcggaaggtcatgctcgccctcccctccgtgcggcagatcgatgccacgttcgtcaggttctgagtccttcttggctcctcatgtggtccctctcctcggaagaactgcccagccacgggtttttaacccacctgttgctcctgaggtcgtcactatatcaacagtcacaaacccaatggcaataaaggcactgacgatagctggcgcgcgcgacgtcacacacca

SEQ ID NO: 24475 - DNA, 820 bp, Homo sapiens
  source 1..820: mol_type = unassigned DNA
atggcggcggaacgcggcgcggggcagcaacagtcgcaggagatgatggaggaagaacatgagctgcctgtggacatggaaaccatcaacctggacagagatgcagaggatgttgatttgaatcactatcgcatagggaagattgaaggatttgaggtactgaagaaagtgaagactctctgcctccgccaaaatttaattaaatgcattgagaatctggaggagctacagagtcttcgagagctggatctttacgacaaccagatcaagaagattgagaatctggaggcgctaacagagctggagattctagatatttcttttaatctgctgagaaacatcgaaggggttgacaagttgacacgactgaaaaaactcttcttggtcaacaataaaatcagtaaaattgagaacttaagcaacttacatcaactacagatgctagagctgggatctaaccgcatccgggcaatcgaaaatatcgacaccttaaccaacctggagagtttgtttttggggaaaaacaaaattactaaacttcagaacctggatgcgctcaccaacctgacagtcctcagtatgcagagcaaccggctgaccaagatcgagggtctgcagaacctggtgaacctgcgggagctgtaccttagccacaatggcatcgaggtcatcgagggcctggagaacaatgtgcaggacagcctcacgtactgaggggaagtgtgctcacagagcccccaccctcctcagctgcctccagctcaccctgctctgccccagtgcggtgttcaagacaaataaaagactttttctcattcaa

SEQ ID NO: 24476 - DNA, 965 bp, Homo sapiens
  source 1..965: mol_type = unassigned DNA
gggaagagcagccaacatggcggcggaacgcggcgcggggcagcaacagtcgcaggagatgatggaggttgacaggcgggtcgagtctgaagaatccggcgatgaagaagggaagaaacacagcagtggcatcgtggccgacctcagtgaacagagcctgaaggatggggaggagcggggggaggaggacccagaagaagaacatgagctgcctgtggacatggaaaccatcaacctggacagagatgcagaggatgttgatttgaatcactatcgcatagggaagattgaaggatttgaggtactgaagaaagtgaagactctctgcctccgccaaaatttaattaaatgcattgagaatctggaggagctacagagtcttcgagagctggatctttacgacaaccagatcaagaagattgagaatctggaggcgctaacagagctggagattctagatatttcttttaatctgctgagaaacatcgaaggggttgacaagttgacacgactgaaaaaactcttcttggtcaacaataaaatcagtaaaattgagaacttaagcaacttacatcaactacagatgctagagctgggatctaaccgcatccgggcaatcgaaaatatcgacaccttaaccaacctggagagtttgtttttggggaaaaacaaaattactaaacttcagaacctggatgcgctcaccaacctgacagtcctcagtatgcagagcaaccggctgaccaagatcgagggtctgcagaacctggtgaacctgcgggagctgtaccttagccacaatggcatcgaggtcatcgagggcctggagaacaatgtgcaggacagcctcacgtactgaggggaagtgtgctcacagagcccccaccctcctcagctgcctccagctcaccctgctctgccccagtgcggtgttcaagacaaataaaagactttttctcattcaa

SEQ ID NO: 24477 - DNA, 1592 bp, Homo sapiens
  source 1..1592: mol_type = unassigned DNA
aaaggaataatgggcgcctccgcccccgggccgggcagatgcggtttcctcccgactcgcgatcaaaatggcttctcgcctccagactgttccggctccgccgcctgaaattacctgctctgggggaggcgcggcgcgcggcctcatgacggaactacaactcccatgaggcgctgggcccacgcaggcgcggcgcggctgaagtcgccgcgccggaatcccattggcagggccggctctgaggcgggagccctgattggctgaggggtctgaggcgacagattccggaaaggggaagagcagccaacatggcggcggaacgcggcgcggggcagcaacagtcgcaggagatgatggaggttgacaggcgggtcgagtctgaagaatccggcgatgaagaagggaagaaacacagcagtggcatcgtggccgacctcagtgaacagagcctgaaggatggggaggagcggggggaggaggacccagaagaagaacatgagctgcctgtggacatggaaaccatcaacctggacagagatgcagaggatgttgatttgaatcactatcgcatagggaagattgaaggatttgaggtactgaagaaagtgaagactctctgcctccgccaaaatttaattaaatgcattgagaatctggaggagctacagagtcttcgagagctggatctttacgacaaccagatcaagaagattgagaatctggaggcgctaacagagctggagattctagatatttcttttaatctgctgagaaacatcgaaggggttgacaagttgacacgactgaaaaaactcttcttggtcaacaataaaatcagtaaaattgagaacttaagcaacttacatcaactacagatgctagagctgggatctaaccgcatccgggcaatcgaaaatatcgacaccttaaccaacctggagagtttgtttttggggaaaaacaaaattactaaacttcagaacctggatgcgctcaccaacctgacagtcctcagtatgcagagcaaccggctgaccaagatcgagggtctgcagaacctggtgaacctgcgggagctgtaccttagccacaatggcatcgaggtcatcgagggcctggagaacaataacaaactcacgatgttggacattgcatcaaatagaatcaaaaagattgaaaatatcagccatctaacagagctgcaagagttctggatgaacgacaatctccttgagagctggagcgacctcgacgagctgaagggagccaggagcctggagacagtgtacctggagcggaaccccttgcagaaggacccccagtaccggcggaaggtcatgctcgccctcccctccgtgcggcagatcgatgccacgttcgtcaggttctgagtccttcttggctcctcatgtggtccctctcctcggaagaactgcccagccacgggtttttaacccacctgttgctcctgaggtcgtcactatatcaacagtcacaaacccaatggcaataaaggcactgacgatagctggcgcgcgcgacgtcacacaccattttcagatgccgttgcaattaaatcttgccacactgtc

SEQ ID NO: 24478 - DNA, 2414 bp, Homo sapiens
  source 1..2414: mol_type = unassigned DNA
aaatgggagggggagacgcaagatggcggcagccgcgaactccggctctagcctcccgctgttcgactgcccaacctggtgagtggcggggcggccagggctagagtggcccggccggagctagcctgggctggaagggcggctctttttttacttttctgctgcgagccgaacggctcagaaaccccggaatggttgaggaaaaactgtttgctgcaccgggccgggcgacgtgttgaagaaccgagagcctggagcccaggcccaggaactgaagaaacccggggttgggggctcaaaggcgctcacttaggcagcccctttgagcgattagccagtcgccggagcgcttcgaggccttggcccgaacttacgcccaactcttgactgagtgcctggtgctctcgtggagcatcgcatctggccccttcctgtacgtcccgagcgcgctcgagccagccccggccccaaccctacctccaagccccgcatccctctgtggttgctgcatccctcgtgcggcacttgtctgtctgccacagagaatacgaggggcaggtaagccccctcccggtttacatctggatgtagtcaaaggagacaaactaattgagaaactgattattgatgagaagaagtattacttatttgggagaaaccctgatttgtgtgactttaccattgaccaccagtcttgctctcgggtccatgctgcacttgtctaccacaagcatctgaagagagttttcctgatagatctcaacagtaaacctgacagagttcaacactgcccacaacaagcggatttctacccttaccattgaggagggaaatctggacattcaaagaccaaagaggaagaggaagaactcacgggtgacattcagtgaggatgatgagatcatcaacccagaggatgtggatccctcagttggtcgattcaggaacatggtgcaaactgcagtggtcccagtcaagaagaagcgtgtggagggccctggctccctgggcctggaggaatcagggagcaggcgcatgcagaactttgccttcagcggaggactctacgggggcctgccccccacacacagtgaagcaggctcccagccacatggcatccatgggacagcactcatcggtggcttgcccatgccatacccaaaccttgcccctgatgtggacttgactcctgttgtgccgtcagcagtgaacatgaaccctgcaccaaaccctgcagtctataaccctgaagctgtaaatgaacccaagaagaagaaatatgcaaaagaggcttggccaggcaagaagcccacaccttccttgctgatttgatatttttggtcatggagaagggtgggattgggtgggaatggggtggaagggtgatggggagctaatgaactagggagaaaaactttccatgtgtgcggtatcgtctttcagaatgtctcctggcatcctaaccatgtaatatgacaattgggggtggggttgaaatagcccataaagacctgtcttcacaacacttgcattgtagagaaaggcttcttatatccttttcaatagactgccctggctctttcctaggccttccactacctcctttctttctcccactttctaggatcatttttatgtaaagtcacatatcccaggccctcaggttgaatccagagctgtagaggttacagtagcatcaccagccttgggggtccagagcctaatttatattcactatccttccaagtcccgggtagcagaagggttgccatagatctcagtttgatcaaaaagaaggcttagaattctgcagttaagctgaggtttaaactaaaaaatgtttccttgggtcagtggttttgaggtccagtagctaggcttttctcttttgtccttcctgttggaatgaaaacatttcgattttccttcatctgtgactggtgccatagacacaggtttatagttttaacttacagtattgtttgaaatttacctgtttttcttgtcaaacctgagcactcctcctgctgaagtttcttatttaattccagagtactgtcctctactctaaggcattacttttaagtgtattatgaaggcagttttcaaaggatatgaccagttggggtaattcaaattaaaaaggaaaagatttgtttggaagtaactggtgtctctaagaggaatttttagatgtcagtttggaggctctttcccccctcaattgagagctcttgttattcagagctccaagactagacctggctaacaaacataggagacaaagttaggaaacattgatacaagctttgtacagagatttgtacatttgtgtaataggccttttcatgctttatgtgtagctttttacctgtaacctttattacattgtaaattaaacgtaacttttgtca

SEQ ID NO: 24479 - DNA, 2344 bp, Homo sapiens
  source 1..2344: mol_type = unassigned DNA
cggtcttccagtttcccggcgtgcttagggcgcgccaaatgggagggggagacgcaagatggcggcagccgcgaactccggctctagcctcccgctgttcgactgcccaacctgggcaggtaagccccctcccggtttacatctggatgtagtcaaaggagacaaactaattgagaaactgattattgatgagaagaagtattacttatttgggagaaaccctgatttgtgtgactttaccattgaccaccagtcttgctctcgggtccatgctgcacttgtctaccacaagcatctgaagagagttttcctgatagatctcaacagtacacacggcactttcttgggtcacattcggttggaacctcacaagcctcagcaaattcccatcgattccacggtctcatttggcgcatccacaagggcatacactctgcgcgagaagcctcagacattgccatcggctgtgaaaggagatgagaagatgggtggagaggatgatgaactcaagggcttactggggcttccagaggaggaaactgagcttgataacctgacagagttcaacactgcccacaacaagcggatttctacccttaccattgaggagggaaatctggacattcaaagaccaaagaggaagaggaagaactcacgggtgacattcagtgaggatgatgagatcatcaacccagaggatgtggatccctcagttggtcgattcaggaacatggtgcaaactgcagtggtcccagtcaagaagaagcgtgtggagggccctggctccctgggcctggaggaatcagggagcaggcgcatgcagaactttgccttcagcggaggactctacgggggcctgccccccacacacagtgaagcaggctcccagccacatggcatccatgggacagcactcatcggtggcttgcccatgccatacccaaaccttgcccctgatgtggacttgactcctgttgtgccgtcagcagtgaacatgaaccctgcaccaaaccctgcagtctataaccctgaagctgtaaatgaacccaagaagaagaaatatgcaaaagaggcttggccaggcaagaagcccacaccttccttgctgatttgatatttttggtcatggagaagggtgggattgggtgggaatggggtggaagggtgatggggagctaatgaactagggagaaaaactttccatgtgtgcggtatcgtctttcagaatgtctcctggcatcctaaccatgtaatatgacaattgggggtggggttgaaatagcccataaagacctgtcttcacaacacttgcattgtagagaaaggcttcttatatccttttcaatagactgccctggctctttcctaggccttccactacctcctttctttctcccactttctaggatcatttttatgtaaagtcacatatcccaggccctcaggttgaatccagagctgtagaggttacagtagcatcaccagccttgggggtccagagcctaatttatattcactatccttccaagtcccgggtagcagaagggttgccatagatctcagtttgatcaaaaagaaggcttagaattctgcagttaagctgaggtttaaactaaaaaatgtttccttgggtcagtggttttgaggtccagtagctaggcttttctcttttgtccttcctgttggaatgaaaacatttcgattttccttcatctgtgactggtgccatagacacaggtttatagttttaacttacagtattgtttgaaatttacctgtttttcttgtcaaacctgagcactcctcctgctgaagtttcttatttaattccagagtactgtcctctactctaaggcattacttttaagtgtattatgaaggcagttttcaaaggatatgaccagttggggtaattcaaattaaaaaggaaaagatttgtttggaagtaactggtgtctctaagaggaatttttagatgtcagtttggaggctctttcccccctcaattgagagctcttgttattcagagctccaagactagacctggctaacaaacataggagacaaagttaggaaacattgatacaagctttgtacagagatttgtacatttgtgtaataggccttttcatgctttatgtgtagctttttacctgtaacctttattacattgtaaattaaacgtaacttttgtcatttgggtgcaggctgtgaatttgtctctcagtcactgattgccactgccatctggaaatgtttgctaaaggcacagtcactgggcttgggaggcaatgctccatccccattatattacaaataaagatgccctaaatgagtgtggaaa

SEQ ID NO: 24480 - DNA, 2651 bp, Homo sapiens
  source 1..2651: mol_type = unassigned DNA
gggggagacgcaagatggcggcagccgcgaactccggctctagcctcccgctgttcgactgcccaacctggtgagtggcggggcggccagggctagagtggcccggccggagctagcctgggctggaagggcggctctttttttacttttctgctgcgagccgaacggctcagaaaccccggaatggttgaggaaaaactgtttgctgcaccgggccgggcgacgtgttgaagaaccgagagcctggagcccaggcccaggaactgaagaaacccggggttgggggctcaaaggcgctcacttaggcagcccctttgagcgattagccagtcgccggagcgcttcgaggccttggcccgaacttacgcccaactcttgactgagtgcctggtgctctcgtggagcatcgcatctggccccttcctggcaggtaagccccctcccggtttacatctggatgtagtcaaaggagacaaactaattgagaaactgattattgatgagaagaagtattacttatttgggagaaaccctgatttgtgtgactttaccattgaccaccagtcttgctctcgggtccatgctgcacttgtctaccacaagcatctgaagagagttttcctgatagatctcaacagtacacacggcactttcttgggtcacattcggttggaacctcacaagcctcagcaaattcccatcgattccacggtctcatttggcgcatccacaagggcatacactctgcgcgagaagcctcagacattgccatcggctgtgaaaggagatgagaagatgggtggagaggatgatgaactcaagggcttactggggcttccagaggaggaaactgagcttgataacctgacagagttcaacactgcccacaacaagcggatttctacccttaccattgaggagggaaatctggacattcaaagaccaaagaggaagaggaagaactcacgggtgacattcagtgaggatgatgagatcatcaacccagaggatgtggatccctcagttggtcgattcaggaacatggtgcaaactgcagtggtcccagtcaagaagaagcgtgtggagggccctggctccctgggcctggaggaatcagggagcaggcgcatgcagaactttgccttcagcggaggactctacgggggcctgccccccacacacagtgaagcaggctcccagccacatggcatccatgggacagcactcatcggtggcttgcccatgccatacccaaaccttgcccctgatgtggacttgactcctgttgtgccgtcagcagtgaacatgaaccctgcaccaaaccctgcagtctataaccctgaagctgtaaatgaacccaagaagaagaaatatgcaaaagaggcttggccaggcaagaagcccacaccttccttgctgatttgatatttttggtcatggagaagggtgggattgggtgggaatggggtggaagggtgatggggagctaatgaactagggagaaaaactttccatgtgtgcggtatcgtctttcagaatgtctcctggcatcctaaccatgtaatatgacaattgggggtggggttgaaatagcccataaagacctgtcttcacaacacttgcattgtagagaaaggcttcttatatccttttcaatagactgccctggctctttcctaggccttccactacctcctttctttctcccactttctaggatcatttttatgtaaagtcacatatcccaggccctcaggttgaatccagagctgtagaggttacagtagcatcaccagccttgggggtccagagcctaatttatattcactatccttccaagtcccgggtagcagaagggttgccatagatctcagtttgatcaaaaagaaggcttagaattctgcagttaagctgaggtttaaactaaaaaatgtttccttgggtcagtggttttgaggtccagtagctaggcttttctcttttgtccttcctgttggaatgaaaacatttcgattttccttcatctgtgactggtgccatagacacaggtttatagttttaacttacagtattgtttgaaatttacctgtttttcttgtcaaacctgagcactcctcctgctgaagtttcttatttaattccagagtactgtcctctactctaaggcattacttttaagtgtattatgaaggcagttttcaaaggatatgaccagttggggtaattcaaattaaaaaggaaaagatttgtttggaagtaactggtgtctctaagaggaatttttagatgtcagtttggaggctctttcccccctcaattgagagctcttgttattcagagctccaagactagacctggctaacaaacataggagacaaagttaggaaacattgatacaagctttgtacagagatttgtacatttgtgtaataggccttttcatgctttatgtgtagctttttacctgtaacctttattacattgtaaattaaacgtaacttttgtcatttgggtgcaggctgtgaatttgtctctcagtcactgattgccactgccatctggaaatgtttgctaaaggcacagtcactgggcttgggaggcaatgctccatccccattatattacaaataaagatgccctaaatgagtgtg

SEQ ID NO: 24481 - DNA, 1148 bp, Homo sapiens
  source 1..1148: mol_type = unassigned DNA
ggagacgcaagatggcggcagccgcgaactccggctctagcctcccgctgttcgactgcccaacctgggcaggtaagccccctcccggtttacatctggatgtagtcaaaggagacaaactaattgagaaactgattattgatgagaagaagtattacttatttgggagaaaccctgatttgtgtgactttaccattgaccaccagtcttgctctcgggtccatgctgcacttgtctaccacaagcatctgaagagagttttcctgatagatctcaacagtacacacggcactttcttgggtcacattcggttggaacctcacaagcctcagcaaattcccatcgattccacggtctcatttggcgcatccacaagggcatacactctgcgcgagaagcctcagacattgccatcggctgtgaaaggagatgagaagatgggtggagaggatgatgaactcaagggcttactggggcttccagaggaggaaactgagcttgataacctgacagagttcaacactgcccacaacaagcggatttctacccttaccattgaggagggaaatctggacattcaaagaccaaagaggaagaggaagaactcacgggtgacattcagtgaggatgatgagatcatcaacccagaggatgtggatccctcagttggtcgattcaggaacatggtgcaaactgcagtggtcccagtcaagaagaagcgtgtggagggccctggctccctgggcctggaggaatcagggagcaggcgcatgcagaactttgccttcagcggaggactctacgggggcctgccccccacacacagtgaagcaggctcccagccacatggcatccatgggacagcactcatcggtggcttgcccatgccatacccaaaccttgcccctgatgtggacttgactcctgttgtgccgtcagcagtgaacatgaaccctgcaccaaaccctgcagtctataaccctgaagctgtaaatgaacccaagaagaagaaatatgcaaaagaggcttggccaggctgtgaatttgtctctcagtcactgattgccactgccatctggaaatgtttgctaaaggcacagtcactgggcttgggaggcaatgctccatccccattatattacaaataa

SEQ ID NO: 24482 - DNA, 1029 bp, Homo sapiens
  source 1..1029: mol_type = unassigned DNA
tccctcgtgcggcacttgtctgtctgccacagagaatacgaggggcaggtaagccccctcccggtttacatctggatgtagtcaaaggagacaaactaattgagaaactgattattgatgagaagaagtattacttatttgggagaaaccctgatttgtgtgactttaccattgaccaccagtcttgctctcgggtccatgctgcacttgtctaccacaagcatctgaagagagttttcctgatagatctcaacagtacacacggcactttcttgggtcacattcggttggaacctcacaagcctcagcaaattcccatcgattccacggtctcatttggcgcatccacaagggcatacactctgcgcgagaagcctcagacattgccatcggctgtgaaaggagatgagaagatgggtggagaggatgatgaactcaagggcttactggggcttccagaggaggaaactgagcttgataacctgacagagttcaacactgcccacaacaagcggatttctacccttaccattgaggagggaaatctggacattcaaagaccaaagaggaagaggaagaactcacgggtgacattcagtgaggatgatgagatcatcaacccagaggatgtggatccctcagttggtcgattcaggaacatggtgcaaactgcagtggtcccagtcaagaagaagcgtgtggagggccctggctccctgggcctggaggaatcagggagcaggcgcatgcagaactttgccttcagcggaggactctacgggggcctgccccccacacacagtgaagcaggctcccagccacatggcatccatgggacagcactcatcggtggcttgcccatgccatacccaaaccttgcccctgatgtggacttgactcctgttgtgccgtcagcagtgaacatgaaccctgcaccaaaccctgcagtctataaccctgaagctgtaaatgaacccaagaagaagaaatatgcaaaagaggcttggccaggcaagaagcccacacctt

SEQ ID NO: 24483 - DNA, 611 bp, Homo sapiens
  source 1..611: mol_type = unassigned DNA
ggagacgcaagatggcggcagccgcgaactccggctctagcctcccgctgttcgactgcccaacctgggcaggtaagccccctcccggtttacatctggatgtagtcaaaggagacaaactaattgagaaactgattattgatgagaagaagtattacttatttgggagaaaccctgatttgtgtgactttaccattgaccaccagtcttgctctcgggtccatgctgcacttgtctaccacaagcatctgaagagagttttcctgatagatctcaacagtacacacggcactttcttgggtcacattcggttggaacctcacaagcctcagcaaattcccatcgattccacggtctcatttggcgcatccacaagggcatacactctgcgcgagaagcctcagacattgccatcggctgtgaaaggagatgagaagatgggtggagaggatgatgaactcaagggcttactggggcttccagaggaggaaactgagcttgataacctgacagagttcaacactgcccacaaccacatggcatccatgggacagcactcatcggtggcttgcccatgccatacccaaaccttgcccctgatgtggacttga

SEQ ID NO: 24484 - DNA, 10219 bp, Homo sapiens
  source 1..10219: mol_type = unassigned DNA
atgaacctctagtcttgctttgaaaaaatcattctgtgtaactcttgactgtgactaagttcctaatacacctgttgggacgatcactgacaccgtataccatttgagaggtacttttcttgacccaatactggtgattagagaagagaggtatcttggtttttggtttttttctttgatcattatgaacattggcttttcacccctgaagtgaaaatgttgaaaactgagtcttcaggtgaacgaaccactctcagaagtgcctctcctcacaggaatgcatatcgaactgagtttcaggcactgaaaagtacctttgacaaacccaagtcagatggggaacaaaaaacaaaagaaggtgagggctcccagcagagcagggggaggaaatatggctccaatgtcaacagaattaaaaacctatttatgcagatgggtatggaacccaacgagaatgctgcagtcattgccaaaacaagggggaaaggtggacattcatctcctcagagaagaatgaagcccaaagaatttctggaaaaaacagatggctcagttgttaagttggagtcttctgtttctgaacgaattagtagatttgacactatgtacgatggcccttcatattccaagttcactgagactcgaaagatgtttgagagaagtgtgcatgaatcaggacagaacaaccgctattccccaaagaaagagaaagctggagggagtgaacctcaggatgaatggggaggttccaagtccaacagaggcagtactgattccttggacagccttagctcccgaactgaggctgtctccccaactgtgagtcaactgagtgcagtatttgagaacactgattctcccagtgccatcatttctgagaaggctgaaaacaatgaatactcagtgactgggcattatcccttgaatttaccatctgttactgttacaaatcttgacacatttggtcacctgaaggattctaattcctggcctccttcaaacaagcgaggtgttgatacagaggatgctcacaagagtaatgcaactccagtaccagaagtggcttctaaaagtacctctctagcttcgatacctggtgaagagatccagcagagcaaggaacccgaggactccacatctaatcaacagactcccgacagcattgacaaagatggtcctgaagaaccttgtgctgaaagtaaggcaatgccaaagtccgaaatcccttcaccacaaagccaactgttagaagatgctgaagctaatttggttggaagggaggcagcaaagcaacagaggaaagaacttgcaggtggtgatttcacctctcctgatgcttctgcatccagttgtggaaaagaagtacctgaagattcaaataattttgatggttcccatgtgtacatgcacagtgactataatgtgtatagggtgagatccaggtataattcagactggggagagacaggcactgagcaggatgaggaggaagatagtgatgagaacagttactatcagcctgatatggagtactcggaaattgttggattgccagaagaagaagaaatcccagcaaataggaaaattaagtttagtagtgctcctattaaggttttcaacacatactccaatgaagactatgacaggagaaatgacgaagttgaccctgtggctgcttcagctgagtatgaacttgaaaaacgtgtagaaaagctggaacttttcccagtggagctagagaaagatgaggatggtcttggtataagtattattggaatgggtgttggagcagatgctggacttgaaaagctgggaatattcgtcaagacagtaacagaaggtggtgctgctcaacgggatggcagaatacaagtcaatgaccagattgtggaagtggatggaatcagcttggtgggtgtgacacagaattttgcagcaacagttctcagaaacaccaagggcaacgtcagatttgttattgggcgggaaaaaccaggacaagtgagcgaggttgcccagttgataagccagacactggaacaggagaggcgccagagagagctgctggaacagcactatgcccagtatgatgccgacgatgacgagacaggagaatatgccacagatgaagaagaagatgaggtaggacctgtccttcctggcagcgacatggccattgaagtctttgagctgcctgagaatgaggacatgttttccccatcagaactggacacaagcaagctcagtcacaagttcaaagagttgcaaatcaaacatgcagttacagaagcagagattcaaaaattgaagaccaagctgcaggcagcagaaaatgagaaagtgaggtgggaactagaaaaaacccaactccaacaaaacatagaagagaataaggaaagaatgttgaagttggaaagctactggattgaggcccaaacattatgccacacagtgaatgagcatctcaaagagactcaaagccagtatcaggccttggaaaagaaatacaacaaggcaaagaagttgatcaaggattttcaacaaaaagagcttgatttcatcaaaagacaggaagcagaaagaaagaaaatagaagatttggaaaaagctcatcttgtggaagtgcaaggcctccaagtgcggattagagatttggaagctgaggtattcaggctactgaagcaaaatgggactcaagttaacaataataacaacatctttgagagaagaacatctcttggtgaagtctctaaaggggataccatggagaacttggatggcaagcagacatcttgccaagatggcctaagtcaagacttgaatgaagcagtcccagagacagagcgcctggattcaaaagcactgaaaactcgagcccagctctctgtgaagaacagacgccagagaccctctaggacaagactgtatgatagtgttagttccacagatggggaggacagtctagagagaaagggtttgagaacgtcttctccagaatcagattctggtgttccacccctcaccccggtggatagcaatgtgcccttctcgtctgaccacatagctgaatttcaagaagaaccactggacccagaaatggggcctctctcctctatgtggggagacacttcactgttttctacttcaaagtctgatcatgatgtggaagaatctccttgccatcaccaaaccaccaacaagaaaatattacgagaaaaagatgatgccaaagatcccaaatcactaagggcatccagttcattggcggtgcaaggaggaaaaattaagcggaagtttgtggatctgggggcgcctttgcgaaggaattccagcaagggaaagaagtggaaagaaaaagaaaaagaagccagtaggttttctgcaggtagcaggatcttcagaggcagactggaaaactggacacccaagccatgttcaacagctcagacctccactcgttccccttgcatgcctttctcatggtttaatgacagccggaaaggatcctattccttcaggaacctgcctgcgcctacaagttcccttcagccttctcctgagactctaatttcagataaaaaggggtccaagaattttaccttcaatgatgacttcagtcccagcagtaccagttcagcagacctcagcggcttaggagcagaacctaaaacaccagggctctctcagtccttagcactgtcatcagatgagatccttgatgatggacagtctcccaaacacagtcagtgtcagaatcgggccgttcaggaatggagtgtgcagcaggtttctcactggttaatgagcctaaatctggagcagtatgtatctgaattcagtgcccaaaacatcactggagaacagctcctgcagttggatggaaataaacttaaggctcttggaatgacagcatcccaggaccgagcagtggtcaaaaagaaactcaaggaaatgaagatgtctctagagaaggctcggaaggcccaagagaaaatggaaaaacaaagagaaaagctaaggagaaaggagcaagagcaaatgcagaggaagtccaaaaagacagaaaagatgacgtcaactacagccgagggtgctggtgagcagtaacacataccctcttacagatgatggagatgctccaagagaagtccccacctcttcctgccctgctctcctccagaggatgaaaaagaaactaaatgataagggtaatgcggctctaggccggctgaggaactgtgtgttgaataactgcattttctgcaatagaatgcactcttaattttaactactaaaataatcccaagccacctttggttcattaacaaaccagagatttcatttaagtagctgtgttttgctcttctctaacttaccaacatcttgtgttgtgttgggtgtgttttgtcacttggagaactagtgtgaccccacccaagagcatgacacaccctggtgttgttaatggagcgccgtgaattttcagtgtgggatcctgaaatggcaattgcacatgtctgcatggcagagagcaccctgccatgagatctgagaccagtacttaacttctaggactgcaacacctactccaatgtgtgggaaagatttgctcttaattctcagtctggacagtgagaccaccccgctgtggaaacatgggtgctctgctctgtagttacctactaagggaaaaggcaagcaagtcattctgcttgctaggcatcaaaaagaaagaaaataaattatagctatttgttaaccactgaaaaaagcaaaagccttaagaatgtggatgtgggtattaccttggggttctgagggtaatatttatcctctagatacggctgaacaagaaagaaaaaaatcagacattaatgcagccatgggatattgggatctgttgaccttgctactgctgtgtgttcagcatttcagcaacactggcaaacacaacacagttcctcttccccctacctaacccaagaaattgaacaggaaattgatttttaaggaaaccaccattttcaggtttcctctcctggggaacattctggctggtcttcagcctgcctatgtcacaatcaggaactcatcacatattttctactcaagatttcccaggtgggctcagttagtattttaacaaatgtacttttaagaaaaatagaaataccagttagaggaaactgtcagttaacattttagagagattttgaatggtttttccgaaccattcctttccatacttcaaagattctcaattttacagaaaaagtttgtttaaggcagtgcataggtatactttagtagtggaggaacttatactaattttaagccagcattaaggatttccatgtttcaccaaactaagtcaagtgcaggagactggggcagaagaaggagaaaataaactcgttttgagaaatttcatgtgatgagggttttttgttttttatgctcatgtatctggttctctttgctgcgttgactctaaaaatgaggttatccactttccaaaggacaagtttcagaataagacttgaggccacatgaattcttggacagtattttacttcttttactttatgggaatctctgctctgttcccagcatctcgtatcttccactagaagtattccatatttagagcctcggcaaggcttttgagtgtaacagattaagggaactcccttgtagccccatcttgtattttaataacagtgtgatttttttttatctgaaaatctgaattcagaaattatctaaactggacatttttaattctgttttacccccaaggcctgttttcttttcattgccagagtattgtcggttatgcgtcagctcttttgtcattaggtacagacccttcattcaatcctcagaaacgttgacatgaagtaacattgtgttttacagttatcaaagtcaccattatgtttttctgtctgtcttcattaggggtatgataatgaaactgccgtattggatactctattaatgtcttgagatgtctggtgctttgttattttttcacatcatgagaaataagaagccactattaatgagtgatacaatttggcaaaacttttcaaatactaaaacactaaattagtaaaaatctggtaatattagtgcttgctattgtaaatttttgccatttttgcttatctttgggaaaaaagtgacctggatcacactggaagtttcactgtattcaagagtagaaatagaaggatgattatcttaagttatgtttacactttggtaatatttgaaaatggatgtatatactggaaatgtctgtaagtgtcttgtttttgcacctaatttatgatctattatattgcattttcttaaatatcttagaagtatttttctttataactttgtatattgaatgtttagataaatgtccaactgacaatgttataaatcaaattcttattcctaaaatcatttagtattataagtattttgattttttaagttaaattatagtaattttaggccgaagtgagttattttaacattaccacttaaaacggatgaaattgtaaaagtcatttggtttgattgccccacaaagcataagatgtaaactgattaagggtatgaaagcaaagtgaaagacctcagatcttgtgcacattttgttttcctattatttcttttattgactgtagtgcatgatacctaatcaaggctccaatgtcttgcacaattcctactttaatgctagtggttttcagtgtccttacaatttaacacagaattgttatttcatcaaccttaaaaactgcagtttttattatcagaaaatgaacaaaaagggaatatctggttgctatgaactgattccctaaaggagagctcagtatgattctaacaatagccaaaagtgttttggggtataggttatgctttgttgggagggaatgtgtggtgaggaggccaagctgcagacagaaagcattgtatgagctgtatctgggtcagggtttcccattaaaggatgttagttttataacagattactttgtttaagaccatctcccttcaagtaactcacagtttatgtaatactaatctcattctttttttacctgaatcaggaattttctgcagaatgttaagttagggaagaaacctcatttcatccattctaacactcctgatgaagtccccctttagtttcatgacaataaagctgttctgtggctatcatcctttagctgggattgacaattgatttcacaccctcaacatcacaagctttttttaacccacagcagttcatgattgcagtatgataggtactaaagccaaactcagctttcaactggcacaaaatgggactgtcaccttttgctccattgttgttggaaacaaagtggcaagagggaaaatgaggaaccagatttacctttgccactatctgtgaccctgtaatcatcactagcctgaaatcttaaaatatcccagtcccaagctacaaaaatggtcacaggtggtttgatctagcacctcggccgttagagtttgtgctgaagacaaatttgtctgggttcattgtgcaccagaattagcatgtgcttgaaaattgcattttataaaagggaaatgaaaatttgcatttatatagatactctgattcatgtttaagtgttaaaggttatgcagactaaacttcaagaggagatccagtgtttaacaatagtgttctagaggattctaaaggaagctgccccagcagccctgagagaaccatctatactttggatatgttgtagccccatcattacactgagatatttccatttgagtaactaaaggtactcctgacagagctggagatgaggggcattttggtgggcagtggtcactagggttcacgtcacctacttaatgcaaagaccttagtggtctcagaatgaaaaggtaaaatggaagagaaaagcacagtcctttcctgtcttttcaaatttactttttattaaggatgtacctgtgcactattctaaagctaagcatttaaggataaagtccagaaataaaatgtccatattttcttttcttttctttttttttttttttttctgtcatctgtcacccagactggactgcagtggtgccatcatgtcttactgcagcctcaaactcctgggctcaagtggtcctcctgcttcagcttcccaagtagctgggactacaggcatgtgccaccacccccagccaaaacatccatattttctattagaatggtttacattatgatgggggatggggagctgggggagggctgtacattcccaaaagaaagtagtgttataggaaatccaaatgcgcttcagtgattcactcctgaaaagcagcctgggtatgttggcagattttgtttgcatttgtcttgcgtatttaaagtctcaggaaatctagtcttggtccaaaacactggagaaaaaaataacaccagacaaaacacatttgagtaacttgaagtagcagcatagaataggcccaactaagaagttggaggggcaaagagaaagccgacagaatcagcttctcctggaaagtgaaagcatcaagttctatttatggtagacagagggtccttatttgcttgtccgtggtgtctatgtgggcctattgagggaatggtagttacttgaaggttcacatatgtaagcgtgtggacccagcacagtctgtgacctgattccagatcctcaagagtggagaaggaaagaaatatgatgatttcctatgcttgaccctaacccaaccccaaaactgctagggattcaacagtgagtaagatgtatgcaataagagaacagataacttctcaacaatgtgcatgccgtttgtgtagatgttcagaactacatatgtgtgaatatcactcccaccttacacacgcacacacactgcaatcacatggcattaaaaaatatattgtgtatggaacttggcgaggtcagtcaggacctggagctgtaatcatagccttattgccacttcttgcgttgtgtatacattgaatggctcatagattttaagagatttttttattgtaagtatttctactaaatgcacttatccttctatatgtttatatattttggtaaaattgatttatcagatacttggtattttagtaagaaaatttcctcaaatatttggctaatgctttgatgtcaagattgcatattgctgagttggagctcagaagaaatgtatgcagctaaaaattgcactgtgtgttcttgtgaatttgctcacaattctaaaatgacataattggtggctgtgatgcttacagtcactgcctactggctctcttatgatgaatgttgccatcatatgatcatttatttactttttgtgcaagcaatggcattttggttgttgccaaaaacaacacaagtggttgggagtgtatgttgttggaaggtgtacacttctgtttctttcagctgtattatttatacacccaggttttctgttaaggatgtaatcattcattcaagaaagaacaattggcaagaaataattaaattaccttaaaaagaattaagaggcactccagccagataacacctcccaacaacatgaaatttagttagtgcttagtgaaattccttaaatatatatgtatatgttttcttcaacattatttaatataactactgcttttatattttttaatggtgttgcaaccacttgtacacctgctacaccttactgacaaaactgggcagctgaaaataaaagagaataaattctattccactgtaagaagttgatttcttttcagctttctttgtatatcagtaaagaacacgaattgtttgaaaataattttaagtctgataagtatggatagcatgttacctaagcttttaatttgtacattttgatgtctgatcatttgcatggaagagacaatagtgccacgtctgaattgttctcttgtgcttggttaatatgtacttctctagattgttcaaaaagtttcaaatgacattccttactctttggttttcagaggcattcaagcaaaatatcacagtggtcttttgttttctgaccaatctaacaatacctgtgattaaatttaatttgttagtgtaaataaatttcttgccaatgagtattattgttgttagacaacgaatgcaataaaaagaaatactgaggtctgttgaagcaa

SEQ ID NO: 24485 - DNA, 9689 bp, Homo sapiens
  source 1..9689: mol_type = unassigned DNA
ctctcccgggattttgctgccgggctccctctctctgcggccctagagttaatcccatcagccgagatgaacctctagtcttgctttgaaaaaatcattctgtgtaactcttgactgtgactaagttcctaatacacctgttgggacgatcactgacaccgtataccatttgagaggtacttttcttgacccaatactggtgattagagaagagaggtatcttggtttttggtttttttctttgatcattatgaacattggcttttcacccctgaagtgaaaatgttgaaaactgagtcttcaggtgaacgaaccactctcagaagtgcctctcctcacaggaatgcatatcgaactgagtttcaggcactgaaaagtacctttgacaaacccaagtcagatggggaacaaaaaacaaaagaaggtgagggctcccagcagagcagggggaggaaatatggctccaatgtcaacagaattaaaaacctatttatgcagatgggtatggaacccaacgagaatgctgcagtcattgccaaaacaagggggaaaggtggacattcatctcctcagagaagaatgaagcccaaagaatttctggaaaaaacagatggctcagttgttaagttggagtcttctgtttctgaacgaattagtagatttgacactatgtacgatggcccttcatattccaagttcactgagactcgaaagatgtttgagagaagtgtgcatgaatcaggacagaacaaccgctattccccaaagaaagagaaagctggagggagtgaacctcaggatgaatggggaggttccaagtccaacagaggcagtactgattccttggacagccttagctcccgaactgaggctgtctccccaactgtgagtcaactgagtgcagtatttgagaacactgattctcccagtgccatcatttctgagaaggctgaaaacaatgaatactcagtgactgggcattatcccttgaatttaccatctgttactgttacaaatcttgacacatttggtcacctgaaggattctaattcctggcctccttcaaacaagcgaggtgttgatacagaggatgctcacaagagtaatgcaactccagtaccagaagtggcttctaaaagtacctctctagcttcgatacctggtgaagagatccagcagagcaaggaacccgaggactccacatctaatcaacagactcccgacagcattgacaaagatggtcctgaagaaccttgtgctgaaagtaaggcaatgccaaagtccgaaatcccttcaccacaaagccaactgttagaagatgctgaagctaatttggttggaagggaggcagcaaagcaacagaggaaagaacttgcaggtggtgatttcacctctcctgatgcttctgcatccagttgtggaaaagaagtacctgaagattcaaataattttgatggttcccatgtgtacatgcacagtgactataatgtgtatagggtgagatccaggtataattcagactggggagagacaggcactgagcaggatgaggaggaagatagtgatgagaacagttactatcagcctgatatggagtactcggaaattgttggattgccagaagaagaagaaatcccagcaaataggaaaattaagtttagtagtgctcctattaaggttttcaacacatactccaatgaagactatgacaggagaaatgacgaagttgaccctgtggctgcttcagctgagtatgaacttgaaaaacgtgtagaaaagctggaacttttcccagtggagctagagaaagatgaggatggtcttggtataagtattattggaatgggtgttggagcagatgctggacttgaaaagctgggaatattcgtcaagacagtaacagaaggtggtgctgctcaacgggatggcagaatacaagtcaatgaccagattgtggaagtggatggaatcagcttggtgggtgtgacacagaattttgcagcaacagttctcagaaacaccaagggcaacgtcagatttgttattgggcgggaaaaaccaggacaagtgagcgaggttgcccagttgataagccagacactggaacaggagaggcgccagagagagctgctggaacagcactatgcccagtatgatgccgacgatgacgagacaggagaatatgccacagatgaagaagaagatgaggtaggacctgtccttcctggcagcgacatggccattgaagtctttgagctgcctgagaatgaggacatgttttccccatcagaactggacacaagcaagctcagtcacaagttcaaagagttgcaaatcaaacatgcagttacagaagcagagattcaaaaattgaagaccaagctgcaggcagcagaaaatgagaaagtgaggtgggaactagaaaaaacccaactccaacaaaacatagaagagaataaggaaagaatgttgaagttggaaagctactggattgaggcccaaacattatgccacacagtgaatgagcatctcaaagagactcaaagccagtatcaggccttggaaaagaaatacaacaaggcaaagaagttgatcaaggattttcaacaaaaagagcttgatttcatcaaaagacaggaagcagaaagaaagaaaatagaagatttggaaaaagctcatcttgtggaagtgcaaggcctccaagtgcggattagagatttggaagctgaggtattcaggctactgaagcaaaatgggactcaagttaacaataataacaacatctttgagagaagaacatctcttggtgaagtctctaaaggggataccatggagaacttggatggcaagcagacatcttgccaagatggcctaagtcaagacttgaatgaagcagtcccagagacagagcgcctggattcaaaagcactgaaaactcgagcccagctctctgtgaagaacagacgccagagaccctctaggacaagactgtatgatagtgttagttccacagatggggaggacagtctagagagaaagaattttaccttcaatgatgacttcagtcccagcagtaccagttcagcagacctcagcggcttaggagcagaacctaaaacaccagggctctctcagtccttagcactgtcatcagatgagagcctggatatgatagatgacgagatccttgatgatggacagtctcccaaacacagtcagtgtcagaatcgggccgttcaggaatggagtgtgcagcaggtttctcactggttaatgagcctaaatctggagcagtatgtatctgaattcagtgcccaaaacatcactggagaacagctcctgcagttggatggaaataaacttaaggctcttggaatgacagcatcccaggaccgagcagtggtcaaaaagaaactcaaggaaatgaagatgtctctagagaaggctcggaaggcccaagagaaaatggaaaaacaaagagaaaagctaaggagaaaggagcaagagcaaatgcagaggaagtccaaaaagacagaaaagatgacgtcaactacagccgagggtgctggtgagcagtaacacataccctcttacagatgatggagatgctccaagagaagtccccacctcttcctgccctgctctcctccagaggatgaaaaagaaactaaatgataagggtaatgcggctctaggccggctgaggaactgtgtgttgaataactgcattttctgcaatagaatgcactcttaattttaactactaaaataatcccaagccacctttggttcattaacaaaccagagatttcatttaagtagctgtgttttgctcttctctaacttaccaacatcttgtgttgtgttgggtgtgttttgtcacttggagaactagtgtgaccccacccaagagcatgacacaccctggtgttgttaatggagcgccgtgaattttcagtgtgggatcctgaaatggcaattgcacatgtctgcatggcagagagcaccctgccatgagatctgagaccagtacttaacttctaggactgcaacacctactccaatgtgtgggaaagatttgctcttaattctcagtctggacagtgagaccaccccgctgtggaaacatgggtgctctgctctgtagttacctactaagggaaaaggcaagcaagtcattctgcttgctaggcatcaaaaagaaagaaaataaattatagctatttgttaaccactgaaaaaagcaaaagccttaagaatgtggatgtgggtattaccttggggttctgagggtaatatttatcctctagatacggctgaacaagaaagaaaaaaatcagacattaatgcagccatgggatattgggatctgttgaccttgctactgctgtgtgttcagcatttcagcaacactggcaaacacaacacagttcctcttccccctacctaacccaagaaattgaacaggaaattgatttttaaggaaaccaccattttcaggtttcctctcctggggaacattctggctggtcttcagcctgcctatgtcacaatcaggaactcatcacatattttctactcaagatttcccaggtgggctcagttagtattttaacaaatgtacttttaagaaaaatagaaataccagttagaggaaactgtcagttaacattttagagagattttgaatggtttttccgaaccattcctttccatacttcaaagattctcaattttacagaaaaagtttgtttaaggcagtgcataggtatactttagtagtggaggaacttatactaattttaagccagcattaaggatttccatgtttcaccaaactaagtcaagtgcaggagactggggcagaagaaggagaaaataaactcgttttgagaaatttcatgtgatgagggttttttgttttttatgctcatgtatctggttctctttgctgcgttgactctaaaaatgaggttatccactttccaaaggacaagtttcagaataagacttgaggccacatgaattcttggacagtattttacttcttttactttatgggaatctctgctctgttcccagcatctcgtatcttccactagaagtattccatatttagagcctcggcaaggcttttgagtgtaacagattaagggaactcccttgtagccccatcttgtattttaataacagtgtgatttttttttatctgaaaatctgaattcagaaattatctaaactggacatttttaattctgttttacccccaaggcctgttttcttttcattgccagagtattgtcggttatgcgtcagctcttttgtcattaggtacagacccttcattcaatcctcagaaacgttgacatgaagtaacattgtgttttacagttatcaaagtcaccattatgtttttctgtctgtcttcattaggggtatgataatgaaactgccgtattggatactctattaatgtcttgagatgtctggtgctttgttattttttcacatcatgagaaataagaagccactattaatgagtgatacaatttggcaaaacttttcaaatactaaaacactaaattagtaaaaatctggtaatattagtgcttgctattgtaaatttttgccatttttgcttatctttgggaaaaaagtgacctggatcacactggaagtttcactgtattcaagagtagaaatagaaggatgattatcttaagttatgtttacactttggtaatatttgaaaatggatgtatatactggaaatgtctgtaagtgtcttgtttttgcacctaatttatgatctattatattgcattttcttaaatatcttagaagtatttttctttataactttgtatattgaatgtttagataaatgtccaactgacaatgttataaatcaaattcttattcctaaaatcatttagtattataagtattttgattttttaagttaaattatagtaattttaggccgaagtgagttattttaacattaccacttaaaacggatgaaattgtaaaagtcatttggtttgattgccccacaaagcataagatgtaaactgattaagggtatgaaagcaaagtgaaagacctcagatcttgtgcacattttgttttcctattatttcttttattgactgtagtgcatgatacctaatcaaggctccaatgtcttgcacaattcctactttaatgctagtggttttcagtgtccttacaatttaacacagaattgttatttcatcaaccttaaaaactgcagtttttattatcagaaaatgaacaaaaagggaatatctggttgctatgaactgattccctaaaggagagctcagtatgattctaacaatagccaaaagtgttttggggtataggttatgctttgttgggagggaatgtgtggtgaggaggccaagctgcagacagaaagcattgtatgagctgtatctgggtcagggtttcccattaaaggatgttagttttataacagattactttgtttaagaccatctcccttcaagtaactcacagtttatgtaatactaatctcattctttttttacctgaatcaggaattttctgcagaatgttaagttagggaagaaacctcatttcatccattctaacactcctgatgaagtccccctttagtttcatgacaataaagctgttctgtggctatcatcctttagctgggattgacaattgatttcacaccctcaacatcacaagctttttttaacccacagcagttcatgattgcagtatgataggtactaaagccaaactcagctttcaactggcacaaaatgggactgtcaccttttgctccattgttgttggaaacaaagtggcaagagggaaaatgaggaaccagatttacctttgccactatctgtgaccctgtaatcatcactagcctgaaatcttaaaatatcccagtcccaagctacaaaaatggtcacaggtggtttgatctagcacctcggccgttagagtttgtgctgaagacaaatttgtctgggttcattgtgcaccagaattagcatgtgcttgaaaattgcattttataaaagggaaatgaaaatttgcatttatatagatactctgattcatgtttaagtgttaaaggttatgcagactaaacttcaagaggagatccagtgtttaacaatagtgttctagaggattctaaaggaagctgccccagcagccctgagagaaccatctatactttggatatgttgtagccccatcattacactgagatatttccatttgagtaactaaaggtactcctgacagagctggagatgaggggcattttggtgggcagtggtcactagggttcacgtcacctacttaatgcaaagaccttagtggtctcagaatgaaaaggtaaaatggaagagaaaagcacagtcctttcctgtcttttcaaatttactttttattaaggatgtacctgtgcactattctaaagctaagcatttaaggataaagtccagaaataaaatgtccatattttcttttcttttctttttttttttttttttctgtcatctgtcacccagactggactgcagtggtgccatcatgtcttactgcagcctcaaactcctgggctcaagtggtcctcctgcttcagcttcccaagtagctgggactacaggcatgtgccaccacccccagccaaaacatccatattttctattagaatggtttacattatgatgggggatggggagctgggggagggctgtacattcccaaaagaaagtagtgttataggaaatccaaatgcgcttcagtgattcactcctgaaaagcagcctgggtatgttggcagattttgtttgcatttgtcttgcgtatttaaagtctcaggaaatctagtcttggtccaaaacactggagaaaaaaataacaccagacaaaacacatttgagtaacttgaagtagcagcatagaataggcccaactaagaagttggaggggcaaagagaaagccgacagaatcagcttctcctggaaagtgaaagcatcaagttctatttatggtagacagagggtccttatttgcttgtccgtggtgtctatgtgggcctattgagggaatggtagttacttgaaggttcacatatgtaagcgtgtggacccagcacagtctgtgacctgattccagatcctcaagagtggagaaggaaagaaatatgatgatttcctatgcttgaccctaacccaaccccaaaactgctagggattcaacagtgagtaagatgtatgcaataagagaacagataacttctcaacaatgtgcatgccgtttgtgtagatgttcagaactacatatgtgtgaatatcactcccaccttacacacgcacacacactgcaatcacatggcattaaaaaatatattgtgtatggaacttggcgaggtcagtcaggacctggagctgtaatcatagccttattgccacttcttgcgttgtgtatacattgaatggctcatagattttaagagatttttttattgtaagtatttctactaaatgcacttatccttctatatgtttatatattttggtaaaattgatttatcagatacttggtattttagtaagaaaatttcctcaaatatttggctaatgctttgatgtcaagattgcatattgctgagttggagctcagaagaaatgtatgcagctaaaaattgcactgtgtgttcttgtgaatttgctcacaattctaaaatgacataattggtggctgtgatgcttacagtcactgcctactggctctcttatgatgaatgttgccatcatatgatcatttatttactttttgtgcaagcaatggcattttggttgttgccaaaaacaacacaagtggttgggagtgtatgttgttggaaggtgtacacttctgtttctttcagctgtattatttatacacccaggttttctgttaaggatgtaatcattcattcaagaaagaacaattggcaagaaataattaaattaccttaaaaagaattaagaggcactccagccagataacacctcccaacaacatgaaatttagttagtgcttagtgaaattccttaaatatatatgtatatgttttcttcaacattatttaatataactactgcttttatattttttaatggtgttgcaaccacttgtacacctgctacaccttactgacaaaactgggcagctgaaaataaaagagaataaattctattccactgtaagaagttgatttcttttcagctttctttgtatatcagtaaagaacacgaattgtttgaaaataattttaagtctgataagtatggatagcatgttacctaagcttttaatttgtacattttgatgtctgatcatttgcatggaagagacaatagtgccacgtctgaattgttctcttgtgcttggttaatatgtacttctctagattgttcaaaaagtttcaaatgacattccttactctttggttttcagaggcattcaagcaaaatatcacagtggtcttttgttttctgaccaatctaacaatacctgtgattaaatttaatttgttagtgtaaataaatttcttgccaatgagtattattgttgttagacaacgaatgcaataaaaagaaatactgaggtctgttgaagc

SEQ ID NO: 24486 - DNA, 555 bp, Homo sapiens
  source 1..555: mol_type = unassigned DNA
actgagcctttagaaaagggcggggttcgggggggagtgagctgaaaaactctccctagacaggaaaggtagaagacctcctcatccctttctctttggcagtgagatcttaaggtcaagatgaacctctagtcttgctttgaaaaaatcattctgtgtaactcttgactgtgactaagttcctaatacacctgttgggacgatcactgacaccgtataccatttgagaggtacttttcttgacccaatactggtgattagagaagagaggtatcttggtttttggtttttttctttgatcattatgaacattggcttttcacccctgaagtgaaaatgttgaaaactgagtcttcaggtgaacgaaccactctcagaagtgcctctcctcacaggaatgcatatcgaactgagtttcaggcactgaaaagtacctttgacaaacccaagtcagatggggaacaaaaaacaaaagaaggtgagggctcccagcagagcagggggaggaaatatggctccaatgtcaacagaattaaaaacctatttatgcagatg

SEQ ID NO: 24487 - DNA, 512 bp, Homo sapiens
  source 1..512: mol_type = unassigned DNA
gcggccgccgcagccgccctacgcgctgcgccgtgaggagcgggttgcggtgtacccagcgggccggcgccgagccgagccgccgcgtccaccgtggggcggggggcgcctgcgaggagggggtgggagccgcggcggcccgaccctccccgcccgcggcgctcccgctcggatgaacctctagtcttgctttgaaaaaatcattctgtgtaactcttgactgtgactaagttcctaatacacctgttgggacgatcactgacaccgtataccatttgagaggtacttttcttgacccaatactggtgattagagaagagaggtatcttggtttttggtttttttctttgatcattatgaacattggcttttcacccctgaagtgaaaatgttgaaaactgagtcttcaggtgaacgaaccactctcagaagtgcctctcctcacaggaatgcatatcgaactgagtttcaggcactgaaaagtacctttgacaaacccaagtcagatgggg

SEQ ID NO: 24488 - DNA, 9928 bp, Homo sapiens
  source 1..9928: mol_type = unassigned DNA
attatcagtgggatctattgtttcctggcacattgggaggaaaaacaaagggatttattttcattaccctgtaattttttttcttttctatttttttaaatgtggccagggagctcgtctctctccgtgtcacagtgggatccgcctggcagccgccgggagctgcagccaatgtgttaggacttcaggtgcttcttggcacaaagctagactgcgacctcctaccatagcgcttggcgtcacctgctctcccggtcctgccccagggccgagggattgcgtcccgaaccgggcttgggaatcggctgcctctcaaatgaacctctagtcttgctttgaaaaaatcattctgtgtaactcttgactgtgactaagttcctaatacacctgttgggacgatcactgacaccgtataccatttgagaggtacttttcttgacccaatactggtgattagagaagagaggtatcttggtttttggtttttttctttgatcattatgaacattggcttttcacccctgaagtgaaaatgttgaaaactgagtcttcaggtgaacgaaccactctcagaagtgcctctcctcacaggaatgcatatcgaactgagtttcaggcactgaaaagtacctttgacaaacccaagtcagatggggaacaaaaaacaaaagaaggtgagggctcccagcagagcagggggaggaaatatggctccaatgtcaacagaattaaaaacctatttatgcagatgggtatggaacccaacgagaatgctgcagtcattgccaaaacaagggggaaaggtggacattcatctcctcagagaagaatgaagcccaaagaatttctggaaaaaacagatggctcagttgttaagttggagtcttctgtttctgaacgaattagtagatttgacactatgtacgatggcccttcatattccaagttcactgagactcgaaagatgtttgagagaagtgtgcatgaatcaggacagaacaaccgctattccccaaagaaagagaaagctggagggagtgaacctcaggatgaatggggaggttccaagtccaacagaggcagtactgattccttggacagccttagctcccgaactgaggctgtctccccaactgtgagtcaactgagtgcagtatttgagaacactgattctcccagtgccatcatttctgagaaggctgaaaacaatgaatactcagtgactgggcattatcccttgaatttaccatctgttactgttacaaatcttgacacatttggtcacctgaaggattctaattcctggcctccttcaaacaagcgaggtgttgatacagaggatgctcacaagagtaatgcaactccagtaccagaagtggcttctaaaagtacctctctagcttcgatacctggtgaagagatccagcagagcaaggaacccgaggactccacatctaatcaacagactcccgacagcattgacaaagatggtcctgaagaaccttgtgctgaaagtaaggcaatgccaaagtccgaaatcccttcaccacaaagccaactgttagaagatgctgaagctaatttggttggaagggaggcagcaaagcaacagaggaaagaacttgcaggtggtgatttcacctctcctgatgcttctgcatccagttgtggaaaagaagtacctgaagattcaaataattttgatggttcccatgtgtacatgcacagtgactataatgtgtatagggtgagatccaggtataattcagactggggagagacaggcactgagcaggatgaggaggaagatagtgatgagaacagttactatcagcctgatatggagtactcggaaattgttggattgccagaagaagaagaaatcccagcaaataggaaaattaagtttagtagtgctcctattaaggttttcaacacatactccaatgaagactatgacaggagaaatgacgaagttgaccctgtggctgcttcagctgagtatgaacttgaaaaacgtgtagaaaagctggaacttttcccagtggagctagagaaagatgaggatggtcttggtataagtattattggaatgggtgttggagcagatgctggacttgaaaagctgggaatattcgtcaagacagtaacagaaggtggtgctgctcaacgggatggcagaatacaagtcaatgaccagattgtggaagtggatggaatcagcttggtgggtgtgacacagaattttgcagcaacagttctcagaaacaccaagggcaacgtcagatttgttattgggcgggaaaaaccaggacaagtgagcgaggttgcccagttgataagccagacactggaacaggagaggcgccagagagagctgctggaacagcactatgcccagtatgatgccgacgatgacgagacaggagaatatgccacagatgaagaagaagatgaggtaggacctgtccttcctggcagcgacatggccattgaagtctttgagctgcctgagaatgaggacatgttttccccatcagaactggacacaagcaagctcagtcacaagttcaaagagttgcaaatcaaacatgcagttacagaagcagagattcaaaaattgaagaccaagctgcaggcagcagaaaatgagaaagtgaggtgggaactagaaaaaacccaactccaacaaaacatagaagagaataaggaaagaatgttgaagttggaaagctactggattgaggcccaaacattatgccacacagtgaatgagcatctcaaagagactcaaagccagtatcaggccttggaaaagaaatacaacaaggcaaagaagttgatcaaggattttcaacaaaaagagcttgatttcatcaaaagacaggaagcagaaagaaagaaaatagaagatttggaaaaagctcatcttgtggaagtgcaaggcctccaagtgcggattagagatttggaagctgaggtattcaggctactgaagcaaaatgggactcaagttaacaataataacaacatctttgagagaagaacatctcttggtgaagtctctaaaggggataccatggagaacttggatggcaagcagacatcttgccaagatggcctaagtcaagacttgaatgaagcagtcccagagacagagcgcctggattcaaaagcactgaaaactcgagcccagctctctgtgaagaacagacgccagagaccctctaggacaagactgtatgatagtgttagttccacagatggggaggacagtctagagagaaagaattttaccttcaatgatgacttcagtcccagcagtaccagttcagcagacctcagcggcttaggagcagaacctaaaacaccagggctctctcagtccttagcactgtcatcagatgagagcctggatatgatagatgacgagatccttgatgatggacagtctcccaaacacagtcagtgtcagaatcgggccgttcaggaatggagtgtgcagcaggtttctcactggttaatgagcctaaatctggagcagtatgtatctgaattcagtgcccaaaacatcactggagaacagctcctgcagttggatggaaataaacttaaggctcttggaatgacagcatcccaggaccgagcagtggtcaaaaagaaactcaaggaaatgaagatgtctctagagaaggctcggaaggcccaagagaaaatggaaaaacaaagagaaaagctaaggagaaaggagcaagagcaaatgcagaggaagtccaaaaagacagaaaagatgacgtcaactacagccgagggtgctggtgagcagtaacacataccctcttacagatgatggagatgctccaagagaagtccccacctcttcctgccctgctctcctccagaggatgaaaaagaaactaaatgataagggtaatgcggctctaggccggctgaggaactgtgtgttgaataactgcattttctgcaatagaatgcactcttaattttaactactaaaataatcccaagccacctttggttcattaacaaaccagagatttcatttaagtagctgtgttttgctcttctctaacttaccaacatcttgtgttgtgttgggtgtgttttgtcacttggagaactagtgtgaccccacccaagagcatgacacaccctggtgttgttaatggagcgccgtgaattttcagtgtgggatcctgaaatggcaattgcacatgtctgcatggcagagagcaccctgccatgagatctgagaccagtacttaacttctaggactgcaacacctactccaatgtgtgggaaagatttgctcttaattctcagtctggacagtgagaccaccccgctgtggaaacatgggtgctctgctctgtagttacctactaagggaaaaggcaagcaagtcattctgcttgctaggcatcaaaaagaaagaaaataaattatagctatttgttaaccactgaaaaaagcaaaagccttaagaatgtggatgtgggtattaccttggggttctgagggtaatatttatcctctagatacggctgaacaagaaagaaaaaaatcagacattaatgcagccatgggatattgggatctgttgaccttgctactgctgtgtgttcagcatttcagcaacactggcaaacacaacacagttcctcttccccctacctaacccaagaaattgaacaggaaattgatttttaaggaaaccaccattttcaggtttcctctcctggggaacattctggctggtcttcagcctgcctatgtcacaatcaggaactcatcacatattttctactcaagatttcccaggtgggctcagttagtattttaacaaatgtacttttaagaaaaatagaaataccagttagaggaaactgtcagttaacattttagagagattttgaatggtttttccgaaccattcctttccatacttcaaagattctcaattttacagaaaaagtttgtttaaggcagtgcataggtatactttagtagtggaggaacttatactaattttaagccagcattaaggatttccatgtttcaccaaactaagtcaagtgcaggagactggggcagaagaaggagaaaataaactcgttttgagaaatttcatgtgatgagggttttttgttttttatgctcatgtatctggttctctttgctgcgttgactctaaaaatgaggttatccactttccaaaggacaagtttcagaataagacttgaggccacatgaattcttggacagtattttacttcttttactttatgggaatctctgctctgttcccagcatctcgtatcttccactagaagtattccatatttagagcctcggcaaggcttttgagtgtaacagattaagggaactcccttgtagccccatcttgtattttaataacagtgtgatttttttttatctgaaaatctgaattcagaaattatctaaactggacatttttaattctgttttacccccaaggcctgttttcttttcattgccagagtattgtcggttatgcgtcagctcttttgtcattaggtacagacccttcattcaatcctcagaaacgttgacatgaagtaacattgtgttttacagttatcaaagtcaccattatgtttttctgtctgtcttcattaggggtatgataatgaaactgccgtattggatactctattaatgtcttgagatgtctggtgctttgttattttttcacatcatgagaaataagaagccactattaatgagtgatacaatttggcaaaacttttcaaatactaaaacactaaattagtaaaaatctggtaatattagtgcttgctattgtaaatttttgccatttttgcttatctttgggaaaaaagtgacctggatcacactggaagtttcactgtattcaagagtagaaatagaaggatgattatcttaagttatgtttacactttggtaatatttgaaaatggatgtatatactggaaatgtctgtaagtgtcttgtttttgcacctaatttatgatctattatattgcattttcttaaatatcttagaagtatttttctttataactttgtatattgaatgtttagataaatgtccaactgacaatgttataaatcaaattcttattcctaaaatcatttagtattataagtattttgattttttaagttaaattatagtaattttaggccgaagtgagttattttaacattaccacttaaaacggatgaaattgtaaaagtcatttggtttgattgccccacaaagcataagatgtaaactgattaagggtatgaaagcaaagtgaaagacctcagatcttgtgcacattttgttttcctattatttcttttattgactgtagtgcatgatacctaatcaaggctccaatgtcttgcacaattcctactttaatgctagtggttttcagtgtccttacaatttaacacagaattgttatttcatcaaccttaaaaactgcagtttttattatcagaaaatgaacaaaaagggaatatctggttgctatgaactgattccctaaaggagagctcagtatgattctaacaatagccaaaagtgttttggggtataggttatgctttgttgggagggaatgtgtggtgaggaggccaagctgcagacagaaagcattgtatgagctgtatctgggtcagggtttcccattaaaggatgttagttttataacagattactttgtttaagaccatctcccttcaagtaactcacagtttatgtaatactaatctcattctttttttacctgaatcaggaattttctgcagaatgttaagttagggaagaaacctcatttcatccattctaacactcctgatgaagtccccctttagtttcatgacaataaagctgttctgtggctatcatcctttagctgggattgacaattgatttcacaccctcaacatcacaagctttttttaacccacagcagttcatgattgcagtatgataggtactaaagccaaactcagctttcaactggcacaaaatgggactgtcaccttttgctccattgttgttggaaacaaagtggcaagagggaaaatgaggaaccagatttacctttgccactatctgtgaccctgtaatcatcactagcctgaaatcttaaaatatcccagtcccaagctacaaaaatggtcacaggtggtttgatctagcacctcggccgttagagtttgtgctgaagacaaatttgtctgggttcattgtgcaccagaattagcatgtgcttgaaaattgcattttataaaagggaaatgaaaatttgcatttatatagatactctgattcatgtttaagtgttaaaggttatgcagactaaacttcaagaggagatccagtgtttaacaatagtgttctagaggattctaaaggaagctgccccagcagccctgagagaaccatctatactttggatatgttgtagccccatcattacactgagatatttccatttgagtaactaaaggtactcctgacagagctggagatgaggggcattttggtgggcagtggtcactagggttcacgtcacctacttaatgcaaagaccttagtggtctcagaatgaaaaggtaaaatggaagagaaaagcacagtcctttcctgtcttttcaaatttactttttattaaggatgtacctgtgcactattctaaagctaagcatttaaggataaagtccagaaataaaatgtccatattttcttttcttttctttttttttttttttttctgtcatctgtcacccagactggactgcagtggtgccatcatgtcttactgcagcctcaaactcctgggctcaagtggtcctcctgcttcagcttcccaagtagctgggactacaggcatgtgccaccacccccagccaaaacatccatattttctattagaatggtttacattatgatgggggatggggagctgggggagggctgtacattcccaaaagaaagtagtgttataggaaatccaaatgcgcttcagtgattcactcctgaaaagcagcctgggtatgttggcagattttgtttgcatttgtcttgcgtatttaaagtctcaggaaatctagtcttggtccaaaacactggagaaaaaaataacaccagacaaaacacatttgagtaacttgaagtagcagcatagaataggcccaactaagaagttggaggggcaaagagaaagccgacagaatcagcttctcctggaaagtgaaagcatcaagttctatttatggtagacagagggtccttatttgcttgtccgtggtgtctatgtgggcctattgagggaatggtagttacttgaaggttcacatatgtaagcgtgtggacccagcacagtctgtgacctgattccagatcctcaagagtggagaaggaaagaaatatgatgatttcctatgcttgaccctaacccaaccccaaaactgctagggattcaacagtgagtaagatgtatgcaataagagaacagataacttctcaacaatgtgcatgccgtttgtgtagatgttcagaactacatatgtgtgaatatcactcccaccttacacacgcacacacactgcaatcacatggcattaaaaaatatattgtgtatggaacttggcgaggtcagtcaggacctggagctgtaatcatagccttattgccacttcttgcgttgtgtatacattgaatggctcatagattttaagagatttttttattgtaagtatttctactaaatgcacttatccttctatatgtttatatattttggtaaaattgatttatcagatacttggtattttagtaagaaaatttcctcaaatatttggctaatgctttgatgtcaagattgcatattgctgagttggagctcagaagaaatgtatgcagctaaaaattgcactgtgtgttcttgtgaatttgctcacaattctaaaatgacataattggtggctgtgatgcttacagtcactgcctactggctctcttatgatgaatgttgccatcatatgatcatttatttactttttgtgcaagcaatggcattttggttgttgccaaaaacaacacaagtggttgggagtgtatgttgttggaaggtgtacacttctgtttctttcagctgtattatttatacacccaggttttctgttaaggatgtaatcattcattcaagaaagaacaattggcaagaaataattaaattaccttaaaaagaattaagaggcactccagccagataacacctcccaacaacatgaaatttagttagtgcttagtgaaattccttaaatatatatgtatatgttttcttcaacattatttaatataactactgcttttatattttttaatggtgttgcaaccacttgtacacctgctacaccttactgacaaaactgggcagctgaaaataaaagagaataaattctattccactgtaagaagttgatttcttttcagctttctttgtatatcagtaaagaacacgaattgtttgaaaataattttaagtctgataagtatggatagcatgttacctaagcttttaatttgtacattttgatgtctgatcatttgcatggaagagacaatagtgccacgtctgaattgttctcttgtgcttggttaatatgtacttctctagattgttcaaaaagtttcaaatgacattccttactctttggttttcagaggcattcaagcaaaatatcacagtggtcttttgttttctgaccaatctaacaatacctgtgattaaatttaatttgttagtgtaaataaatttcttgccaatgagtattattgttgttagacaacgaatgcaataaaaagaaatactgagg

SEQ ID NO: 24489 - DNA, 10090 bp, Homo sapiens
  source 1..10090: mol_type = unassigned DNA
atgaacctctagtcttgctttgaaaaaatcattctgtgtaactcttgactgtgactaagttcctaatacacctgttgggacgatcactgacaccgtataccatttgagaggtacttttcttgacccaatactggtgattagagaagagaggtatcttggtttttggtttttttctttgatcattatgaacattggcttttcacccctgaagtgaaaatgttgaaaactgagtcttcaggtgaacgaaccactctcagaagtgcctctcctcacaggaatgcatatcgaactgagtttcaggcactgaaaagtacctttgacaaacccaagtcagatggggaacaaaaaacaaaagaaggtgagggctcccagcagagcagggggaggaaatatggctccaatgtcaacagaattaaaaacctatttatgcagatgggtatggaacccaacgagaatgctgcagtcattgccaaaacaagggggaaaggtggacattcatctcctcagagaagaatgaagcccaaagaatttctggaaaaaacagatggctcagttgttaagttggagtcttctgtttctgaacgaattagtagatttgacactatgtacgatggcccttcatattccaagttcactgagactcgaaagatgtttgagagaagtgtgcatgaatcaggacagaacaaccgctattccccaaagaaagagaaagctggagggagtgaacctcaggatgaatggggaggttccaagtccaacagaggcagtactgattccttggacagccttagctcccgaactgaggctgtctccccaactgtgagtcaactgagtgcagtatttgagaacactgattctcccagtgccatcatttctgagaaggctgaaaacaatgaatactcagtgactgggcattatcccttgaatttaccatctgttactgttacaaatcttgacacatttggtcacctgaaggattctaattcctggcctccttcaaacaagcgaggtgttgatacagaggatgctcacaagagtaatgcaactccagtaccagaagtggcttctaaaagtacctctctagcttcgatacctggtgaagagatccagcagagcaaggaacccgaggactccacatctaatcaacagactcccgacagcattgacaaagatggtcctgaagaaccttgtgctgaaagtaaggcaatgccaaagtccgaaatcccttcaccacaaagccaactgttagaagatgctgaagctaatttggttggaagggaggcagcaaagcaacagaggaaagaacttgcaggtggtgatttcacctctcctgatgcttctgcatccagttgtggaaaagaagtacctgaagattcaaataattttgatggttcccatgtgtacatgcacagtgactataatgtgtatagggtgagatccaggtataattcagactggggagagacaggcactgagcaggatgaggaggaagatagtgatgagaacagttactatcagcctgatatggagtactcggaaattgttggattgccagaagaagaagaaatcccagcaaataggaaaattaagtttagtagtgctcctattaaggttttcaacacatactccaatgaagactatgacaggagaaatgacgaagttgaccctgtggctgcttcagctgagtatgaacttgaaaaacgtgtagaaaagctggaacttttcccagtggagctagagaaagatgaggatggtcttggtataagtattattggaatgggtgttggagcagatgctggacttgaaaagctgggaatattcgtcaagacagtaacagaaggtggtgctgctcaacgggatggcagaatacaagtcaatgaccagattgtggaagtggatggaatcagcttggtgggtgtgacacagaattttgcagcaacagttctcagaaacaccaagggcaacgtcagatttgttattgggcgggaaaaaccaggacaagtgagcgaggttgcccagttgataagccagacactggaacaggagaggcgccagagagagctgctggaacagcactatgcccagtatgatgccgacgatgacgagacaggagaatatgccacagatgaagaagaagatgaggtaggacctgtccttcctggcagcgacatggccattgaagtctttgagctgcctgagaatgaggacatgttttccccatcagaactggacacaagcaagctcagtcacaagttcaaagagttgcaaatcaaacatgcagttacagaagcagagattcaaaaattgaagaccaagctgcaggcagcagaaaatgagaaagtgaggtgggaactagaaaaaacccaactccaacaaaacatagaagagaataaggaaagaatgttgaagttggaaagctactggattgaggcccaaacattatgccacacagtgaatgagcatctcaaagagactcaaagccagtatcaggccttggaaaagaaatacaacaaggcaaagaagttgatcaaggattttcaacaaaaagagcttgatttcatcaaaagacaggaagcagaaagaaagaaaatagaagatttggaaaaagctcatcttgtggaagtgcaaggcctccaagtgcggattagagatttggaagctgaggtattcaggctactgaagcaaaatgggactcaagttaacaataataacaacatctttgagagaagaacatctcttggtgaagtctctaaaggggataccatggagaacttggatggcaagcagacatcttgccaagatggcctaagtcaagacttgaatgaagcagtcccagagacagagcgcctggattcaaaagcactgaaaactcgagcccagctctctgtgaagaacagacgccagagaccctctaggacaagactgtatgatagtgttagttccacagatggggaggacagtctagagagaaagccatcaaacagtttctataaccacatgcatattaccaaattacttccacctaagggtttgagaacgtcttctccagaatcagattctggtgttccacccctcaccccggtggatagcaatgtgcccttctcgtctgaccacatagctgaatttcaagaagaaccactggacccagaaatggggcctctctcctctatgtggggagacacttcactgttttctacttcaaagtctgatcatgatgtggaagaatctccttgccatcaccaaaccaccaacaagaaaatattacgagaaaaagatgatgccaaagatcccaaatcactaagggcatccagttcattggcggtgcaaggaggaaaaattaagcggaagtttgtggatctgggggcgcctttgcgaaggaattccagcaagggaaagaagtggaaagaaaaagaaaaagaagccagtaggttttctgcaggtagcaggatcttcagaggcagactggaaaactggacacccaagccatgttcaacagctcagacctccactcgttccccttgcatgcctttctcatggtttaatgacagccggaaaggatcctattccttcaggaacctgcctgcgcctacaagttcccttcagccttctcctgagactctaatttcagataaaaaggggtccaagaattttaccttcaatgatgacttcagtcccagcagtaccagttcagcagacctcagcggcttaggagcagaacctaaaacaccagggctctctcagtccttagcactgtcatcagatgaggctcttggaatgacagcatcccaggaccgagcagtggtcaaaaagaaactcaaggaaatgaagatgtctctagagaaggctcggaaggcccaagagaaaatggaaaaacaaagagaaaagctaaggagaaaggagcaagagcaaatgcagaggaagtccaaaaagacagaaaagatgacgtcaactacagccgagggtgctggtgagcagtaacacataccctcttacagatgatggagatgctccaagagaagtccccacctcttcctgccctgctctcctccagaggatgaaaaagaaactaaatgataagggtaatgcggctctaggccggctgaggaactgtgtgttgaataactgcattttctgcaatagaatgcactcttaattttaactactaaaataatcccaagccacctttggttcattaacaaaccagagatttcatttaagtagctgtgttttgctcttctctaacttaccaacatcttgtgttgtgttgggtgtgttttgtcacttggagaactagtgtgaccccacccaagagcatgacacaccctggtgttgttaatggagcgccgtgaattttcagtgtgggatcctgaaatggcaattgcacatgtctgcatggcagagagcaccctgccatgagatctgagaccagtacttaacttctaggactgcaacacctactccaatgtgtgggaaagatttgctcttaattctcagtctggacagtgagaccaccccgctgtggaaacatgggtgctctgctctgtagttacctactaagggaaaaggcaagcaagtcattctgcttgctaggcatcaaaaagaaagaaaataaattatagctatttgttaaccactgaaaaaagcaaaagccttaagaatgtggatgtgggtattaccttggggttctgagggtaatatttatcctctagatacggctgaacaagaaagaaaaaaatcagacattaatgcagccatgggatattgggatctgttgaccttgctactgctgtgtgttcagcatttcagcaacactggcaaacacaacacagttcctcttccccctacctaacccaagaaattgaacaggaaattgatttttaaggaaaccaccattttcaggtttcctctcctggggaacattctggctggtcttcagcctgcctatgtcacaatcaggaactcatcacatattttctactcaagatttcccaggtgggctcagttagtattttaacaaatgtacttttaagaaaaatagaaataccagttagaggaaactgtcagttaacattttagagagattttgaatggtttttccgaaccattcctttccatacttcaaagattctcaattttacagaaaaagtttgtttaaggcagtgcataggtatactttagtagtggaggaacttatactaattttaagccagcattaaggatttccatgtttcaccaaactaagtcaagtgcaggagactggggcagaagaaggagaaaataaactcgttttgagaaatttcatgtgatgagggttttttgttttttatgctcatgtatctggttctctttgctgcgttgactctaaaaatgaggttatccactttccaaaggacaagtttcagaataagacttgaggccacatgaattcttggacagtattttacttcttttactttatgggaatctctgctctgttcccagcatctcgtatcttccactagaagtattccatatttagagcctcggcaaggcttttgagtgtaacagattaagggaactcccttgtagccccatcttgtattttaataacagtgtgatttttttttatctgaaaatctgaattcagaaattatctaaactggacatttttaattctgttttacccccaaggcctgttttcttttcattgccagagtattgtcggttatgcgtcagctcttttgtcattaggtacagacccttcattcaatcctcagaaacgttgacatgaagtaacattgtgttttacagttatcaaagtcaccattatgtttttctgtctgtcttcattaggggtatgataatgaaactgccgtattggatactctattaatgtcttgagatgtctggtgctttgttattttttcacatcatgagaaataagaagccactattaatgagtgatacaatttggcaaaacttttcaaatactaaaacactaaattagtaaaaatctggtaatattagtgcttgctattgtaaatttttgccatttttgcttatctttgggaaaaaagtgacctggatcacactggaagtttcactgtattcaagagtagaaatagaaggatgattatcttaagttatgtttacactttggtaatatttgaaaatggatgtatatactggaaatgtctgtaagtgtcttgtttttgcacctaatttatgatctattatattgcattttcttaaatatcttagaagtatttttctttataactttgtatattgaatgtttagataaatgtccaactgacaatgttataaatcaaattcttattcctaaaatcatttagtattataagtattttgattttttaagttaaattatagtaattttaggccgaagtgagttattttaacattaccacttaaaacggatgaaattgtaaaagtcatttggtttgattgccccacaaagcataagatgtaaactgattaagggtatgaaagcaaagtgaaagacctcagatcttgtgcacattttgttttcctattatttcttttattgactgtagtgcatgatacctaatcaaggctccaatgtcttgcacaattcctactttaatgctagtggttttcagtgtccttacaatttaacacagaattgttatttcatcaaccttaaaaactgcagtttttattatcagaaaatgaacaaaaagggaatatctggttgctatgaactgattccctaaaggagagctcagtatgattctaacaatagccaaaagtgttttggggtataggttatgctttgttgggagggaatgtgtggtgaggaggccaagctgcagacagaaagcattgtatgagctgtatctgggtcagggtttcccattaaaggatgttagttttataacagattactttgtttaagaccatctcccttcaagtaactcacagtttatgtaatactaatctcattctttttttacctgaatcaggaattttctgcagaatgttaagttagggaagaaacctcatttcatccattctaacactcctgatgaagtccccctttagtttcatgacaataaagctgttctgtggctatcatcctttagctgggattgacaattgatttcacaccctcaacatcacaagctttttttaacccacagcagttcatgattgcagtatgataggtactaaagccaaactcagctttcaactggcacaaaatgggactgtcaccttttgctccattgttgttggaaacaaagtggcaagagggaaaatgaggaaccagatttacctttgccactatctgtgaccctgtaatcatcactagcctgaaatcttaaaatatcccagtcccaagctacaaaaatggtcacaggtggtttgatctagcacctcggccgttagagtttgtgctgaagacaaatttgtctgggttcattgtgcaccagaattagcatgtgcttgaaaattgcattttataaaagggaaatgaaaatttgcatttatatagatactctgattcatgtttaagtgttaaaggttatgcagactaaacttcaagaggagatccagtgtttaacaatagtgttctagaggattctaaaggaagctgccccagcagccctgagagaaccatctatactttggatatgttgtagccccatcattacactgagatatttccatttgagtaactaaaggtactcctgacagagctggagatgaggggcattttggtgggcagtggtcactagggttcacgtcacctacttaatgcaaagaccttagtggtctcagaatgaaaaggtaaaatggaagagaaaagcacagtcctttcctgtcttttcaaatttactttttattaaggatgtacctgtgcactattctaaagctaagcatttaaggataaagtccagaaataaaatgtccatattttcttttcttttctttttttttttttttttctgtcatctgtcacccagactggactgcagtggtgccatcatgtcttactgcagcctcaaactcctgggctcaagtggtcctcctgcttcagcttcccaagtagctgggactacaggcatgtgccaccacccccagccaaaacatccatattttctattagaatggtttacattatgatgggggatggggagctgggggagggctgtacattcccaaaagaaagtagtgttataggaaatccaaatgcgcttcagtgattcactcctgaaaagcagcctgggtatgttggcagattttgtttgcatttgtcttgcgtatttaaagtctcaggaaatctagtcttggtccaaaacactggagaaaaaaataacaccagacaaaacacatttgagtaacttgaagtagcagcatagaataggcccaactaagaagttggaggggcaaagagaaagccgacagaatcagcttctcctggaaagtgaaagcatcaagttctatttatggtagacagagggtccttatttgcttgtccgtggtgtctatgtgggcctattgagggaatggtagttacttgaaggttcacatatgtaagcgtgtggacccagcacagtctgtgacctgattccagatcctcaagagtggagaaggaaagaaatatgatgatttcctatgcttgaccctaacccaaccccaaaactgctagggattcaacagtgagtaagatgtatgcaataagagaacagataacttctcaacaatgtgcatgccgtttgtgtagatgttcagaactacatatgtgtgaatatcactcccaccttacacacgcacacacactgcaatcacatggcattaaaaaatatattgtgtatggaacttggcgaggtcagtcaggacctggagctgtaatcatagccttattgccacttcttgcgttgtgtatacattgaatggctcatagattttaagagatttttttattgtaagtatttctactaaatgcacttatccttctatatgtttatatattttggtaaaattgatttatcagatacttggtattttagtaagaaaatttcctcaaatatttggctaatgctttgatgtcaagattgcatattgctgagttggagctcagaagaaatgtatgcagctaaaaattgcactgtgtgttcttgtgaatttgctcacaattctaaaatgacataattggtggctgtgatgcttacagtcactgcctactggctctcttatgatgaatgttgccatcatatgatcatttatttactttttgtgcaagcaatggcattttggttgttgccaaaaacaacacaagtggttgggagtgtatgttgttggaaggtgtacacttctgtttctttcagctgtattatttatacacccaggttttctgttaaggatgtaatcattcattcaagaaagaacaattggcaagaaataattaaattaccttaaaaagaattaagaggcactccagccagataacacctcccaacaacatgaaatttagttagtgcttagtgaaattccttaaatatatatgtatatgttttcttcaacattatttaatataactactgcttttatattttttaatggtgttgcaaccacttgtacacctgctacaccttactgacaaaactgggcagctgaaaataaaagagaataaattctattccactgtaagaagttgatttcttttcagctttctttgtatatcagtaaagaacacgaattgtttgaaaataattttaagtctgataagtatggatagcatgttacctaagcttttaatttgtacattttgatgtctgatcatttgcatggaagagacaatagtgccacgtctgaattgttctcttgtgcttggttaatatgtacttctctagattgttcaaaaagtttcaaatgacattccttactctttggttttcagaggcattcaagcaaaatatcacagtggtcttttgttttctgaccaatctaacaatacctgtgattaaatttaatttgttagtgtaaataaatttcttgccaatgagtattattgttgttagacaacgaatgcaataaaaagaaatactgaggtctgttgaagcaa

SEQ ID NO: 24490 - DNA, 4649 bp, Homo sapiens
  source 1..4649: mol_type = unassigned DNA
cttttcccctccgctccccgccgcctcctgacgccgggcgtgacgtcaccacgcccggcggccgccattacagagagccgagctctggagcctcagcgagcggaggaggaggcgcagcggccgacggccgagtactgcggtgagagccagcgggccagcgccagcctcaacagccgccagaagtacacgaggaaccggcggcggcgtgtgcgtgtaggcccgtgtgcgggcggcggcgcgggagcagcgcggagcggcagccggctggggcgggtggcatcatggacgagaaggtgttcaccaaggagctggaccagtggatcgagcagctgaacgagtgcaagcagctgtccgagtcccaggtcaagagcctctgcgagaaggctaaagaaatcctgacaaaagaatccaacgtgcaagaggttcgatgtccagttactgtctgtggagatgtgcatgggcaatttcatgatctcatggaactgtttagaattggtggcaaatcaccagatacaaattacttgtttatgggagattatgttgacagaggatattattcagttgaaacagttacactgcttgtagctcttaaggttcgttaccgtgaacgcatcaccattcttcgagggaatcatgagagcagacagatcacacaagtttatggtttctatgatgaatgtttaagaaaatatggaaatgcaaatgtttggaaatattttacagatctttttgactatcttcctctcactgccttggtggatgggcagatcttctgtctacatggtggtctctcgccatctatagatacactggatcatatcagagcacttgatcgcctacaagaagttccccatgagggtccaatgtgtgacttgctgtggtcagatccagatgaccgtggtggttggggtatatctcctcgaggagctggttacacctttgggcaagatatttctgagacatttaatcatgccaatggcctcacgttggtgtctagagctcaccagctagtgatggagggatataactggtgccatgaccggaatgtagtaacgattttcagtgctccaaactattgttatcgttgtggtaaccaagctgcaatcatggaacttgacgatactctaaaatactctttcttgcagtttgacccagcacctcgtagaggcgagccacatgttactcgtcgtaccccagactacttcctgtaatgaaattttaaacttgtacagtattgccatgaaccatatatcgacctaatggaaatgggaagagcaacagtaactccaaagtgtcagaaaatagttaacattcaaaaaacttgttttcacatggaccaaaagatgtgccatataaaaatacaaagcctcttgtcatcaacagccgtgaccactttagaatgaaccagttcattgcatgctgaagcgacattgttggtcaagaaaccagtttctggcatagcgctatttgtagttacttttgctttctctgagagactgcagataataagatgtaaacattaacacctcgtgaatacaatttaacttccatttagctatagctttactcagcatgactgtagataaggatagcagcaaacaatcattggagcttaatgaacatttttaaaaataattaccaaggcctcccttctacttgtgagttttgaaattgttctttttattttcagggataccgtttaatttaattatatgatttgtctgcactcagtttattccctactcaaatctcagccccatgttgttctttgttattgtcagaacctggtgagttgttttgaacagaactgttttttccccttcctgtaagacgatgtgactgcacaagagcactgcagtgtttttcataataaacttgtgaactaagaactgagaaggtcaaattttaattgtatcaatgggcaagactggtgctgtttattaaaaaagttaaatcaattgagtaaattttagaatttgtagacttgtaggtaaaataaaaatcaagggcactacataacctctctggtaactccttgacattcttcagattaacttcaggatttatttgtatttcacatattacaatttgtcacattgttggtgtgcactttgtgggttcttcctgcatattaacttgtttgtaagaaaggaaatctgtgctgcttcagtaagacttaattgtaaaaccatataacttgagatttaagtctttgggttttgttttaataaaacagcatgttttcaggtagagcttaaactaaatgatgtgtttacttagtgcagtttctggttatgaatattatattgctatgtgtatattatatggactctttaaaatgattgacagattggcaaattcttaaatctttgtacattgttgagtcatatgttcttagagttaaatttgtctcagataagaaagtgttaaagcattagcctgtgtcaagttctttgagtgatactagtgaaaccaaatagaaaactattgttggatcatgatttagtcttatgtacattcacccgaagacaaaaatggtacttaaagtggcagtgttcaacatttaatgagtttttccccttttatccttcgaataggattagatgtttaaaaaaaagttcttctgtgggaactaatatttgatattttaacctaccagagtaaacaggaacacttaatcatacttgtgagtgtagtaaataaaagttttcttgctttgtgctgtgttgaatctggaaccaacagggaagttatagcatatcccctttctaaaatgcttgaggaacacatacataccgaatgtcttttctgatctaattgatagtatttttagtggcttgtggagttaattttccaaagcaaaaggccattagggtttctacatttcatttcatttcattcttttctttcacaagaaatacattctctgtgtgtctttttgttgctctgtcactctatgccctttctctccgactgaacaaatagcttatccatgtgcagtggttttaatacccaaacaatctagacaccaagcagctattttttccggtcctgtgatatcagaattgaccaaggaatacgtatattgtaattgacacgtggtggtatcttccaggtacaaattctctaaattttgtggttagcagaatgggacttgtgataagaatagcttggttttagcataactagggtttaaaataattgtttaattatagagactgaccgggctttggccatctaaactggaaagtgttagtaccctaccttcttttgaaaatggctatggtaaggaaaatgtgttagtaaattatgtattttcttgaaaaatacataattatggttggatgggaatcactaagttgggtgttaactgatgtctcaattagtaacattaggattttcattaataaacctaaaaagctttccctaagaacaggcctggcacagtggctcatgcctgtaatcccagcactttgggagaccagggtgggtggatcccttgaggtcaggagttgaagagcagcctggccaacatggcaaaaccccatctctacaaaaaatatgaaaatcagccgggcttggtggcataccatagtcccagctacttgggaggctgaggtgagaggatcgcctgagcccaggagatggaggttgcagtgggctgagattgtgccactgtactccagtctgggtgacagagccagaccctgtctcaaaaataaagaggattctgagtttgtatagtgagggcttgcagaaattttgaaacttattttgtaagtttacaatgaatttgtacatgatgtgctcatgtcttgggttgagtatcctagacatgattttttcatttgctgcatattaaacatttgttggttgtagtcggtatttcttaaatagaagtttgtcaatattagattagtttcaagaaggacttagctcaggaaaaggatagttatttctgtggttctcagctttgatgcctacagagattctgatttaaattgctggaggagggcccaggcatacattttttaagtttcccaagtgattctaatttacatctagggttaaaaacagccaggcgcggtggctcatgcctgtaatcccagcacttggggaggccggggtgggtggatcacctgatgtcaggagatcgagaccagcctggccagcgtggtgaaaccccatctctattaaaaatacaaaactgaccggtgtggtggcaggagcctgtaatcccagctacttgggaggctgaggcaggagaatcacttgaactcaggaggaggaggttacagtgagcccagatcgtgccattgcactccagcctgggcaaaaagagcaaaactccatctcaaaaaacaaaaacacctcactgctgtttcctaagtacatacttaagaaaattgggatacatggtggtggttcatggatgttgataaggaattaaaatgtaccgtgcgactctctgtttcagtggtgacttttacctgtttagtataaatattcctttgcttccaaccataaatgtgttcttagaaatgggcctatagtttagtaacctatagtttggtaataggcttgtttgttttcagatggattttggttctgtgagctaaagctattttgcattaaagccttcgtcctca

SEQ ID NO: 24491 - DNA, 2006 bp, Homo sapiens
  source 1..2006: mol_type = unassigned DNA
cggcggaaatgcccgagcgatgacggaaacccggagggaggggagagaaagagcgagagaaggggaaagacaagtcgggagaggccggtaggcgtgaggcgggcctgaagcggcagcgggcggccttcgtccggcgagagctaggccgaggacccgcgccgcgctccccggcacctcaccgcgtccttcaccgactcccgcggcgcgcggccgggcggggaagggcgggcgggggtctcctccaggctgcgcgctcggagccgcctgctgggcttgggcggggcgcggggcccgcggccgccctacccggctcagtcctccccctgtgggacctggcgacggcggcggagggagaggggagcggcgcccgggccggggccgggggcgggtggggaggggggagggcggcggccgggctggggctcgggatccgcatcgggatcgggccgccatggacgacaaggcgttcaccaaggagctggaccagtgggtcgagcagctgaacgagtgtaagcagctgaacgagaaccaagtgcggacgctgtgcgagaaggcaaaggaaattttaacaaaagaatcaaatgtgcaagaggttcgttgccctgttactgtctgtggagatgtgcatggtcaatttcatgatcttatggaactctttagaattggtggaaaatcaccggatacaaactacttattcatgggtgactatgtagacagaggatattattcagtggagactgtgactcttcttgtagcattaaaggtgcgttatccagaacgcattacaatattgagaggaaatcacgaaagccgacaaattacccaagtatatggcttttatgatgaatgtctgcgaaagtatgggaatgccaacgtttggaaatattttacagatctctttgattatcttccacttacagctttagtagatggacagatattctgcctccatggtggcctctctccatccatagacacactggatcatataagagccctggatcgtttacaggaagttccacatgagggcccaatgtgtgatctgttatggtcagatccagatgatcgtggtggatggggtatttcaccacgtggtgctggctacacatttggacaagacatttctgaaacctttaaccatgccaatggtctcacactggtttctcgtgcccaccagcttgtaatggagggatacaattggtgtcatgatcggaatgtggttaccattttcagtgcacccaattactgttatcgttgtgggaaccaggctgctatcatggaattagatgacactttaaaatattccttccttcaatttgacccagcgcctcgtcgtggtgagcctcatgttacacggcgcaccccagactacttcctataaatttctcctgggaaacctgcctttgtatgtggaagtatacctggctttttaaaatatatgtatttaaaaacaaaaagcaacagtaatctatgtgtttctgtaacaaattgggatctgtcttggcattaaaccacatcatggaccaaatgtgccatactaatgatgagcatttagcacaatttgagactgaaatttagtacactatgttctaggtcagtctaacagtttgcctgctgtatttatagtaaccattttcctttggactgttcaagcaaaaaaggtaactaactgcttcatctccttttgcgcttatttggaaattttagttatagtgtttaactggcatggattaatagagttggagttttatttttaagaaaaattcacaagctaacttccactaatccattatcctttattttattgaaatgtataattaacttaactgaagaaaaggttcttcttgggagtatgttgtcataacatttaaagagatttcccttcatttaaactaaattactgttttatgttgatctgcatatttctgtatatttgtcatgacagtgcttgcatcctatttggtgtactcagcaaataaacttttcattttaaacaaaaacattca

SEQ ID NO: 24492 - DNA, 1723 bp, Homo sapiens
  source 1..1723: mol_type = unassigned DNA
aagtcgggagaggccggtaggcgtgaggcgggcctgaagcggcagcgggcggccttcgtccggcgagagctaggccgaggacccgcgccgcgctccccggcacctcaccgcgtccttcaccgactcccgcggcgcgcggccgggctggggctcgggatccgcatcgggatcgggccgccatggacgacaaggcgttcaccaaggagctggaccagtgggtcgagcagctgaacgagtgtaagcagctgaacgagaaccaagtgcggacgctgtgcgagaaggcaaaggaaattttaacaaaagaatcaaatgtgcaagaggttcgttgccctgttactgtctgtggagatgtgcatggtcaatttcatgatcttatggaactctttagaattggtggaaaatcaccggatacaaactacttattcatgggtgactatgtagacagaggatattattcagtggagactgtgactcttcttgtagcattaaaggtgcgttatccagaacgcattacaatattgagaggaaatcacgaaagccgacaaattacccaagtatatggcttttatgatgaatgtctgcgaaagtatgggaatgccaacgtttggaaatattttacagatctctttgattatcttccacttacagctttagtagatggacagatattctgcctccatggtggcctctctccatccatagacacactggatcatataagagccctggatcgtttacaggaagttccacatgagggcccaatgtgtgatctgttatggtcagatccagatgatcgtggtggatggggtatttcaccacgtggtgctggctacacatttggacaagacatttctgaaacctttaaccatgccaatggtctcacactggtttctcgtgcccaccagcttgtaatggagggatacaattggtgtcatgatcggaatgtggttaccattttcagtgcacccaattactgttatcgttgtgggaaccaggctgctatcatggaattagatgacactttaaaatattccttccttcaatttgacccagcgcctcgtcgtggtgagcctcatgttacacggcgcaccccagactacttcctataaatttctcctgggaaacctgcctttgtatgtggaagtatacctggctttttaaaatatatgtatttaaaaacaaaaagcaacagtaatctatgtgtttctgtaacaaattgggatctgtcttggcattaaaccacatcatggaccaaatgtgccatactaatgatgagcatttagcacaatttgagactgaaatttagtacactatgttctaggtcagtctaacagtttgcctgctgtatttatagtaaccattttcctttggactgttcaagcaaaaaaggtaactaactgcttcatctccttttgcgcttatttggaaattttagttatagtgtttaactggcatggattaatagagttggagttttatttttaagaaaaattcacaagctaacttccactaatccattatcctttattttattgaaatgtataattaacttaactgaagaaaaggttcttcttgggagtatgttgtcataacatttaaagagatttcccttcatttaaactaaattactgttttatgttgatctgcatatttctgtatatttgtcatgacagtgcttgcatcctatttggtgtactcagcaaataaacttttcattttaaac

SEQ ID NO: 24493 - DNA, 3123 bp, Homo sapiens
  source 1..3123: mol_type = unassigned DNA
cgcagagggccggggctacggggcagcgccccgggcgatgaggggccggcgttgaccgggaagagcgggcaccgcggcagtggctccgaggggacccgcgatggcagcgccctgagaggaggctccaggcagggcgggctgcgctggcagcggccgctgaggtgctggccggccggctggctggcgacgggggcagaagcgacgagaggcgcgctcggcacccgcacccccgtgcccccgcctcagttgtctaaacttcgggctctcttccacccgctctgcgcgcccagagtcaacaacttcttcacccccctccgcccccgcccttccctccgtcagccccgggagctcgccgcgcgccggggaccaggaacctccagcgctgagatgtggccgtgaggcgttggcgggcggcgaggagaagctcggcggcgtcccggggccggagggccgtggggccggggcgcaggggcgcgagcaccccgcgcctctcccccgcctcctcctgccgtctccgccgctgcccgtgccttgcaagcagcagccggagctgccaagcgtcagggccgcggagatgtcgtcgtcgtcgccgccggcgggggctgccagcgccgccatctcggcctcggagaaagtggacggcttcacccggaaatcggtccgcaaggcgcagaggcagaagcgctcccagggctcgtcgcagtttcgcagccagggcagccaggcagagctgcacccgctgccccagctcaaagatgccacttcaaatgaacaacaagagcttttctgtcagaagttgcagcagtgttgtatactgtttgatttcatggactctgtttcagacttgaagagcaaagaaattaaaagagcaacactgaatgaactggttgagtatgtttcaactaatcgtggtgtaattgttgaatcagcgtattctgatatagtaaaaatgatcagtgctaacatcttccgtacacttcctccaagtgataatccagattttgatccagaagaggatgaacccacgcttgaggcctcttggcctcacatacagttggtatatgaattcttcttgagatttttggagagccctgatttccagcctagcattgcaaaacgatacattgatcagaaattcgtacaacagctcctggagctttttgatagtgaagatcccagagaacgtgacttcctgaagactgttctgcaccgaatttatgggaaatttcttggattaagagcattcatcagaaaacaaattaacaacattttcctcaggtttatatatgaaacagaacatttcaatggtgttgctgaacttcttgaaatattaggaagtattatcaatggctttgcattgccactgaaagcagaacataaacaatttctaatgaaggttcttattcctatgcatactgcaaaaggattagctttgtttcatgctcagctagcatattgtgttgtacagttcctggagaaagatacaacactaacagagccagtgatcagaggactgctgaaattttggccaaaaacctgcagtcagaaagaggtgatgtttttaggagaaattgaagaaatcttagatgtcattgaaccaacacagttcaaaaaaattgaagagccacttttcaagcagatatccaagtgtgtatccagttctcattttcaggttgcagaaagggcattgtacttctggaataacgaatatattcttagtttgattgaggagaacattgataaaattctgccaattatgtttgccagtttgtacaaaatttccaaagaacactggaatccgaccattgtagcactggtatacaatgtgctgaaaaccctaatggaaatgaatggcaagcttttcgatgaccttactagctcatacaaagctgaaagacagagagagaaaaagaaggaattggaacgtgaagaattatggaaaaaattagaggagctaaagctaaagaaagctctagaaaaacagaatagtgcttacaacatgcacagtattctcagcaatacaagtgccgaataaaaaaaaagcctcccacctctgccggataggcagagttttgtatgcttttttgaaatatgtaaaaattacaaaacaaacctcatcagtataatataattaaaaggccaattttttctggcaactgtaaatggaaaaatatatggactaaacgtagccctgtgctgtatcatggccatagtatattgtaacctttgtctaatcattggatttattgtgtcacttctgaagtttcacagaaatgaatgaattttatcatctatgatatgagtgagataattatgggagtggtaagaattatgacttgaattcttctttgattgtgttgcacatagatatggtagtctgctctgtatatttttcccttttataatgtgcttttcacactgctgcaaaccttagttacatcctaggaaaaaatacttcctaaaataaaactaaggtatcatccttacccttctctttgtctcacccagaaatatgatggggggaattacctgccctaacccctccctcaataaatacattactgtactctggaatttaggcaaaaccttaaatctccaggctttttaaagcacaaaatataaataaaagctgggaaagtaaaccaaaattcttcagattgttcctcatgaatatcccccttcctctgcaattctccagagtggtaacagatgggtagaggcagctcaggtgaattacccagcttgcctctcaattcattcctcctcttcctctcaaaggctgaaggcagggcctttccagtcctcacaacctgtccttcacctagtccctcctgacccagggatggaggctttgagtcccacagtgtggtgatacagagcactagttgtcactgcctggctttatttaaaggaactgcagtaggcttcctctgtagagctctgaaaaggttgactatatagaggtcttgtatgtttttacttggtcaagtatttctcacatcttttgttatcagagtaccattccaatctcttaacttgcagttgtgtggaaaactgttttgtaatgaaagatcttcattgggggattgagcagcatttaataaagtctatgtttgtattttg

SEQ ID NO: 24494 - DNA, 1719 bp, Homo sapiens
  source 1..1719: mol_type = unassigned DNA
atgatacagtgcttgttctataatttgtagcatgaatcctatatgagatcttactttagatttcaagtatgttagcagcagtaattagggatgttttcctctaaggaaaattatagttataaaattattatttgttagaaatgattcctgctacttcaaattatttatccttaaatgtagaggattaacaatgaacaacttgaaataacttggttatcacctcagaagtttagtttatcactgatttaatgaagaagggcaagaagaggaaggctttatgataatgaatgccacttcaaatgaacaacaagagcttttctgtcagaagttgcagcagtgttgtatactgtttgatttcatggactctgtttcagacttgaagagcaaagaaattaaaagagcaacactgaatgaactggttgagtatgtttcaactaatcgtggtgtaattgttgaatcagcgtattctgatatagtaaaaatgatcagtgctaacatcttccgtacacttcctccaagtgataatccagattttgatccagaagaggatgaacccacgcttgaggcctcttggcctcacatacagttggtatatgaattcttcttgagatttttggagagccctgatttccagcctagcattgcaaaacgatacattgatcagaaattcgtacaacagctcctggagctttttgatagtgaagatcccagagaacgtgacttcctgaagactgttctgcaccgaatttatgggaaatttcttggattaagagcattcatcagaaaacaaattaacaacattttcctcaggtttatatatgaaacagaacatttcaatggtgttgctgaacttcttgaaatattaggaagtattatcaatggctttgcattgccactgaaagcagaacataaacaatttctaatgaaggttcttattcctatgcatactgcaaaaggattagctttgtttcatgctcagctagcatattgtgttgtacagttcctggagaaagatacaacactaacagagccagtgatcagaggactgctgaaattttggccaaaaacctgcagtcagaaagaggtgatgtttttaggagaaattgaagaaatcttagatgtcattgaaccaacacagttcaaaaaaattgaagagccacttttcaagcagatatccaagtgtgtatccagttctcattttcaggttgcagaaagggcattgtacttctggaataacgaatatattcttagtttgattgaggagaacattgataaaattctgccaattatgtttgccagtttgtacaaaatttccaaagaacactggaatccgaccattgtagcactggtatacaatgtgctgaaaaccctaatggaaatgaatggcaagcttttcgatgaccttactagctcatacaaagctgaaagacagagagagaaaaagaaggaattggaacgtgaagaattatggaaaaaattagaggagctaaagctaaagaaagctctagaaaaacagaatagtgcttacaacatgcacagtattctcagcaatacaagtgccgaataaaaaaaaagcctcccacctctgccggataggcagagttttgtatgcttttttgaaatatgtaaaaattacaaaacaaacctcatcagtataatataattaaaaggccaattttttctggcaactgtaaatggaaaaatatatggactaaacgt

SEQ ID NO: 24495 - DNA, 1850 bp, Homo sapiens
  source 1..1850: mol_type = unassigned DNA
gtagcggtcgctcgcctggggttctccgtgggcggccgacgggcccgtgcccccgcctcagttgtctaaacttcgggctctcttccacccgctctgcgcgcccagagtcaacaacttcttcacccccctccgcccccgcccttccctccgtcagccccgggagctcgccgcgcgccggggaccaggaacctccagcgctgagatgtggccgtgaggcgttggcgggcggcgaggagaagctcggcggcgtcccggggccggagggccgtggggccggggcgcaggggcgcgagcaccccgcgcctctcccccgcctcctcctgccgtctccgccgctgcccgtgccttgcaagcagcagccggagctgccaagcgtcagggccgcggagatgtcgtcgtcgtcgccgccggcgggggctgccagcgccgccatctcggcctcggagaaagtggacggcttcacccggaaatcggtccgcaaggcgcagaggcagaagcgctcccagggctcgtcgcagtttcgcagccagggcagccaggcagagctgcacccgctgccccagctcaaagatgccacttcaaatgaacaacaagagcttttctgtcagaagttgcagcagtgttgtatactgtttgatttcatggactctgtttcagacttgaagagcaaagaaattaaaagagcaacactgaatgaactggttgagtatgtttcaactaatcgtggtgtaattgttgaatcagcgtattctgatatagtaaaaatgatcagtgctaacatcttccgtacacttcctccaagtgataatccagattttgatccagaagaggatgaacccacgcttgaggcctcttggcctcacatacagttggtatatgaattcttcttgagatttttggagagccctgatttccagcctagcattgcaaaacgatacattgatcagaaattcgtacaacagctcctggagctttttgatagtgaagatcccagagaacgtgacttcctgaagactgttctgcaccgaatttatgggaaatttcttggattaagagcattcatcagaaaacaaattaacaacattttcctcaggtttatatatgaaacagaacatttcaatggtgttgctgaacttcttgaaatattaggaagtattatcaatggctttgcattgccactgaaagcagaacataaacaatttctaatgaaggttcttattcctatgcatactgcaaaaggattagctttgtttcatgctcagctagcatattgtgttgtacagttcctggagaaagatacaacactaacagagccagtgatcagaggactgctgaaattttggccaaaaacctgcagtcagaaagaggtgatgtttttaggagaaattgaagaaatcttagatgtcattgaaccaacacagttcaaaaaaattgaagagccacttttcaagcagatatccaagtgtgtatccagttctcattttcaggttgcagaaagggcattgtacttctggaataacgaatatattcttagtttgattgaggagaacattgataaaattctgccaattatgtttgccagtttgtacaaaatttccaaagaacactggaatccgaccattgtagcactggtatacaatgtgctgaaaaccctaatggaaatgaatggcaagcttttcgatgaccttactagctcatacaaagctgaaagacagagagagaaaaagaaggaattggaacgtgaagaattatggaaaaaattagaggagctaaagctaaagaaagctctagaaaaacagaatagtgcttacaacatgcacagtattctcagcaatacaagtgccgaataa

SEQ ID NO: 24496 - DNA, 2008 bp, Homo sapiens
  source 1..2008: mol_type = unassigned DNA
cttgggggcttctgagtttgagctgcatgcagaaatgtaaggcagtgcttcctggcgctgatggcaaaatgggacccatctccagttattcctcgggcaccccagctttgcaaatctgggaaagaacctacataaacatattggtgatgtagccagcttaaaaggccgagagaatccttatggattcaggagactgtttttttatttagatttttattttttatttggaagatgaaatgcttctctcgttacctgccttacatcttcagacctccgaacaccatcctttcttccagctgccacacagaagctgacattatctctacggtagaattcaaccacacgggagaattactagcgacaggggacaaggggggtcgggttgtaatatttcaacgagagcaggagagtaaaaatcaggttcatcgtaggggtgaatacaatgtttacagcacattccagagccatgaacccgagttcgattacctgaagagtttagaaatagaagaaaaaatcaataaaataagatggctcccccagcagaatgcagcttactttcttctgtctactaatgataaaactgtgaagctgtggaaagtcagcgagcgtgataagaggccagaaggctacaatctgaaagatgaggagggccggctccgggatcctgccaccatcacaaccctgcgggtgcctgtcctgagacccatggacctgatggtggaggccaccccacgaagagtatttgccaacgcacacacatatcacatcaactccatatctgtcaacagcgactatgaaacctacatgtccgctgatgacctgaggattaacctatggaactttgaaataaccaatcaaagttttaatattgtggacattaagccagccaacatggaggagctcacggaggtgatcacagcagccgagttccacccccatcattgcaacaccttcgtgtacagcagcagcaaagggacaatccggctgtgtgacatgcgggcatctgccctgtgtgacaggcacaccaaattttttgaagagccggaagatccaagcaacagatcatttttctctgaaattatctcttcgatttcggatgtgaagttcagccacagtgggaggtatatcatgaccagggactacttgaccgtcaaagtctgggatctcaacatggaaaaccgccccatcgagacttaccaggttcatgactacctccgcagcaagctgtgttccctctatgaaaatgactgcatttttgataaatttgagtgtgtgtggaatgggtcagacagtgtcatcatgacaggctcctacaacaacttcttcaggatgttcgacagaaacaccaagcgtgatgtgacccttgaggcttcgagggaaaacagcaagccccgggctatcctcaaaccccgaaaagtgtgtgtggggggcaagcggagaaaagacgagatcagtgtcgacagtctggactttagcaaaaagatcttgcatacagcttggcatccttcagaaaatattatagcagtggcggctacaaataacctatatatattccaggacaaggttaactaggtggacaagttattacttaataatctcacatactgaatactagtcaaacaagtttttaaatgtttctttgggtcttcatttgatgcattgactttaatttccctatacaggaaatgattggaatagaattaaaaggagtccaacattcccagctccccagttctaagaaacttttgtcaaacccaataggtttgggacacttctgtttagaattgaaagctgccagctaacagtaattcttccatagttgacttgaacttctgatgcttttattgcccagttttctctggtgggtccagtgttttgttcctaggtgtctgctgcgataaaatgaggttgtctgtagtatttaaggagaaaagagataagttttttttaattaagcaattccatttgattgaaaaaaatcaacaaaaaataaacaccgtttactctt

SEQ ID NO: 24497 - DNA, 2367 bp, Homo sapiens
  source 1..2367: mol_type = unassigned DNA
atatcctgctggatttctcttgcgaaaagagaaactcaccacacgggaaaaggtagaggtttcaggcagagcatttcagcgtgtgtttacaggcaggactgacttactcagcaaatcctgttcagaggagcttcagccaatgaagaggctatatcccggcttgcttgggggcttctgagtttgagctgcatgcagaaatgtaaggcagtgcttcctggcgctgatggcaaaatgggacccatctccagttattcctcgggcaccccagctttgcaaatctgggaaagaacctacataaacatattggtgatgtagccagcttaaaaggccgagagaatccttatggattcaggagactgtttttttatttagatttttattttttatttggaagatgaaatgcttctctcgttacctgccttacatcttcagacctccgaacaccatcctttcttccagctgccacacagaaggctcggaccatggtgcagtcccactggctcccctgcccccctctcctgtgagactggctgcggggagggatcatggatacttgtctgccggcttctggttcccacgcaagtaagcctgctgtcaatggaggaggacattgatacccgcaaaatcaacaacagtttcctgcgcgaccacagctatgcgaccgaagctgacattatctctacggtagaattcaaccacacgggagaattactagcgacaggggacaaggggggtcgggttgtaatatttcaacgagagcaggagagtaaaaatcaggttcatcgtaggggtgaatacaatgtttacagcacattccagagccatgaacccgagttcgattacctgaagagtttagaaatagaagaaaaaatcaataaaataagatggctcccccagcagaatgcagcttactttcttctgtctactaatgataaaactgtgaagctgtggaaagtcagcgagcgtgataagaggccagaaggctacaatctgaaagatgaggagggccggctccgggatcctgccaccatcacaaccctgcgggtgcctgtcctgagacccatggacctgatggtggaggccaccccacgaagagtatttgccaacgcacacacatatcacatcaactccatatctgtcaacagcgactatgaaacctacatgtccgctgatgacctgaggattaacctatggaactttgaaataaccaatcaaagttttaatattgtggacattaagccagccaacatggaggagctcacggaggtgatcacagcagccgagttccacccccatcattgcaacaccttcgtgtacagcagcagcaaagggacaatccggctgtgtgacatgcgggcatctgccctgtgtgacaggcacaccaaattttttgaagagccggaagatccaagcaacagatcatttttctctgaaattatctcttcgatttcggatgtgaagttcagccacagtgggaggtatatcatgaccagggactacttgaccgtcaaagtctgggatctcaacatggaaaaccgccccatcgagacttaccaggttcatgactacctccgcagcaagctgtgttccctctatgaaaatgactgcatttttgataaatttgagtgtgtgtggaatgggtcagacagtgtcatcatgacaggctcctacaacaacttcttcaggatgttcgacagaaacaccaagcgtgatgtgacccttgaggcttcgagggaaaacagcaagccccgggctatcctcaaaccccgaaaagtgtgtgtggggggcaagcggagaaaagacgagatcagtgtcgacagtctggactttagcaaaaagatcttgcatacagcttggcatccttcagaaaatattatagcagtggcggctacaaataacctatatatattccaggacaaggttaactaggtggacaagttattacttaataatctcacatactgaatactagtcaaacaagtttttaaatgtttctttgggtcttcatttgatgcattgactttaatttccctatacaggaaatgattggaatagaattaaaaggagtccaacattcccagctccccagttctaagaaacttttgtcaaacccaataggtttgggacacttctgtttagaattgaaagctgccagctaacagtaattcttccatagttgacttgaacttctgatgcttttattgcccagttttctctggtgggtccagtgttttgttcctaggtgtctgctgcgataaaatgaggttgtctgtagtatttaaggagaaaagagataagttttttttaattaagcaattccatttgattgaaaaaaatcaacaaaaaataaacaccgtttactcttag

SEQ ID NO: 24498 - DNA, 1506 bp, Homo sapiens
  source 1..1506: mol_type = unassigned DNA
atggtgcttcagccaagtgaaaggcactatcgagattggaaccacagaaggctcggaccatggtgcagtcccactggctcccctgcccccctctcctgtgagactggctgcggggagggatcatggatacttgtctgccggcttctggttcccacgcaagtaagcctgctgtcaatggaggaggacattgatacccgcaaaatcaacaacagtttcctgcgcgaccacagctatgcgaccgaagctgacattatctctacggtagaattcaaccacacgggagaattactagcgacaggggacaaggggggtcgggttgtaatatttcaacgagagcaggagagtaaaaatcaggttcatcgtaggggtgaatacaatgtttacagcacattccagagccatgaacccgagttcgattacctgaagagtttagaaatagaagaaaaaatcaataaaataagatggctcccccagcagaatgcagcttactttcttctgtctactaatgataaaactgtgaagctgtggaaagtcagcgagcgtgataagaggccagaaggctacaatctgaaagatgaggagggccggctccgggatcctgccaccatcacaaccctgcgggtgcctgtcctgagacccatggacctgatggtggaggccaccccacgaagagtatttgccaacgcacacacatatcacatcaactccatatctgtcaacagcgactatgaaacctacatgtccgctgatgacctgaggattaacctatggaactttgaaataaccaatcaaagttttaatattgtggacattaagccagccaacatggaggagctcacggaggtgatcacagcagccgagttccacccccatcattgcaacaccttcgtgtacagcagcagcaaagggacaatccggctgtgtgacatgcgggcatctgccctgtgtgacaggcacaccaaattttttgaagagccggaagatccaagcaacagatcatttttctctgaaattatctcttcgatttcggatgtgaagttcagccacagtgggaggtatatcatgaccagggactacttgaccgtcaaagtctgggatctcaacatggaaaaccgccccatcgagacttaccaggttcatgactacctccgcagcaagctgtgttccctctatgaaaatgactgcatttttgataaatttgagtgtgtgtggaatgggtcagacagtgtcatcatgacaggctcctacaacaacttcttcaggatgttcgacagaaacaccaagcgtgatgtgacccttgaggcttcgagggaaaacagcaagccccgggctatcctcaaaccccgaaaagtgtgtgtggggggcaagcggagaaaagacgagatcagtgtcgacagtctggactttagcaaaaagatcttgcatacagcttggcatccttcagaaaatattatagcagtggcggctacaaataacctatatatattccaggacaaggttaactag

SEQ ID NO: 24499 - DNA, 2012 bp, Homo sapiens
  source 1..2012: mol_type = unassigned DNA
agtcacacaggggatgactgcaagtccttcgtaaccactccaggacgctgccagggcctgagaagggacaaactccaattgctccagttcaaactggtcctggcctggtcaaacggaggagacagagcagtgattcacagcaggacgtggaattgggacactcacccaggacacactatggtgcttcagccaagtgaaaggcactatcgagattggaaccacagaaggagccaagggagaacccaagacagagaatagtggcccaataatgaagcatgaattatccagatgaaaacacctatggaaataaagctgacattatctctacggtagaattcaaccacacgggagaattactagcgacaggggacaaggggggtcgggttgtaatatttcaacgagagcaggagagtaaaaatcaggttcatcgtaggggtgaatacaatgtttacagcacattccagagccatgaacccgagttcgattacctgaagagtttagaaatagaagaaaaaatcaataaaataagatggctcccccagcagaatgcagcttactttcttctgtctactaatgataaaactgtgaagctgtggaaagtcagcgagcgtgataagaggccagaaggctacaatctgaaagatgaggagggccggctccgggatcctgccaccatcacaaccctgcgggtgcctgtcctgagacccatggacctgatggtggaggccaccccacgaagagtatttgccaacgcacacacatatcacatcaactccatatctgtcaacagcgactatgaaacctacatgtccgctgatgacctgaggattaacctatggaactttgaaataaccaatcaaagttttaatattgtggacattaagccagccaacatggaggagctcacggaggtgatcacagcagccgagttccacccccatcattgcaacaccttcgtgtacagcagcagcaaagggacaatccggctgtgtgacatgcgggcatctgccctgtgtgacaggcacaccaaattttttgaagagccggaagatccaagcaacagatcatttttctctgaaattatctcttcgatttcggatgtgaagttcagccacagtgggaggtatatcatgaccagggactacttgaccgtcaaagtctgggatctcaacatggaaaaccgccccatcgagacttaccaggttcatgactacctccgcagcaagctgtgttccctctatgaaaatgactgcatttttgataaatttgagtgtgtgtggaatgggtcagacagtgtcatcatgacaggctcctacaacaacttcttcaggatgttcgacagaaacaccaagcgtgatgtgacccttgaggcttcgagggaaaacagcaagccccgggctatcctcaaaccccgaaaagtgtgtgtggggggcaagcggagaaaagacgagatcagtgtcgacagtctggactttagcaaaaagatcttgcatacagcttggcatccttcagaaaatattatagcagtggcggctacaaataacctatatatattccaggacaaggttaactaggtggacaagttattacttaataatctcacatactgaatactagtcaaacaagtttttaaatgtttctttgggtcttcatttgatgcattgactttaatttccctatacaggaaatgattggaatagaattaaaaggagtccaacattcccagctccccagttctaagaaacttttgtcaaacccaataggtttgggacacttctgtttagaattgaaagctgccagctaacagtaattcttccatagttgacttgaacttctgatgcttttattgcccagttttctctggtgggtccagtgttttgttcctaggtgtctgctgcgataaaatgaggttgtctgtagtatttaaggagaaaagagataagttttttttaattaagcaattccatttgattgaaaaaaatcaacaaaaaataaacaccgtttactcttag

SEQ ID NO: 24500 - DNA, 2051 bp, Homo sapiens
  source 1..2051: mol_type = unassigned DNA
agcagcagcagcagcagctgcgagtgcgcgcgtgtgggtgtgagggtgagtgcgctggcgccggctgcagcgccctgcccagctccccgccagcttccctacccccgcctgccggagccgccctcccgtgggaccagcaccctcattccggccaggctcggaccatggtgcagtcccactggctcccctgcccccctctcctgtgagactggctgcggggagggatcatggatacttgtctgccggcttctggttcccacgcaagtaagcctgctgtcaatggaggaggacattgatacccgcaaaatcaacaacagtttcctgcgcgaccacagctatgcgaccgaagctgacattatctctacggtagaattcaaccacacgggagaattactagcgacaggggacaaggggggtcgggttgtaatatttcaacgagagcaggagagtaaaaatcaggttcatcgtaggggtgaatacaatgtttacagcacattccagagccatgaacccgagttcgattacctgaagagtttagaaatagaagaaaaaatcaataaaataagatggctcccccagcagaatgcagcttactttcttctgtctactaatgataaaactgtgaagctgtggaaagtcagcgagcgtgataagaggccagaaggctacaatctgaaagatgaggagggccggctccgggatcctgccaccatcacaaccctgcgggtgcctgtcctgagacccatggacctgatggtggaggccaccccacgaagagtatttgccaacgcacacacatatcacatcaactccatatctgtcaacagcgactatgaaacctacatgtccgctgatgacctgaggattaacctatggaactttgaaataaccaatcaaagttttaatattgtggacattaagccagccaacatggaggagctcacggaggtgatcacagcagccgagttccacccccatcattgcaacaccttcgtgtacagcagcagcaaagggacaatccggctgtgtgacatgcgggcatctgccctgtgtgacaggcacaccaaattttttgaagagccggaagatccaagcaacagatcatttttctctgaaattatctcttcgatttcggatgtgaagttcagccacagtgggaggtatatcatgaccagggactacttgaccgtcaaagtctgggatctcaacatggaaaaccgccccatcgagacttaccaggttcatgactacctccgcagcaagctgtgttccctctatgaaaatgactgcatttttgataaatttgagtgtgtgtggaatgggtcagacagtgtcatcatgacaggctcctacaacaacttcttcaggatgttcgacagaaacaccaagcgtgatgtgacccttgaggcttcgagggaaaacagcaagccccgggctatcctcaaaccccgaaaagtgtgtgtggggggcaagcggagaaaagacgagatcagtgtcgacagtctggactttagcaaaaagatcttgcatacagcttggcatccttcagaaaatattatagcagtggcggctacaaataacctatatatattccaggacaaggttaactaggtggacaagttattacttaataatctcacatactgaatactagtcaaacaagtttttaaatgtttctttgggtcttcatttgatgcattgactttaatttccctatacaggaaatgattggaatagaattaaaaggagtccaacattcccagctccccagttctaagaaacttttgtcaaacccaataggtttgggacacttctgtttagaattgaaagctgccagctaacagtaattcttccatagttgacttgaacttctgatgcttttattgcccagttttctctggtgggtccagtgttttgttcctaggtgtctgctgcgataaaatgaggttgtctgtagtatttaaggagaaaagagataagttttttttaattaagcaattccatttgattgaaaaaaatcaacaaaaaataaacaccgtttactcttagac

SEQ ID NO: 24501 - DNA, 3431 bp, Homo sapiens
  source 1..3431: mol_type = unassigned DNA
ggccaggcaagcctgaatcctgtccctgccatctcgccactgcagctcgggtccagaaaggcaccattttgtcgcggctgcccgctctcccagggggaggagggatcttttttgcattttggagcggctgccaaggaggggaacctgttgggcatctccccagacccgcttgtgagcgcctccggggcgggcgggcgggaccagacccctcggggcacggcgtatcttggcacccggaggcagcggaggcaggcgcagcatcctcgctgggaactggagctggagtgagcgcaccgcgcgggaggagccgccgcagcctcgcagaacccgagtggaggaggtgacagctccattgccgggtttttattttttttctctccgcctccccgtctcctcctcaggctcggaccatggtgcagtcccactggctcccctgcccccctctcctgtgagactggctgcggggagggatcatggatacttgtctgccggcttctggttcccacgcaagtaagcctgctgtcaatggaggaggacattgatacccgcaaaatcaacaacagtttcctgcgcgaccacagctatgcgaccgaagctgacattatctctacggtagaattcaaccacacgggagaattactagcgacaggggacaaggggggtcgggttgtaatatttcaacgagagcaggagagtaaaaatcaggttcatcgtaggggtgaatacaatgtttacagcacattccagagccatgaacccgagttcgattacctgaagagtttagaaatagaagaaaaaatcaataaaataagatggctcccccagcagaatgcagcttactttcttctgtctactaatgataaaactgtgaagctgtggaaagtcagcgagcgtgataagaggccagaaggctacaatctgaaagatgaggagggccggctccgggatcctgccaccatcacaaccctgcgggtgcctgtcctgagacccatggacctgatggtggaggccaccccacgaagagtatttgccaacgcacacacatatcacatcaactccatatctgtcaacagcgactatgaaacctacatgtccgctgatgacctgaggattaacctatggaactttgaaataaccaatcaaagttttaatattgtggacattaagccagccaacatggaggagctcacggaggtgatcacagcagccgagttccacccccatcattgcaacaccttcgtgtacagcagcagcaaagggacaatccggctgtgtgacatgcgggcatctgccctgtgtgacaggcacaccaaattttttgaagagccggaagatccaagcaacagatcatttttctctgaaattatctcttcgatttcggatgtgaagttcagccacagtgggaggtatatcatgaccagggactacttgaccgtcaaagtctgggatctcaacatggaaaaccgccccatcgagacttaccaggttcatgactacctccgcagcaagctgtgttccctctatgaaaatgactgcatttttgataaatttgagtgtgtgtggaatgggtcagacagtgtcatcatgacaggctcctacaacaacttcttcaggatgttcgacagaaacaccaagcgtgatgtgacccttgaggcttcgagggaaaacagcaagccccgggctatcctcaaaccccgaaaagtgtgtgtggggggcaagcggagaaaagacgagatcagtgtcgacagtctggactttagcaaaaagatcttgcatacagcttggcatccttcagaaaatattatagcagtggcggctacaaataacctatatatattccaggacaaggttaactaggtggacaagttattacttaataatctcacatactgaatactagtcaaacaagtttttaaatgtttctttgggtcttcatttgatgcattgactttaatttccctatacaggaaatgattggaatagaattaaaaggagtccaacattcccagctccccagttctaagaaacttttgtcaaacccaataggtttgggacacttctgtttagaattgaaagctgccagctaacagtaattcttccatagttgacttgaacttctgatgcttttattgcccagttttctctggtgggtccagtgttttgttcctaggtgtctgctgcgataaaatgaggttgtctgtagtatttaaggagaaaagagataagttttttttaattaagcaattccatttgattgaaaaaaatcaacaaaaaataaacaccgtttactcttagacaaattcttcttgttttgtgaaaaaccagaactagtcagtatctcctgcccctccaccatttttttttccattttccattttcctttgaacaatttcatttaagccagagatttattgcatgaagctgagaagaggatgcagaatgacaaggaaagggcacatcaaccctgctatgctctttttttgtaagctccatagaaacagcctgagaatttggctagggaacttgaatgcttcaggggacagaaagagagcactttcgacacagtgcttcccagagtgagcttggcagggccaggcggggccaaattccatctgctgccttgttactcttgctttttgtgctcttaaatggctccatataatcttctacttacatgttccttggcttttttctcttcaaccttttccagcttatttattccattgacttctaaaggccgagtcctgggtgcttattatctggtgttctaaatgaagcagtaagttggaagcagtgccaccacccctgagtccctgagaaaggctggtctgttctttttgggtgtttctcctaagcagcaccctcccctcctcctggttttggtaaccaaaagtaacaatccatcaacctccattgtacctagaacaaaaatagccaataaaaacgctgagttgtgaagtccaatcaggcacttctaactcaccccaagctcgccatctggaaaaacagaccagaaggctctcttctacagaaatgaactgtggggaaatcaagcagctgtgacatgaagtgaatgaagtccacttgaagctgtggaagatggttcatccttttccccagttgaggatccagatttataacttctagaaagccatttccagaaggttctatgtggcacacccctaggaaaggcactaaatgcatgcaaaggatttataaacttaggaaagtagatgggtggagtccagaaaactggttctgggttaatatctctacatctgtcttgatgactcatttctcctaactcccatttagtgcagggtaaatggtttgagatgagagtttttcaatgaaagggaaattttctttcagtttacagatgtattagaagtcctgactttcaagtgtaatttgctttggaggaggaaaaa

SEQ ID NO: 24502 - DNA, 2262 bp, Homo sapiens
  source 1..2262: mol_type = unassigned DNA
gcaaatcctgttcagaggagcttcagccaatgaagaggctatatcccggcttgcttgggggcttctgagtttgagctgcatgcagaaatgtaaggcagtgcttcctggcgctgatggcaaaatgggacccatctccagttattcctcgggcaccccagctttgcaaatctgggaaagaacctacataaacatattggtgatgtagccagcttaaaaggccgagagaatccttatggattcaggagactgtttttttatttagatttttattttttatttggaagatgaaatgcttctctcgttacctgccttacatcttcagacctccgaacaccatcctttcttccagctgccacacagaaggctcggaccatggtgcagtcccactggctcccctgcccccctctcctgtgagactggctgcggggagggatcatggatacttgtctgccggcttctggttcccacgcaagtaagcctgctgtcaatggaggaggacattgatacccgcaaaatcaacaacagtttcctgcgcgaccacagctatgcgaccgaagctgacattatctctacggtagaattcaaccacacgggagaattactagcgacaggggacaaggggggtcgggttgtaatatttcaacgagagcaggagagtaaaaatcaggttcatcgtaggggtgaatacaatgtttacagcacattccagagccatgaacccgagttcgattacctgaagagtttagaaatagaagaaaaaatcaataaaataagatggctcccccagcagaatgcagcttactttcttctgtctactaatgataaaactgtgaagctgtggaaagtcagcgagcgtgataagaggccagaaggctacaatctgaaagatgaggagggccggctccgggatcctgccaccatcacaaccctgcgggtgcctgtcctgagacccatggacctgatggtggaggccaccccacgaagagtatttgccaacgcacacacatatcacatcaactccatatctgtcaacagcgactatgaaacctacatgtccgctgatgacctgaggattaacctatggaactttgaaataaccaatcaaagttttaatattgtggacattaagccagccaacatggaggagctcacggaggtgatcacagcagccgagttccacccccatcattgcaacaccttcgtgtacagcagcagcaaagggacaatccggctgtgtgacatgcgggcatctgccctgtgtgacaggcacaccaaattttttgaagagccggaagatccaagcaacagatcatttttctctgaaattatctcttcgatttcggatgtgaagttcagccacagtgggaggtatatcatgaccagggactacttgaccgtcaaagtctgggatctcaacatggaaaaccgccccatcgagacttaccaggttcatgactacctccgcagcaagctgtgttccctctatgaaaatgactgcatttttgataaatttgagtgtgtgtggaatgggtcagacagtgtcatcatgacaggctcctacaacaacttcttcaggatgttcgacagaaacaccaagcgtgatgtgacccttgaggcttcgagggaaaacagcaagccccgggctatcctcaaaccccgaaaagtgtgtgtggggggcaagcggagaaaagacgagatcagtgtcgacagtctggactttagcaaaaagatcttgcatacagcttggcatccttcagaaaatattatagcagtggcggctacaaataacctatatatattccaggacaaggttaactaggtggacaagttattacttaataatctcacatactgaatactagtcaaacaagtttttaaatgtttctttgggtcttcatttgatgcattgactttaatttccctatacaggaaatgattggaatagaattaaaaggagtccaacattcccagctccccagttctaagaaacttttgtcaaacccaataggtttgggacacttctgtttagaattgaaagctgccagctaacagtaattcttccatagttgacttgaacttctgatgcttttattgcccagttttctctggtgggtccagtgttttgttcctaggtgtctgctgcgataaaatgaggttgtctgtagtatttaaggagaaaagagataagttttttttaattaagcaattccatttgattgaaaaaaatcaacaaaaaataaacaccgtttactcttagacaaa

SEQ ID NO: 24503 - DNA, 2088 bp, Homo sapiens
  source 1..2088: mol_type = unassigned DNA
gcatgcgccccactgcagcaaagagcagccgcagcctctgcctcggccaccactgctgctgggaaagagtcgtggggctgctgacgcggttgggaggagcctcgcctttaatgcaccagccgcctccagcctcctgcagcagcagcagcagcagcagcagcagcagctgcgagtgcgcgcgtgtgggtgtgagggctcggaccatggtgcagtcccactggctcccctgcccccctctcctgtgagactggctgcggggagggatcatggatacttgtctgccggcttctggttcccacgcaagtaagcctgctgtcaatggaggaggacattgatacccgcaaaatcaacaacagtttcctgcgcgaccacagctatgcgaccgaagctgacattatctctacggtagaattcaaccacacgggagaattactagcgacaggggacaaggggggtcgggttgtaatatttcaacgagagcaggagagtaaaaatcaggttcatcgtaggggtgaatacaatgtttacagcacattccagagccatgaacccgagttcgattacctgaagagtttagaaatagaagaaaaaatcaataaaataagatggctcccccagcagaatgcagcttactttcttctgtctactaatgataaaactgtgaagctgtggaaagtcagcgagcgtgataagaggccagaaggctacaatctgaaagatgaggagggccggctccgggatcctgccaccatcacaaccctgcgggtgcctgtcctgagacccatggacctgatggtggaggccaccccacgaagagtatttgccaacgcacacacatatcacatcaactccatatctgtcaacagcgactatgaaacctacatgtccgctgatgacctgaggattaacctatggaactttgaaataaccaatcaaagttttaatattgtggacattaagccagccaacatggaggagctcacggaggtgatcacagcagccgagttccacccccatcattgcaacaccttcgtgtacagcagcagcaaagggacaatccggctgtgtgacatgcgggcatctgccctgtgtgacaggcacaccaaattttttgaagagccggaagatccaagcaacagatcatttttctctgaaattatctcttcgatttcggatgtgaagttcagccacagtgggaggtatatcatgaccagggactacttgaccgtcaaagtctgggatctcaacatggaaaaccgccccatcgagacttaccaggttcatgactacctccgcagcaagctgtgttccctctatgaaaatgactgcatttttgataaatttgagtgtgtgtggaatgggtcagacagtgtcatcatgacaggctcctacaacaacttcttcaggatgttcgacagaaacaccaagcgtgatgtgacccttgaggcttcgagggaaaacagcaagccccgggctatcctcaaaccccgaaaagtgtgtgtggggggcaagcggagaaaagacgagatcagtgtcgacagtctggactttagcaaaaagatcttgcatacagcttggcatccttcagaaaatattatagcagtggcggctacaaataacctatatatattccaggacaaggttaactaggtggacaagttattacttaataatctcacatactgaatactagtcaaacaagtttttaaatgtttctttgggtcttcatttgatgcattgactttaatttccctatacaggaaatgattggaatagaattaaaaggagtccaacattcccagctccccagttctaagaaacttttgtcaaacccaataggtttgggacacttctgtttagaattgaaagctgccagctaacagtaattcttccatagttgacttgaacttctgatgcttttattgcccagttttctctggtgggtccagtgttttgttcctaggtgtctgctgcgataaaatgaggttgtctgtagtatttaaggagaaaagagataagttttttttaattaagcaattccatttgattgaaaaaaatcaacaaaaaataaacaccgtttactcttag

SEQ ID NO: 24504 - DNA, 2011 bp, Homo sapiens
  source 1..2011: mol_type = unassigned DNA
agtattcccgtgaaaagggccagtcacacaggggatgactgcaagtccttcgtaaccactccaggacgctgccagggcctgagaagggacaaactccaattgctccagttcaaactggtcctggcctggtcaaacggaggagacagagcagtgattcacagcaggacgtggtacttgcagactgaccgtcctctcaggactcactagggtctcttctctgacgagatgatacctggaattgggacactcacccaggacacactatggtgcttcagccaagtgaaaggcactatcgagattggaaccacagaagctgacattatctctacggtagaattcaaccacacgggagaattactagcgacaggggacaaggggggtcgggttgtaatatttcaacgagagcaggagagtaaaaatcaggttcatcgtaggggtgaatacaatgtttacagcacattccagagccatgaacccgagttcgattacctgaagagtttagaaatagaagaaaaaatcaataaaataagatggctcccccagcagaatgcagcttactttcttctgtctactaatgataaaactgtgaagctgtggaaagtcagcgagcgtgataagaggccagaaggctacaatctgaaagatgaggagggccggctccgggatcctgccaccatcacaaccctgcgggtgcctgtcctgagacccatggacctgatggtggaggccaccccacgaagagtatttgccaacgcacacacatatcacatcaactccatatctgtcaacagcgactatgaaacctacatgtccgctgatgacctgaggattaacctatggaactttgaaataaccaatcaaagttttaatattgtggacattaagccagccaacatggaggagctcacggaggtgatcacagcagccgagttccacccccatcattgcaacaccttcgtgtacagcagcagcaaagggacaatccggctgtgtgacatgcgggcatctgccctgtgtgacaggcacaccaaattttttgaagagccggaagatccaagcaacagatcatttttctctgaaattatctcttcgatttcggatgtgaagttcagccacagtgggaggtatatcatgaccagggactacttgaccgtcaaagtctgggatctcaacatggaaaaccgccccatcgagacttaccaggttcatgactacctccgcagcaagctgtgttccctctatgaaaatgactgcatttttgataaatttgagtgtgtgtggaatgggtcagacagtgtcatcatgacaggctcctacaacaacttcttcaggatgttcgacagaaacaccaagcgtgatgtgacccttgaggcttcgagggaaaacagcaagccccgggctatcctcaaaccccgaaaagtgtgtgtggggggcaagcggagaaaagacgagatcagtgtcgacagtctggactttagcaaaaagatcttgcatacagcttggcatccttcagaaaatattatagcagtggcggctacaaataacctatatatattccaggacaaggttaactaggtggacaagttattacttaataatctcacatactgaatactagtcaaacaagtttttaaatgtttctttgggtcttcatttgatgcattgactttaatttccctatacaggaaatgattggaatagaattaaaaggagtccaacattcccagctccccagttctaagaaacttttgtcaaacccaataggtttgggacacttctgtttagaattgaaagctgccagctaacagtaattcttccatagttgacttgaacttctgatgcttttattgcccagttttctctggtgggtccagtgttttgttcctaggtgtctgctgcgataaaatgaggttgtctgtagtatttaaggagaaaagagataagttttttttaattaagcaattccatttgattgaaaaaaatcaacaaaaaataaacaccgtttactctt

SEQ ID NO: 24505 - DNA, 2042 bp, Homo sapiens
  source 1..2042: mol_type = unassigned DNA
gtgaagtcagtggccaccagaccctgagctccccgccccatgtgctgtggagtctaggatgttgaagagagctgggaggagatgccaagaacactaggctgcttcctaccatctagcttacagtccaacatgtgagtaacaccaatacaaatgaaaagccatcaaatgtgtccaatagtgaatatcatcccggcagtctctgagctaggagggagagtcctggagaggtgtttattttctgatataaaaaaggagccaagggagaacccaagacagagaatagtggcccaataatgaagcatgaattatccagatgaaaacacctatggaaataaagctgacattatctctacggtagaattcaaccacacgggagaattactagcgacaggggacaaggggggtcgggttgtaatatttcaacgagagcaggagagtaaaaatcaggttcatcgtaggggtgaatacaatgtttacagcacattccagagccatgaacccgagttcgattacctgaagagtttagaaatagaagaaaaaatcaataaaataagatggctcccccagcagaatgcagcttactttcttctgtctactaatgataaaactgtgaagctgtggaaagtcagcgagcgtgataagaggccagaaggctacaatctgaaagatgaggagggccggctccgggatcctgccaccatcacaaccctgcgggtgcctgtcctgagacccatggacctgatggtggaggccaccccacgaagagtatttgccaacgcacacacatatcacatcaactccatatctgtcaacagcgactatgaaacctacatgtccgctgatgacctgaggattaacctatggaactttgaaataaccaatcaaagttttaatattgtggacattaagccagccaacatggaggagctcacggaggtgatcacagcagccgagttccacccccatcattgcaacaccttcgtgtacagcagcagcaaagggacaatccggctgtgtgacatgcgggcatctgccctgtgtgacaggcacaccaaattttttgaagagccggaagatccaagcaacagatcatttttctctgaaattatctcttcgatttcggatgtgaagttcagccacagtgggaggtatatcatgaccagggactacttgaccgtcaaagtctgggatctcaacatggaaaaccgccccatcgagacttaccaggttcatgactacctccgcagcaagctgtgttccctctatgaaaatgactgcatttttgataaatttgagtgtgtgtggaatgggtcagacagtgtcatcatgacaggctcctacaacaacttcttcaggatgttcgacagaaacaccaagcgtgatgtgacccttgaggcttcgagggaaaacagcaagccccgggctatcctcaaaccccgaaaagtgtgtgtggggggcaagcggagaaaagacgagatcagtgtcgacagtctggactttagcaaaaagatcttgcatacagcttggcatccttcagaaaatattatagcagtggcggctacaaataacctatatatattccaggacaaggttaactaggtggacaagttattacttaataatctcacatactgaatactagtcaaacaagtttttaaatgtttctttgggtcttcatttgatgcattgactttaatttccctatacaggaaatgattggaatagaattaaaaggagtccaacattcccagctccccagttctaagaaacttttgtcaaacccaataggtttgggacacttctgtttagaattgaaagctgccagctaacagtaattcttccatagttgacttgaacttctgatgcttttattgcccagttttctctggtgggtccagtgttttgttcctaggtgtctgctgcgataaaatgaggttgtctgtagtatttaaggagaaaagagataagttttttttaattaagcaattccatttgattgaaaaaaatcaacaaaaaataaacaccgtttactcttagacaaa

SEQ ID NO: 24506 - DNA, 2745 bp, Homo sapiens
  source 1..2745: mol_type = unassigned DNA
ggtggggggaggtgacttgatgtcatcctgagcagctgggcggcgggtgccggtgcgcacggagccgagccggggctcccgttgcgctgcaccgcgttgggtcggagtcccaggacttcagcggagatccgcgcgctgcgacggccggtgcagagcccgccgagcgcccagtcccggcccggggctgagttgggggcatgctctagccgcccccccggagcccgggagagaacccaggagcgccgccgcccagccccagcgccccgagcggaaccgctgcgaaggggccctgaacggccgtcgccctccctacgggcagcccccgggggttggcgaccgaagtctaggttttcgagaaagccagggtgggaaccctaactggactcttcgggacccccaggaaggatctgaggcctgagccatcctcctttctaccctgtctgccccccaggactgggcagttgcaggaggccctgggggggggcccaggactgtggttgtgccccccccccaaaggccggacaggatgggaccaagttagtctgtccagtctcacccagcacctcccaggcccagagagaacccccggggctctgaaagcttgccctgccgcctgaccgccatggagacgaagctgccccctgcaagcacccccactagcccctcctcccccgggctgtcgcctgtgcccccacccgacaaggtggacggcttctcccgccgttccctccgcagagcccggccccgccgctcccacagctcctctcagttccgctatcagagcaaccagcaagagctcacaccgctgcccctgctcaaagatgtgccggcttccgagctgcacgagctgctgagccggaagctggcccagtgtggggtgatgtttgacttcttggactgtgtggccgacctcaaggggaaggaggtgaagcgggcagccctcaacgagctggtggagtgtgtggggagcacccggggtgtcctcatcgagcccgtctacccagacatcatccgcatgatctcagtgaatatcttccggactctgccgcccagtgagaaccctgaatttgaccctgaagaggatgagcccaatcttgagccttcgtggccacacctgcagctggtatatgagtttttcctgcgtttcttggagagcccagacttccagccctccgtggccaagagatatgtggatcaaaagtttgtcctgatgctcctggagctatttgatagtgaggatccccgggagcgtgagtacctcaagaccatcctgcaccgggtctatggcaagttcctgggtctccgggcctacatccgcaaacagtgcaaccacatcttcctccggttcatctatgaattcgagcacttcaatggtgtggctgagctgctggagatcctaggaagcatcatcaatggctttgcgctgcccctgaagacggagcacaagcagttcctggttcgcgtcctgatccccctgcactctgtcaagtcgctgtctgtcttccatgcccagctggcatactgtgtggtgcagttcctggagaaggatgccactctgacagagcacgtgatccgggggctgctcaaatactggccaaaaacctgcacccagaaggaggtgatgtttctgggggagatggaagagattcttgatgtcatcgagccctcccagtttgtgaagatccaggagcccctttttaagcaggtggctcgctgtgtttccagcccccatttccaggttgcagagcgggctctgtatttctggaacaatgagtatatcctaagcctcattgaggacaactgccacactgtgctgcctgctgtgtttgggaccctctaccaagtctccaaggagcactggaaccaaaccatcgtatcactgatctacaatgtgctcaagaccttcatggagatgaatgggaagctgtttgatgagctcacagcctcctacaagctggaaaagcagcaggagcagcagaaggcccaggagcgtcaggagttatggcaaggtctggaggagctgcggctacgccggctacaggggacccagggggccaaggaggcccccctccagcggcttacaccccaggtggccgccagtgggggtcagagctagacagcacctcagaaggggaaaagctaaacccagagctgtcagtccctctatcccttctcctgtccaggggcccagagagaaacacacctacccctggccttgccagagtggcttctgaggactccctgcccagcccagctttcactggggggagacgaggagaggcaatggtggtcttggcaacagaatgctcagcccctcgtggcaggacttgacaagggcaagcttgaccaggaagctgccatcagggatcttcccctgccccgcaaagctaggctccagctgcaggcgggctcccaccctctgctcctggccttgggcaagggcactcagcgcctcgcctgcccctgccttggccaatgcgaggtccttccttatccccaccatggggtccatggtctatttattctcgcccagctcaccctctacacagacactgtcctgggtgcacactcctcccttccctcgctgtgtacttccttgtcccctttttatttattgggcagggggagggggagggcacaggcaagaagagattcacagtgtcctggggtaagggggggttcacagtaatcatggtctactcctctttccgtggctgggggtagacttaataaagagagaaattc

SEQ ID NO: 24507 - DNA, 2740 bp, Homo sapiens
  source 1..2740: mol_type = unassigned DNA
ggtggggggaggtgacttgatgtcatcctgagcagctgggcggcgggtgccggtgcgcacggagccgagccggggctcccgttgcgctgcaccgcgttgggtcggagtcccaggacttcagcggagatccgcgcgctgcgacggccggtgcagagcccgccgagcgcccagtcccggcccggggctgagttgggggcatgctctagccgcccccccggagcccgggagagaacccaggagcgccgccgcccagccccagcgccccgagcggaaccgctgcgaaggggccctgaacggccgtcgccctccctacgggcagcccccgggggttggcgaccgaagtctaggttttcgagaaagccagggtgggaaccctaactggactcttcgggacccccaggaaggatctgaggcctgagccatcctcctttctaccctgtctgccccccaggactgggcagttgcaggaggccctgggggggggcccaggactgtggttgtgccccccccccaaaggccggacaggatgggaccaagttagtctgtccagtctcacccagcacctcccaggcccagagagaacccccggggctctgaaagcttgccctgccgcctgaccgccatggagacgaagctgccccctgcaagcacccccactagcccctcctcccccgggctgtcgcctgtgcccccacccgacaaggtggacggcttctcccgccgttccctccgcagagcccggccccgccgctcccacagctcctctcagttccgctatcagagcaaccagcaagagctcacaccgctgcccctgctcaaagatgtgccggcttccgagctgcacgagctgctgagccggaagctggcccagtgtggggtgatgtttgacttcttggactgtgtggccgacctcaaggggaaggaggtgaagcgggcagccctcaacgagctggtggagtgtgtggggagcacccggggtgtcctcatcgagcccgtctacccagacatcatccgcatgatctcagtgaatatcttccggactctgccgcccagtgagaaccctgaatttgaccctgaagaggatgagcccaatcttgagccttcgtggccacacctgcagctggtatatgagtttttcctgcgtttcttggagagcccagacttccagccctccgtggccaagagatatgtggatcaaaagtttgtcctgatgctcctggagctatttgatagtgaggatccccgggagcgtgagtacctcaagaccatcctgcaccgggtctatggcaagttcctgggtctccgggcctacatccgcaaacagtgcaaccacatcttcctccggttcatctatgaattcgagcacttcaatggtgtggctgagctgctggagatcctaggaagcatcatcaatggctttgcgctgcccctgaagacggagcacaagcctggttcgcgtcctgatccccctgcactctgtcaagtcgctgtctgtcttccatgcccagctggcatactgtgtggtgcagttcctggagaaggatgccactctgacagagcacgtgatccgggggctgctcaaatactggccaaaaacctgcacccagaaggaggtgatgtttctgggggagatggaagagattcttgatgtcatcgagccctcccagtttgtgaagatccaggagcccctttttaagcaggtggctcgctgtgtttccagcccccatttccaggttgcagagcgggctctgtatttctggaacaatgagtatatcctaagcctcattgaggacaactgccacactgtgctgcctgctgtgtttgggaccctctaccaagtctccaaggagcactggaaccaaaccatcgtatcactgatctacaatgtgctcaagaccttcatggagatgaatgggaagctgtttgatgagctcacagcctcctacaagctggaaaagcagcaggagcagcagaaggcccaggagcgtcaggagttatggcaaggtctggaggagctgcggctacgccggctacaggggacccagggggccaaggaggcccccctccagcggcttacaccccaggtggccgccagtgggggtcagagctagacagcacctcagaaggggaaaagctaaacccagagctgtcagtccctctatcccttctcctgtccaggggcccagagagaaacacacctacccctggccttgccagagtggcttctgaggactccctgcccagcccagctttcactggggggagacgaggagaggcaatggtggtcttggcaacagaatgctcagcccctcgtggcaggacttgacaagggcaagcttgaccaggaagctgccatcagggatcttcccctgccccgcaaagctaggctccagctgcaggcgggctcccaccctctgctcctggccttgggcaagggcactcagcgcctcgcctgcccctgccttggccaatgcgaggtccttccttatccccaccatggggtccatggtctatttattctcgcccagctcaccctctacacagacactgtcctgggtgcacactcctcccttccctcgctgtgtacttccttgtcccctttttatttattgggcagggggagggggagggcacaggcaagaagagattcacagtgtcctggggtaagggggggttcacagtaatcatggtctactcctctttccgtggctgggggtagacttaataaagagagaaattc

SEQ ID NO: 24508 - DNA, 887 bp, Homo sapiens
  source 1..887: mol_type = unassigned DNA
ctcagtgcgcgatcttaagcgcgcatctgtggaaacaattaaagccagggtgggaaccctaactggactcttcgggacccccaggaaggatctgaggcctgagccatcctcctttctaccctgtctgccccccaggactgggcagttgcaggaggccctgggggggggcccaggactgtggttgtgccccccccccaaaggccggacaggatgggaccaagttagtctgtccagtctcacccagcacctcccaggcccagagagaacccccggggctctgaaagcttgccctgccgcctgaccgccatggagacgaagctgccccctgcaagcacccccactagcccctcctcccccgggctgtcgcctgtgcccccacccgacaaggtggacggcttctcccgccgttccctccgcagagcccggccccgccgctcccacagctcctctcagttccgctatcagagcaaccagcaagagctcacaccgctgcccctgctcaaagatgtgccggcttccgagctgcacgagctgctgagccggaagctggcccagtgtggggtgatgtttgacttcttggactgtgtggccgacctcaaggggaaggaggtgaagcgggcagccctcaacgagctggtggagtgtgtggggagcacccggggtgtcctcatcgagcccgtctacccagacatcatccgcatgatctcagtgaatatcttccggactctgccgcccagtgagaaccctgaatttgaccctgaagaggatgagcccaatcttgagccttcgtggccacacctgcagctggtatatgagtttttcctgcgtttcttggagagcccagacttccagccctccgtggccaagagatatgtggatcaaaagtt

SEQ ID NO: 24509 - DNA, 2721 bp, Homo sapiens
  source 1..2721: mol_type = unassigned DNA
cgcacggagccgagccggggctcccgttgcgctgcaccgcgttgggtcggagtcccaggacttcagcggagatccgcgcgctgcgacggccggtgcagagcccgccgagcgcccagtcccggcccggggctgagttgggggcatgctctagccgcccccccggagcccgggagagaacccaggagcgccgccgcccagccccagcgccccgagcggaaccgctgcgaaggggccctgaacggccgtcgccctccctacgggcagcccccgggggttggcgaccgaagtctaggttttcgagaaatctttctgcctgacttcgttttcaaaagagccagggtgggaaccctaactggactcttcgggacccccaggaaggatctgaggcctgagccatcctcctttctaccctgtctgccccccaggactgggcagttgcaggaggccctgggggggggcccaggactgtggttgtgccccccccccaaaggccggacaggatgggaccaagttagtctgtccagtctcacccagcacctcccaggcccagagagaacccccggggctctgaaagcttgccctgccgcctgaccgccatggagacgaagctgccccctgcaagcacccccactagcccctcctcccccgggctgtcgcctgtgcccccacccgacaaggtggacggcttctcccgccgttccctccgcagagcccggccccgccgctcccacagctcctctcagttccgctatcagagcaaccagcaagagctcacaccgctgcccctgctcaaagatgtgccggcttccgagctgcacgagctgctgagccggaagctggcccagtgtggggtgatgtttgacttcttggactgtgtggccgacctcaaggggaaggaggtgaagcgggcagccctcaacgagctggtggagtgtgtggggagcacccggggtgtcctcatcgagcccgtctacccagacatcatccgcatgatctcagtgaatatcttccggactctgccgcccagtgagaaccctgaatttgaccctgaagaggatgagcccaatcttgagccttcgtggccacacctgcagctggtatatgagtttttcctgcgtttcttggagagcccagacttccagccctccgtggccaagagatatgtggatcaaaagtttgtcctgatgctcctggagctatttgatagtgaggatccccgggagcgtgagtacctcaagaccatcctgcaccgggtctatggcaagttcctgggtctccgggcctacatccgcaaacagtgcaaccacatcttcctccggttcatctatgaattcgagcacttcaatggtgtggctgagctgctggagatcctaggaagcatcatcaatggctttgcgctgcccctgaagacggagcacaagcagttcctggttcgcgtcctgatccccctgcactctgtcaagtcgctgtctgtcttccatgcccagctggcatactgtgtggtgcagttcctggagaaggatgccactctgacagagcacgtgatccgggggctgctcaaatactggccaaaaacctgcacccagaaggaggtgatgtttctgggggagatggaagagattcttgatgtcatcgagccctcccagtttgtgaagatccaggagcccctttttaagcaggtggctcgctgtgtttccagcccccatttccaggttgcagagcgggctctgtatttctggaacaatgagtatatcctaagcctcattgaggacaactgccacactgtgctgcctgctgtgtttgggaccctctaccaagtctccaaggagcactggaaccaaaccatcgtatcactgatctacaatgtgctcaagaccttcatggagatgaatgggaagctgtttgatgagctcacagcctcctacaagctggaaaagcagcaggagcagcagaaggcccaggagcgtcaggagttatggcaaggtctggaggagctgcggctacgccggctacaggggacccagggggccaaggaggcccccctccagcggcttacaccccaggtggccgccagtgggggtcagagctagacagcacctcagaaggggaaaagctaaacccagagctgtcagtccctctatcccttctcctgtccaggggcccagagagaaacacacctacccctggccttgccagagtggcttctgaggactccctgcccagcccagctttcactggggggagacgaggagaggcaatggtggtcttggcaacagaatgctcagcccctcgtggcaggacttgacaagggcaagcttgaccaggaagctgccatcagggatcttcccctgccccgcaaagctaggctccagctgcaggcgggctcccaccctctgctcctggccttgggcaagggcactcagcgcctcgcctgcccctgccttggccaatgcgaggtccttccttatccccaccatggggtccatggtctatttattctcgcccagctcaccctctacacagacactgtcctgggtgcacactcctcccttccctcgctgtgtacttccttgtcccctttttatttattgggcagggggagggggagggcacaggcaagaagagattcacagtgtcctggggtaagggggggttcacagtaatcatggtctactcctctttccgtggctgggggtagacttaataaagagagaaattcaa

SEQ ID NO: 24510 - DNA, 1714 bp, Homo sapiens
  source 1..1714: mol_type = unassigned DNA
agaataaaagccgccctcattctaggggagaatataatgtttacagcacctttcaaagtcatgaaccggagtttgactatttgaaaagtctagaaattgaggaaaaaattaataaaattaggtggttaccacaacagaatgctgctcattttctactgtctacaaatgataaaactataaaattatggaaaataagtgaacgggataaaagagcagaaggttataacctgaaagacgaagatggaagacttcgagacccatttaggatcacggcgctacgggtcccaatattgaagcccatggatcttatggtagaagcgagtccacggcgaatttttgcaaatgctcacacatatcatataaattccatttcagtaaatagtgatcatgaaacatatctttctgcagatgacctgagaattaatttatggcacttagaaatcacagatagaagctttaacatcgtggacatcaagcctgctaacatggaggagctgaccgaagtcatcactgcagccgagttccacccgcaccagtgcaacgtgttcgtctacagcagtagcaaagggaccatccgcctgtgtgacatgcgctcctcggccctgtgcgacagacactccaagttttttgaagagcctgaagatcccagcagtaggtccttcttctcagaaataatttcatccatatccgatgtaaaattcagtcatagtgggcggtacatgatgaccagagaccctgtcggtgaaggtgtgggacctcaacatagagcaggccggtggagacccaccaggtccacgagtacctgcgcagcaagctctgctctctctatgagaacgactgcatctttgacaagtttgagtgttgctggaacggttcggatagcgccatcatgaccgggtcctataacaacttcttcaggatgtttgatagagacacgcggagggatgtgaccctggaggcctcgagagagagcagcaaaccgcgcgccagcctcaaaccccggaaggtgtgtacggggggtaagcggaggaaagacgagatcagtgtggacagtctggacttcaacaagaagatcctgcacacagcctggcaccccgtggacaatgtcattgccgtggctgccaccaataacttgtacatattccaggacaaaatcaactagagacgcgaacgtgaggaccaagtcttgtcttgcatagttaagccggacatttttctgtcagagaaaaggcatcattgtccgctccattaagaacagtgacgcacctgctacttcccttcacagacacaggagaaagccgcctccgctggaggcccggtgtggttccgcctcggcgaggcgcgagacaggcgctgctgctcacgtggagacgctctcgaagcagagttgacggacactgctcccaaaaggtcattactcagaataaatgtatttatttcagtccgagccttcctttccaatttatagaccaaaaaattaacatccaagagaaaagttattgtcagataccgctctttctccaactttccctctttctctgccatcacacttgggccttcactgcagcgtggtgtggccaccgtccgtgtcctctcggccttcctccgagtccaggtggactctgtggatgtgtggatgtggcccgagcaggctcaggcggccccactcacccacagcatccgccgccaccccttcgggtgtgagcgctcaata

SEQ ID NO: 24511 - DNA, 5133 bp, Homo sapiens
  source 1..5133: mol_type = unassigned DNA
ttgacagcggacatcatttccaccgttgagtttaattactctggagatcttcttgcaacaggagacaagggcggcagagttgttatttttcagcgtgaacaagagaataaaagccgccctcattctaggggagaatataatgtttacagcacctttcaaagtcatgaaccggagtttgactatttgaaaagtctagaaattgaggaaaaaattaataaaattaggtggttaccacaacagaatgctgctcattttctactgtctacaaatgataaaactataaaattatggaaaataagtgaacgggataaaagagcagaaggttataacctgaaagacgaagatggaagacttcgagacccatttaggatcacggcgctacgggtcccaatattgaagcccatggatcttatggtagaagcgagtccacggcgaatttttgcaaatgctcacacatatcatataaattccatttcagtaaatagtgatcatgaaacatatctttctgcagatgacctgagaattaatttatggcacttagaaatcacagatagaagctttaacatcgtggacatcaagcctgctaacatggaggagctgaccgaagtcatcactgcagccgagttccacccgcaccagtgcaacgtgttcgtctacagcagtagcaaagggaccatccgcctgtgtgacatgcgctcctcggccctgtgcgacagacactccaagttttttgaagagcctgaagatcccagcagtaggtccttcttctcagaaataatttcatccatatccgatgtaaaattcagtcatagtgggcggtacatgatgaccagagactacctgtcggtgaaggtgtgggacctcaacatggagagcaggccggtggagacccaccaggtccacgagtacctgcgcagcaagctctgctctctctatgagaacgactgcatctttgacaagtttgagtgttgctggaacggttcggatagcgccatcatgaccgggtcctataacaacttcttcaggatgtttgatagagacacgcggagggatgtgaccctggaggcctcgagagagagcagcaaaccgcgcgccagcctcaaaccccggaaggtgtgtacggggggtaagcggaggaaagacgagatcagtgtggacagtctggacttcaacaagaagatcctgcacacagcctggcaccccgtggacaatgtcattgccgtggctgccaccaataacttgtacatattccaggacaaaatcaactagagacgcgaacgtgaggaccaagtcttgtcttgcatagttaagccggacatttttctgtcagagaaaaggcatcattgtccgctccattaagaacagtgacgcacctgctacttcccttcacagacacaggagaaagccgcctccgctggaggcccggtgtggttccgcctcggcgaggcgcgagacaggcgctgctgctcacgtggagacgctctcgaagcagagttgacggacactgctcccaaaaggtcattactcagaataaatgtatttatttcagtccgagccttcctttccaatttatagaccaaaaaattaacatccaagagaaaagttattgtcagataccgctctttctccaactttccctctttctctgccatcacacttgggccttcactgcagcgtggtgtggccaccgtccgtgtcctctcggccttcctccgagtccaggtggactctgtggatgtgtggatgtggcccgagcaggctcaggcggccccactcacccacagcatccgccgccaccccttcgggtgtgagcgctcaataaaaacaacacactataaagtgtttttaaatccaaacagaagtattgtctttttatttaattttattgcatagaatgaagttatgcagggttcttctttggaactaactgtttgagaaatgtgtgtccttctttggcagcgtgggggtatgtgtgcagcatttctgtccccaagctgctgcccgctgtgtttctgtagaagtagcccatcagatacaccaggtaaggtctgggaaaagccagaaccgaggccacctctgagaaagaaaattgcaaggaagaaccaaaattgctgccatccagtaagcctggtttaaagtagcttcaaattcactacagttgaagaaatacgtgcttgctttctaaggcttttgaaaaagcactttggggaaagtatactttttaaacattgctaaaattacatgcatgctaaatttcatcctgcatttcaagccagcaaaattaagcaattttaattacacgatgccaccagtacgttggtttattttcaaagtaggatctttgataccagaaatcaagattttccaagacaaataatacagagctgtaccaatgctgagtgaccagagcttgcttccgtgggatttaacacacgcccactacgtgtccccgaggggagtggggagtcgggctcccgtgcccctgtggagatggaggtgtgtgctgatcccccgtccgcctgtggagatgaaggtgtgtgttgattcctcctgctgctgtggagatggaggtgtgtgctgatcgcccgtcaccctgtctagatgaaggtatgtgctgattgcctgtgcccctgtggagaaggaggtgtgtgctgatcccctgtgccctgtggagatggaggtgtgtgctgctccctcgtgcccctgtggagatggaggtgtgtgctgatcccccatcccatccccctgtctagatgaaggtgtgtgctgattcctcatgcccctgtctggatgaaggtgtgtgctgatcccccgtccccctgtggagatgaaggtgtgtgctgatcccccgtgcccctgtggagatgaaggtgcgtgctgatcccccatctccctgtggagatgaaggtgtgtgctgatccccatccccctgtggagatgaagggatatgctgatcccctgtcccactgtggagatgaaggggtgtgctgatcccccgtccccctgtggagatgaaggtgtgtgctgatcccccatctccctgtggagatgaaggggtgtgccaatcccccgcgcccctgtggagatggaggcgtgtgctgatccccatccccctgtggagatgaaggtgtgtgctgatcccccatccccatgtggagatgaaggggtgtgttgatcccctgtccccctgtggagatggtgtgtgctgatccccgtccccctgtggagatgaaggtgtgtgctgatcccccatctccctgtgaagatgaaggggtgtgctgatcccccgtgcccctgtggacatggaggcgtgtgctgatcccccgtccccctgtggagatgaaggtgtgtgctgatcccccatccccatgtggagatgaaggggtgtgttgatcccccgtccccctgtggagatgaaggtgtgtgctgatccccgtccccctgtggagatgaaggggtgtgctgatcccccatgccctgtggagatggaggtgtgtgctgatccctcgtgcccctgtggagatagaggtgtgtactgatcccctgttcccctatctagatgaaggtgtgtactgctgatcccccgtccccctgtggagatgaaggtgtgtgctgatcccccatccccctgtggagatgaaggggtgtgctgatcccccgtcttcctgtggagatgaaggtgtgtgctgattcctcatgcccctgtggagatggaggtgtgtgctgatcccccatccccctgtggggatgaaggtgtgtgctgatcccccatccccctgtggagatgaaggggtatgctgatcccccgtccccctgtggagatgaaggtgtgtgctgatcccccatccccctgtggagatgaaggggtatgctgatcccctgtccccctgtggggatgaaggtgtgtgctgatctcttgtccccctgtggagatggaggtgtgtgctgatcccccatccccctgtggagatgaagatgtgtgctgatcccccgtcctcctgtggagatgaaggtgtgtgctgcttcctcgtgcccctgtggagatggaggtgtgtgctggtcccccgtccccctgtggagatggaggtgtgtgctgatcccccgtccccctgtggagatggaggcgtgtgctgatcccccatccccctgtggagatgaaggcgtgtgctgatccgccatcccactgtggagatgaaggcgtgtgctgatcccccatccccctgtggagataaaggtgtgtgctgatcccccatccccctgtggagatgaaggcgtgtgctgatccgccatcccactgtggagatgaaggcgtgtgctgatcccccatccccctgtggagatgaaggcgtgtgctcatcccccatccccctgtggagatgaaggcgtgtgctgatccgccatcccactgtggagatgaaggtgtgtgctgatcccccatccccctgtggagatgaaggtgtgtgctgatccccggtccccctgtggagatgaaggtgtgtgctgatcccccgtcctcctgtggagatgaaggcgtgtgctgatcccccgtccccctgtggagatgaaggcgtgtgctgatccgccgtccccctgtggagatgaaggcgtgtgctgatccgccatccccctgtggagatgaaggcgtgtgctcatcccccatccccctgtggagatgaaggcgtgtgctgatccgccatcccactgtggagatgaaggtgtgtgctgatcccccatccccctgtggagatgaaggcgtgtgctgatccccggtccccctgtggagatgaaggtgtgtgttgatcccccatccccctgtggaggtgaaggtgtgtgctgattactaatccacatgggcaagaacaggatgtccgtcattaccctgaatcaatgctaacacagtgccacttgagttcacattaagttagaaattgagaatctaaaggtacctttattttaactaaaaaataatttatatactgtatattgattgtgacacaatttacaaagtctgaggtgtggaacagttatttaagcattagtcaaccctggtccttaagacagttctagtaaaatgggattgtatatatttgttcaactattttgaccaaaaagttcaataaattttaaatgttt

SEQ ID NO: 24512 - DNA, 2894 bp, Homo sapiens
  source 1..2894: mol_type = unassigned DNA
caccgctcgacccgggcgcagcgcgcaggcggtggcgaagagacgccgagcgggccgagtgcggccgagcaaagccggagccggagcggggccgcaggagacgggccgggtccggacgggccgagatgccctataaactgaaaaaggagaaggagccccccaaggttgccaaatgcacagccaagcctagcagctcgggcaaggatggtggaggcgagaacactgaggaggcccagccgcagccccagccccagccccagccccaagcccagtctcagccaccgtcatccaacaagcgtcccagcaatagcacgccgccccccacgcagctcagcaaaatcaagtactcaggggggccccagattgtcaagaaggagctgtttatccagaagctacgccagtgctgtgtcctctttgacttcgtgtcagacccactcagtgacctcaaattcaaggaggtgaagcgggcaggactcaacgagatggtggagtacatcacccatagccgtgatgttgtcactgaggccatttaccctgaggctgtcaccatgttttcagtgaacctcttccggacgctgccaccttcatcgaatcccacaggggctgagtttgacccagaggaagatgagcccaccctggaagctgcttggccacatctccagctcgtgtatgagttcttcttacgtttccttgagtctcctgatttccagccaaacatagccaagaagtacatcgaccagaagtttgtacttgctctcctagacctatttgacagtgaggatcctcgagagcgggacttcctcaagaccattttgcatcgcatctatggcaagtttttggggctccgggcttatatccgtaggcagatcaaccacatcttctacaggttcatctacgagacggagcatcacaacgggattgctgagctcctggagatcctgggcagcatcatcaatggctttgccctgccccttaaagaagagcacaagatgttcctcatccgtgtcctacttccccttcacaaggtcaagtccctgagtgtctaccaccctcagctggcatactgtgtggtacaattcctggagaaggagagcagtctgactgagccggtaattgtgggacttctcaagttttggcccaagacccacagccccaaggaggtgatgttcttgaatgagctggaggagattctggacgtcattgaaccttctgagttcagcaaagtgatggaacccctcttccgccagctggccaagtgtgtctctagcccccatttccaggtggcagagcgtgctctctattactggaacaatgagtacatcatgagcctgataagtgacaatgctgcccgagtcctccccatcatgttccctgcactctacaggaactccaagagccactggaacaagacaatccatggactgatctataatgccctgaagttgtttatggaaatgaatcagaagctgtttgatgactgcacacaacaatacaaggcagagaagcagaagggccggttccgaatgaaggaaagggaagagatgtggcaaaaaatcgaggagctggcccggcttaatccccagtatcccatgttccgagcccctccaccactgccccctgtgtactcgatggagacagagacccccacagctgaggacatccagcttctgaagaggactgtggagactgaggctgttcagatgctaaaagacatcaagaaggagaaagtgctgctgcggaggaagtcggagctgccccaggacgtgtacaccatcaaggcactggaggcgcacaagcgggcggaagagttcctaactgccagccaggaggctctctgacccctcacgttcctaccacagggccacagcccacacagccctgggacactgccctggccctccatactctgctccctactggctgtcttgggggaaggcagcgcctctctagctactcaagggagggggatgtgggcacttgaagcagggacacccacagaatggtccctcttctccccaaaaggtgttcatgcctccctgtggctagtacaggctgagcactaagatgcttagtgctcagacaacctggggatgcctgtcccctacctgctcctcacccacagctacctgaggctgctctgagaagtacacacaggaatacatacgctcctctattcttcccttcatcctcatttgaacgccaggtatctcccctcctctctctcccctgcagaggcatgtagggaacagcaggagattattctcaccaaagttatgtcaagccccattggtcccagagtagctgaagggaagccaacccccctgcagcacaaataggccccccagtcccagccgtgtgctggcagatagggttgtattatttcttcttaccccatgcctgaccaagggaggtcaaaaggagaaaagtataggctgtggacaataactgatgaatatagggcccagatggaccaagtggggccggggagggatgaataaacaccctaccccgtgccctgtctttggtgagcagcagccctggggtcacagacatggaagggaccaccctggggctgactgcttttctgtgctgttggttcccaaaactagaaagaaggaagcagggagcggtgccccaagcatggctcctgccaacacctatttatttccttgtttgtgctatgctgggcaggccttctcttgtcccttataggtaccttggaggggccaggggctgaggaaggccggacccaggttccaggggcgcaggcagtgcggcttttggctgtgtacatagggtgctttattctccacagagtgatacatgctaaggtgggttgggcttggaccgatgtccccatatgtacagaactgaataaagtgggtctctgagaa

SEQ ID NO: 24513 - DNA, 1558 bp, Homo sapiens
  source 1..1558: mol_type = unassigned DNA
gacgggccgggtccggacgggccgagatgccctataaactgaaaaaggagaaggagctgtttatccagaagctacgccagtgctgtgtcctctttgacttcgtgtcagacccactcagtgacctcaaattcaaggaggtgaagcgggcaggactcaacgagatggtggagtacatcacccatagccgtgatgttgtcactgaggccatttaccctgaggctgtcaccatgttttcagtgaacctcttccggacgctgccaccttcatcgaatcccacaggggctgagtttgacccagaggaagatgagcccaccctggaagctgcttggccacatctccagctcgtgtatgagttcttcttacgtttccttgagtctcctgatttccagccaaacatagccaagaagtacatcgaccagaagtttgtacttgctctcctagacctatttgacagtgaggatcctcgagagcgggacttcctcaagaccattttgcatcgcatctatggcaagtttttggggctccgggcttatatccgtaggcagatcaaccacatcttctacaggttcatctacgagacggagcatcacaacgggattgctgagctcctggagatcctgggcagcatcatcaatggctttgccctgccccttaaagaagagcacaagatgttcctcatccgtgtcctacttccccttcacaaggtcaagtccctgagtgtctaccaccctcagctggcatactgtgtggtacaattcctggagaaggagagcagtctgactgagccggtaattgtgggacttctcaagttttggcccaagacccacagccccaaggaggtgatgttcttgaatgagctggaggagattctggacgtcattgaaccttctgagttcagcaaagtgatggaacccctcttccgccagctggccaagtgtgtctctagcccccatttccaggtggcagagcgtgctctctattactggaacaatgagtacatcatgagcctgataagtgacaatgctgcccgagtcctccccatcatgttccctgcactctacaggaactccaagagccactggaacaagacaatccatggactgatctataatgccctgaagttgtttatggaaatgaatcagaagctgtttgatgactgcacacaacaatacaaggcagagaagcagaagggccggttccgaatgaaggaaagggaagagatgtggcaaaaaatcgaggagctggcccggcttaatccccagtatcccatgttccgagcccctccaccactgccccctgtgtactcgatggagacagagacccccacagctgaggacatccagcttctgaagaggactgtggagactgaggctgttcagatgctaaaagacatcaagaaggagaaagtgctgctgcggaggaagtcggagctgccccaggacgtgtacaccatcaaggcactggaggcgcacaagcgggcggaagagttcctaactgccagccaggaggctctctgacccctcacgttcctaccacagggccacagcccacacagccc

SEQ ID NO: 24514 - DNA, 2567 bp, Homo sapiens
  source 1..2567: mol_type = unassigned DNA
caagaaggagcgacggcaaagctcctcccgcttcaacctcagcaagaatcgggagctgcagaagcttcctgccctgaaagattcgccaacccaggagcgggaggagctgtttatccagaagctacgccagtgctgtgtcctctttgacttcgtgtcagacccactcagtgacctcaaattcaaggaggtgaagcgggcaggactcaacgagatggtggagtacatcacccatagccgtgatgttgtcactgaggccatttaccctgaggctgtcaccatgttttcagtgaacctcttccggacgctgccaccttcatcgaatcccacaggggctgagtttgacccagaggaagatgagcccaccctggaagctgcttggccacatctccagctcgtgtatgagttcttcttacgtttccttgagtctcctgatttccagccaaacatagccaagaagtacatcgaccagaagtttgtacttgctctcctagacctatttgacagtgaggatcctcgagagcgggacttcctcaagaccattttgcatcgcatctatggcaagtttttggggctccgggcttatatccgtaggcagatcaaccacatcttctacaggttcatctacgagacggagcatcacaacgggattgctgagctcctggagatcctgggcagcatcatcaatggctttgccctgccccttaaagaagagcacaagatgttcctcatccgtgtcctacttccccttcacaaggtcaagtccctgagtgtctaccaccctcaggtaattgtgggacttctcaagttttggcccaagacccacagccccaaggaggtgatgttcttgaatgagctggaggagattctggacgtcattgaaccttctgagttcagcaaagtgatggaacccctcttccgccagctggccaagtgtgtctctagcccccatttccaggtggcagagcgtgctctctattactggaacaatgagtacatcatgagcctgataagtgacaatgctgcccgagtcctccccatcatgttccctgcactctacaggaactccaagagccactggaacaagacaatccatggactgatctataatgccctgaagttgtttatggaaatgaatcagaagctgtttgatgactgcacacaacaatacaaggcagagaagcagaagggccggttccgaatgaaggaaagggaagagatgtggcaaaaaatcgaggagctggcccggcttaatccccagtatcccatgttccgagcccctccaccactgccccctgtgtactcgatggagacagagacccccacagctgaggacatccagcttctgaagaggactgtggagactgaggctgttcagatgctaaaagacatcaagaaggagaaagtgctgctgcggaggaagtcggagctgccccaggacgtgtacaccatcaaggcactggaggcgcacaagcgggcggaagagttcctaactgccagccaggaggctctctgacccctcacgttcctaccacagggccacagcccacacagccctgggacactgccctggccctccatactctgctccctactggctgtcttgggggaaggcagcgcctctctagctactcaagggagggggatgtgggcacttgaagcagggacacccacagaatggtccctcttctccccaaaaggtgttcatgcctccctgtggctagtacaggctgagcactaagatgcttagtgctcagacaacctggggatgcctgtcccctacctgctcctcacccacagctacctgaggctgctctgagaagtacacacaggaatacatacgctcctctattcttcccttcatcctcatttgaacgccaggtatctcccctcctctctctcccctgcagaggcatgtagggaacagcaggagattattctcaccaaagttatgtcaagccccattggtcccagagtagctgaagggaagccaacccccctgcagcacaaataggccccccagtcccagccgtgtgctggcagatagggttgtattatttcttcttaccccatgcctgaccaagggaggtcaaaaggagaaaagtataggctgtggacaataactgatgaatatagggcccagatggaccaagtggggccggggagggatgaataaacaccctaccccgtgccctgtctttggtgagcagcagccctggggtcacagacatggaagggaccaccctggggctgactgcttttctgtgctgttggttcccaaaactagaaagaaggaagcagggagcggtgccccaagcatggctcctgccaacacctatttatttccttgtttgtgctatgctgggcaggccttctcttgtcccttataggtaccttggaggggccaggggctgaggaaggccggacccaggttccaggggcgcaggcagtgcggcttttggctgtgtacatagggtgctttattctccacagagtgatacatgctaaggtgggttgggcttggaccgatgtccccatatgtacagaactgaataaagtgggtctctgag

SEQ ID NO: 24515 - DNA, 3044 bp, Homo sapiens
  source 1..3044: mol_type = unassigned DNA
ggcgcctggttgtcaggcagttttgtaggagttcgggccaattggaggcgcaggcaccgctcgacccgggcgcagcgcgcaggcggtggcgaagagacgccgagcgggccgagtgcggccgagcaaagccggagccggagcggggccgcaggagacgggccgggtccggacgggccgagatgccctataaactgaaaaaggagaaggagccccccaaggttgccaaatgcacagccaagcctagcagctcgggcaaggatggtggaggcgagaacactgaggaggcccagccgcagccccagccccagccccagccccaagcccagtctcagccaccgtcatccaacaagcgtcccagcaatagcacgccgccccccacgcagctcagcaaaatcaagtactcaggggggccccagattgtcaagaaggagcgacggcaaagctcctcccgcttcaacctcagcaagaatcgggagctgcagaagcttcctgccctgaaagattcgccaacccaggagcgggaggagctgtttatccagaagctacgccagtgctgtgtcctctttgacttcgtgtcagacccactcagtgacctcaaattcaaggaggtgaagcgggcaggactcaacgagatggtggagtacatcacccatagccgtgatgttgtcactgaggccatttaccctgaggctgtcaccatgttttcagtgaacctcttccggacgctgccaccttcatcgaatcccacaggggctgagtttgacccagaggaagatgagcccaccctggaagctgcttggccacatctccagctcgtgtatgagttcttcttacgtttccttgagtctcctgatttccagccaaacatagccaagaagtacatcgaccagaagtttgtacttgctctcctagacctatttgacagtgaggatcctcgagagcgggacttcctcaagaccattttgcatcgcatctatggcaagtttttggggctccgggcttatatccgtaggcagatcaaccacatcttctacaggttcatctacgagacggagcatcacaacgggattgctgagctcctggagatcctgggcagcatcatcaatggctttgccctgccccttaaagaagagcacaagatgttcctcatccgtgtcctacttccccttcacaaggtcaagtccctgagtgtctaccaccctcagctggcatactgtgtggtacaattcctggagaaggagagcagtctgactgagccggtaattgtgggacttctcaagttttggcccaagacccacagccccaaggaggtgatgttcttgaatgagctggaggagattctggacgtcattgaaccttctgagttcagcaaagtgatggaacccctcttccgccagctggccaagtgtgtctctagcccccatttccaggtggcagagcgtgctctctattactggaacaatgagtacatcatgagcctgataagtgacaatgctgcccgagtcctccccatcatgttccctgcactctacaggaactccaagagccactggaacaagacaatccatggactgatctataatgccctgaagttgtttatggaaatgaatcagaagctgtttgatgactgcacacaacaatacaaggcagagaagcagaagggccggttccgaatgaaggaaagggaagagatgtggcaaaaaatcgaggagctggcccggcttaatccccagtatcccatgttccgagcccctccaccactgccccctgtgtactcgatggagacagagacccccacagctgaggacatccagcttctgaagaggactgtggagactgaggctgttcagatgctaaaagacatcaagaaggagaaagtgctgctgcggaggaagtcggagctgccccaggacgtgtacaccatcaaggcactggaggcgcacaagcgggcggaagagttcctaactgccagccaggaggctctctgacccctcacgttcctaccacagggccacagcccacacagccctgggacactgccctggccctccatactctgctccctactggctgtcttgggggaaggcagcgcctctctagctactcaagggagggggatgtgggcacttgaagcagggacacccacagaatggtccctcttctccccaaaaggtgttcatgcctccctgtggctagtacaggctgagcactaagatgcttagtgctcagacaacctggggatgcctgtcccctacctgctcctcacccacagctacctgaggctgctctgagaagtacacacaggaatacatacgctcctctattcttcccttcatcctcatttgaacgccaggtatctcccctcctctctctcccctgcagaggcatgtagggaacagcaggagattattctcaccaaagttatgtcaagccccattggtcccagagtagctgaagggaagccaacccccctgcagcacaaataggccccccagtcccagccgtgtgctggcagatagggttgtattatttcttcttaccccatgcctgaccaagggaggtcaaaaggagaaaagtataggctgtggacaataactgatgaatatagggcccagatggaccaagtggggccggggagggatgaataaacaccctaccccgtgccctgtctttggtgagcagcagccctggggtcacagacatggaagggaccaccctggggctgactgcttttctgtgctgttggttcccaaaactagaaagaaggaagcagggagcggtgccccaagcatggctcctgccaacacctatttatttccttgtttgtgctatgctgggcaggccttctcttgtcccttataggtaccttggaggggccaggggctgaggaaggccggacccaggttccaggggcgcaggcagtgcggcttttggctgtgtacatagggtgctttattctccacagagtgatacatgctaaggtgggttgggcttggaccgatgtccccatatgtacagaactgaataaagtgggtctctgagaa

SEQ ID NO: 24516 - DNA, 2893 bp, Homo sapiens
  source 1..2893: mol_type = unassigned DNA
gagacgccgagcgggccgagtgcggccgagcaaagccggagccggagcggggccgcaggagacgggccgggtccggacgggccgagatgccctataaactgaaaaaggagaaggagccccccaaggttgccaaatgcacagccaagcctagcagctcgggcaaggatggtggaggcgagaacactgaggaggcccagccgcagccccagccccagccccagccccaagcccagtctcagccaccgtcatccaacaagcgtcccagcaatagcacgccgccccccacgcagctcagcaaaatcaagtactcaggggggccccagattgtcaagaaggagcgacggcaaagctcctcccgcttcaacctcagcaagaatcgggagctgcagaagcttcctgccctgaaagattcgccaacccaggagcgggaggagctgtttatccagaagctacgccagtgctgtgtcctctttgacttcgtgtcagacccactcagtgacctcaaattcaaggaggtgaagcgggcaggactcaacgagatggtggagtacatcacccatagccgtgatgttgtcactgaggccatttaccctgaggctgtcaccatgttttcagtgaacctcttccggacgctgccaccttcatcgaatcccacaggggctgagtttgacccagaggaagatgagcccaccctggaagctgcttggccacatctccagctcgtgtatgagttcttcttacgtttccttgagtctcctgatttccagccaaacatagccaagaagtacatcgaccagaagtttgtacttgctctcctagacctatttgacagtgaggatcctcgagagcgggacttcctcaagaccattttgcatcgcatctatggcaagtttttggggctccgggcttatatccgtaggcagatcaaccacatcttctacaggttcatctacgagacggagcatcacaacgggattgctgagctcctggagatcctgggcagcatcatcaatggctttgccctgccccttaaagaagagcacaagatgttcctcatccgtgtcctacttccccttcacaaggtcaagtccctgagtgtctaccaccctcaggtaattgtgggacttctcaagttttggcccaagacccacagccccaaggaggtgatgttcttgaatgagctggaggagattctggacgtcattgaaccttctgagttcagcaaagtgatggaacccctcttccgccagctggccaagtgtgtctctagcccccatttccaggtggcagagcgtgctctctattactggaacaatgagtacatcatgagcctgataagtgacaatgctgcccgagtcctccccatcatgttccctgcactctacaggaactccaagagccactggaacaagacaatccatggactgatctataatgccctgaagttgtttatggaaatgaatcagaagctgtttgatgactgcacacaacaatacaaggcagagaagcagaagggccggttccgaatgaaggaaagggaagagatgtggcaaaaaatcgaggagctggcccggcttaatccccagtatcccatgttccgagcccctccaccactgccccctgtgtactcgatggagacagagacccccacagctgaggacatccagcttctgaagaggactgtggagactgaggctgttcagatgctaaaagacatcaagaaggagaaagtgctgctgcggaggaagtcggagctgccccaggacgtgtacaccatcaaggcactggaggcgcacaagcgggcggaagagttcctaactgccagccaggaggctctctgacccctcacgttcctaccacagggccacagcccacacagccctgggacactgccctggccctccatactctgctccctactggctgtcttgggggaaggcagcgcctctctagctactcaagggagggggatgtgggcacttgaagcagggacacccacagaatggtccctcttctccccaaaaggtgttcatgcctccctgtggctagtacaggctgagcactaagatgcttagtgctcagacaacctggggatgcctgtcccctacctgctcctcacccacagctacctgaggctgctctgagaagtacacacaggaatacatacgctcctctattcttcccttcatcctcatttgaacgccaggtatctcccctcctctctctcccctgcagaggcatgtagggaacagcaggagattattctcaccaaagttatgtcaagccccattggtcccagagtagctgaagggaagccaacccccctgcagcacaaataggccccccagtcccagccgtgtgctggcagatagggttgtattatttcttcttaccccatgcctgaccaagggaggtcaaaaggagaaaagtataggctgtggacaataactgatgaatatagggcccagatggaccaagtggggccggggagggatgaataaacaccctaccccgtgccctgtctttggtgagcagcagccctggggtcacagacatggaagggaccaccctggggctgactgcttttctgtgctgttggttcccaaaactagaaagaaggaagcagggagcggtgccccaagcatggctcctgccaacacctatttatttccttgtttgtgctatgctgggcaggccttctcttgtcccttataggtaccttggaggggccaggggctgaggaaggccggacccaggttccaggggcgcaggcagtgcggcttttggctgtgtacatagggtgctttattctccacagagtgatacatgctaaggtgggttgggcttggaccgatgtccccatatgtacagaactgaataaagtgggtctctg

SEQ ID NO: 24517 - DNA, 6659 bp, Homo sapiens
  source 1..6659: mol_type = unassigned DNA
ggccagaaggttcggttgcgcgtgtgccatggactcagccgcccggtgatattgacaataggagagagaaaggggcattgactgggacccaccgcgggtagcgaaaggtggctctggcagcggcggctccagctcctgcggctcctcctccttattctgtccccttctcttgctgccgctgcagatccagtcttcctccctcccttccccccctccccacgtcgtcgccgccgccgccgggtccggggcaacgagctgaggcgccgcccgccaggaatgtgagcgaggagccaccggcggagccgcaacggggtcggtgccgatttgatgggacgggcccgcgggggaggatcgtgaggccgccgccgccaccggaacgctgaggttcgggtccggccgtgaggcctagaggctccgccgccgcggaaccggagggaccccgtaccggacagccgtcgccccaggctccccgcagctgcccggacctccccctgcacgtcccggtcccgccgcccgcccccgctgcggccacctcgcccgtctcccgcccctccaagccacagatcatctttggattcttccccagaagcttcaagtagggatatgtcctcagcaccaactactcctccatcagtggataaagtagacggattttctcggaagtccgtcagaaaagccagacagaagaggtcgcaaagttcctcacagtttaggtctcaaggcaagcctattgagttaacacctctgccgctgctaaaagacgttccatcctcagagcagcctgaactgttcctaaagaaacttcagcagtgctgtgtcatttttgacttcatggacacgctatctgatcttaaaatgaaagaatacaagcgctccactcttaatgaactggtggactacattacaataagcagaggctgtttgacagagcagacttaccctgaagtagttagaatggtatcttgcaatatattcagaactctccctcctagtgacagcaatgaatttgatccagaagaagatgaacctacccttgaggcatcgtggccacacttacagcttgtatatgaatttttcatacgatttttggaaagccaagaattccaacccagcattgccaaaaaatatatagatcagaaatttgtattacagcttctggagctatttgacagcgaagaccctcgggaacgggactacttaaaaacagtcttacacagaatttatggcaagtttcttggtcttagagcatttatccgaaaacagattaacaatatttttctaaggtttgtttatgaaacagaacacttcaatggtgtagctgaactgctggaaatattaggaagtattatcaatggctttgctttacctcttaaggcagaacacaaacagtttctggtgaaagtattgatccctttacacactgtcaggagcttatcactcttccatgcacagctggcatattgtatagtacagtttctggagaaagatccttcactcacagaaccagttattagggggttaatgaaattttggcctaaaacatgtagtcaaaaagaggtcatgttccttggggaactggaagaaatattggatgtgattgaaccttcacaatttgttaaaatccaagaacctttgtttaaacaaatcgccaagtgtgtatctagcccccattttcaggtggcagaaagagcactctattattggaataatgaatacatcatgagtttgatagaagaaaactctaacgtcatccttcccatcatgttttccagcctttataggatttcaaaagaacattggaatccggctattgtggcgttggtgtacaatgtgttgaaggcatttatggaaatgaacagcaccatgtttgacgagctgacagccacatacaagtcagatcgtcagcgtgagaaaaagaaagaaaaggagcgtgaagaattgtggaaaaaattggaggatctggagttaaagagaggtcttagacgtgatggaataattccaacttaacaaaaacaatgacaacaacattactaacctgtggagtcacacgtttatgtagtagaagatggagcaacagttttctgtattgtgcaactttacagtagatttcacctttgtttcattattacagcagcactgtatatacctgtctctaagtaaaggaaaaaacaaaataaggacttcaatccaaagtttggacagtagatggacttctcagaactttgcaaacataatcattgttctcaccctcttttaaaaaaaaaaatcggtcttcaaagatctgttgatgaaattgctatgttaaaattccattatcgggagttccttatttatcactagcagagagtatgatacaattttcaaatgtgaacaatcttaaatttagcttgtctttctgctaagctgttaaatgtatttatagtaaaggaagaaaaaaagactgtcatttccttataagtttgtgtaacatcctcctctggataacttgactgtaatttaacatctttttcttttgcacatcttcctgagttgaatgtccacgtggaatggggtcatgaattataaaagtccctgataaaagttttgtttactggggtgaacatctttccagtaaccaggtagtcctggtactcctttagttttaaaattaggagttaagagagaagaggtgataaacatagtagggaagggaatatcggattcatgcatcagtttatggtgaatccaaatcaatgtcttgaatcctttgaaaacaggcactgggacatcacaggcttcagtacctgaccagtattagttgcatatatcattgaacacacataccagagatgttttagaaatgtgagaaaaacatccttttggaccatttgaaataagaaagacaaacactaaacaatacaaccatgaaattgatcaccgggattgcaaatctaattgggaaaagagttgagcaaacagcttggactgtttggagttgttgccttactttttaatatgtatttataaagtattccagcaaaagaggatgtagcctctgggaaaaaacaaacatgttacagtgttttttgtagattctcgttctatatctcatcacagcgccagccctgtttttagccggaaaggattcaggataaacattattatgcattctgaattggatgcatattcctaactactgtatttgttaccaaaagtggttctacaaatgctactgaaaaaaatctggaaattcctaatgtcctgagtattaataataaagtttaaaaatgcttttatatcaaaggtgcatcgtgaccaaattgtttaagaaaaaaaaacaaaaaaaacaaaatctagggctgtattttatatatatatatatatatatatatatatatatatcttattggctctctgctttgtatttaaatgaagaatcttacatcttgggtaggtaaactgctgataaaatttgtgtacagtatgtacttacctaatgcagttgcattattacgtactgaaagatatgtgtttggaggtttatttccaggatgcatttgcttgttttggtcatggcagcagtgagttggtaatcctaaaccatcacttccagcagtattcatggtatagagctgatctgtgttcatatgttgaattgtgatagtagcaaacatgaacatatgaactattgttgctcttaatagaaatacaatataaatatgggcttgtatattttcttccttacatttaaatataaagtagaatacgcagttttattattttcaagaaaaagaaagagaagctgctgacctttctcccccataaagtttttcaggatgatcaggtcacagtgtgtacgtaagagtcagctaattatggatattgtcatctcggtaactttgtaaaaaaacaaacaaaactggcattgttaattccaaaaagaaaaaaaaaagcagtaaaaaaaaaaagtcatatgcaacaccagacgcaacatggtttaatggaattaatagtttttttttttttttttttaaagaacattgatggggattcactgtaaagttggcagaggctgccaaagacgaaacaactgactttaaaaatgctggaacaatgtgataaaaaataaatttgtaacaaatcttctcctttttagcccttgtcattttagccctttagtttcaactctgcattatatttagtttatatagtgtaaacttttgtttgccattaattcatctttttaggtagaagacattaaaatcacaggtttatgaagaatctctgctcattggaatgaaatgcagtcatttgaaatgagaaaggccaggatccttttttgtaccttaccctgtcttcaagagtaaaggtgaacacttacagctctcctccttgatgtcaattttgtatgttgatcattccaaactgagaagaataaagccacattttagacatatttatagaatcaattaaagctatatgtctaaaattcgtagggcaacttctgagaagaaacaccgtctttttcttttttaatggaaagtgacaatgtgacattagtcatgttgtgtgcggtgacgcagagtaactgaggtaatctgactgttgcactatgtgacatatttcaggacgtacttgctgcatttgcagcagccctctctctctgtcccttcccacaattctgctgttgctgcaacttgagttaattgtgacaaatgcatctttgtgttatattttgtttgcttcataatttccagaactatatataaatatattttttaaatagcaaatattgtagttagtgagtgatgatcactccaaccttatccttaccatattggtttcagggataggattaagagtgtctttggaagagaaaaatacacacaaccctgtggtttagaatgacgctgaggccttaggctgtgggcctagaacaactatgtgagtgaattcacccatctcatactttgaatcaagcatgcattcctgtttctcattgtgaagtatccccagttgttttccttcagtgttgagtttttgtccttttaaattttattatattttgctctccctaacatttgactgttttttataaaagaaaagaaaaaaaaagaaataaataataccctcgatgccactggatactcacaagcagggttatgctccttcatcttgggcttgtttgcctaaatgaaagggtttaatttattttgtacctcctatgcgtgggatagtccagggtgcagagccaggacttgcttgtaattgcacctgctatacttaaatgtatagccctaggctcaatcacactatggaaagaaacaaaaaaagtatatttagagctttaaaagcttttttatttttttgtggggatgagggtgggatgggaaagggatgtatggatgttattggcatttttaagtgtttagagttttttggggtttggggtggttttttttccttgttttccttttttccttttaattggatgcactgacctggcccaggaaatgaagagattctcttttgatgctattaccaatgttatcataaagtgacagtcacctgtaacaaaaaggtggcaccagacatgatcactgatgttttatttgcacatcaatatttttatttttgtattctggctcagctgcttctctgagtggagttaaggaatgagccacaaagatttttgtagtaggtatattggcattgcattttatattcctctatatttaattttgaaaacctaaaagaaggattgtgcatcttgagagaaagttgagcaaattgtgatctagcggaatgttaatttgtgctgcttcttgtgcacgatagcagcagtagtatctctcttggaaataaacatcccatattatgatgtctatgaatataggtttccttttcttccttccctccctccttcccccacctttctcttttttttttctctctcagcttctcttttcctccttccctcttcccttcctctttctttactttttttgaaatcacttattgtaaataagttgtaatccaaacctcatgtatcaatggggaattttcaaatataaatattaccaatgcattttctggttgttgtctgatttttgattgaagtataatgagaatgacatgtctgttgcttttggtttgaggacttcgctttagcttcataaatcttttggtattttagtatttcattgttttagcaggagagggcagcaaaagttcattttccctgttagtaatgctgtggttcatgatcggttttaaatttagctgtgtgtgtgtttttttaaacagcatctctttgtgagtagaggtaaaaatgaaacatttttgatatgaaaagttgcatatgaaaattatagactggttcaaccagacagtgaagacttctgatccacatcaaacttaaaatgccacaaaacaatcttccacctctggctaaaacatgctacttccttttcaaacaccacaaaatacaagctgagtcttaaacacttggaatttaaaatgtttttctttggaaatgatttgctttcttcaaagtggtaacagaaacaaaaatgaaggtgctccccaaaaagaaatgtaaccttcccctttcacagatgtgtgagaggttctgtactgtgggtgcatcataataaagaagcagtgaagagttttcaggt

SEQ ID NO: 24518 - DNA, 1471 bp, Homo sapiens
  source 1..1471: mol_type = unassigned DNA
agcatttgtgtgcatagtggctccaaagaggtgtgtgaggtgtgcgaggagggaagagcacacacttgacgttccatcctcagagcagcctgaactgttcctaaagaaacttcagcagtgctgtgtcatttttgacttcatggacacgctatctgatcttaaaatgaaagaatacaagcgctccactcttaatgaactggtggactacattacaataagcagaggctgtttgacagagcagacttaccctgaagtagttagaatggtatcttgcaatatattcagaactctccctcctagtgacagcaatgaatttgatccagaagaagatgaacctacccttgaggcatcgtggccacacttacagcttgtatatgaatttttcatacgatttttggaaagccaagaattccaacccagcattgccaaaaaatatatagatcagaaatttgtattacagcttctggagctatttgacagcgaagaccctcgggaacgggactacttaaaaacagtcttacacagaatttatggcaagtttcttggtcttagagcatttatccgaaaacagattaacaatatttttctaaggtttgtttatgaaacagaacacttcaatggtgtagctgaactgctggaaatattaggaagtattatcaatggctttgctttacctcttaaggcagaacacaaacagtttctggtgaaagtattgatccctttacacactgtcaggagcttatcactcttccatgcacagctggcatattgtatagtacagtttctggagaaagatccttcactcacagaaccagttattagggggttaatgaaattttggcctaaaacatgtagtcaaaaagaggtcatgttccttggggaactggaagaaatattggatgtgattgaaccttcacaatttgttaaaatccaagaacctttgtttaaacaaatcgccaagtgtgtatctagcccccattttcaggtggcagaaagagcactctattattggaataatgaatacatcatgagtttgatagaagaaaactctaacgtcatccttcccatcatgttttccagcctttataggatttcaaaagaacattggaatccggctattgtggcgttggtgtacaatgtgttgaaggcatttatggaaatgaacagcaccatgtttgacgagctgacagccacatacaagtcagatcgtcagcgtgagaaaaagaaagaaaaggagcgtgaagaattgtggaaaaaattggaggatctggagttaaagagaggtcttagacgtgatggaataattccaacttaacaaaaacaatgacaacaacattactaacctgtggagtcacacgtttatgtagtagaagatggagcaacagttttctgtattgtgcaactttacagtagatttcacctttgtttcattattacagcagcactgtatatacctgtctctaagtaaagg

SEQ ID NO: 24519 - DNA, 2164 bp, Homo sapiens
  source 1..2164: mol_type = unassigned DNA
attgactgggacccaccgcgggtagcgaaaggtggctctggcagcggcggctccagctcctgcggctcctcctccttattctgtccccttctcttgctgccgctgcagatccagtcttcctccctcccttccccccctccccacgtcgtcgccgccgccgccgggtccggggcaacgagctgaggcgccgcccgccaggaatgtgagcgaggagccaccggcggagccgcaacggggtcggtgccgatttgatgggacgggcccgcgggggaggatcgtgaggccgccgccgccaccggaacgctgaggttcgggtccggccgtgaggcctagaggctccgccgccgcggaaccggagggaccccgtaccggacagccgtcgccccaggctccccgcagctgcccggacctccccctgcacgtcccggtcccgccgcccgcccccgctgcggccacctcgcccgtctcccgcccctccaagccacagatcatctttggattcttccccagaagcttcaagtagggatatgtcctcagcaccaactactcctccatcagtggataaagtagacggattttctcggaagtccgtcagaaaagccagacagaagaggtcgcaaagttcctcacagtttaggtctcaaggcaagcctattgagttaacacctctgccgctgctaaaagacgttccatcctcagagcagcctgaactgttcctaaagaaacttcagcagtgctgtgtcatttttgacttcatggacacgctatctgatcttaaaatgaaagaatacaagcgctccactcttaatgaactggtggactacattacaataagcagaggctgtttgacagagcagacttaccctgaagtagttagaatggtatcttgcaatatattcagaactctccctcctagtgacagcaatgaatttgatccagaagaagatgaacctacccttgaggcatcgtggccacacttacagcttgtatatgaatttttcatacgatttttggaaagccaagaattccaacccagcattgccaaaaaatatatagatcagaaatttgtattacagcttctggagctatttgacagcgaagaccctcgggaacgggactacttaaaaacagtcttacacagaatttatggcaagtttcttggtcttagagcatttatccgaaaacagattaacaatatttttctaaggtttgtttatgaaacagaacacttcaatggtgtagctgaactgctggaaatattaggaagtattatcaatggctttgctttacctcttaaggcagaacacaaacagtttctggtgaaagtattgatccctttacacactgtcaggagcttatcactcttccatgcacagctggcatattgtatagtacagtttctggagaaagatccttcactcacagaaccagttattagggggttaatgaaattttggcctaaaacatgtagtcaaaaagaggtcatgttccttggggaactggaagaaatattggatgtgattgaaccttcacaatttgttaaaatccaagaacctttgtttaaacaaatcgccaagtgtgtatctagcccccattttcaggtggcagaaagagcactctattattggaataatgaatacatcatgagtttgatagaagaaaactctaacgtcatccttcccatcatgttttccagcctttataggatttcaaaagaacattggaatccggctattgtggcgttggtgtacaatgtgttgaaggcatttatggaaatgaacagcaccatgtttgacgagctgacagccacatacaatgagaaaaagaaagaaaaggagcgtgaagaattgtggaaaaaattggaggatctggagttaaagagaggtcttagacgtgatggaataattccaacttaacaaaaacaatgacaacaacattactaacctgtggagtcacacgtttatgtagtagaagatggagcaacagttttctgtattgtgcaactttacagtagatttcacctttgtttcattattacagcagcactgtatatacctgtctctaagtaaaggaaaaaacaaaataaggacttcaatccaaagtttggacagtagatggacttctcagaactttgcaaacataatcattgttctcaccctctttt

SEQ ID NO: 24520 - DNA, 4092 bp, Homo sapiens
  source 1..4092: mol_type = unassigned DNA
acatgcaaaaagtggggcctggagatggggctgtcttttttctccaaacacttgcccatccaggaaggccagccctgggcattgaagactccagctgacatcatctctaccgttgagttcaaccacacgggagagctgctggccacaggtgacaagggcggccgggtcgtcatcttccagcgggaaccagagagtaaaaatgcgccccacagccagggcgaatacgacgtgtacagcactttccagagccacgagccggagtttgactatctcaagagcctggagatagaggagaagatcaacaagatcaagtggctcccacagcagaacgccgcccactcactcctgtccaccaacgataaaactatcaaattatggaagattaccgaacgagataaaaggcccgaaggatacaacctgaaggatgaagaggggaaacttaaggacctgtccacggtgacgtcactgcaggtgccagtgctgaagcccatggatctgatggtggaggtgagccctcggaggatctttgccaatggccacacctaccacatcaactccatctccgtcaacagtgactgcgagacctacatgtcggcggatgacctgcgcatcaacctctggcacctggccatcaccgacaggagcttcaacatcgtggacatcaagccggccaacatggaggaccttacggaggtgatcacagcatctgagttccatccgcaccactgcaacctcttcgtctacagcagcagcaagggctccctgcggctctgcgacatgcgggcagctgccctgtgtgacaagcattccaagctctttgaagagcctgaggaccccagtaaccgctcattcttctcggaaatcatctcctccgtgtccgacgtgaagttcagccacagcggccgctacatgctcacccgggactaccttacagtcaaggtctgggacctgaacatggaggcaagacccatagagacctaccaggtccatgactaccttcggagcaagctctgttccctgtacgagaacgactgcattttcgacaagtttgaatgtgcctggaacgggagcgacagcgtcatcatgaccggggcctacaacaacttcttccgcatgttcgatcggaacaccaagcgggacgtgaccctggaggcctcgagggaaagcagcaagccccgggctgtgctcaagccacggcgcgtgtgcgtggggggcaagcgccggcgtgatgacatcagtgtggacagcttggacttcaccaagaagatcctgcacacggcctggcacccggctgagaacatcattgccatcgccgccaccaacaacctgtacatcttccaggacaaggtaaactctgacatgcactaggtatgtgcagttcccggcccctgccacccagcctcatgcaagtcatccccgacatgaccttcacgaccgcaatgcaaggaggggaagaaagtcacagcactgatgaggacagctgcagaggtggcagtgtgtggacacaggaagtttgggccccctccctgccccagctttcctaggccagaattgtgtttggcagtaattgtctgtttaaaaaaataaaaaggaaaggaagcgttcaccgccacaaatcataaaatggacatgactgtggagtcttacagttcagggttctttcattcacgtcccttcctgtctcggtctgcggtctttaccacatcaataggactttttatgcgtccgggttaatttttcactccagtgcgtcctgttgcagggaccggagctgatgggagctgcttctcccccatgcctcactggtcccagatcagggctccagggacagatgatgagtctcaaacgagccagccaggggttcttttggttataaatggggcaattcgccctgtctcagagctgatgacctcaccgttgttttttggatggtgaattcatgctgagaatttgcagatgcaagctcctctcctaggtcttctgaatgtcttgaaacatcccaggtcccaggtctggtgcggtttcccgagaggagcggagtggggtttgtcttctgtgtgcctgtgtcctcatctgattcacctgccatttgctgagcctctgctgtgtaccaggcgtggtgctcagccctagaggcagttgacttaccctctgcagccctccctgccgcctcacccttcagcattcactgggcaccttcccggagcggacactgactcccatgcacgattttttggaatcttcctcctgactgtgaggtgggtgttcattcatttcctccataaacaccaacttctcgaagcgtgccaggctctgggctggatgctggggataagcgggaacccttaggatcccctctgtccacgagaagaagctgaggctctgagcggatgcacaggtcacccatggcaggtgccgtgcagtggtgtcaggaacccgtccgggtcttcacacaaggttctctccagtccatctcgtgggcggctcatgttagagcgacattcaaatggaaggtttggaaaggaatgcctctgtcttgtgaagtaggacatggcagacttggcgacgacaagggtccaggagaactgagacgcaggatggaagacagagaagaccccccggagctcctcgctctgcttggtggcttcaggagtgtggccctccccaggactccacttcatcctgggcttgcaccctccttgagccaatgcactgaactgcctttgaaaggaaattgcatgttctgaccattttaggatacctttactttaaggaccacacagtcccagaggacacatccctcgggaactctgcccctctgacaatgagggccacagagaaggtggtgtttccatggtagatgctcctgttctggtgataccaaacctgcccacccctctgagtcgtctttgctcatggacttgcagcagagccacgtagtttggcattttgattcagaaagtggggagcagagacccagccaaatccaaactttttttttggttttgttttgttttgttttttacaagatataacataacccaggaaacagacccagctgaggttattctcagtggattacagtatacttttgtgtgtgtaaaagcacaaagtgcatgtgtactcacttctggccatataacatttacacagggaaatggatcattgatttttttttaatcaacgtgaatgaagaatgtttgtttatatatcactataaaatccagttgacctggacagtattatatgtacatatctattctaattaaatttaacaatcaaaggattggattacttttttcccccttgtaaagaggttcgagaatgtggtcaattgtatagatagcgtgttaaagccaaaacccagctctgagggccttacccattacttggatatttgctacgatccatctccctttgtgagtcaaatgttaagagaagaaacttgtatttgcagctagaggttactgtcacatcatagatttaacatttaccatcttcaaagtacaaatcttacatgtccttcaaaaggaggtcttaatacagttcctagttccttacttctgttttaaactttgggtaccaaaccaaaaagaagaaaaaagaaaggaaaagatcttctttgaagaaaagtatgtctctggatccctggaaaataatgatgtccaaagcaaattgtgaagatcaaatgtgtgttaagaaaaggtgtcgaggggagggacaaaaccagaaacggtggaaggaccagtgtaatagtcacagacttgcatcctggctctgcttacatttcctggtactctcgaatgtacgggcgttcacatagtcattgtgaagttgttggggtttttttggttttgtttttaatttagctcttctctgaggacgaagctgttggtggtggtggtggtgggggtggtggtgtgggatacatggtggtcaagttgtcagccctgatcagtttggactctgtaactcataggtgcattctttttttctttggtgtctcacaaattacccaattgttgaataaaactataaatatgttaataccagctttttccaataaaataacaaatgttacatcaaaaacga

SEQ ID NO: 24521 - DNA, 1807 bp, Homo sapiens
  source 1..1807: mol_type = unassigned DNA
gcggccgccgcccgcccaccgcgcgctcgcttgaccgcggcgcccgcccccggccgcccccgcccgtccccctgccgcgatgccctcccttcggggccccggcggcccgcgcccctgctaggctgcggcggcatggcccgcgcgcccggcgcgacctctgcggattgcatcggtgtgtggcggcggggcatgcccagagcaccgggcacggccttcaatgggcgaggacacggacacgcggaaaattaaccacagcttcctgcgggaccacagctatgtgactgaagctgacatcatctctaccgttgagttcaaccacacgggagagctgctggccacaggtgacaagggcggccgggtcgtcatcttccagcgggaaccagagagtaaaaatgcgccccacagccagggcgaatacgacgtgtacagcactttccagagccacgagccggagtttgactatctcaagagcctggagatagaggagaagatcaacaagatcaagtggctcccacagcagaacgccgcccactcactcctgtccaccaacgataaaactatcaaattatggaagattaccgaacgagataaaaggcccgaaggatacaacctgaaggatgaagaggggaaacttaaggacctgtccacggtgacgtcactgcaggtgccagtgctgaagcccatggatctgatggtggaggtgagccctcggaggatctttgccaatggccacacctaccacatcaactccatctccgtcaacagtgactgcgagacctacatgtcggcggatgacctgcgcatcaacctctggcacctggccatcaccgacaggagcttcaacatcgtggacatcaagccggccaacatggaggaccttacggaggtgatcacagcatctgagttccatccgcaccactgcaacctcttcgtctacagcagcagcaagggctccctgcggctctgcgacatgcgggcagctgccctgtgtgacaagcattccaagctctttgaagagcctgaggaccccagtaaccgctcattcttctcggaaatcatctcctccgtgtccgacgtgaagttcagccacagcggccgctacatgctcacccgggactaccttacagtcaaggtctgggacctgaacatggaggcaagacccatagagacctaccaggtccatgactaccttcggagcaagctctgttccctgtacgagaacgactgcattttcgacaagtttgaatgtgcctggaacgggagcgacagcgtcatcatgaccggggcctacaacaacttcttccgcatgttcgatcggaacaccaagcgggacgtgaccctggaggcctcgagggaaagcagcaagccccgggctgtgctcaagccacggcgcgtgtgcgtggggggcaagcgccggcgtgatgacatcagtgtggacagcttggacttcaccaagaagatcctgcacacggcctggcacccggctgagaacatcattgccatcgccgccaccaacaacctgtacatcttccaggacaaggtaaactctgacatgcactaggtatgtgcagttcccggcccctgccacccagcctcatgcaagtcatccccgacatgaccttcacgaccgcaatgcaaggaggggaagaaagtcacagcactgatgaggacagctgcagaggtggcagtgtgtggacacaggaagtttgggccccctccctgccccagctttcctaggccagaattgtgtttggcagtaattgtctgtttaaaaaaataaaaaggaaaggaagcgttcaccgccaca

SEQ ID NO: 24522 - DNA, 1780 bp, Homo sapiens
  source 1..1780: mol_type = unassigned DNA
gtgccagctcaatggggccgccgacctcgaagtttccgaagaagtaaaatagaaagaagaccttttttgaaatgacctgtgttagtcacctctctcaggatgcgtgaggcggacacgttgaggccacctcagctgatggaagtttccgctgacatcatctctaccgttgagttcaaccacacgggagagctgctggccacaggtgacaagggcggccgggtcgtcatcttccagcgggaaccagagagtaaaaatgcgccccacagccagggcgaatacgacgtgtacagcactttccagagccacgagccggagtttgactatctcaagagcctggagatagaggagaagatcaacaagatcaagtggctcccacagcagaacgccgcccactcactcctgtccaccaacgataaaactatcaaattatggaagattaccgaacgagataaaaggcccgaaggatacaacctgaaggatgaagaggggaaacttaaggacctgtccacggtgacgtcactgcaggtgccagtgctgaagcccatggatctgatggtggaggtgagccctcggaggatctttgccaatggccacacctaccacatcaactccatctccgtcaacagtgactgcgagacctacatgtcggcggatgacctgcgcatcaacctctggcacctggccatcaccgacaggagcttcaacatcgtggacatcaagccggccaacatggaggaccttacggaggtgatcacagcatctgagttccatccgcaccactgcaacctcttcgtctacagcagcagcaagggctccctgcggctctgcgacatgcgggcagctgccctgtgtgacaagcattccaagctctttgaagagcctgaggaccccagtaaccgctcattcttctcggaaatcatctcctccgtgtccgacgtgaagttcagccacagcggccgctacatgctcacccgggactaccttacagtcaaggtctgggacctgaacatggaggcaagacccatagagacctaccaggtccatgactaccttcggagcaagctctgttccctgtacgagaacgactgcattttcgacaagtttgaatgtgcctggaacgggagcgacagcgtcatcatgaccggggcctacaacaacttcttccgcatgttcgatcggaacaccaagcgggacgtgaccctggaggcctcgagggaaagcagcaagccccgggctgtgctcaagccacggcgcgtgtgcgtggggggcaagcgccggcgtgatgacatcagtgtggacagcttggacttcaccaagaagatcctgcacacggcctggcacccggctgagaacatcattgccatcgccgccaccaacaacctgtacatcttccaggacaaggtaaactctgacatgcactaggtatgtgcagttcccggcccctgccacccagcctcatgcaagtcatccccgacatgaccttcacgaccgcaatgcaaggaggggaagaaagtcacagcactgatgaggacagctgcagaggtggcagtgtgtggacacaggaagtttgggccccctccctgccccagctttcctaggccagaattgtgtttggcagtaattgtctgtttaaaaaaataaaaaggaaaggaagcgttcaccgccacaaatcataaaatggacatgactgtggagtcttacagttcagggttctttcattcacgtcccttcctgtctcggtctgcggtctttaccacatcaataggactttttatgcgtc

SEQ ID NO: 24523 - DNA, 1667 bp, Homo sapiens
  source 1..1667: mol_type = unassigned DNA
atcattcaaaggattcctgcggtggtgcagagctgcggcaaagggccctcgcccgtggggttcactctcatcacccagaagcagggagaagggcctgcggctgcaggcctggctgccacaccggcctccagacaacacacagcagaagtaaaatagaaagaagaccttttttgaaatgacctgtgttagtcacctctctcaggatgcgtgaggcggacacgttgaggccacctcagctgatggaagtttccgctgacatcatctctaccgttgagttcaaccacacgggagagctgctggccacaggtgacaagggcggccgggtcgtcatcttccagcgggaaccagagagtaaaaatgcgccccacagccagggcgaatacgacgtgtacagcactttccagagccacgagccggagtttgactatctcaagagcctggagatagaggagaagatcaacaagatcaagtggctcccacagcagaacgccgcccactcactcctgtccaccaacgataaaactatcaaattatggaagattaccgaacgagataaaaggcccgaaggatacaacctgaaggatgaagaggggaaacttaaggacctgtccacggtgacgtcactgcaggtgccagtgctgaagcccatggatctgatggtggaggtgagccctcggaggatctttgccaatggccacacctaccacatcaactccatctccgtcaacagtgactgcgagacctacatgtcggcggatgacctgcgcatcaacctctggcacctggccatcaccgacaggagcttcaacatcgtggacatcaagccggccaacatggaggaccttacggaggtgatcacagcatctgagttccatccgcaccactgcaacctcttcgtctacagcagcagcaagggctccctgcggctctgcgacatgcgggcagctgccctgtgtgacaagcattccaagctctttgaagagcctgaggaccccagtaaccgctcattcttctcggaaatcatctcctccgtgtccgacgtgaagttcagccacagcggccgctacatgctcacccgggactaccttacagtcaaggtctgggacctgaacatggaggcaagacccatagagacctaccaggtccatgactaccttcggagcaagctctgttccctgtacgagaacgactgcattttcgacaagtttgaatgtgcctggaacgggagcgacagcgtcatcatgaccggggcctacaacaacttcttccgcatgttcgatcggaacaccaagcgggacgtgaccctggaggcctcgagggaaagcagcaagccccgggctgtgctcaagccacggcgcgtgtgcgtggggggcaagcgccggcgtgatgacatcagtgtggacagcttggacttcaccaagaagatcctgcacacggcctggcacccggctgagaacatcattgccatcgccgccaccaacaacctgtacatcttccaggacaaggtaaactctgacatgcactaggtatgtgcagttcccggcccctgccacccagcctcatgcaagtcatccccgacatgaccttcacgaccgcaatgcaaggaggggaagaaagtcacagcactgatgaggacagctgcagaggtggcagtgtgtggacacagg

SEQ ID NO: 24524 - DNA, 1832 bp, Homo sapiens
  source 1..1832: mol_type = unassigned DNA
atgtgttttgggggaaacagagagaaaggtgtggcctctccacttctgtggacaccccaaataggaagaagggtgcacacaaagcaccgcttcctccacgaagccctcctcaggcacatcgaggagaaccagctgcccaagctcttggctgctgcccttctgaggcctgcctgatttgggccacatagatctggttttggccattgactggcaacatggcagtagccaactgcagagccaccagggagcagcctcattctgattgagtataacgaagacgctgatgggaaagagagacacggctgacatcatctctaccgttgagttcaaccacacgggagagctgctggccacaggtgacaagggcggccgggtcgtcatcttccagcgggaaccagagagtaaaaatgcgccccacagccagggcgaatacgacgtgtacagcactttccagagccacgagccggagtttgactatctcaagagcctggagatagaggagaagatcaacaagatcaagtggctcccacagcagaacgccgcccactcactcctgtccaccaacgataaaactatcaaattatggaagattaccgaacgagataaaaggcccgaaggatacaacctgaaggatgaagaggggaaacttaaggacctgtccacggtgacgtcactgcaggtgccagtgctgaagcccatggatctgatggtggaggtgagccctcggaggatctttgccaatggccacacctaccacatcaactccatctccgtcaacagtgactgcgagacctacatgtcggcggatgacctgcgcatcaacctctggcacctggccatcaccgacaggagcttcaacatcgtggacatcaagccggccaacatggaggaccttacggaggtgatcacagcatctgagttccatccgcaccactgcaacctcttcgtctacagcagcagcaagggctccctgcggctctgcgacatgcgggcagctgccctgtgtgacaagcattccaagctctttgaagagcctgaggaccccagtaaccgctcattcttctcggaaatcatctcctccgtgtccgacgtgaagttcagccacagcggccgctacatgctcacccgggactaccttacagtcaaggtctgggacctgaacatggaggcaagacccatagagacctaccaggtccatgactaccttcggagcaagctctgttccctgtacgagaacgactgcattttcgacaagtttgaatgtgcctggaacgggagcgacagcgtcatcatgaccggggcctacaacaacttcttccgcatgttcgatcggaacaccaagcgggacgtgaccctggaggcctcgagggaaagcagcaagccccgggctgtgctcaagccacggcgcgtgtgcgtggggggcaagcgccggcgtgatgacatcagtgtggacagcttggacttcaccaagaagatcctgcacacggcctggcacccggctgagaacatcattgccatcgccgccaccaacaacctgtacatcttccaggacaaggtaaactctgacatgcactaggtatgtgcagttcccggcccctgccacccagcctcatgcaagtcatccccgacatgaccttcacgaccgcaatgcaaggaggggaagaaagtcacagcactgatgaggacagctgcagaggtggcagtgtgtggacacaggaagtttgggccccctccctgccccagctttcctaggccagaattgtgtttggcagtaattgtctgtttaaaaaaataaaaaggaaaggaagcgttcaccgccacaaatcataaaa

SEQ ID NO: 24525 - DNA, 4045 bp, Homo sapiens
  source 1..4045: mol_type = unassigned DNA
gctccagccatgccgaataaaaacaagaaggagaaagaatcaccaaaagcagggaagagtggaaaaagttcaaaagaaggacaagacacagtagaatcagagcaaatttccgtcaggaaaaacagccttgttgctgtcccgtctacagtatctgctaaaataaaagtaccagtctctcagcccatagtgaagaaagacaaacggcaaaattcttcaaggtttagcgcaagcaataatagagaacttcaaaaactaccatccttaaaagatgttcctcctgctgatcaagagaagctttttatccagaagttacgtcagtgttgcgtcctctttgactttgtttctgatccactaagtgacctaaagtggaaggaagtaaaacgagctgctttaagtgaaatggtagaatatatcacccataatcggaatgtgatcacagagcctatttacccagaagtagtccatatgtttgcagttaacatgtttcgaacattaccaccttcctccaatcctacgggagcggaatttgacccggaggaagatgaaccaacgttagaagcagcctggcctcatctacagcttgtttatgaatttttcttaagatttttagagtctccagatttccaacctaatatagcgaagaaatatattgatcagaagtttgtattgcagcttttagagctctttgacagtgaagatcctcgggagagagattttcttaaaaccacccttcacagaatctatgggaaattcctaggcttgagagcttacatcagaaaacagataaataatatattttataggtttatttatgaaacagagcatcataatggcatagcagagttactggaaatattgggaagtataattaatggatttgccttaccactaaaagaagagcacaagattttcttattgaaggtgttactacctttgcacaaagtgaaatctctgagtgtctaccatccccagctggcatactgtgtagtgcagtttttagaaaaggacagcaccctcacggaaccagtggtgatggcacttctcaaatactggccaaagactcacagtccaaaagaagtaatgttcttaaacgaattagaagagattttagatgtcattgaaccatcagaatttgtgaagatcatggaacccctcttccggcagttggccaaatgtgtctccagcccacacttccaggtggcagagcgagctctctattactggaataatgaatacatcatgagtttaatcagtgacaacgcagcgaagattctgcccatcatgtttccttccttgtaccgcaactcaaagacccattggaacaagacaatacatggcttgatatacaacgccctgaagctcttcatggagatgaaccaaaagctatttgatgactgtacacaacagttcaaagcagagaaactaaaagagaagctaaaaatgaaagaacgggaagaagcatgggttaaaatagaaaatctagccaaagccaatccccaggcacagaaagatccgaagaaggaccgtcctcttgcacgccgcaagtccgagctgcctcaggacccccacaccaagaaagccttggaagctcactgcagggccgatgagctggcctcccaggacggccgctagcctccggggcgccgcgtcggggccgggcccgccagttcttttccggattctgtagaaaatacatacttcctgtgccataccaatcagttacactcaaagctttcttggaccccgttccgtaggcaataacgtgcgtccgcctcagcgcgagattaggagttcaaacaatggtgacttcccagagcccgctggcagagccgcgggttgacgacggtgtcctcgcagtgtcgccgccaccccagcgtagtccaagtcagactatttcacaaagtcagagcgataggaaagcaccctgcccttcatcttcatgttctcccaaatggaacttaggatcttttaacataggtggttctgtgataacatcagtgttttccaaatcaaaggaacgctttaaaaaataggacctattttttaagactttacagcctttgaaatggtttccacgtgattgttacgccagcagttctcgttttgtttgtttttcaatctcagtgaaatggctctttgctttcgagttctcacgcaacgtactgggcaaatgacaatcctcagccgctggtattttctaaggggtctcttcactttgatgagtgacatgaacaccgtgtctccttctcttgtgtgtacctaaagccatatttccaagtctgtggtactccaggattccaggagtaagcctgtagaagagatttattttaaaagagattgctctgaaatttatcttaaaagagcttgctctgtctaccttgacagaaattggagttttaaaattatgtgttaatatttttatttgcagatttcgtttccgtcaacttaaacattgttgcccttcaacaaggctcttgaattaataaaattatagtctctaagaattccacattttatggaaagttagagcaaaatcattttgagttaagccagttcttagcctaatgcaaactgcagcgcctttaagcataaagtaacacaacagcattgcacggggccggcactgccgctgccttcactgaaggctgcagtgctgttctgagagcttggaggaggcaccagcgaggatgacgtttagtggagctctttctgttgaaaagagctcacgttatcaacaccttgtaaggaaaatacagtgtctgagttttcatcggtcttcacatgctgctatatattccacagagttccttgcatgtactgagcttttgttttagatggaatagcacaaggagaaaaatctttaaacttagtgctttgtctattctttatttctctcagggtggccagtattttgacttatttatcctgcttgaaagctacttgagatgtgtactgctattctaaacacgtgatctagtttctttcatctctggcataagattatataacttaatgttaagtgtcttgaggcataaaagacaaaatgtggcttattttaggatctgttttttcatcgaggtctcgggtatcctttcaaagatagtgagaagcagacactgctccttgtgcagctctggtacctcctgcccactgctgtcacttcaagccactggcaatgcttctgtcctcgtgtcttggaggaaaatcacctggggggaggggacttcttgtggtaagagcaagtgcaggtatgaaatgcgaagattgccccagctaaaagtggacaagtccgctttgtgagatgaatacttcctgagaaacttgacaagtatctctccattttaccattatgaaaactatcattaaaaaaaacagtttagatgccttctccttttgagggaaaaagggtgctttttattgtataaagcagcgtcttatgtattttgatataccattgtttgaacttccgtctttagctgatagattctcaaatatccttgattttggatgttcagtatgtttgtgagagaggtttctgggaagactctctttttgccctcgggaaaaagcaaaatatcaatgtttgggtgactgtgtaaagctcagtgtgtaagaacatctttttgtctaggttttctttctgctctttattgaagacaaacactcaccaaaaagaaaaataaaagttttcagagaaactaattttctttggcaagagtattacttaatattttggcctcctaaagtttccctagttagtactcggactcctgtgctaattgtcagcttacatatcattgtatagagactgtttattctgtaccaaactgatttcaaaagtactacattgaaaataaaccggtgactgtttttcttcataaagttctgcgtttggcatcttcactctttccaaaatgtatctgtacatcagaaatgtcactattccaagtgtctttttagtgtggctttagtatggcttccttttaatattgtacatacattgtatctttgttttatggtaataagtaataaaaatgtagacttc

SEQ ID NO: 24526 - DNA, 4037 bp, Homo sapiens
  source 1..4037: mol_type = unassigned DNA
ctggtttcttgccttaaggagcccattgcctttcccgctgaagtctagatgttgacatgtaataaagcgggcagcaggatggtggtggatgcggccaactccaatgggcctttccagcccgtggtccttctccatattcgagatgttcctcctgctgatcaagagaagctttttatccagaagttacgtcagtgttgcgtcctctttgactttgtttctgatccactaagtgacctaaagtggaaggaagtaaaacgagctgctttaagtgaaatggtagaatatatcacccataatcggaatgtgatcacagagcctatttacccagaagtagtccatatgtttgcagttaacatgtttcgaacattaccaccttcctccaatcctacgggagcggaatttgacccggaggaagatgaaccaacgttagaagcagcctggcctcatctacagcttgtttatgaatttttcttaagatttttagagtctccagatttccaacctaatatagcgaagaaatatattgatcagaagtttgtattgcagcttttagagctctttgacagtgaagatcctcgggagagagattttcttaaaaccacccttcacagaatctatgggaaattcctaggcttgagagcttacatcagaaaacagataaataatatattttataggtttatttatgaaacagagcatcataatggcatagcagagttactggaaatattgggaagtataattaatggatttgccttaccactaaaagaagagcacaagattttcttattgaaggtgttactacctttgcacaaagtgaaatctctgagtgtctaccatccccagctggcatactgtgtagtgcagtttttagaaaaggacagcaccctcacggaaccagtggtgatggcacttctcaaatactggccaaagactcacagtccaaaagaagtaatgttcttaaacgaattagaagagattttagatgtcattgaaccatcagaatttgtgaagatcatggaacccctcttccggcagttggccaaatgtgtctccagcccacacttccaggtggcagagcgagctctctattactggaataatgaatacatcatgagtttaatcagtgacaacgcagcgaagattctgcccatcatgtttccttccttgtaccgcaactcaaagacccattggaacaagacaatacatggcttgatatacaacgccctgaagctcttcatggagatgaaccaaaagctatttgatgactgtacacaacagttcaaagcagagaaactaaaagagaagctaaaaatgaaagaacgggaagaagcatgggttaaaatagaaaatctagccaaagccaatccccagtacacagtgtatagtcaagccagcaccatgagcattccggttgcaatggagacagatgggcctttatttgaagatgtgcagatgctgagaaagacagtgaaggacgaggctcatcaggcacagaaagatccgaagaaggaccgtcctcttgcacgccgcaagtccgagctgcctcaggacccccacaccaagaaagccttggaagctcactgcagggccgatgagctggcctcccaggacggccgctagcctccggggcgccgcgtcggggccgggcccgccagttcttttccggattctgtagaaaatacatacttcctgtgccataccaatcagttacactcaaagctttcttggaccccgttccgtaggcaataacgtgcgtccgcctcagcgcgagattaggagttcaaacaatggtgacttcccagagcccgctggcagagccgcgggttgacgacggtgtcctcgcagtgtcgccgccaccccagcgtagtccaagtcagactatttcacaaagtcagagcgataggaaagcaccctgcccttcatcttcatgttctcccaaatggaacttaggatcttttaacataggtggttctgtgataacatcagtgttttccaaatcaaaggaacgctttaaaaaataggacctattttttaagactttacagcctttgaaatggtttccacgtgattgttacgccagcagttctcgttttgtttgtttttcaatctcagtgaaatggctctttgctttcgagttctcacgcaacgtactgggcaaatgacaatcctcagccgctggtattttctaaggggtctcttcactttgatgagtgacatgaacaccgtgtctccttctcttgtgtgtacctaaagccatatttccaagtctgtggtactccaggattccaggagtaagcctgtagaagagatttattttaaaagagattgctctgaaatttatcttaaaagagcttgctctgtctaccttgacagaaattggagttttaaaattatgtgttaatatttttatttgcagatttcgtttccgtcaacttaaacattgttgcccttcaacaaggctcttgaattaataaaattatagtctctaagaattccacattttatggaaagttagagcaaaatcattttgagttaagccagttcttagcctaatgcaaactgcagcgcctttaagcataaagtaacacaacagcattgcacggggccggcactgccgctgccttcactgaaggctgcagtgctgttctgagagcttggaggaggcaccagcgaggatgacgtttagtggagctctttctgttgaaaagagctcacgttatcaacaccttgtaaggaaaatacagtgtctgagttttcatcggtcttcacatgctgctatatattccacagagttccttgcatgtactgagcttttgttttagatggaatagcacaaggagaaaaatctttaaacttagtgctttgtctattctttatttctctcagggtggccagtattttgacttatttatcctgcttgaaagctacttgagatgtgtactgctattctaaacacgtgatctagtttctttcatctctggcataagattatataacttaatgttaagtgtcttgaggcataaaagacaaaatgtggcttattttaggatctgttttttcatcgaggtctcgggtatcctttcaaagatagtgagaagcagacactgctccttgtgcagctctggtacctcctgcccactgctgtcacttcaagccactggcaatgcttctgtcctcgtgtcttggaggaaaatcacctggggggaggggacttcttgtggtaagagcaagtgcaggtatgaaatgcgaagattgccccagctaaaagtggacaagtccgctttgtgagatgaatacttcctgagaaacttgacaagtatctctccattttaccattatgaaaactatcattaaaaaaaacagtttagatgccttctccttttgagggaaaaagggtgctttttattgtataaagcagcgtcttatgtattttgatataccattgtttgaacttccgtctttagctgatagattctcaaatatccttgattttggatgttcagtatgtttgtgagagaggtttctgggaagactctctttttgccctcgggaaaaagcaaaatatcaatgtttgggtgactgtgtaaagctcagtgtgtaagaacatctttttgtctaggttttctttctgctctttattgaagacaaacactcaccaaaaagaaaaataaaagttttcagagaaactaattttctttggcaagagtattacttaatattttggcctcctaaagtttccctagttagtactcggactcctgtgctaattgtcagcttacatatcattgtatagagactgtttattctgtaccaaactgatttcaaaagtactacattgaaaataaaccggtgactgtttttcttcataaagttctgcgtttggcatcttcactctttccaaaatgtatctgtacatcagaaatgtcactattccaagtgtctttttagtgtggctttagtatggcttccttttaatattgtacatacattgtatctttgttttatggtaataagtaataaaaatgtagacttca

SEQ ID NO: 24527 - DNA, 4304 bp, Homo sapiens
  source 1..4304: mol_type = unassigned DNA
agcttcatgcctgctgacatcacgaaccagccagttccctccagctgcagagagcttcagtttgtctttttttttttaaactaaaatggaggctggtttcttgccttaaggagcccattgcctttcccgctgaagtctagatgttgacatgtaataaagcgggcagcaggatggtggtggatgcggccaactccaatgggcctttccagcccgtggtccttctccatattcgagatgttcctcctgctgatcaagagaagctttttatccagaagttacgtcagtgttgcgtcctctttgactttgtttctgatccactaagtgacctaaagtggaaggaagtaaaacgagctgctttaagtgaaatggtagaatatatcacccataatcggaatgtgatcacagagcctatttacccagaagtagtccatatgtttgcagttaacatgtttcgaacattaccaccttcctccaatcctacgggagcggaatttgacccggaggaagatgaaccaacgttagaagcagcctggcctcatctacagcttgtttatgaatttttcttaagatttttagagtctccagatttccaacctaatatagcgaagaaatatattgatcagaagtttgtattgcagcttttagagctctttgacagtgaagatcctcgggagagagattttcttaaaaccacccttcacagaatctatgggaaattcctaggcttgagagcttacatcagaaaacagataaataatatattttataggtttatttatgaaacagagcatcataatggcatagcagagttactggaaatattgggaagtataattaatggatttgccttaccactaaaagaagagcacaagattttcttattgaaggtgttactacctttgcacaaagtgaaatctctgagtgtctaccatccccagctggcatactgtgtagtgcagtttttagaaaaggacagcaccctcacggaaccagtggtgatggcacttctcaaatactggccaaagactcacagtccaaaagaagtaatgttcttaaacgaattagaagagattttagatgtcattgaaccatcagaatttgtgaagatcatggaacccctcttccggcagttggccaaatgtgtctccagcccacacttccaggacaatacatggcttgatatacaacgccctgaagctcttcatggagatgaaccaaaagctatttgatgactgtacacaacagttcaaagcagagaaactaaaagagaagctaaaaatgaaagaacgggaagaagcatgggttaaaatagaaaatctagccaaagccaatccccagtacacagtgtatagtcaagccagcaccatgagcattccggttgcaatggagacagatgggcctttatttgaagatgtgcagatgctgagaaagacagtgaaggacgaggctcatcaggcacagaaagatccgaagaaggaccgtcctcttgcacgccgcaagtccgagctgcctcaggacccccacaccaagaaagccttggaagctcactgcagggccgatgagctggcctcccaggacggccgctagcctccggggcgccgcgtcggggccgggcccgccagttcttttccggattctgtagaaaatacatacttcctgtgccataccaatcagttacactcaaagctttcttggaccccgttccgtaggcaataacgtgcgtccgcctcagcgcgagattaggagttcaaacaatggtgacttcccagagcccgctggcagagccgcgggttgacgacggtgtcctcgcagtgtcgccgccaccccagcgtagtccaagtcagactatttcacaaagtcagagcgataggaaagcaccctgcccttcatcttcatgttctcccaaatggaacttaggatcttttaacataggtggttctgtgataacatcagtgttttccaaatcaaaggaacgctttaaaaaataggacctattttttaagactttacagcctttgaaatggtttccacgtgattgttacgccagcagttctcgttttgtttgtttttcaatctcagtgaaatggctctttgctttcgagttctcacgcaacgtactgggcaaatgacaatcctcagccgctggtattttctaaggggtctcttcactttgatgagtgacatgaacaccgtgtctccttctcttgtgtgtacctaaagccatatttccaagtctgtggtactccaggattccaggagtaagcctgtagaagagatttattttaaaagagattgctctgaaatttatcttaaaagagcttgctctgtctaccttgacagaaattggagttttaaaattatgtgttaatatttttatttgcagatttcgtttccgtcaacttaaacattgttgcccttcaacaaggctcttgaattaataaaattatagtctctaagaattccacattttatggaaagttagagcaaaatcattttgagttaagccagttcttagcctaatgcaaactgcagcgcctttaagcataaagtaacacaacagcattgcacggggccggcactgccgctgccttcactgaaggctgcagtgctgttctgagagcttggaggaggcaccagcgaggatgacgtttagtggagctctttctgttgaaaagagctcacgttatcaacaccttgtaaggaaaatacagtgtctgagttttcatcggtcttcacatgctgctatatattccacagagttccttgcatgtactgagcttttgttttagatggaatagcacaaggagaaaaatctttaaacttagtgctttgtctattctttatttctctcagggtggccagtattttgacttatttatcctgcttgaaagctacttgagatgtgtactgctattctaaacacgtgatctagtttctttcatctctggcataagattatataacttaatgttaagtgtcttgaggcataaaagacaaaatgtggcttattttaggatctgttttttcatcgaggtctcgggtatcctttcaaagatagtgagaagcagacactgctccttgtgcagctctggtacctcctgcccactgctgtcacttcaagccactggcaatgcttctgtcctcgtgtcttggaggaaaatcacctggggggaggggacttcttgtggtaagagcaagtgcaggtatgaaatgcgaagattgccccagctaaaagtggacaagtccgctttgtgagatgaatacttcctgagaaacttgacaagtatctctccattttaccattatgaaaactatcattaaaaaaaacagtttagatgccttctccttttgagggaaaaagggtgctttttattgtataaagcagcgtcttatgtattttgatataccattgtttgaacttccgtctttagctgatagattctcaaatatccttgattttggatgttcagtatgtttgtgagagaggtttctgggaagactctctttttgccctcgggaaaaagcaaaatatcaatgtttgggtgactgtgtaaagctcagtgtgtaagaacatctttttgtctaggttttctttctgctctttattgaagacaaacactcaccaaaaagaaaaataaaagttttcagagaaactaattttctttggcaagagtattacttaatattttggcctcctaaagtttccctagttagtactcggactcctgtgctaattgtcagcttacatatcattgtatagagactgtttattctgtaccaaactgatttcaaaagtactacattgaaaataaaccggtgactgtttttcttcataaagttctgcgtttggcatcttcactctttccaaaatgtatctgtacatcagaaatgtcactattccaagtgtctttttagtgtggctttagtatggcttccttttaatattgtacatacattgtatctttgttttatggtaataagtaataaaaatgtagacttcatattttgtacaaaatgtcctatgtacagaataaaaaagttcatagaaacagcaaatataggtaagtggcacaattatttttctttagaaaatatctgtaactttatgcattagtgaaatgttaagtaccgacatattttttaacattttgtaattcaaaactttttgttttgacattgtttatgaagagaaacttcatacacttgccatttaatatgctcttttatctaattttcaaaaactctaaaaaacggtgtatcatatggactaaataaagaacatgtgaattttattgctcatcatg

SEQ ID NO: 24528 - DNA, 3845 bp, Homo sapiens
  source 1..3845: mol_type = unassigned DNA
agcttcatgcctgctgacatcacgaaccagccagttccctccagctgcagagagcttcagtttgtctttttttttttaaactaaaatggaggctggtttcttgccttaaggagcccattgcctttcccgctgaagtctagatgttgacatgtaataaagcgggcagcaggatggtggtggatgcggccaactccaatgggcctttccagcccgtggtccttctccatattcgagatgttcctcctgctgatcaagagaagctttttatccagaagttacgtcagtgttgcgtcctctttgactttgtttctgatccactaagtgacctaaagtggaaggaagtaaaacgagctgctttaagtgaaatggtagaatatatcacccataatcggaatgtgatcacagagcctatttacccagaagtagtccatatgtttgcagttaacatgtttcgaacattaccaccttcctccaatcctacgggagcggaatttgacccggaggaagatgaaccaacgttagaagcagcctggcctcatctacagcttgtttatgaatttttcttaagatttttagagtctccagatttccaacctaatatagcgaagaaatatattgatcagaagtttgtattgcagcttttagagctctttgacagtgaagatcctcgggagagagattttcttaaaaccacccttcacagaatctatgggaaattcctaggcttgagagcttacatcagaaaacagataaataatatattttataggtttatttatgaaacagagcatcataatggcatagcagagttactggaaatattgggaagtataattaatggatttgccttaccactaaaagaagagcacaagattttcttattgaaggtgttactacctttgcacaaagtgaaatctctgagtgtctaccatccccagctggcatactgtgtagtgcagtttttagaaaaggacagcaccctcacggaaccagtggtgatggcacttctcaaatactggccaaagactcacagtccaaaagaagtaatgttcttaaacgaattagaagagattttagatgtcattgaaccatcagaatttgtgaagatcatggaacccctcttccggcagttggccaaatgtgtctccagcccacacttccaggtggcagagcgagctctctattactggaataatgaatacatcatgagtttaatcagtgacaacgcagcgaagattctgcccatcatgtttccttccttgtaccgcaactcaaagacccattggaacaagacaatacatggcttgatatacaacgccctgaagctcttcatggagatgaaccaaaagctatttgatgactgtacacaacagttcaaagcagagaaactaaaagagaagctaaaaatgaaagaacgggaagaagcatgggttaaaatagaaaatctagccaaagccaatccccaggcacagaaagatccgaagaaggaccgtcctcttgcacgccgcaagtccgagctgcctcaggacccccacaccaagaaagccttggaagctcactgcagggccgatgagctggcctcccaggacggccgctagcctccggggcgccgcgtcggggccgggcccgccagttcttttccggattctgtagaaaatacatacttcctgtgccataccaatcagttacactcaaagctttcttggaccccgttccgtaggcaataacgtgcgtccgcctcagcgcgagattaggagttcaaacaatggtgacttcccagagcccgctggcagagccgcgggttgacgacggtgtcctcgcagtgtcgccgccaccccagcgtagtccaagtcagactatttcacaaagtcagagcgataggaaagcaccctgcccttcatcttcatgttctcccaaatggaacttaggatcttttaacataggtggttctgtgataacatcagtgttttccaaatcaaaggaacgctttaaaaaataggacctattttttaagactttacagcctttgaaatggtttccacgtgattgttacgccagcagttctcgttttgtttgtttttcaatctcagtgaaatggctctttgctttcgagttctcacgcaacgtactgggcaaatgacaatcctcagccgctggtattttctaaggggtctcttcactttgatgagtgacatgaacaccgtgtctccttctcttgtgtgtacctaaagccatatttccaagtctgtggtactccaggattccaggagtaagcctgtagaagagatttattttaaaagagattgctctgaaatttatcttaaaagagcttgctctgtctaccttgacagaaattggagttttaaaattatgtgttaatatttttatttgcagatttcgtttccgtcaacttaaacattgttgcccttcaacaaggctcttgaattaataaaattatagtctctaagaattccacattttatggaaagttagagcaaaatcattttgagttaagccagttcttagcctaatgcaaactgcagcgcctttaagcataaagtaacacaacagcattgcacggggccggcactgccgctgccttcactgaaggctgcagtgctgttctgagagcttggaggaggcaccagcgaggatgacgtttagtggagctctttctgttgaaaagagctcacgttatcaacaccttgtaaggaaaatacagtgtctgagttttcatcggtcttcacatgctgctatatattccacagagttccttgcatgtactgagcttttgttttagatggaatagcacaaggagaaaaatctttaaacttagtgctttgtctattctttatttctctcagggtggccagtattttgacttatttatcctgcttgaaagctacttgagatgtgtactgctattctaaacacgtgatctagtttctttcatctctggcataagattatataacttaatgttaagtgtcttgaggcataaaagacaaaatgtggcttattttaggatctgttttttcatcgaggtctcgggtatcctttcaaagatagtgagaagcagacactgctccttgtgcagctctggtacctcctgcccactgctgtcacttcaagccactggcaatgcttctgtcctcgtgtcttggaggaaaatcacctggggggaggggacttcttgtggtaagagcaagtgcaggtatgaaatgcgaagattgccccagctaaaagtggacaagtccgctttgtgagatgaatacttcctgagaaacttgacaagtatctctccattttaccattatgaaaactatcattaaaaaaaacagtttagatgccttctccttttgagggaaaaagggtgctttttattgtataaagcagcgtcttatgtattttgatataccattgtttgaacttccgtctttagctgatagattctcaaatatccttgattttggatgttcagtatgtttgtgagagaggtttctgggaagactctctttttgccctcgggaaaaagcaaaatatcaatgtttgggtgactgtgtaaagctcagtgtgtaagaacatctttttgtctaggttttctttctgctctttattgaagacaaacactcaccaaaaagaaaaataaaagttttcagagaaactaattttctttggcaagagtattacttaatattttggcctcctaaagtttccctagttagtactcggactcctgtgctaattgtcagcttacatatcattgtatagagactgtttattctgtaccaaactgatttcaaaagtactacattgaaaataaaccggtgactgtttttcttcat

SEQ ID NO: 24529 - DNA, 4481 bp, Homo sapiens
  source 1..4481: mol_type = unassigned DNA
gcggccgcgggggcgcgacggccggggcgggggcgctgctgctgcgggggcaggcggcggcaggggcggcggcggcggcggcggcccgctccagccatgccgaataaaaacaagaaggagaaagaatcaccaaaagcagggaagagtggaaaaagttcaaaagaaggacaagacacagtagaatcagagggaacaagtcctgaagaaccctcaagccctaaagtaccacctccacttcttcctgagttgctggttcttatttttggtgggcttcaaggaagagatgttcctcctgctgatcaagagaagctttttatccagaagttacgtcagtgttgcgtcctctttgactttgtttctgatccactaagtgacctaaagtggaaggaagtaaaacgagctgctttaagtgaaatggtagaatatatcacccataatcggaatgtgatcacagagcctatttacccagaagtagtccatatgtttgcagttaacatgtttcgaacattaccaccttcctccaatcctacgggagcggaatttgacccggaggaagatgaaccaacgttagaagcagcctggcctcatctacagcttgtttatgaatttttcttaagatttttagagtctccagatttccaacctaatatagcgaagaaatatattgatcagaagtttgtattgcagcttttagagctctttgacagtgaagatcctcgggagagagattttcttaaaaccacccttcacagaatctatgggaaattcctaggcttgagagcttacatcagaaaacagataaataatatattttataggtttatttatgaaacagagcatcataatggcatagcagagttactggaaatattgggaagtataattaatggatttgccttaccactaaaagaagagcacaagattttcttattgaaggtgttactacctttgcacaaagtgaaatctctgagtgtctaccatccccagctggcatactgtgtagtgcagtttttagaaaaggacagcaccctcacggaaccagtggtgatggcacttctcaaatactggccaaagactcacagtccaaaagaagtaatgttcttaaacgaattagaagagattttagatgtcattgaaccatcagaatttgtgaagatcatggaacccctcttccggcagttggccaaatgtgtctccagcccacacttccaggtggcagagcgagctctctattactggaataatgaatacatcatgagtttaatcagtgacaacgcagcgaagattctgcccatcatgtttccttccttgtaccgcaactcaaagacccattggaacaagacaatacatggcttgatatacaacgccctgaagctcttcatggagatgaaccaaaagctatttgatgactgtacacaacagttcaaagcagagaaactaaaagagaagctaaaaatgaaagaacgggaagaagcatgggttaaaatagaaaatctagccaaagccaatccccagtacacagtgtatagtcaagccagcaccatgagcattccggttgcaatggagacagatgggcctttatttgaagatgtgcagatgctgagaaagacagtgaaggacgaggctcatcaggcacagaaagatccgaagaaggaccgtcctcttgcacgccgcaagtccgagctgcctcaggacccccacaccaagaaagccttggaagctcactgcagggccgatgagctggcctcccaggacggccgctagcctccggggcgccgcgtcggggccgggcccgccagttcttttccggattctgtagaaaatacatacttcctgtgccataccaatcagttacactcaaagctttcttggaccccgttccgtaggcaataacgtgcgtccgcctcagcgcgagattaggagttcaaacaatggtgacttcccagagcccgctggcagagccgcgggttgacgacggtgtcctcgcagtgtcgccgccaccccagcgtagtccaagtcagactatttcacaaagtcagagcgataggaaagcaccctgcccttcatcttcatgttctcccaaatggaacttaggatcttttaacataggtggttctgtgataacatcagtgttttccaaatcaaaggaacgctttaaaaaataggacctattttttaagactttacagcctttgaaatggtttccacgtgattgttacgccagcagttctcgttttgtttgtttttcaatctcagtgaaatggctctttgctttcgagttctcacgcaacgtactgggcaaatgacaatcctcagccgctggtattttctaaggggtctcttcactttgatgagtgacatgaacaccgtgtctccttctcttgtgtgtacctaaagccatatttccaagtctgtggtactccaggattccaggagtaagcctgtagaagagatttattttaaaagagattgctctgaaatttatcttaaaagagcttgctctgtctaccttgacagaaattggagttttaaaattatgtgttaatatttttatttgcagatttcgtttccgtcaacttaaacattgttgcccttcaacaaggctcttgaattaataaaattatagtctctaagaattccacattttatggaaagttagagcaaaatcattttgagttaagccagttcttagcctaatgcaaactgcagcgcctttaagcataaagtaacacaacagcattgcacggggccggcactgccgctgccttcactgaaggctgcagtgctgttctgagagcttggaggaggcaccagcgaggatgacgtttagtggagctctttctgttgaaaagagctcacgttatcaacaccttgtaaggaaaatacagtgtctgagttttcatcggtcttcacatgctgctatatattccacagagttccttgcatgtactgagcttttgttttagatggaatagcacaaggagaaaaatctttaaacttagtgctttgtctattctttatttctctcagggtggccagtattttgacttatttatcctgcttgaaagctacttgagatgtgtactgctattctaaacacgtgatctagtttctttcatctctggcataagattatataacttaatgttaagtgtcttgaggcataaaagacaaaatgtggcttattttaggatctgttttttcatcgaggtctcgggtatcctttcaaagatagtgagaagcagacactgctccttgtgcagctctggtacctcctgcccactgctgtcacttcaagccactggcaatgcttctgtcctcgtgtcttggaggaaaatcacctggggggaggggacttcttgtggtaagagcaagtgcaggtatgaaatgcgaagattgccccagctaaaagtggacaagtccgctttgtgagatgaatacttcctgagaaacttgacaagtatctctccattttaccattatgaaaactatcattaaaaaaaacagtttagatgccttctccttttgagggaaaaagggtgctttttattgtataaagcagcgtcttatgtattttgatataccattgtttgaacttccgtctttagctgatagattctcaaatatccttgattttggatgttcagtatgtttgtgagagaggtttctgggaagactctctttttgccctcgggaaaaagcaaaatatcaatgtttgggtgactgtgtaaagctcagtgtgtaagaacatctttttgtctaggttttctttctgctctttattgaagacaaacactcaccaaaaagaaaaataaaagttttcagagaaactaattttctttggcaagagtattacttaatattttggcctcctaaagtttccctagttagtactcggactcctgtgctaattgtcagcttacatatcattgtatagagactgtttattctgtaccaaactgatttcaaaagtactacattgaaaataaaccggtgactgtttttcttcataaagttctgcgtttggcatcttcactctttccaaaatgtatctgtacatcagaaatgtcactattccaagtgtctttttagtgtggctttagtatggcttccttttaatattgtacatacattgtatctttgttttatggtaataagtaataaaaatgtagacttcatattttgtacaaaatgtcctatgtacagaataaaaaagttcatagaaacagcaaatataggtaagtggcacaattatttttctttagaaaatatctgtaactttatgcattagtgaaatgttaagtaccgacatattttttaacattttgtaattcaaaactttttgttttgacattgtttatgaagagaaacttcatacacttgccatttaatatgctcttttatctaattttcaaaaactctaaaaaacggtgtatcatatggactaaataaagaacatgtgaattttattgctcatcatg

SEQ ID NO: 24530 - DNA, 1526 bp, Homo sapiens
  source 1..1526: mol_type = unassigned DNA
ctggtttcttgccttaaggagcccattgcctttcccgctgaagtctagatgttgacatgtaataaagcgggcagcaggatggtggtggatgcggccaactccaatgggcctttccagcccgtggtccttctccatattcgagatgttcctcctgctgatcaagagaagctttttatccagaagttacgtcagtgttgcgtcctctttgactttgtttctgatccactaagtgacctaaagtggaaggaagtaaaacgagctgctttaagtgaaatggtagaatatatcacccataatcggaatgtgatcacagagcctatttacccagaagtagtccatatgtttgcagttaacatgtttcgaacattaccaccttcctccaatcctacgggagcggaatttgacccggaggaagatgaaccaacgttagaagcagcctggcctcatctacagcttgtttatgaatttttcttaagatttttagagtctccagatttccaacctaatatagcgaagaaatatattgatcagaagtttgtattgcagcttttagagctctttgacagtgaagatcctcgggagagagattttcttaaaaccacccttcacagaatctatgggaaattcctaggcttgagagcttacatcagaaaacagataaataatatattttataggtttatttatgaaacagagcatcataatggcatagcagagttactggaaatattgggaagtataattaatggatttgccttaccactaaaagaagagcacaagattttcttattgaaggtgttactacctttgcacaaagtgaaatctctgagtgtctaccatccccagctggcatactgtgtagtgcagtttttagaaaaggacagcaccctcacggaaccagtggtgatggcacttctcaaatactggccaaagactcacagtccaaaagaagtaatgttcttaaacgaattagaagagattttagatgtcattgaaccatcagaatttgtgaagatcatggaacccctcttccggcagttggccaaatgtgtctccagcccacacttccaggtggcagagcgagctctctattactggaataatgaatacatcatgagtttaatcagtgacaacgcagcgaagattctgcccatcatgtttccttccttgtaccgcaactcaaagacccattggaacaagacaatacatggcttgatatacaacgccctgaagctcttcatggagatgaaccaaaagctatttgatgactgtacacaacagttcaaagcagagaaactaaaagagaagctaaaaatgaaagaacgggaagaagcatgggttaaaatagaaaatctagccaaagccaatccccaggtactaaaaaagagaataacatgaaaacgcccagggttacttgaatgtttttataagataggaatatatgtcttcaccatggggggggtctcgatttcactaacgttgtatatgaaaatgtctgcaataaaaagtacttttaaactttgtaa

SEQ ID NO: 24531 - DNA, 1307 bp, Homo sapiens
  source 1..1307: mol_type = unassigned DNA
gccttaaggagcccattgcctttcccgctgaagtctagatgttgacatgtaataaagcgggcagcaggatggtggtggatgcggccaactccaatgggcctttccagcccgtggtccttctccatattcgagatgttcctcctgctgatcaagagaagctttttatccagaagttacgtcagtgttgcgtcctctttgactttgtttctgatccactaagtgacctaaagtggaaggaagtaaaacgagctgctttaagtgaaatggtagaatatatcacccataatcggaatgtgatcacagagcctatttacccagaagtagtccatatgtttgcagttaacatgtttcgaacattaccaccttcctccaatcctacgggagcggaatttgacccggaggaagatgaaccaacgttagaagcagcctggcctcatctacagcttgtttatgaatttttcttaagatttttagagtctccagatttccaacctaatatagcgaagaaatatattgatcagaagtttgtattgcagcttttagagctctttgacagtgaagatcctcgggagagagattttcttaaaaccacccttcacagaatctatgggaaattcctaggcttgagagcttacatcagaaaacagataaataatatattttataggtttatttatgaaacagagcatcataatggcatagcagagttactggaaatattgggaagtataattaatggatttgccttaccactaaaagaagagcacaagattttcttattgaaggtgttactacctttgcacaaagtgaaatctctgagtgtctaccatccccagctggcatactgtgtagtgcagtttttagaaaaggacagcaccctcacggaaccagtggtgatggcacttctcaaatactggccaaagactcacagtccaaaagaagtaatgttcttaaacgaattagaagagattttagatgtcattgaaccatcagaatttgtgaagatcatggaacccctcttccggcagttggccaaatgtgtctccagcccacacttccaggtggcagagcgagctctctattactggaataatgaatacatcatgagtttaatcagtgacaacgcagcgaagattctgcccatcatgtttccttccttgtaccgcaactcaaagacccattggaacaagtaagaaagaactggctgccatctttttcagtcattttaaaatatggcacgttttactgctacttcagtaagaataaatatcagaattttaaatatcaattaaaaaacaagaaggtca

SEQ ID NO: 24532 - DNA, 2013 bp, Homo sapiens
  source 1..2013: mol_type = unassigned DNA
aataaaaacaagaaggagaaagaatcaccaaaagcagggaagagtggaaaaagttcaaaagaaggacaagacacagtagaatcagagggaacaagtcctgaagaaccctcaagccctaaagtaccacctccacttcttcctgagttgctggttcttatttttggtgggcttcaaggaagagatgttcctcctgctgatcaagagaagctttttatccagaagttacgtcagtgttgcgtcctctttgactttgtttctgatccactaagtgacctaaagtggaaggaagtaaaacgagctgctttaagtgaaatggtagaatatatcacccataatcggaatgtgatcacagagcctatttacccagaagtagtccatatgtttgcagttaacatgtttcgaacattaccaccttcctccaatcctacgggagcggaatttgacccggaggaagatgaaccaacgttagaagcagcctggcctcatctacagcttgtttatgaatttttcttaagatttttagagtctccagatttccaacctaatatagcgaagaaatatattgatcagaagtttgtattgcagcttttagagctctttgacagtgaagatcctcgggagagagattttcttaaaaccacccttcacagaatctatgggaaattcctaggcttgagagcttacatcagaaaacagataaataatatattttataggtttatttatgaaacagagcatcataatggcatagcagagttactggaaatattgggaagtataattaatggatttgccttaccactaaaagaagagcacaagattttcttattgaaggtgttactacctttgcacaaagtgaaatctctgagtgtctaccatccccagctggcatactgtgtagtgcagtttttagaaaaggacagcaccctcacggaaccagtggtgatggcacttctcaaatactggccaaagactcacagtccaaaagaagtaatgttcttaaacgaattagaagagattttagatgtcattgaaccatcagaatttgtgaagatcatggaacccctcttccggcagttggccaaatgtgtctccagcccacacttccaggtggcagagcgagctctctattactggaataatgaatacatcatgagtttaatcagtgacaacgcagcgaagattctgcccatcatgtttccttccttgtaccgcaactcaaagacccattggaacaagacaatacatggcttgatatacaacgccctgaagctcttcatggagatgaaccaaaagctatttgatgactgtacacaacagttcaaagcagagaaactaaaagagaagctaaaaatgaaagaacgggaagaagcatgggttaaaatagaaaatctagccaaagccaatccccagtacacagtgtatagtcaagccagcaccatgagcattccggttgcaatggagacagatgggcctttatttgaagatgtgcagatgctgagaaagacagtgaaggacgaggctcatcaggcacagaaagatccgaagaaggaccgtcctcttgcacgccgcaagtccgagctgcctcaggacccccacaccaagaaagccttggaagctcactgcagggccgatgagctggcctcccaggacggccgctagcctccggggcgccgcgtcggggccgggcccgccagttcttttccggattctgtagaaaatacatacttcctgtgccataccaatcagttacactcaaagctttcttggaccccgttccgtaggcaataacgtgcgtccgcctcagcgcgagattaggagttcaaacaatggtgacttcccagagcccgctggcagagccgcgggttgacgacggtgtcctcgcagtgtcgccgccaccccagcgtagtccaagtcagactatttcacaaagtcagagcgataggaaagcaccctgcccttcatcttcatgttctcccaaatggaacttaggatcttttaacataggtggtt

SEQ ID NO: 24533 - DNA, 2824 bp, Homo sapiens
  source 1..2824: mol_type = unassigned DNA
ccgcactgacatggccgtcgcccggttccgcgcgtccgccgcgcgccggccgttaataggcttgctccctgagcgccccgcaccgacatggcggccgtcttcgctgtggtgactttaactctcggttttcggttatagccggccggcgctcacttgtcttcaggaagctcggagcctttggtggagccggggagaggaagggtgggtgcaagagtgaaaggcgagaggggactgcaagcatccgggtcggctcctggccggagcaagatggctgagggcgagcggcagccgccgccagattcttcagaggaggcccctccagccactcagaacttcatcattccaaaaaaggagatccacacagttccagacatgggcaaatggaagcgttctcaggcatacgctgactacatcggattcatccttaccctcaacgaaggtgtgaaggggaagaagctgaccttcgagtacagagtctccgagatgtggaatgaggttcatgaggaaaaggagcaggctgcaaagcagagtgtgtcctgcgatgaatgcataccattaccccgcgccgggcactgtgcaccttcggaggccattgagaaactagtcgctcttctcaacacgctggacaggtggattgatgagactcctccagtggaccagccctctcggtttgggaataaggcatacaggacctggtatgccaaacttgatgaggaagcagaaaacttggtggccacagtggtccctacccatctggcagctgctgtgcctgaggtggctgtttacctaaaggagtcagtggggaactccacgcgcattgactacggcacagggcatgaggcagccttcgctgctttcctctgctgtctctgcaagattggggtgctccgggtggatgaccaaatagctattgtcttcaaggtgttcaatcggtaccttgaggttatgcggaaactccagaaaacatacaggatggagccagccggcagccagggagtgtggggtctggatgacttccagtttctgcccttcatctggggcagttcgcagctgatagaccacccatacctggagcccagacactttgtggatgagaaggccgtgaatgagaaccacaaggactacatgttcctggagtgtatcctgtttattaccgagatgaagactggcccatttgcagagcactccaaccagctgtggaacatcagcgccgtcccttcctggtccaaagtgaaccagggtctcatccgcatgtataaggccgagtgcctggagaagttccctgtgatccagcacttcaagttcgggagcctgctgcccatccatcctgtcacgtcgggctaggaggggccaagccgaagagccacccaggccacagttcctgtgcctgccttccccaccccagcagtggcccctccccatcccctccctctgttcgtcccgtttgatgagaggctgtttactggggtggggtggcgagatgggcttgagggggctcagagcataaggcttcagggcccaagttgggagaagtgaccaaagtgtagccagttttctgagttcccgtgtgctagactggccagaagagagggtctggggcctggtcactcggccactctctcctgtttctggcctcttctcccttcactcccgtccagtctggttttgagagcaggggctgttctgcagcaccgcagggaagggaggagagatacctgctgcttccattgcttttcccttcctggagtcgatgcctttctaagggttggagctgctccttgcaggggcgggtcagtttcccaggccatgccggggtggccatctatggtagggctggaagctgaggctggccgccagctgtgggctggggtggggtgggtggggtcgggtggtggagaggccttagctgtcctggctggtgcccctcccaggctccttttcaccctgccccctgggcctgaggccccctgtgtccaagcctccccctggctcttcagttctctagcccttggctctgctgggtttcctgactgtagccacatctctcccgctccctaagggtaacctagccaatggaagctgccctttgggtaggtgctgggctcctgggagggcccagatgatggggtgaggcatgtctttccagaactttccctggcagggaggggatggcagaaactcagggaggggcttggggcccattgtatctggagagcctggattcctcttggcagtcttaggcccggccacttctgctacctttgcgctgctgtgagcctcaccctgggcccctgggccctgcttctctgctcccctgggtgatgggtgggcccagaaggtggcagtcccacaccttgtcctcccacctccctgaactgtccattgcttttatagggtgaggtaagagacagcctcccaagcccaggctttggcactcagaatgggcccagtgggggctgggcaggcccattgagggccaccgccgaggtttctcctagggctgttcctgggcctggctcttacaggctcgtcccccaggcctgcccttctccactgccccctcctgtgtctgggtccacacacccttcaggaagggggagcactgagaagcacagcacaggggctcagcctgggatccggtgatggtctgggcagaggctgggtcaggagtcccaaaggtcagtgacagtttctcagaagaggcccagcgtccacctctctcccagggccagacagcccttcctggctcccccatccccctatgggctcccagccccttgcaccctcattgctgttcagattaaagcctctgttttgcacctgt

SEQ ID NO: 24534 - DNA, 2737 bp, Homo sapiens
  source 1..2737: mol_type = unassigned DNA
gcactgacatggccgtcgcccggttccgcgcgtccgccgcgcgccggccgttaataggcttgctccctgagcgccccgcaccgacatggcggccgtcttcgctgtggtgactttaactctcggttttcggttatagccggccggcgctcacttgtcttcaggaagctcggagcctttggtggagccggggagaggaagggtgggtgcaagagtgaaaggcgagaggggactgcaagcatccgggtcggctcctggccggagcaagatggctgagggcgagcggcagccgccgccagattcttcagaggaggcccctccagccactcagaacttcatcattccaaaaaaggagatccacacagttccagacatgggcaaatggaagcgttctcaggtaccatttggaactgtggcatacgctgactacatcggattcatccttaccctcaacgaaggtgtgaaggggaagaagctgaccttcgagtacagagtctccgaggccattgagaaactagtcgctcttctcaacacgctggacaggtggattgatgagactcctccagtggaccagccctctcggtttgggaataaggcatacaggacctggtatgccaaacttgatgaggaagcagaaaacttggtggccacagtggtccctacccatctggcagctgctgtgcctgaggtggctgtttacctaaaggagtcagtggggaactccacgcgcattgactacggcacagggcatgaggcagccttcgctgctttcctctgctgtctctgcaagattggggtgctccgggtggatgaccaaatagctattgtcttcaaggtgttcaatcggtaccttgaggttatgcggaaactccagaaaacatacaggatggagccagccggcagccagggagtgtggggtctggatgacttccagtttctgcccttcatctggggcagttcgcagctgatagaccacccatacctggagcccagacactttgtggatgagaaggccgtgaatgagaaccacaaggactacatgttcctggagtgtatcctgtttattaccgagatgaagactggcccatttgcagagcactccaaccagctgtggaacatcagcgccgtcccttcctggtccaaagtgaaccagggtctcatccgcatgtataaggccgagtgcctggagaagttccctgtgatccagcacttcaagttcgggagcctgctgcccatccatcctgtcacgtcgggctaggaggggccaagccgaagagccacccaggccacagttcctgtgcctgccttccccaccccagcagtggcccctccccatcccctccctctgttcgtcccgtttgatgagaggctgtttactggggtggggtggcgagatgggcttgagggggctcagagcataaggcttcagggcccaagttgggagaagtgaccaaagtgtagccagttttctgagttcccgtgtgctagactggccagaagagagggtctggggcctggtcactcggccactctctcctgtttctggcctcttctcccttcactcccgtccagtctggttttgagagcaggggctgttctgcagcaccgcagggaagggaggagagatacctgctgcttccattgcttttcccttcctggagtcgatgcctttctaagggttggagctgctccttgcaggggcgggtcagtttcccaggccatgccggggtggccatctatggtagggctggaagctgaggctggccgccagctgtgggctggggtggggtgggtggggtcgggtggtggagaggccttagctgtcctggctggtgcccctcccaggctccttttcaccctgccccctgggcctgaggccccctgtgtccaagcctccccctggctcttcagttctctagcccttggctctgctgggtttcctgactgtagccacatctctcccgctccctaagggtaacctagccaatggaagctgccctttgggtaggtgctgggctcctgggagggcccagatgatggggtgaggcatgtctttccagaactttccctggcagggaggggatggcagaaactcagggaggggcttggggcccattgtatctggagagcctggattcctcttggcagtcttaggcccggccacttctgctacctttgcgctgctgtgagcctcaccctgggcccctgggccctgcttctctgctcccctgggtgatgggtgggcccagaaggtggcagtcccacaccttgtcctcccacctccctgaactgtccattgcttttatagggtgaggtaagagacagcctcccaagcccaggctttggcactcagaatgggcccagtgggggctgggcaggcccattgagggccaccgccgaggtttctcctagggctgttcctgggcctggctcttacaggctcgtcccccaggcctgcccttctccactgccccctcctgtgtctgggtccacacacccttcaggaagggggagcactgagaagcacagcacaggggctcagcctgggatccggtgatggtctgggcagaggctgggtcaggagtcccaaaggtcagtgacagtttctcagaagaggcccagcgtccacctctctcccagggccagacagcccttcctggctcccccatccccctatgggctcccagccccttgcaccctcattgctgttcagattaaagcctctgttttgcacctgtca

SEQ ID NO: 24535 - DNA, 2515 bp, Homo sapiens
  source 1..2515: mol_type = unassigned DNA
caccgacatggcggccgtcttcgctgtggtgactttaactctcggttttcggttatagccggccggcgctcacttgtcttcaggaagctcggagcctttggtggagccggggagaggaagggtgggtgcaagagtgaaaggcgagaggggactgcaagcatccgggtcggctcctggccggagcaagatggctgagggcgagcggcagccgccgccagattcttcagaggaggcccctccagccactcagaacttcatcattccaaaaaaggagatccacacagttccagacatgggcaaatggaagcgttctcaggcatacgctgactacatcggattcatccttaccctcaacgaaggtgtgaaggggaagaagctgaccttcgagtacagagtctccgaggaagcagaaaacttggtggccacagtggtccctacccatctggcagctgctgtgcctgaggtggctgtttacctaaaggagtcagtggggaactccacgcgcattgactacggcacagggcatgaggcagccttcgctgctttcctctgctgtctctgcaagattggggtgctccgggtggatgaccaaatagctattgtcttcaaggtgttcaatcggtaccttgaggttatgcggaaactccagaaaacatacaggatggagccagccggcagccagggagtgtggggtctggatgacttccagtttctgcccttcatctggggcagttcgcagctgatagaccacccatacctggagcccagacactttgtggatgagaaggccgtgaatgagaaccacaaggactacatgttcctggagtgtatcctgtttattaccgagatgaagactggcccatttgcagagcactccaaccagctgtggaacatcagcgccgtcccttcctggtccaaagtgaaccagggtctcatccgcatgtataaggccgagtgcctggagaagttccctgtgatccagcacttcaagttcgggagcctgctgcccatccatcctgtcacgtcgggctaggaggggccaagccgaagagccacccaggccacagttcctgtgcctgccttccccaccccagcagtggcccctccccatcccctccctctgttcgtcccgtttgatgagaggctgtttactggggtggggtggcgagatgggcttgagggggctcagagcataaggcttcagggcccaagttgggagaagtgaccaaagtgtagccagttttctgagttcccgtgtgctagactggccagaagagagggtctggggcctggtcactcggccactctctcctgtttctggcctcttctcccttcactcccgtccagtctggttttgagagcaggggctgttctgcagcaccgcagggaagggaggagagatacctgctgcttccattgcttttcccttcctggagtcgatgcctttctaagggttggagctgctccttgcaggggcgggtcagtttcccaggccatgccggggtggccatctatggtagggctggaagctgaggctggccgccagctgtgggctggggtggggtgggtggggtcgggtggtggagaggccttagctgtcctggctggtgcccctcccaggctccttttcaccctgccccctgggcctgaggccccctgtgtccaagcctccccctggctcttcagttctctagcccttggctctgctgggtttcctgactgtagccacatctctcccgctccctaagggtaacctagccaatggaagctgccctttgggtaggtgctgggctcctgggagggcccagatgatggggtgaggcatgtctttccagaactttccctggcagggaggggatggcagaaactcagggaggggcttggggcccattgtatctggagagcctggattcctcttggcagtcttaggcccggccacttctgctacctttgcgctgctgtgagcctcaccctgggcccctgggccctgcttctctgctcccctgggtgatgggtgggcccagaaggtggcagtcccacaccttgtcctcccacctccctgaactgtccattgcttttatagggtgaggtaagagacagcctcccaagcccaggctttggcactcagaatgggcccagtgggggctgggcaggcccattgagggccaccgccgaggtttctcctagggctgttcctgggcctggctcttacaggctcgtcccccaggcctgcccttctccactgccccctcctgtgtctgggtccacacacccttcaggaagggggagcactgagaagcacagcacaggggctcagcctgggatccggtgatggtctgggcagaggctgggtcaggagtcccaaaggtcagtgacagtttctcagaagaggcccagcgtccacctctctcccagggccagacagcccttcctggctcccccatccccctatgggctcccagccccttgcaccctcattgctgttcagattaaagcctctgttttgcacctgtca

SEQ ID NO: 24536 - DNA, 2558 bp, Homo sapiens
  source 1..2558: mol_type = unassigned DNA
ccccgcaccgacatggcggccgtcttcgctgtggtgactttaactctcggttttcggttatagccggccggcgctcacttgtcttcaggaagctcggagcctttggtggagccggggagaggaagggtgggtgcaagagtgaaaggcgagaggggactgcaagcatccgggtcggctcctggccggagcaagatggctgagggcgagcggcagccgccgccagattcttcagaggaggcccctccagccactcagaacttcatcattccaaaaaaggagatccacacagttccagacatgggcaaatggaagcgttctcaggccattgagaaactagtcgctcttctcaacacgctggacaggtggattgatgagactcctccagtggaccagccctctcggtttgggaataaggcatacaggacctggtatgccaaacttgatgaggaagcagaaaacttggtggccacagtggtccctacccatctggcagctgctgtgcctgaggtggctgtttacctaaaggagtcagtggggaactccacgcgcattgactacggcacagggcatgaggcagccttcgctgctttcctctgctgtctctgcaagattggggtgctccgggtggatgaccaaatagctattgtcttcaaggtgttcaatcggtaccttgaggttatgcggaaactccagaaaacatacaggatggagccagccggcagccagggagtgtggggtctggatgacttccagtttctgcccttcatctggggcagttcgcagctgatagaccacccatacctggagcccagacactttgtggatgagaaggccgtgaatgagaaccacaaggactacatgttcctggagtgtatcctgtttattaccgagatgaagactggcccatttgcagagcactccaaccagctgtggaacatcagcgccgtcccttcctggtccaaagtgaaccagggtctcatccgcatgtataaggccgagtgcctggagaagttccctgtgatccagcacttcaagttcgggagcctgctgcccatccatcctgtcacgtcgggctaggaggggccaagccgaagagccacccaggccacagttcctgtgcctgccttccccaccccagcagtggcccctccccatcccctccctctgttcgtcccgtttgatgagaggctgtttactggggtggggtggcgagatgggcttgagggggctcagagcataaggcttcagggcccaagttgggagaagtgaccaaagtgtagccagttttctgagttcccgtgtgctagactggccagaagagagggtctggggcctggtcactcggccactctctcctgtttctggcctcttctcccttcactcccgtccagtctggttttgagagcaggggctgttctgcagcaccgcagggaagggaggagagatacctgctgcttccattgcttttcccttcctggagtcgatgcctttctaagggttggagctgctccttgcaggggcgggtcagtttcccaggccatgccggggtggccatctatggtagggctggaagctgaggctggccgccagctgtgggctggggtggggtgggtggggtcgggtggtggagaggccttagctgtcctggctggtgcccctcccaggctccttttcaccctgccccctgggcctgaggccccctgtgtccaagcctccccctggctcttcagttctctagcccttggctctgctgggtttcctgactgtagccacatctctcccgctccctaagggtaacctagccaatggaagctgccctttgggtaggtgctgggctcctgggagggcccagatgatggggtgaggcatgtctttccagaactttccctggcagggaggggatggcagaaactcagggaggggcttggggcccattgtatctggagagcctggattcctcttggcagtcttaggcccggccacttctgctacctttgcgctgctgtgagcctcaccctgggcccctgggccctgcttctctgctcccctgggtgatgggtgggcccagaaggtggcagtcccacaccttgtcctcccacctccctgaactgtccattgcttttatagggtgaggtaagagacagcctcccaagcccaggctttggcactcagaatgggcccagtgggggctgggcaggcccattgagggccaccgccgaggtttctcctagggctgttcctgggcctggctcttacaggctcgtcccccaggcctgcccttctccactgccccctcctgtgtctgggtccacacacccttcaggaagggggagcactgagaagcacagcacaggggctcagcctgggatccggtgatggtctgggcagaggctgggtcaggagtcccaaaggtcagtgacagtttctcagaagaggcccagcgtccacctctctcccagggccagacagcccttcctggctcccccatccccctatgggctcccagccccttgcaccctcattgctgttcagattaaagcctctgttttgcacctgtc

SEQ ID NO: 24537 - DNA, 2664 bp, Homo sapiens
  source 1..2664: mol_type = unassigned DNA
attgagacctgtggaggaggaaggaggaggtcaccgtccagctgtctctcccctgtccccacatgtcttctaagctgttggagccggccggcgctcacttgtcttcaggaagctcggagcctttggtggagccggggagaggaagggtgggtgcaagagtgaaaggcgagaggggactgcaagcatccgggtcggctcctggccggagcaagatggctgagggcgagcggcagccgccgccagattcttcagaggaggcccctccagccactcagaacttcatcattccaaaaaaggagatccacacagttccagacatgggcaaatggaagcgttctcaggcatacgctgactacatcggattcatccttaccctcaacgaaggtgtgaaggggaagaagctgaccttcgagtacagagtctccgaggccattgagaaactagtcgctcttctcaacacgctggacaggtggattgatgagactcctccagtggaccagccctctcggtttgggaataaggcatacaggacctggtatgccaaacttgatgaggaagcagaaaacttggtggccacagtggtccctacccatctggcagctgctgtgcctgaggtggctgtttacctaaaggagtcagtggggaactccacgcgcattgactacggcacagggcatgaggcagccttcgctgctttcctctgctgtctctgcaagattggggtgctccgggtggatgaccaaatagctattgtcttcaaggtgttcaatcggtaccttgaggttatgcggaaactccagaaaacatacaggatggagccagccggcagccagggagtgtggggtctggatgacttccagtttctgcccttcatctggggcagttcgcagctgatagaccacccatacctggagcccagacactttgtggatgagaaggccgtgaatgagaaccacaaggactacatgttcctggagtgtatcctgtttattaccgagatgaagactggcccatttgcagagcactccaaccagctgtggaacatcagcgccgtcccttcctggtccaaagtgaaccagggtctcatccgcatgtataaggccgagtgcctggagaagttccctgtgatccagcacttcaagttcgggagcctgctgcccatccatcctgtcacgtcgggctaggaggggccaagccgaagagccacccaggccacagttcctgtgcctgccttccccaccccagcagtggcccctccccatcccctccctctgttcgtcccgtttgatgagaggctgtttactggggtggggtggcgagatgggcttgagggggctcagagcataaggcttcagggcccaagttgggagaagtgaccaaagtgtagccagttttctgagttcccgtgtgctagactggccagaagagagggtctggggcctggtcactcggccactctctcctgtttctggcctcttctcccttcactcccgtccagtctggttttgagagcaggggctgttctgcagcaccgcagggaagggaggagagatacctgctgcttccattgcttttcccttcctggagtcgatgcctttctaagggttggagctgctccttgcaggggcgggtcagtttcccaggccatgccggggtggccatctatggtagggctggaagctgaggctggccgccagctgtgggctggggtggggtgggtggggtcgggtggtggagaggccttagctgtcctggctggtgcccctcccaggctccttttcaccctgccccctgggcctgaggccccctgtgtccaagcctccccctggctcttcagttctctagcccttggctctgctgggtttcctgactgtagccacatctctcccgctccctaagggtaacctagccaatggaagctgccctttgggtaggtgctgggctcctgggagggcccagatgatggggtgaggcatgtctttccagaactttccctggcagggaggggatggcagaaactcagggaggggcttggggcccattgtatctggagagcctggattcctcttggcagtcttaggcccggccacttctgctacctttgcgctgctgtgagcctcaccctgggcccctgggccctgcttctctgctcccctgggtgatgggtgggcccagaaggtggcagtcccacaccttgtcctcccacctccctgaactgtccattgcttttatagggtgaggtaagagacagcctcccaagcccaggctttggcactcagaatgggcccagtgggggctgggcaggcccattgagggccaccgccgaggtttctcctagggctgttcctgggcctggctcttacaggctcgtcccccaggcctgcccttctccactgccccctcctgtgtctgggtccacacacccttcaggaagggggagcactgagaagcacagcacaggggctcagcctgggatccggtgatggtctgggcagaggctgggtcaggagtcccaaaggtcagtgacagtttctcagaagaggcccagcgtccacctctctcccagggccagacagcccttcctggctcccccatccccctatgggctcccagccccttgcaccctcattgctgttcagattaaagcctctgttttgcacctgt

SEQ ID NO: 24538 - DNA, 2737 bp, Homo sapiens
  source 1..2737: mol_type = unassigned DNA
atgcgccccgcgcgccccgcactgacatggccgtcgcccggttccgcgcgtccgccgcgcgccggccgttaataggcttgctccctgagcgccccgcaccgacatggcggccgtcttcgctgtggtgactttaactctcggttttcggttatagccggccggcgctcacttgtcttcaggaagctcggagcctttggtggagccggggagaggaagggtgggtgcaagagtgaaaggcgagaggggactgcaagcatccgggtcggctcctggccggagcaagatggctgagggcgagcggcagccgccgccagattcttcagaggaggcccctccagccactcagaacttcatcattccaaaaaaggagatccacacagttccagacatgggcaaatggaagcgttctcaggcatacgctgactacatcggattcatccttaccctcaacgaaggtgtgaaggggaagaagctgaccttcgagtacagagtctccgaggccattgagaaactagtcgctcttctcaacacgctggacaggtggattgatgagactcctccagtggaccagccctctcggtttgggaataaggcatacaggacctggtatgccaaacttgatgaggaagcagaaaacttggtggccacagtggtccctacccatctggcagctgctgtgcctgaggtggctgtttacctaaaggagtcagtggggaactccacgcgcattgactacggcacagggcatgaggcagccttcgctgctttcctctgctgtctctgcaagattggggtgctccgggtggatgaccaaatagctattgtcttcaaggtgttcaatcggtaccttgaggttatgcggaaactccagaaaacatacaggatggagccagccggcagccagggagtgtggggtctggatgacttccagtttctgcccttcatctggggcagttcgcagctgatagaccacccatacctggagcccagacactttgtggatgagaaggccgtgaatgagaaccacaaggactacatgttcctggagtgtatcctgtttattaccgagatgaagactggcccatttgcagagcactccaaccagctgtggaacatcagcgccgtcccttcctggtccaaagtgaaccagggtctcatccgcatgtataaggccgagtgcctggagaagttccctgtgatccagcacttcaagttcgggagcctgctgcccatccatcctgtcacgtcgggctaggaggggccaagccgaagagccacccaggccacagttcctgtgcctgccttccccaccccagcagtggcccctccccatcccctccctctgttcgtcccgtttgatgagaggctgtttactggggtggggtggcgagatgggcttgagggggctcagagcataaggcttcagggcccaagttgggagaagtgaccaaagtgtagccagttttctgagttcccgtgtgctagactggccagaagagagggtctggggcctggtcactcggccactctctcctgtttctggcctcttctcccttcactcccgtccagtctggttttgagagcaggggctgttctgcagcaccgcagggaagggaggagagatacctgctgcttccattgcttttcccttcctggagtcgatgcctttctaagggttggagctgctccttgcaggggcgggtcagtttcccaggccatgccggggtggccatctatggtagggctggaagctgaggctggccgccagctgtgggctggggtggggtgggtggggtcgggtggtggagaggccttagctgtcctggctggtgcccctcccaggctccttttcaccctgccccctgggcctgaggccccctgtgtccaagcctccccctggctcttcagttctctagcccttggctctgctgggtttcctgactgtagccacatctctcccgctccctaagggtaacctagccaatggaagctgccctttgggtaggtgctgggctcctgggagggcccagatgatggggtgaggcatgtctttccagaactttccctggcagggaggggatggcagaaactcagggaggggcttggggcccattgtatctggagagcctggattcctcttggcagtcttaggcccggccacttctgctacctttgcgctgctgtgagcctcaccctgggcccctgggccctgcttctctgctcccctgggtgatgggtgggcccagaaggtggcagtcccacaccttgtcctcccacctccctgaactgtccattgcttttatagggtgaggtaagagacagcctcccaagcccaggctttggcactcagaatgggcccagtgggggctgggcaggcccattgagggccaccgccgaggtttctcctagggctgttcctgggcctggctcttacaggctcgtcccccaggcctgcccttctccactgccccctcctgtgtctgggtccacacacccttcaggaagggggagcactgagaagcacagcacaggggctcagcctgggatccggtgatggtctgggcagaggctgggtcaggagtcccaaaggtcagtgacagtttctcagaagaggcccagcgtccacctctctcccagggccagacagcccttcctggctcccccatccccctatgggctcccagccccttgcaccctcattgctgttcagattaaagcctctgttttgcacctgtca

SEQ ID NO: 24539 - DNA, 967 bp, Homo sapiens
  source 1..967: mol_type = unassigned DNA
gtgtgggaggctcaggagggcgagagtcatgacacggaggaactggaggggcaaaagctgaggggccccgaggagggactgagttgaatggccttaggggagagattcttcagaggaggcccctccagccactcagaacttcatcattccaaaaaaggagatccacacagttccagacatgggcaaatggaagcgttctcaggcatacgctgactacatcggattcatccttaccctcaacgaaggtgtgaaggggaagaagctgaccttcgagtacagagtctccgaggccattgagaaactagtcgctcttctcaacacgctggacaggtggattgatgagactcctccagtggaccagccctctcggtttgggaataaggcatacaggacctggtatgccaaacttgatgaggaagcagaaaacttggtggccacagtggtccctacccatctggcagctgctgtgcctgaggtggctgtttacctaaaggagtcagtggggaactccacgcgcattgactacggcacagggcatgaggcagccttcgctgctttcctctgctgtctctgcaagattggggtgctccgggtggatgaccaaatagctattgtcttcaaggtgttcaatcggtaccttgaggttatgcggaaactccagaaaacatacaggatggagccagccggcagccagggagtgtggggtctggatgacttccagtttctgcccttcatctggggcagttcgcagctgatagaccacccatacctggagcccagacactttgtggatgagaaggccgtgaatgagaaccacaaggactacatgttcctggagtgtatcctgtttattaccgagatgaagactggcccatttgcagagcactccaaccagctgtggaacatcagcgccgtcccttcctggtccaaagtgaaccagggtctcatccgcatgtataaggccgag

SEQ ID NO: 24540 - DNA, 1837 bp, Homo sapiens
  source 1..1837: mol_type = unassigned DNA
aataggcttgctccctgagcgccccgcaccgacatggcggccgtcttcgctgtggtgactttaactctcggttttcggttatagccggccggcgctcacttgtcttcaggaagctcggagcctttggtggagccggggagaggaagggtgggtgcaagagtgaaaggcgagaggggactgcaagcatccgggtcggctcctggccggagcaagatggctgagggcgagcggcagccgccgccagattcttcagaggaggcccctccagccactcagaacttcatcattccaaaaaaggagatccacacagttccagacatgggcaaatggaagcgttctcaggcatacgctgactacatcggattcatccttaccctcaacgaaggtgtgaaggggaagaagctgaccttcgagtacagagtctccgagatgtggaatgaggttcatgaggaaaaggagcaggctgcaaagcagagtgtgtcctgcgatgaatgcataccattaccccgcgccgggcactgtgcaccttcggaggccattgagaaactagtcgctcttctcaacacgctggacaggtggattgatgagactcctccagtggaccagccctctcggtttgggaataaggcatacaggacctggtatgccaaacttgatgaggaagcagaaaacttggtggccacagtggtccctacccatctggcagctgctgtgcctgaggtggctgtttacctaaaggagtcagtggggaactccacgcgcattgactacggcacagggcatgaggcagccttcgctgctttcctctgctgtctctgcaagattggggtgctccgggtggatgaccaaatagctattgtcttcaaggtgttcaatcggtaccttgaggttatgcggaaactccagaaaacatacaggatggagccagccggcagccagggagtgtggggtctggatgacttccagtttctgcccttcatctggggcagttcgcagctgatagaccacccatacctggagcccagacactttgtggatgagaaggccgtgaatgagaaccacaaggactacatgttcctggagtgtatcctgtttattaccgagatgaagactggcccatttgcagagcactccaaccagctgtggaacatcagcgccgtcccttcctggtccaaagtgaaccagggtctcatccgcatgtataaggccgaggccagcccctctgacacttggggcctcggaatctcccatctggggcatgggcagtcagagaagcaccagccaccccagccccgaaaagctgcagtccagctctgtcctgatgagcttggaggctgaggcaaggacctgctgcatggggagtgggggcgatgggggcctcccttctcctttatcaagtggccaaaggctcctcaaagctcgggcagtctgagtctggctctcccatggcatacctgggaagggtcttaccctttggaggcatctccaaagtgctgccttcaaatgttagtgtgtatgatcactgagtggtgggaggtctgagggtaggccgagaattggcatttttatggaccgcttcagggattttgatgcaaatggttttccctgctctcaaatcagatgctgaggagaggagagctgaggcttcctggagctccccctgctggcaggcagccgagggtgtctcctgccctcttggcactgttctcccagccaaggaggtggccttttctctcttccaagtggggaggagacattttatttctactctgtcccttctgctagctcctcccacttcctgggaagactaattctagaactgcttgaccttggccag

SEQ ID NO: 24541 - DNA, 1204 bp, Homo sapiens
  source 1..1204: mol_type = unassigned DNA
tttgggtctaggctcttgggcatggtgttcaacagtagaccctaggaggagtgtgcccaggagccggggtggctgcagcaagggcccatcttgccacgtggccgctggttgcagcacacgttgtgttggttctccagagcgcccaccctcttccacctcggagcagtgagcagcattttgcagtccctagttgatgaagactggcccatttgcagagcactccaaccagctgtggaacatcagcgccgtcccttcctggtccaaagtgaaccagggtctcatccgcatgtataaggccgaggtgagtgggggctggccagtgtgcccgtccctgctgccgcacttggtcctgggctggggacaaagcaaaagatgtggaacctggggctcctgcttcctcctaccccactgttttgctctgaatcttaggccagcccctctgacacttggggcctcggaatctcccatctggggcatgggcagtcagagaagcaccagccaccccagccccgaaaagctgcagtccagctctgtcctgatgagcttggaggctgaggcaaggacctgctgcatggggagtgggggcgatgggggcctcccttctcctttatcaagtggccaaaggctcctcaaagctcgggcagtctgagtctggctctcccatggcatacctgggaagggtcttaccctttggaggcatctccaaagtgctgccttcaaatgttagtgtgtatgatcactgagtggtgggaggtctgagggtaggccgagaattggcatttttatggaccgcttcagggattttgatgcaaatggttttccctgctctcaaatcagatgctgaggagaggagagctgaggcttcctggagctccccctgctggcaggcagccgagggtgtctcctgccctcttggcactgttctcccagccaaggaggtggccttttctctcttccaagtggggaggagacattttatttctactctgtcccttctgctagctcctcccacttcctgggaagactaattctagaactgcttgaccttggccagggaagggctggatgtgaagttccacacctggagtgatgggtccttaaagtcccttctttctgttctcaggctggcccttgtgactagttcatggcctcagacactgtactgtgggcaccatctcttgactcctggccggccttctcttct

SEQ ID NO: 24542 - DNA, 3885 bp, Homo sapiens
  source 1..3885: mol_type = unassigned DNA
gcgcgcgtccaccggctccccggctcgcgccgctccatgtagccccggctccccgggcggccgcggaggagggggcgaccacaagatggcggacctctcgctgcttcaggaggacctgcaggaggacgcagacggatccctggactttgtctcacaagatgaaatgttgacgcccctggggagattggacaagtatgctgcaagtgagaacatatttaacagacaaatggtggcccggagtttgctcgataccttgagggaagtctgcgatgatgaaagagattgtattgctgttttggaaagaattagcagattggccgatgattcagaaccaactgtgagagcggagctgatggaacaggtgcctcacatcgcactgttttgtcaagaaaaccggccttcaataccatatgctttttcaaaattcttactacctattgtggttagataccttgcagatcagaataatcaggtgaggaaaacaagtcaggcagctttgctggctctgttggagcaggagctcattgaacgatttgatgtggagaccaaagtgtgccctgtcctcatagagctgacagccccagatagcaatgatgatgtgaaaacagaagctgtggctataatgtgcaaaatggctcccatggttgggaaggatattacagagcgtcttatcctccctaggttttgtgagatgtgctgcgattgcagaatgtttcacgttcgaaaggtctgtgctgccaattttggagatatttgcagtgtagttggccagcaagctactgaagaaatgttgctgcccagatttttccagctttgttctgataatgtatggggagtccgaaaggcttgtgctgaatgcttcatggcggtttcatgtgcaacatgtcaagaaatccgacggaccaaattatcagcactttttattaatttgatcagtgatccttcacgttgggttcgccaagcagcttttcagtctctgggacctttcatatctacttttgctaatccatctagctcaggccagtattttaaagaagaaagcaaaagttcagaagagatgtcagtagaaaacaaaaataggaccagagatcaagaagccccagaggatgtacaagtcaggccagaggatactccttcagatctcagtgttagtaattccagtgtcatactggaaaacacgatggaagaccatgctgctgaggcatccgggaagcctctaggtgaaattagtgttccactggacagctctttactttgtactttgtcctcagaatctcaccaggaagcagctagtaatgagaatgataaaaaacctggtaactacaaatctatgttacgaccagaggttggcaccacttcacaagattcagctctcttagatcaggaattgtataactccttccatttctggaggactcctcttcctgaaatagatctagacatagagcttgaacagaactctgggggaaaacccagcccagagggaccagaggaagaatctgagggccctgtgcccagttctccaaacatcaccatggccaccagaaaggaactggaagaaatgatagaaaatctagagccccacattgatgatccagatgttaaagcacaagtggaagtgctgtccgctgcactacgtgcttccagcctggatgcacatgaagagaccatcagtatagaaaagagaagtgatttgcaagatgaactggatataaatgagctaccaaattgtaaaataaatcaagaagattctgtgcctttaatcagcgatgctgttgagaatatggactccactcttcactatattcacagcgattcagacttgagcaacaatagcagttttagccctgatgaggaaaggagaactaaagtacaagatgttgtacctcaggcgttgttagatcagtatttatctatgactgacccttctcgtgcacagacggttgacactgaaattgctaagcactgtgcatatagcctccctggtgtggccttgacactcggaagacagaattggcactgcctgagagagacgtatgagactctggcctcagacatgcagtggaaagttcgacgaactctagcattctccatccacgagcttgcagttattcttggagatcaattgacagctgcagatctggttccaatttttaatggatttttaaaagacctcgatgaagtcaggataggtgttcttaaacacttgcatgattttctgaagcttcttcatattgacaaaagaagagaatatctttatcaacttcaggagtttttggtgacagataatagtagaaattggcggtttcgagctgaactggctgaacagctgattttacttctagagttatatagtcccagagatgtttatgactatttacgtcccattgctctgaatctgtgtgcagacaaagtttcttctgttcgttggatttcctacaagttggtcagcgagatggtgaagaagctgcacgcggcaacaccaccaacgttcggagtggacctcatcaatgagcttgtggagaactttggcagatgtcccaagtggtctggtcggcaagcctttgtctttgtctgccagactgtcattgaggatgactgccttcccatggaccagtttgctgtgcatctcatgccgcatctgctaaccttagcaaatgacagggttcctaacgtgcgagtgctgcttgcaaagacattaagacaaactctactagaaaaagactatttcttggcctctgccagctgccaccaggaggctgtggagcagaccatcatggctcttcagatggaccgtgacagcgatgtcaagtattttgcaagcatccaccctgccagtaccaaaatctccgaagatgccatgagcacagcgtcctcaacctactagaaggcttgaatctcggtgtctttcctgcttccatgagagccgaggttcagtgggcattcgccacgcatgtgacctgggatagctttcgggggaggagagaccttcctctcctgcggacttcattgcaggtgcaagttgcctacacccaataccagggatttcaagagtcaagagaaagtacagtaaacactattatcttatcttgactttaaggggaaataatttctcagaggattataattgtcaccgaagccttaaatccttctgtcttcctgactgaatgaaacttgaattggcagagcattttccttatggaagggatgagattcccagagacctgcattgctttctcctggttttatttaacaatcgacaaatgaaattcttacagcctgaaggcagacgtgtgcccagatgtgaaagagaccttcagtatcagccctaactcttctctcccaggaaggacttgctgggctctgtggccagctgtccagcccagccctgtgtgtgaatcgtttgtgacgtgtgcaaatgggaaaggaggggtttttacatctcctaaaggacctgatgccaacacaagtaggattgacttaaactcttaagcgcagcatattgctgtacacatttacagaatggttgctgagtgtctgtgtctgattttttcatgctggtcatgacctgaaggaaatttattagacgtataatgtatgtctggtgtttttaacttgatcatgatcagctctgaggtgcaacttcttcacatactgtacatacctgtgaccactcttgggagtgctgcagtctttaatcatgctgtttaaactgttgtggcacaagttctcttgtccaaataaaatttattaataagatctatagagagagatatatacacttttgattgttttctagatgtctaccaataaatgcaatttgtgacctgtattaatgatttaaagtggggaaactagattaaaatatttgtcttttaactagtt

SEQ ID NO: 24543 - DNA, 1407 bp, Homo sapiens
  source 1..1407: mol_type = unassigned DNA
cggggccggaagtaggagcggcggcggcggcggcggcggcggtcgaaagcggagtgaaagagggaggcagggagccggagagccggaaccggagtcgcagcggcggagacccctgtgcggtgcggagggggcggcggccccgactctgacccgcgccgggggtgggccatggcggagatcagcgacctggaccggcagatcgagcagctgcgtcgctgcgagctcatcaaggagagcgaagtcaaggccctgtgcgctaaggccagagagatcttggtagaggagagcaacgtgcagagggtggactcgccagtcacagtgtgcggcgacatccatggacaattctatgacctcaaagagctgttcagagtaggtggcgacgtccctgagaccaactacctcttcatgggggactttgtggaccgtggcttctatagcgtcgaaacgttcctcctgctgctggcacttaaggttcgctatcctgatcgcatcacactgatccggggcaaccatgagagtcgccagatcacgcaggtctatggcttctacgatgagtgcctgcgcaagtacggctcggtgactgtgtggcgctactgcactgagatctttgactacctcagcctgtcagccatcatcgatggcaagatcttctgcgtgcacgggggcctctccccctccatccagaccctggatcagattcggacaatcgaccgaaagcaagaggtgcctcatgatgggcccatgtgtgacctcctctggtctgacccagaagacaccacaggctggggcgtgagcccccgaggagccggctacctatttggcagtgacgtggtggcccagttcaacgcagccaatgacattgacatgatctgccgtgcccaccaactggtgatggaaggttacaagtggcacttcaatgagacggtgctcactgtgtggtcggcacccaactactgctaccgctgtgggaatgtggcagccatcttggagctggacgagcatctccagaaagatttcatcatctttgaggctgctccccaagagacacggggcatcccctccaagaagcccgtggccgactacttcctgtgaccccgcccggcccctgccccctccaacccttctggccctcgcaccactgtgactctgccatcttcctcagacggaggctgggcgtggggggggctgtcctggctctgctgtcccccaagagggtgcttcgagggtgaggacttctctggagaggcctggagacctagctccatgttcctcctcctctctccccacttgaaccatgaagtttccaataatttttttttctttttttccttcttttttctgtttgtttttagataaaaattttgagaaaaaaaatgaaaaaattctaataaaagaagaaaaatggtt

SEQ ID NO: 24544 - DNA, 1866 bp, Homo sapiens
  source 1..1866: mol_type = unassigned DNA
ggaggagggggcgaccacaagatggcggacctctcgctgcttcaggaggacctgcaggaggacgcagacggatccctggactttgtctcacaagatgaaatgttgacgcccctggggagattggacaagtatgctgcaagtgagaacatatttaacagaaccaactgtgagagcggagctgatggaacaggtgcctcacatcgcactgttttgtcaagaaaaccggccttcaataccatatgctttttcaaaattcttactacctattgtggttagataccttgcagatcagaataatcaggtgaggaaaacaagtcaggcagctttgctggctctgttggagcaggagctcattgaacgatttgatgtggagaccaaagtgtgccctgtcctcatagagctgacagccccagatagcaatgatgatgtgaaaacagaagctgtggctataatgtgcaaaatggctcccatggttgggaaggatattacagagcgtcttatcctccctaggttttgtgagatgtgctgcgattgcagaatgtttcacgttcgaaaggtctgtgctgccaattttggagatatttgcagtgtagttggccagcaagctactgaagaaatgttgctgcccagatttttccagctttgttctgataatgtatggggagtccgaaaggcttgtgctgaatgcttcatggcggtttcatgtgcaacatgtcaagaaatccgacggaccaaattatcagcactttttattaatttgatcagtgatccttcacgttgggttcgccaagcagcttttcagtctctgggacctttcatatctacttttgctaatccatctagctcaggccagtattttaaagaagaaagcaaaagttcagaagagatgtcagtagaaaacaaaaataggaccagagatcaagaagccccagaggatgtacaagtcaggccagaggatactccttcagatctcagtgttagtaattccagtgtcatactggaaaacacgatggaagaccatgctgctgaggcatccgggaagcctctaggtgaaattagtgttccactggacagctctttactttgtactttgtcctcagaatctcaccaggaagcagctagtaatgagaatgataaaaaacctggtaactacaaatctatgttacgaccagaggttggcaccacttcacaagattcagctctcttagatcaggaattgtataactccttccatttctggaggactcctcttcctgaaatagatctagacatagagcttgaacagaactctgggggaaaacccagcccagagggaccagaggaagaatctgagggccctgtgcccagttctccaaacatcaccatggccaccagaaaggaactggaagaaatgatagaaaatctagagccccacattgatgatccagatgttaaagcacaagtggaagtgctgtccgctgcactacgtgcttccagcctggatgcacatgaagagaccatcagtataaaaagagaagtgatttgcaagatgaactggatataaatgagctaccaaattgtaaaataaatcaagaagattctgtgcctttaatcagcgatgctgttgagaggtgctttgtttctgatcggaccatttcactgcagcaagcaacacagtattctgagcagaagatcgggacttgaggccatgttgcggagggccagtgacattatctggactctggagtgtgaggaatatggactccactcttcactatattcacagcgattcagacttgagcaacaatagcagttttagccctgatgaggaaaggagaactaaagtacaagatgttgtacctcaggcgttgttagatcagtatttat

SEQ ID NO: 24545 - DNA, 3925 bp, Homo sapiens
  source 1..3925: mol_type = unassigned DNA
ccggctccccggctcgcgccgctccatgtagccccggctccccgggcggccgcggaggagggggcgaccacaagatggcggacctctcgctgcttcaggaggacctgcaggaggacgcagacggatttggtgtggatgactacagctcagagtctgatgtgattattataccttcagccctggactttgtctcacaagatgaaatgttgacgcccctggggagattggacaagtatgctgcaagtgagaacatatttaacagacaaatggtggcccggagtttgctcgataccttgagggaagtctgcgatgatgaaagagattgtattgctgttttggaaagaattagcagattggccgatgattcagaaccaactgtgagagcggagctgatggaacaggtgcctcacatcgcactgttttgtcaagaaaaccggccttcaataccatatgctttttcaaaattcttactacctattgtggttagataccttgcagatcagaataatcaggtgaggaaaacaagtcaggcagctttgctggctctgttggagcaggagctcattgaacgatttgatgtggagaccaaagtgtgccctgtcctcatagagctgacagccccagatagcaatgatgatgtgaaaacagaagctgtggctataatgtgcaaaatggctcccatggttgggaaggatattacagagcgtcttatcctccctaggttttgtgagatgtgctgcgattgcagaatgtttcacgttcgaaaggtctgtgctgccaattttggagatatttgcagtgtagttggccagcaagctactgaagaaatgttgctgcccagatttttccagctttgttctgataatgtatggggagtccgaaaggcttgtgctgaatgcttcatggcggtttcatgtgcaacatgtcaagaaatccgacggaccaaattatcagcactttttattaatttgatcagtgatccttcacgttgggttcgccaagcagcttttcagtctctgggacctttcatatctacttttgctaatccatctagctcaggccagtattttaaagaagaaagcaaaagttcagaagagatgtcagtagaaaacaaaaataggaccagagatcaagaagccccagaggatgtacaagtcaggccagaggatactccttcagatctcagtgttagtaattccagtgtcatactggaaaacacgatggaagaccatgctgctgaggcatccgggaagcctctaggtgaaattagtgttccactggacagctctttactttgtactttgtcctcagaatctcaccaggaagcagctagtaatgagaatgataaaaaacctggtaactacaaatctatgttacgaccagaggttggcaccacttcacaagattcagctctcttagatcaggaattgtataactccttccatttctggaggactcctcttcctgaaatagatctagacatagagcttgaacagaactctgggggaaaacccagcccagagggaccagaggaagaatctgagggccctgtgcccagttctccaaacatcaccatggccaccagaaaggaactggaagaaatgatagaaaatctagagccccacattgatgatccagatgttaaagcacaagtggaagtgctgtccgctgcactacgtgcttccagcctggatgcacatgaagagaccatcagtatagaaaagagaagtgatttgcaagatgaactggatataaatgagctaccaaattgtaaaataaatcaagaagattctgtgcctttaatcagcgatgctgttgagaatatggactccactcttcactatattcacagcgattcagacttgagcaacaatagcagttttagccctgatgaggaaaggagaactaaagtacaagatgttgtacctcaggcgttgttagatcagtatttatctatgactgacccttctcgtgcacagacggttgacactgaaattgctaagcactgtgcatatagcctccctggtgtggccttgacactcggaagacagaattggcactgcctgagagagacgtatgagactctggcctcagacatgcagtggaaagttcgacgaactctagcattctccatccacgagcttgcagttattcttggagatcaattgacagctgcagatctggttccaatttttaatggatttttaaaagacctcgatgaagtcaggataggtgttcttaaacacttgcatgattttctgaagcttcttcatattgacaaaagaagagaatatctttatcaacttcaggagtttttggtgacagataatagtagaaattggcggtttcgagctgaactggctgaacagctgattttacttctagagttatatagtcccagagatgtttatgactatttacgtcccattgctctgaatctgtgtgcagacaaagtttcttctgttcgttggatttcctacaagttggtcagcgagatggtgaagaagctgcacgcggcaacaccaccaacgttcggagtggacctcatcaatgagcttgtggagaactttggcagatgtcccaagtggtctggtcggcaagcctttgtctttgtctgccagactgtcattgaggatgactgccttcccatggaccagtttgctgtgcatctcatgccgcatctgctaaccttagcaaatgacagggttcctaacgtgcgagtgctgcttgcaaagacattaagacaaactctactagaaaaagactatttcttggcctctgccagctgccaccaggaggctgtggagcagaccatcatggctcttcagatggaccgtgacagcgatgtcaagtattttgcaagcatccaccctgccagtaccaaaatctccgaagatgccatgagcacagcgtcctcaacctactagaaggcttgaatctcggtgtctttcctgcttccatgagagccgaggttcagtgggcattcgccacgcatgtgacctgggatagctttcgggggaggagagaccttcctctcctgcggacttcattgcaggtgcaagttgcctacacccaataccagggatttcaagagtcaagagaaagtacagtaaacactattatcttatcttgactttaaggggaaataatttctcagaggattataattgtcaccgaagccttaaatccttctgtcttcctgactgaatgaaacttgaattggcagagcattttccttatggaagggatgagattcccagagacctgcattgctttctcctggttttatttaacaatcgacaaatgaaattcttacagcctgaaggcagacgtgtgcccagatgtgaaagagaccttcagtatcagccctaactcttctctcccaggaaggacttgctgggctctgtggccagctgtccagcccagccctgtgtgtgaatcgtttgtgacgtgtgcaaatgggaaaggaggggtttttacatctcctaaaggacctgatgccaacacaagtaggattgacttaaactcttaagcgcagcatattgctgtacacatttacagaatggttgctgagtgtctgtgtctgattttttcatgctggtcatgacctgaaggaaatttattagacgtataatgtatgtctggtgtttttaacttgatcatgatcagctctgaggtgcaacttcttcacatactgtacatacctgtgaccactcttgggagtgctgcagtctttaatcatgctgtttaaactgttgtggcacaagttctcttgtccaaataaaatttattaataagatctatagagagagatatatacacttttgattgttttctagatgtctaccaataaatgcaatttgtgacctgtattaatgatttaaagtggggaaactagattaaaatatttgtcttttaactagtt

SEQ ID NO: 24546 - DNA, 2869 bp, Homo sapiens
  source 1..2869: mol_type = unassigned DNA
ggcttggggaggtgctcgctctgtcggtcttgctctctcgcacgcttcccccggctcccttcgtttcccccccccggtcgcctgcgtgccggagtgtgtgcgagggagggggagggcgtcgggggggtggggggaggcgttccggtccccaagagacccgcggagggaggcggaggctgtgagggactccgggaagccatggacgtcgagaggctccaggaggcgctgaaagattttgagaagagggggaaaaaggaagtttgtcctgtcctggatcagtttctttgtcatgtagccaagactggagaaacaatgattcagtggtcccaatttaaaggctattttattttcaaactggagaaagtgatggatgatttcagaacttcagctcctgagccaagaggtcctcccaaccctaatgtcgaatatattccctttgatgaaatgaaggaaagaatactgaaaattgtcactggatttaatggtatcccttttactattcagcgactatgtgaattgttaacagatccaaggagaaactatacaggaacagacaaatttctcagaggagtagaaaagaatgtgatggttgttagctgtgtttatccttcttcagagaaaaacaattccaatagtttaaatcgaatgaatggtgttatgtttcctggaaattcaccaagctatactgagaggtctaatataaatgggcctgggacacccaggccacttaatcgaccaaaggtttctttgtcagcccccatgacaacaaatgggttgcctgagagcacagacagcaaagaggcaaatttgcagcaaaatgaggagaaaaatcacagtgactcttcgacctctgaatcagaagtttcctcagtgagccctttgaaaaataaacatccagatgaagatgctgtggaagctgaggggcatgaggtaaaaagactcaggtttgacaaagaaggtgaagtcagagaaacagccagtcaaacgacttccagcgaaatttcttcagttatggtaggagaaacagaagcatcatcttcatctcaggataaagacaaagatagccgttgtacccggcagcactgtacagaagaggatgaagaagaggatgaagaggaagaagaagagtcttttatgacatcaagagaaatgatcccagaaagaaaaaatcaagaaaaagaatctgatgatgccttaactgtgaatgaagagacttctgaggaaaataatcaaatggaggaatctgatgtgtctcaagctgagaaagatttgctacattctgaaggtagtgaaaacgaaggccctgtaagtagtagttcttctgactgccgtgaaacagaagaattagtaggatccaattccagtaaaactggagagattctttcagaatcatccatggaaaatgatgacgaagccacagaagtcaccgatgaaccaatggaacaagactaactatttagaaacatttagatgcagtattttacatacagttctggttttaacactgtataaaacttttgtgtaataaaatggacctttagttttacaagagaagcaggttgtaaaataaagtactttatggataattcctgaaagagttgtacatgtaagaactgtgaatatcagctcctctgggtcctgcttaccttaccgctgacttttctttctttctttttttggtctgggcaaatcagtggtttgtgtatagatttttttttttttttaatttaggattgaagtttttaaactggaaagtaattacaattttgaaaagttttttgagattatcacatttagtttatacatatgcaagaagctttttgtcttgtctctttctgatagctctagcagttttcatattttggtcatagtttcaacattttaacatgtgaattatagggtttcatgctggtttccagattttattgtttggctacgtacaatggaactttaagtcatatatacatacatatatatatatatatatatataattctaaggggggaaatgttatatttttctgtttctataagagatgaatacagtggatactttttctattggtaatgattgagttcacctctttcagaagacattttctttctcttctgagtaattgaaataaaatctggcccttgtgaaaccctggaaatcttaagtctgttgaaataccaggttaaacacattccaagagatctgttcaaactcaaattcttttgtatacttctgaggtgcctgagaaaaagacttcattatttatgagaaaatatgctttatcttggaaattgtgttcaaatgttagcttactattttgtagaatgaatgtttatgaagctgatatgagaccatctcagaagaaccaagtaggttccttgaccttttgcttgcttttctgaacattgtgaatattacacatgtctttctaaattattctagggtatgcaaatgtcaatggtatgaaacaccactgtactggaagaattaatatattactttagtatgtacctgagctaaatgactgaagctttaggggtgcatagaaaccaccataatttgtatgacattttgaagtgaattaaatatttttgaacatgcttcttcgacagccagtgttatatttttcagatcaacacaaagcacaatgattactcgaaattcagtattttcaaatttacatatttaaagtcatgcaagctgtaacttccctgtcaaaattactggctgccaaatttatacctgtttcttcagctgtaccttttgatatttaaagtttttaaatttctgtaaagtagattttgtagaatgtaatgtgttcactgcctttgtgaagcggtatataattgtataatttctgtgtgtaaactgaatg

SEQ ID NO: 24547 - DNA, 4984 bp, Homo sapiens
  source 1..4984: mol_type = unassigned DNA
agggagcgtgcgcgcggtgacgtaccgggcgccatgttggagggttggtggtagcggcttggggaggtgctcgctctgtcggtcttgctctctcgcacgcttcccccggctcccttcgtttcccccccccggtcgcctgcgtgccggagtgtgtgcgagggagggggagggcgtcgggggggtggggggaggcgttccggtccccaagagacccgcggagggaggcggaggctgtgagggactccgggaagccatggacgtcgagaggctccaggaggcgctgaaagattttgagaagagggggaaaaaggaagtttgtcctgtcctggatcagtttctttgtcatgtagccaagactggagaaacaatgattcagtggtcccaatttaaaggctattttattttcaaactggagaaagtgatggatgatttcagaacttcagctcctgagccaagaggtcctcccaaccctaatgtcgaatatattccctttgatgaaatgaaggaaagaatactgaaaattgtcactggatttaatggtatcccttttactattcagcgactatgtgaattgttaacagatccaaggagaaactatacaggaacagacaaatttctcagaggagtagaaaagaatgtgatggttgttagctgtgtttatccttcttcagagaaaaacaattccaatagtttaaatcgaatgaatggtgttatgtttcctggaaattcaccaagctatactgagaggtctaatataaatgggcctgggacacccaggccacttaatcgaccaaaggtttctttgtcagcccccatgacaacaaatgggttgcctgagagcacagacagcaaagaggcaaatttgcagcaaaatgaggagaaaaatcacagtgactcttcgacctctgaatcagaagtttcctcagtgagccctttgaaaaataaacatccagatgaagatgctgtggaagctgaggggcatgaggtaaaaagactcaggtttgacaaagaaggtgaagtcagagaaacagccagtcaaacgacttccagcgaaatttcttcagttatggtaggagaaacagaagcatcatcttcatctcaggataaagacaaagatagccgttgtacccggcagcactgtacagaagaggatgaagaagaggatgaagaggaagaagaagagtcttttatgacatcaagagaaatgatcccagaaagaaaaaatcaagaaaaagaatctgatgatgccttaactgtgaatgaagagacttctgaggaaaataatcaaatggaggaatctgatgtgtctcaagctgagaaagatttgctacattctgaaggtagtgaaaacgaaggccctgtaagtagtagttcttctgactgccgtgaaacagaagaattagtaggatccaattccagtaaaactggagagattctttcagaatcatccatggaaaatgatgacgaagccacagaagtcaccgatgaaccaatggaacaagactaactatttagaaacatttagatgcagtattttacatacagttctggttttaacactgtataaaacttttgtgtaataaaatggacctttagttttacaagagaagcaggttgtaaaataaagtactttatggataattcctgaaagagttgtacatgtaagaactgtgaatatcagctcctctgggtcctgcttaccttaccgctgacttttctttctttctttttttggtctgggcaaatcagtggtttgtgtatagatttttttttttttttaatttaggattgaagtttttaaactggaaagtaattacaattttgaaaagttttttgagattatcacatttagtttatacatatgcaagaagctttttgtcttgtctctttctgatagctctagcagttttcatattttggtcatagtttcaacattttaacatgtgaattatagggtttcatgctggtttccagattttattgtttggctacgtacaatggaactttaagtcatatatacatacatatatatatatatatatatataattctaaggggggaaatgttatatttttctgtttctataagagatgaatacagtggatactttttctattggtaatgattgagttcacctctttcagaagacattttctttctcttctgagtaattgaaataaaatctggcccttgtgaaaccctggaaatcttaagtctgttgaaataccaggttaaacacattccaagagatctgttcaaactcaaattcttttgtatacttctgaggtgcctgagaaaaagacttcattatttatgagaaaatatgctttatcttggaaattgtgttcaaatgttagcttactattttgtagaatgaatgtttatgaagctgatatgagaccatctcagaagaaccaagtaggttccttgaccttttgcttgcttttctgaacattgtgaatattacacatgtctttctaaattattctagggtatgcaaatgtcaatggtatgaaacaccactgtactggaagaattaatatattactttagtatgtacctgagctaaatgactgaagctttaggggtgcatagaaaccaccataatttgtatgacattttgaagtgaattaaatatttttgaacatgcttcttcgacagccagtgttatatttttcagatcaacacaaagcacaatgattactcgaaattcagtattttcaaatttacatatttaaagtcatgcaagctgtaacttccctgtcaaaattactggctgccaaatttatacctgtttcttcagctgtaccttttgatatttaaagtttttaaatttctgtaaagtagattttgtagaatgtaatgtgttcactgcctttgtgaagcggtatataattgtataatttctgtgtgtaaactgaatgcttgggctttcaatacagtattcatataaagcaataaatattaatgttatgaaatatttgactacatttttatcaaaatatgaaagaatccccccttttttagtttcagatacctgaactacacagatgagcttctaaaactgatgcaaacagtttctgacactgtataatatgcttttgggtgatttggggggcaaccacaagttttgcgttttgactacttaaatcatcatggctataaataccaaaacgatttggatccatttatgtttgtaggataatatactactgactgacttgactgtcaggttcacaacagctagatgatatatttatgactatgtctaatagttgaaataaaatctgaatattgatttactatacccaagaggggagaaaaattaaccattgtaaatttttaaaaaatttttcaaaaatgttaaaatgaggcaaatttaagtttacaaattttgaaattttcttttgaatatttatgaaattgtcagtaaacttacctaagatcctgtgaccttttgatattttttattttaattgtagtgccatggaccatttgtaaacaaattgatttacttttgttggttgtaagttgaagatttagcattatgactttgaggtctgtggttttatttgtaaacttgcaattgctatatttgcaagggcaaatgtatttctttattaaataaagtacaataatggtgaatgtaccaaaatgacatcacttaactctatgagagatctgcattttaatctatagtttaatagttttaatatttattagatattcatatgttgatcatagatcaaacttgttgctgtttatacagataattgtagaatgctcatggaatatctttagggtaggtggaatacttctgtagttaaattgggaaaccttgttcagctggttttagatattgatggccatttggaagtaaatttccgcaggtattcataggtgcacttaacacagactttgcttaatgaaaatgtcagttctaatagtaactgattcacttctgaacagaagtgattttaggcatatttcttaacatatatcaagcaaagtcctgttaaaagatctaaatgaagaatggagacctcagtgattaaagatattttgtttctgaccttgagcagattgcttacctgttctctagactataacccaacatgtaaaaaaaatttgaagatggtgatgaggaaagtgagatatatatatatatatgtattatgtttctagcacttttcccttttaaaaagtgaaaatatccttgtacatttttgaaaaatatattttcagttctgaaaaatgtagcagaagtagtgaaaatgtcatattttaaatgttgattattagataaatttaacctgcttagggtttattgtaactacacctttcagacgtgtgttttggagtagtggaattgccagccaggccctgtggcttggaaaggcatcccagaaatcctcggccagaaggtgtggcttgttaaagcattgagattcagagtattttgttttgccggtgtagataggcatgtatttatgcatttttgcatttgtaaaatcaacttttcaaataatgtaaatgtaatatactagtttacttaaaggtacttgggcagaatctaaagctgctacaatgtttgattatgaaaaaaatgtaacatggtaaggatgaaaatgcaacttacaaaaccaaaggaattaaaaattttcggtagtgtttcaaattgtcttctgaacaggaatttaacattggttttgatgaaggtgagggtcagttctcaagatttgtgctaatcataaaatgaatgaatgcaaaacaccttgtaatttcatatggaattataaaaattaggtttgctgggttttggcctaataagagtgctagtatgtattggttagactacatcttactatttcacattttaaaaatcagtacactcttcaggattttcttttatttcaacttggagcctagattactttgccaaatgtattattttcataatgcaataaaatataaattagaatat

SEQ ID NO: 24548 - DNA, 2698 bp, Homo sapiens
  source 1..2698: mol_type = unassigned DNA
ggcttggggaggtgctcgctctgtcggtcttgctctctcgcacgcttcccccggctcccttcgtttcccccccccggtcgcctgcgtgccggagtgtgtgcgagggagggggagggcgtcgggggggtggggggaggcgttccggtccccaagagacccgcggagggaggcggaggctgtgagggactccgggaagccatggacgtcgagaggctccaggaggcgctgaaagattttgagaagagggggaaaaaggaagtttgtcctgtcctggatcagtttctttgtcatgtagccaagactggagaaacaattatcccttttactattcagcgactatgtgaattgttaacagatccaaggagaaactatacaggaacagacaaatttctcagaggagtagaaaagaatgtgatggttgttagctgtgtttatccttcttcagagaaaaacaattccaatagtttaaatcgaatgaatggtgttatgtttcctggaaattcaccaagctatactgagaggtctaatataaatgggcctgggacacccaggccacttaatcgaccaaaggtttctttgtcagcccccatgacaacaaatgggttgcctgagagcacagacagcaaagaggcaaatttgcagcaaaatgaggagaaaaatcacagtgactcttcgacctctgaatcagaagtttcctcagtgagccctttgaaaaataaacatccagatgaagatgctgtggaagctgaggggcatgaggtaaaaagactcaggtttgacaaagaaggtgaagtcagagaaacagccagtcaaacgacttccagcgaaatttcttcagttatggtaggagaaacagaagcatcatcttcatctcaggataaagacaaagatagccgttgtacccggcagcactgtacagaagaggatgaagaagaggatgaagaggaagaagaagagtcttttatgacatcaagagaaatgatcccagaaagaaaaaatcaagaaaaagaatctgatgatgccttaactgtgaatgaagagacttctgaggaaaataatcaaatggaggaatctgatgtgtctcaagctgagaaagatttgctacattctgaaggtagtgaaaacgaaggccctgtaagtagtagttcttctgactgccgtgaaacagaagaattagtaggatccaattccagtaaaactggagagattctttcagaatcatccatggaaaatgatgacgaagccacagaagtcaccgatgaaccaatggaacaagactaactatttagaaacatttagatgcagtattttacatacagttctggttttaacactgtataaaacttttgtgtaataaaatggacctttagttttacaagagaagcaggttgtaaaataaagtactttatggataattcctgaaagagttgtacatgtaagaactgtgaatatcagctcctctgggtcctgcttaccttaccgctgacttttctttctttctttttttggtctgggcaaatcagtggtttgtgtatagatttttttttttttttaatttaggattgaagtttttaaactggaaagtaattacaattttgaaaagttttttgagattatcacatttagtttatacatatgcaagaagctttttgtcttgtctctttctgatagctctagcagttttcatattttggtcatagtttcaacattttaacatgtgaattatagggtttcatgctggtttccagattttattgtttggctacgtacaatggaactttaagtcatatatacatacatatatatatatatatatatataattctaaggggggaaatgttatatttttctgtttctataagagatgaatacagtggatactttttctattggtaatgattgagttcacctctttcagaagacattttctttctcttctgagtaattgaaataaaatctggcccttgtgaaaccctggaaatcttaagtctgttgaaataccaggttaaacacattccaagagatctgttcaaactcaaattcttttgtatacttctgaggtgcctgagaaaaagacttcattatttatgagaaaatatgctttatcttggaaattgtgttcaaatgttagcttactattttgtagaatgaatgtttatgaagctgatatgagaccatctcagaagaaccaagtaggttccttgaccttttgcttgcttttctgaacattgtgaatattacacatgtctttctaaattattctagggtatgcaaatgtcaatggtatgaaacaccactgtactggaagaattaatatattactttagtatgtacctgagctaaatgactgaagctttaggggtgcatagaaaccaccataatttgtatgacattttgaagtgaattaaatatttttgaacatgcttcttcgacagccagtgttatatttttcagatcaacacaaagcacaatgattactcgaaattcagtattttcaaatttacatatttaaagtcatgcaagctgtaacttccctgtcaaaattactggctgccaaatttatacctgtttcttcagctgtaccttttgatatttaaagtttttaaatttctgtaaagtagattttgtagaatgtaatgtgttcactgcctttgtgaagcggtatataattgtataatttctgtgtgtaaactgaatg

SEQ ID NO: 24549 - DNA, 1929 bp, Homo sapiens
  source 1..1929: mol_type = unassigned DNA
ggagggcgagaggactgagtgtgctgagcccccccgggacgaacccccggctgatggagctctgaagcgggcagaggagctcaagactcaggccaatgactacttcaaagccaaggactacgagaacgccatcaagttctacagccaggccatcgagctgaaccccagcaatgccatctactatggcaaccgcagcctggcctacctgcgcactgagtgctatggctacgcgctgggagacgccacgcgggccattgagctggacaagaagtacatcaagggttattaccgccgggctgccagcaacatggcactgggcaagttccgggccgcgctgcgagactacgagacggtggtcaaggtgaagccccatgacaaggatgccaaaatgaaataccaggagtgcaacaagatcgtgaagcagaaggcctttgagcgggccatcgcgggcgacgagcacaagcgctccgtggtggactcgctggacatcgagagcatgaccattgaggatgagtacagcggacccaagcttgaagacggcaaagtgacaatcagtttcatgaaggagctcatgcagtggtacaaggaccagaagaaactgcaccggaaatgtgcctaccagacagagaagattacagtatgtggggacacccatggccagttctatgacctcctcaacatattcgagctcaacggtttaccctcggagaccaacccctatatatttaatggtgactttgtggaccgaggctccttctctgtagaagtgatcctcacccttttcggcttcaagctcctgtacccagatcactttcacctccttcgaggcaaccacgagacagacaacatgaaccagatctacggtttcgagggtgaggtgaaggccaagtacacagcccagatgtacgagctctttagcgaggtgttcgagtggctcccgttggcccagtgcatcaacggcaaagtgctgatcatgcacggaggcctgttcagtgaagacggtgtcaccctggatgacatccggaaaattgagcggaatcgacaacccccagattcagggcccatgtgtgacctgctctggtcagatccacagccacagaacgggcgctcgatcagcaagcggggcgtgagctgtcagtttgggcctgacgtcaccaaggccttcttggaagagaacaacctggactatatcatccgcagccacgaagtcaaggccgagggctacgaggtggctcacggaggccgctgtgtcaccgtcttctctgcccccaactactgcgaccagatggggaacaaagcctcctacatccacctccagggctctgacctacggcctcagttccaccagttcacagcagtgcctcatcccaacgtcaagcccatggcctatgccaacacgctgctgcagctaggaatgatgtgaggtgacgggcggggcggcctgcatcccagggcccctccaatcccaccggacccaggccctgggctaggggcagagcaggccccgccccagggcaatgttggacccccttttactttgtaaagtttgtatttattcccctttaggtttgcagagggggtaggggcagagtcaggggctggccagagggtctgctccctggacagagaggaaggaggtggagcagctggggctgggggcacagcctgggcattctgtggggaggccgtcctcggggtggggtggggccgagtggctgccctgcccccctcatttgcatggctcctcccccactcaagcaatagggccccgccataggaagacccccagagagagggtcagcaggggggccccgcctgcgcctcccctcctatagccccatggtggggctaggctggggctcacccccctccccagctattttatgtctgtaattaaatatgttaaaataaagtcattatcggaagtca

SEQ ID NO: 24550 - DNA, 2109 bp, Homo sapiens
  source 1..2109: mol_type = unassigned DNA
acgacacttgtgcggcagcggcggcggccacccggcgctccttcgcgacggttcggccgggtgccgctggcggccgttgccagggtaggggtcgctttgcggcatggcgatggcggagggcgagaggactgagtgtgctgagcccccccgggacgaacccccggctgatggagctctgaagcgggcagaggagctcaagactcaggccaatgactacttcaaagccaaggactacgagaacgccatcaagttctacagccaggccatcgagctgaaccccagcaatgccatctactatggcaaccgcagcctggcctacctgcgcactgagtgctatggctacgcgctgggagacgccacgcgggccattgagctggacaagaagtacatcaagggttattaccgccgggctgccagcaacatggcactgggcaagttccgggccgcgctgcgagactacgagacggtggtcaaggtgaagccccatgacaaggatgccaaaatgaaataccaggagtgcaacaagatcgtgaagcagaaggcctttgagcgggccatcgcgggcgacgagcacaagcgctccgtggtggactcgctggacatcgagagcatgaccattgaggatgagtacagcggacccaagcttgaagacggcaaagtgacaatcagtttcatgaaggagctcatgcagtggtacaaggaccagaagaaactgcaccggaaatgtgcctaccagattctggtacaggtcaaagaggtcctctccaagctgagcacgctcgtggaaaccacactcaaagagacagagaagattacagtatgtggggacacccatggccagttctatgacctcctcaacatattcgagctcaacggtttaccctcggagaccaacccctatatatttaatggtgactttgtggaccgaggctccttctctgtagaagtgatcctcacccttttcggcttcaagctcctgtacccagatcactttcacctccttcgaggcaaccacgagacagacaacatgaaccagatctacggtttcgagggtgaggtgaaggccaagtacacagcccagatgtacgagctctttagcgaggtgttcgagtggctcccgttggcccagtgcatcaacggcaaagtgctgatcatgcacggaggcctgttcagtgaagacggtgtcaccctggatgacatccggaaaattgagcggaatcgacaacccccagattcagggcccatgtgtgacctgctctggtcagatccacagccacagaacgggcgctcgatcagcaagcggggcgtgagctgtcagtttgggcctgacgtcaccaaggccttcttggaagagaacaacctggactatatcatccgcagccacgaagtcaaggccgagggctacgaggtggctcacggaggccgctgtgtcaccgtcttctctgcccccaactactgcgaccagatggggaacaaagcctcctacatccacctccagggctctgacctacggcctcagttccaccagttcacagcagtgcctcatcccaacgtcaagcccatggcctatgccaacacgctgctgcagctaggaatgatgtgaggtgacgggcggggcggcctgcatcccagggcccctccaatcccaccggacccaggccctgggctaggggcagagcaggccccgccccagggcaatgttggacccccttttactttgtaaagtttgtatttattcccctttaggtttgcagagggggtaggggcagagtcaggggctggccagagggtctgctccctggacagagaggaaggaggtggagcagctggggctgggggcacagcctgggcattctgtggggaggccgtcctcggggtggggtggggccgagtggctgccctgcccccctcatttgcatggctcctcccccactcaagcaatagggccccgccataggaagacccccagagagagggtcagcaggggggccccgcctgcgcctcccctcctatagccccatggtggggctaggctggggctcacccccctccccagctattttatgtctgtaattaaatatgttaaaataaagtcattatcggaagtca

SEQ ID NO: 24551 - DNA, 1961 bp, Homo sapiens
  source 1..1961: mol_type = unassigned DNA
atggcgatggcggagggcgagaggactgagtgtgctgagcccccccgggacgaacccccggctgatggagctctgaagcgggcagaggagctcaagactcaggccaatgactacttcaaagccaaggactacgagaacgccatcaagttctacagccaggccatcgagctgaaccccagcaatgccatctactatggctacgcgctgggagacgccacgcgggccattgagctggacaagaagtacatcaagggttattaccgccgggctgccagcaacatggcactgggcaagttccgggccgcgctgcgagactacgagacggtggtcaaggtgaagccccatgacaaggatgccaaaatgaaataccaggagtgcaacaagatcgtgaagcagaaggcctttgagcgggccatcgcgggcgacgagcacaagcgctccgtggtggactcgctggacatcgagagcatgaccattgaggatgagtacagcggacccaagcttgaagacggcaaagtgacaatcagtttcatgaaggagctcatgcagtggtacaaggaccagaagaaactgcaccggaaatgtgcctaccagattctggtacaggtcaaagaggtcctctccaagctgagcacgctcgtggaaaccacactcaaagagacagagaagattacagtatgtggggacacccatggccagttctatgacctcctcaacatattcgagctcaacggtttaccctcggagaccaacccctatatatttaatggtgactttgtggaccgaggctccttctctgtagaagtgatcctcacccttttcggcttcaagctcctgtacccagatcactttcacctccttcgaggcaaccacgagacagacaacatgaaccagatctacggtttcgagggtgaggtgaaggccaagtacacagcccagatgtacgagctctttagcgaggtgttcgagtggctcccgttggcccagtgcatcaacggcaaagtgctgatcatgcacggaggcctgttcagtgaagacggtgtcaccctggatgacatccggaaaattgagcggaatcgacaacccccagattcagggcccatgtgtgacctgctctggtcagatccacagccacagaacgggcgctcgatcagcaagcggggcgtgagctgtcagtttgggcctgacgtcaccaaggccttcttggaagagaacaacctggactatatcatccgcagccacgaagtcaaggccgagggctacgaggtggctcacggaggccgctgtgtcaccgtcttctctgcccccaactactgcgaccagatggggaacaaagcctcctacatccacctccagggctctgacctacggcctcagttccaccagttcacagcagtgcctcatcccaacgtcaagcccatggcctatgccaacacgctgctgcagctaggaatgatgtgaggtgacgggcggggcggcctgcatcccagggcccctccaatcccaccggacccaggccctgggctaggggcagagcaggccccgccccagggcaatgttggacccccttttactttgtaaagtttgtatttattcccctttaggtttgcagagggggtaggggcagagtcaggggctggccagagggtctgctccctggacagagaggaaggaggtggagcagctggggctgggggcacagcctgggcattctgtggggaggccgtcctcggggtggggtggggccgagtggctgccctgcccccctcatttgcatggctcctcccccactcaagcaatagggccccgccataggaagacccccagagagagggtcagcaggggggccccgcctgcgcctcccctcctatagccccatggtggggctaggctggggctcacccccctccccagctattttatgtctgtaattaaatatgttaaaataaagtcattatcgg

SEQ ID NO: 24552 - DNA, 1886 bp, Homo sapiens
  source 1..1886: mol_type = unassigned DNA
cgatggcggagggcgagaggactgagtgtgctgagcccccccgggacgaacccccggctgatggagctctgaagcgggcagaggagctcaagactcaggccaatgactacttcaaagccaaggactacgagaacgccatcaagttctacagccaggccatcgagctgaaccccagcaatgccatctactatggcaaccgcagcctggcctacctgcgcactgagtgctatggctacgcgctgggagacgccacgcgggccattgagctggacaagaagtacatcaagggttattaccgccgggctgccagcaacatggcactgggcaagttccgggccgcgctgcgagactacgagacggtggtcaaggtgaagccccatgacaaggatgccaaaatgaaataccaggagtgcaacaagatcgtgaagcagaaggcctttgagcgggccatcgcgggcgacgagcacaagcgctccgtggtggactcgctggacatcgagagcatgaccattgaggatgagtacagcggacccaagcttgaagacggcaaagtgacaatcagtttcatgaaggagctcatgcagtggtacaaggaccagaagaaactgcaccggaaatgtgcctaccagattctggtacaggtcaaagaggtcctctccaagctgagcacgctcgtggaaaccacactcaaagagacagagaagattacagtatgtggggacacccatggccagttctatgacctcctcaacatattcgagctcaacggtttaccctcggagaccaacccctatatatttaatggtgactttgtggaccgaggctccttctctgtagaagtgatcctcacccttttcggcttcaagctcctgtacccagatcactttcacctccttcgaggcaaccacgagacagacaacatgaaccagatctacggtttcgagggtgaggtgaaggccaagtacacagcccagatgtacgagctctttagcgaggtgttcgagtggctcccgttggcccagtgcatcaacggcaaagtgctgatcatgcacggaggcctgttcagtgaagacggtgtcaccctggatgacatccggaaaattgagcggaatcgacaacccccagattcagggcccatgtgtgacctgctctggtcagatccacagccacagaacgggcgctcgatcagcaagcggggcgtgagctgtcagtttgggcctgacgtcaccaaggccttcttggaagagaacaacctggactatatcatccgcagccacgaagtcaaggccgagggctacgaggtggctcacggaggccgctgtgtcaccgtcttctctgcccccaactactgcgaccagatggggaacaaagcctcctacatccacctccagggctctgacctacggcctcagttccaccagttcacagcagtgggtaggcccagcagtggttcttgacatcacacgatgaggcgcgcatctcccgtcatccagggagaccagaggacccttgtctcactcccagttggctcttagtcacagccccgctttgtctttgacatggacgtttgtgatgatcacgttcctcccgctccccgtgtctgaagagtgctccctgactggctgccgtctcctccctgtcgggtctggctgggttctccagagggagtgctgcggaggggacacagcagaggccccatgctcgtgatgtatgttgcagatcattttcccccattctgtccttttttgttaaattgtggtaaaaagcacataacataaactgtaccaccttaaccatttgaaagtatatatcccagactgtcttttatctttagacttcacttgtggtttgttgccacagtacaagtttatttttatgaagccaaa

SEQ ID NO: 24553 - DNA, 960 bp, Homo sapiens
  source 1..960: mol_type = unassigned DNA
ttcggcctccgccgctgccgccgccgctgctacagccgccgccgccgctgttgccgcggcttgttattcttaaaatggcgccgctagacctggacaagtatgtggaaatagcgcggctgtgcaagtacctgccagagaacgacctgaagcggctatgtgactacgtttgtgacctcctcttagaagagtcaaatgttcagccagtatcaacaccagtaacagtgtgtggagatatccatggacagatgagtgccaaaccaaatatggaaatgctaatgcctggagatactgtaccaaagtttttgacatgctcacagtagcagctttaatagatgagcagattttgtgtgtccatggtggtttatctcctgatatcaaaacactggatcaaattcgaaccatcgaacggaatcaggaaattcctcataaaggagcattttgtgatctggtttggtcagatcctgaagatgtggatacctgggctatcagtccccgaggagcaggttggctttttggagcaaaggtcacaaatgagtttgttcatatcaacaacttaaaactcatctgcagagcacatcaactagtgcacgaaggctataaatttatgtttgatgagaagctggtgacagtatggtctgctcctaattactgctatcgttgtggaaatattgcttcgatcatggtcttcaaagatgtaaatacaagagaaccaaagttattccgggcagttccagattcagaacgtgttattcctcccagaacgacaacgccatatttcctttgaggccttcgcccatcctgctgacccatttttctgccctcttcttaccccaattttcttgtattaccctctacaatatactttttattgagcactttgctgctgaaatgctgcctcttgcctttttttttttaaattttaaattatctaaatttattgtttgttgtggtgtctatagc

SEQ ID NO: 24554 - DNA, 4118 bp, Homo sapiens
  source 1..4118: mol_type = unassigned DNA
ggacgtgacgcagggaaagttccggcttcggcctccgccgctgccgccgccgctgctacagccgccgccgccgctgttgccgcggcttgttattcttaaaatggcgccgctagacctggacaagtatgtggaaatagcgcggctgtgcaagtacctgccagagaacgacctgaagcggctatgtgactacgtttgtgacctcctcttagaagagtcaaatgttcagccagtatcaacaccagtaacagtgtgtggagatatccatggacagttttatgacctttgtgaactgttcagaactggaggtcaggttcctgacacaaactacatatttatgggtgattttgtagacagaggttactatagtttggagaccttcacttaccttcttgcattaaaggctaaatggcctgatcgtattacacttttgcgaggaaatcatgagagtagacagataacacaggtctatggattttatgatgagtgccaaaccaaatatggaaatgctaatgcctggagatactgtaccaaagtttttgacatgctcacagtagcagctttaatagatgagcagattttgtgtgtccatggtggtttatctcctgatatcaaaacactggatcaaattcgaaccatcgaacggaatcaggaaattcctcataaaggagcattttgtgatctggtttggtcagatcctgaagatgtggatacctgggctatcagtccccgaggagcaggttggctttttggagcaaaggtcacaaatgagtttgttcatatcaacaacttaaaactcatctgcagagcacatcaactagtgcacgaaggctataaatttatgtttgatgagaagctggtgacagtatggtctgctcctaattactgctatcgttgtggaaatattgcttcgatcatggtcttcaaagatgtaaatacaagagaaccaaagttattccgggcagttccagattcagaacgtgttattcctcccagaacgacaacgccatatttcctttgaggccttcgcccatcctgctgacccatttttctgccctcttcttaccccaattttcttgtattaccctctacaatatactttttattgagcactttgctgctgaaatgctgcctcttgcctttttttttttaaattttaaattatctaaatttattgtttgttgtggtgtctatagcaaagtttttctatcaattttcccccatcccatccccaccctggactcatttgagaagacttgagaaatgtcttaatactcacactgctgcatgtagctcttgcttatttactggtctgggaaacaggatgtgtttcctttttttaaaagccaattgacagattacacctaaatactcctccttttgtatcattcagccttttgttttagtttggtaagttttaagaaatttcagcagcaaagttgttattcagtgggcacgatggactccaaatgcctcaagttatgtatacctgtcccagatgtaaacttcattgtcctttgttggatgatattttaaatggatataaaataaattggtctaaagggctgccctccttgttgtgtttttaaattttagttaaaaactgctacagcttatgactttgtactttaagataattgtattgatcttttttcagattccttgtattttttaataaagtaatcttaaataaaactcagataggttaagtgttagaaattttaaacagcttacattgttagcgtaaagttatcttttcttttttcctaatcagagttcttgaccctttggttattgagtttaaaacttcaattgaaattcaatagtatttatttttgaaaaaaatcactaaactgtgcctaaagaacataactgccatattaatgttttggtttatatcctctatagtaatagaaaaacatttaatacttgtaatgctgatgtgttaatttgataccagttgagtagaatgtgatcaatccagtttacaatctatcatgagtattattaactaaaatctatgtgcttttcaataggaatcattcttctcttgctgtaacacttgaccttaacttttagaaagtgttcatttttaaactgcaactggaaaggttgaaaagttaggactcttgtatttgtgaactgtaatctgaagcagattatttaaagtgtagaaaaagaaacaagttcttcttttttgcaaaggtctgtgataccatatttcagctttgtgtaagtaatttgaatatccaaagggttgtgatgatcagttctgaatatgcaactgtccacttaataaggacaagtattccagtatctcttatgactgtagtcataaatgatgttggaatgtacattttgtgaaatagttggtatccctttactatgattaatttttgttattccaggaaatacttgtgaagccagccaattaataaagcactttagcatctgttcaggtagttttgaaaacccacttttccccttcaggataagaacttccaggttacctaaaaatgcaataaaaatctttatagtctaagcttcttggcatataatttttcatcagggttttcttttattaattgagcacaatactgttttgatttaatttttttccctcaaaccacccagctccttacatagtttttaattatatagctatatgaaagaggtggctaagacatttgctgcacacacttgaactaatgttgggtcagtagcttcgtgttactgccctgatcccagtgtaattcaggtggaaaggtatttttatctcacagggatatgtagctatgtattttactaattgtgaaacactggaaattaatgatgcagacaacttggtgtggtctttgaacagctctctgcagtatttttttttttcctgttaccataaattgtatttaagtgcttgctttccacttaagttgtactaatagaaccggtaactcccagccctccctgtttgacactccttagcttagattgatgtagttgtttttgttatccctataatgtgacttttatttttaagtcattgtgtactgcatttgtttgtcactagttgggcacgtgccaataatattctctccattccttatctgccatctctgttttgcctgatttctcttcaactgaataatggctttttgcatggaaaaaatagtttttactattagacgtgtaaagggaagagagagctaatgtattggactttgtgagcctacaaggaatattttggatccctccaataaataagggctatgtactatatgtactatatagagttatcatgtggtggaagatacttgcaagtcatagatttatgggcaggaggatttgttactccctatatctaggctgaatgtaaaatcccttatgttgtatcaatgggggtaaaaactatttttatttgcctatgatatacttggtttctaataaagtgccctaggctctagtgagaactgtctactttgaattgccatttactccctttcctcctttggccgatatgctcttggctagctttttataagttaatgtgtttccccaaaaagtttcactactttatattcatttgagtgtgatcctaaaacacctggatcaacagtacatctcatatgcaatctgcatcagctcctattctgtctggatgtctagaactgttggaagattttgacgtcttaagccctaggttttgctttgggaaataaggtttgaaatattgttcattgcattaagatttgtgtgtgtgtgctttgtaagcccagaaccaggttttggaaaatgcctgtactgtgaaagcaaattaggactctttctgagcctctttcattgtcagaaatagaatcactttccatcagcttccaggaaattgtgtatctggagtcgaagagatttgacatcaagaatccagatttttaaatgtaattgttttttaaatgctaatgtttgtaaagcaccttcagttcttcggatgaaaggtgctatattccctcagtgtaaattaataaaaagattacaggaagtttgtcaaaaaattcaatgcatagtctgtagtatgtcctgacaagaagttagcattttatataagaaattaaaaaatgcttattcctcca

SEQ ID NO: 24555 - DNA, 4172 bp, Homo sapiens
  source 1..4172: mol_type = unassigned DNA
gaagcgggctctcttggggcctgcagtcggggttcagccagagggggcgccgggcgtaccgacgtagcggggagaaacgggtcgcgctttaacggcgctgcgcaggcgccactcacgggccggacgtgacgcagggaaagttccggcttcggcctccgccgctgccgccgccgctgctacagccgccgccgccgctgttgccgcggcttgttattcttaaaatggcgccgctagacctggacaagtatgtggaaatagcgcggctgtgcaagtacctgccagagaacgacctgaagcggctatgtgactacgtttgtgacctcctcttagaagagtcaaatgttcagccagtatcaacaccagtaacagtgtgtggagatatccatggacagggtgattttgtagacagaggttactatagtttggagaccttcacttaccttcttgcattaaaggctaaatggcctgatcgtattacacttttgcgaggaaatcatgagagtagacagataacacaggtctatggattttatgatgagtgccaaaccaaatatggaaatgctaatgcctggagatactgtaccaaagtttttgacatgctcacagtagcagctttaatagatgagcagattttgtgtgtccatggtggtttatctcctgatatcaaaacactggatcaaattcgaaccatcgaacggaatcaggaaattcctcataaaggagcattttgtgatctggtttggtcagatcctgaagatgtggatacctgggctatcagtccccgaggagcaggttggctttttggagcaaaggtcacaaatgagtttgttcatatcaacaacttaaaactcatctgcagagcacatcaactagtgcacgaaggctataaatttatgtttgatgagaagctggtgacagtatggtctgctcctaattactgctatcgttgtggaaatattgcttcgatcatggtcttcaaagatgtaaatacaagagaaccaaagttattccgggcagttccagattcagaacgtgttattcctcccagaacgacaacgccatatttcctttgaggccttcgcccatcctgctgacccatttttctgccctcttcttaccccaattttcttgtattaccctctacaatatactttttattgagcactttgctgctgaaatgctgcctcttgcctttttttttttaaattttaaattatctaaatttattgtttgttgtggtgtctatagcaaagtttttctatcaattttcccccatcccatccccaccctggactcatttgagaagacttgagaaatgtcttaatactcacactgctgcatgtagctcttgcttatttactggtctgggaaacaggatgtgtttcctttttttaaaagccaattgacagattacacctaaatactcctccttttgtatcattcagccttttgttttagtttggtaagttttaagaaatttcagcagcaaagttgttattcagtgggcacgatggactccaaatgcctcaagttatgtatacctgtcccagatgtaaacttcattgtcctttgttggatgatattttaaatggatataaaataaattggtctaaagggctgccctccttgttgtgtttttaaattttagttaaaaactgctacagcttatgactttgtactttaagataattgtattgatcttttttcagattccttgtattttttaataaagtaatcttaaataaaactcagataggttaagtgttagaaattttaaacagcttacattgttagcgtaaagttatcttttcttttttcctaatcagagttcttgaccctttggttattgagtttaaaacttcaattgaaattcaatagtatttatttttgaaaaaaatcactaaactgtgcctaaagaacataactgccatattaatgttttggtttatatcctctatagtaatagaaaaacatttaatacttgtaatgctgatgtgttaatttgataccagttgagtagaatgtgatcaatccagtttacaatctatcatgagtattattaactaaaatctatgtgcttttcaataggaatcattcttctcttgctgtaacacttgaccttaacttttagaaagtgttcatttttaaactgcaactggaaaggttgaaaagttaggactcttgtatttgtgaactgtaatctgaagcagattatttaaagtgtagaaaaagaaacaagttcttcttttttgcaaaggtctgtgataccatatttcagctttgtgtaagtaatttgaatatccaaagggttgtgatgatcagttctgaatatgcaactgtccacttaataaggacaagtattccagtatctcttatgactgtagtcataaatgatgttggaatgtacattttgtgaaatagttggtatccctttactatgattaatttttgttattccaggaaatacttgtgaagccagccaattaataaagcactttagcatctgttcaggtagttttgaaaacccacttttccccttcaggataagaacttccaggttacctaaaaatgcaataaaaatctttatagtctaagcttcttggcatataatttttcatcagggttttcttttattaattgagcacaatactgttttgatttaatttttttccctcaaaccacccagctccttacatagtttttaattatatagctatatgaaagaggtggctaagacatttgctgcacacacttgaactaatgttgggtcagtagcttcgtgttactgccctgatcccagtgtaattcaggtggaaaggtatttttatctcacagggatatgtagctatgtattttactaattgtgaaacactggaaattaatgatgcagacaacttggtgtggtctttgaacagctctctgcagtatttttttttttcctgttaccataaattgtatttaagtgcttgctttccacttaagttgtactaatagaaccggtaactcccagccctccctgtttgacactccttagcttagattgatgtagttgtttttgttatccctataatgtgacttttatttttaagtcattgtgtactgcatttgtttgtcactagttgggcacgtgccaataatattctctccattccttatctgccatctctgttttgcctgatttctcttcaactgaataatggctttttgcatggaaaaaatagtttttactattagacgtgtaaagggaagagagagctaatgtattggactttgtgagcctacaaggaatattttggatccctccaataaataagggctatgtactatatgtactatatagagttatcatgtggtggaagatacttgcaagtcatagatttatgggcaggaggatttgttactccctatatctaggctgaatgtaaaatcccttatgttgtatcaatgggggtaaaaactatttttatttgcctatgatatacttggtttctaataaagtgccctaggctctagtgagaactgtctactttgaattgccatttactccctttcctcctttggccgatatgctcttggctagctttttataagttaatgtgtttccccaaaaagtttcactactttatattcatttgagtgtgatcctaaaacacctggatcaacagtacatctcatatgcaatctgcatcagctcctattctgtctggatgtctagaactgttggaagattttgacgtcttaagccctaggttttgctttgggaaataaggtttgaaatattgttcattgcattaagatttgtgtgtgtgtgctttgtaagcccagaaccaggttttggaaaatgcctgtactgtgaaagcaaattaggactctttctgagcctctttcattgtcagaaatagaatcactttccatcagcttccaggaaattgtgtatctggagtcgaagagatttgacatcaagaatccagatttttaaatgtaattgttttttaaatgctaatgtttgtaaagcaccttcagttcttcggatgaaaggtgctatattccctcagtgtaaattaataaaaagattacaggaagtttgtcaaaaaattcaatgcatagtctgtagtatgtcctgacaagaagttagcattttatataagaaattaaaaaatgcttattcctcc

SEQ ID NO: 24556 - DNA, 4349 bp, Homo sapiens
  source 1..4349: mol_type = unassigned DNA
gaagcgggctctcttggggcctgcagtcggggttcagccagagggggcgccgggcgtaccgacgtagcggggagaaacgggtcgcgctttaacggcgctgcgcaggcgccactcacgggccggacgtgacgcagggaaagttccggcttcggcctccgccgctgccgccgccgctgctacagccgccgccgccgctgttgccgcggcttgttattcttaaaatggcgccgctagacctggacaagtatgtggaaatagcgcggctgtgcaagtacctgccagagaacgacctgaaggtgagccctatttgcgggctcgccccttccggctgtggggcgcccgccggccggcccttcctttctccaggacccccgccggtatttcattttcttcgttttctaaaggagcggctatgtgactacgtttgtgacctcctcttagaagagtcaaatgttcagccagtatcaacaccagtaacagtgtgtggagatatccatggacagttttatgacctttgtgaactgttcagaactggaggtcaggttcctgacacaaactacatatttatgggtgattttgtagacagaggttactatagtttggagaccttcacttaccttcttgcattaaaggctaaatggcctgatcgtattacacttttgcgaggaaatcatgagagtagacagataacacaggtctatggattttatgatgagtgccaaaccaaatatggaaatgctaatgcctggagatactgtaccaaagtttttgacatgctcacagtagcagctttaatagatgagcagattttgtgtgtccatggtggtttatctcctgatatcaaaacactggatcaaattcgaaccatcgaacggaatcaggaaattcctcataaaggagcattttgtgatctggtttggtcagatcctgaagatgtggatacctgggctatcagtccccgaggagcaggttggctttttggagcaaaggtcacaaatgagtttgttcatatcaacaacttaaaactcatctgcagagcacatcaactagtgcacgaaggctataaatttatgtttgatgagaagctggtgacagtatggtctgctcctaattactgctatcgttgtggaaatattgcttcgatcatggtcttcaaagatgtaaatacaagagaaccaaagttattccgggcagttccagattcagaacgtgttattcctcccagaacgacaacgccatatttcctttgaggccttcgcccatcctgctgacccatttttctgccctcttcttaccccaattttcttgtattaccctctacaatatactttttattgagcactttgctgctgaaatgctgcctcttgcctttttttttttaaattttaaattatctaaatttattgtttgttgtggtgtctatagcaaagtttttctatcaattttcccccatcccatccccaccctggactcatttgagaagacttgagaaatgtcttaatactcacactgctgcatgtagctcttgcttatttactggtctgggaaacaggatgtgtttcctttttttaaaagccaattgacagattacacctaaatactcctccttttgtatcattcagccttttgttttagtttggtaagttttaagaaatttcagcagcaaagttgttattcagtgggcacgatggactccaaatgcctcaagttatgtatacctgtcccagatgtaaacttcattgtcctttgttggatgatattttaaatggatataaaataaattggtctaaagggctgccctccttgttgtgtttttaaattttagttaaaaactgctacagcttatgactttgtactttaagataattgtattgatcttttttcagattccttgtattttttaataaagtaatcttaaataaaactcagataggttaagtgttagaaattttaaacagcttacattgttagcgtaaagttatcttttcttttttcctaatcagagttcttgaccctttggttattgagtttaaaacttcaattgaaattcaatagtatttatttttgaaaaaaatcactaaactgtgcctaaagaacataactgccatattaatgttttggtttatatcctctatagtaatagaaaaacatttaatacttgtaatgctgatgtgttaatttgataccagttgagtagaatgtgatcaatccagtttacaatctatcatgagtattattaactaaaatctatgtgcttttcaataggaatcattcttctcttgctgtaacacttgaccttaacttttagaaagtgttcatttttaaactgcaactggaaaggttgaaaagttaggactcttgtatttgtgaactgtaatctgaagcagattatttaaagtgtagaaaaagaaacaagttcttcttttttgcaaaggtctgtgataccatatttcagctttgtgtaagtaatttgaatatccaaagggttgtgatgatcagttctgaatatgcaactgtccacttaataaggacaagtattccagtatctcttatgactgtagtcataaatgatgttggaatgtacattttgtgaaatagttggtatccctttactatgattaatttttgttattccaggaaatacttgtgaagccagccaattaataaagcactttagcatctgttcaggtagttttgaaaacccacttttccccttcaggataagaacttccaggttacctaaaaatgcaataaaaatctttatagtctaagcttcttggcatataatttttcatcagggttttcttttattaattgagcacaatactgttttgatttaatttttttccctcaaaccacccagctccttacatagtttttaattatatagctatatgaaagaggtggctaagacatttgctgcacacacttgaactaatgttgggtcagtagcttcgtgttactgccctgatcccagtgtaattcaggtggaaaggtatttttatctcacagggatatgtagctatgtattttactaattgtgaaacactggaaattaatgatgcagacaacttggtgtggtctttgaacagctctctgcagtatttttttttttcctgttaccataaattgtatttaagtgcttgctttccacttaagttgtactaatagaaccggtaactcccagccctccctgtttgacactccttagcttagattgatgtagttgtttttgttatccctataatgtgacttttatttttaagtcattgtgtactgcatttgtttgtcactagttgggcacgtgccaataatattctctccattccttatctgccatctctgttttgcctgatttctcttcaactgaataatggctttttgcatggaaaaaatagtttttactattagacgtgtaaagggaagagagagctaatgtattggactttgtgagcctacaaggaatattttggatccctccaataaataagggctatgtactatatgtactatatagagttatcatgtggtggaagatacttgcaagtcatagatttatgggcaggaggatttgttactccctatatctaggctgaatgtaaaatcccttatgttgtatcaatgggggtaaaaactatttttatttgcctatgatatacttggtttctaataaagtgccctaggctctagtgagaactgtctactttgaattgccatttactccctttcctcctttggccgatatgctcttggctagctttttataagttaatgtgtttccccaaaaagtttcactactttatattcatttgagtgtgatcctaaaacacctggatcaacagtacatctcatatgcaatctgcatcagctcctattctgtctggatgtctagaactgttggaagattttgacgtcttaagccctaggttttgctttgggaaataaggtttgaaatattgttcattgcattaagatttgtgtgtgtgtgctttgtaagcccagaaccaggttttggaaaatgcctgtactgtgaaagcaaattaggactctttctgagcctctttcattgtcagaaatagaatcactttccatcagcttccaggaaattgtgtatctggagtcgaagagatttgacatcaagaatccagatttttaaatgtaattgttttttaaatgctaatgtttgtaaagcaccttcagttcttcggatgaaaggtgctatattccctcagtgtaaattaataaaaagattacaggaagtttgtcaaaaaattcaatgcatagtctgtagtatgtcctgacaagaagttagcattttatataagaaattaaaaaatgcttattcctcc

SEQ ID NO: 24557 - DNA, 569 bp, Homo sapiens
  source 1..569: mol_type = unassigned DNA
cgccgctgccgccgccgctgctacagccgccgccgccgctgttgccgcggcttgttattcttaaaatggcgccgctagacctggacaagtatgtggaaatagcgcggctgtgcaagtacctgccagagaacgacctgaagttttgggctatgatgcattaggcttctgcgagtatttatatacagattttgaacatgtttttattgccaagactacagttgctgggtcaaatgcggctatgtgactacgtttgtgacctcctcttagaagagtcaaatgttcagccagtatcaacaccagtaacagtgtgtggagatatccatggacagttttatgacctttgtgaactgttcagaactggaggtcaggttcctgacacaaactacatatttatgggtgattttgtagacagaggttactatagtttggagaccttcacttaccttcttgcattaaaggctaaatggcctgatcgtattacacttttgcgaggaaatcatgagagtagacagataacacaggtctatggattttatgatgagtgccaaaccaaatatggaaatgctaat

SEQ ID NO: 24558 - DNA, 2677 bp, Homo sapiens
  source 1..2677: mol_type = unassigned DNA
attgcgcagggtgcattgccctgaagagcgctcctccttccggtgaaagtcgtcgggttcccagccgggagtctgcggagttctcatactctgttacccagcttcctttgtatgagtgctgttgcgcacttccggtggaagcgctgaagcgagtgggtggagtttacggagccggtgggcggtaggcggtgctacgggtagctgggtgctgtccaaaggcgacagggcgtcgttaggggagcgagtcgtgaccggttgggccacactcaacgtgggacgaagcttcgcctactgtttgactacgtgcgtgcagcctcccctcgatgtcggccctcgaaaagagcatgcacctcggccgccttccctctcgcccacctctacccggcagcgggggcagtcagagcggagccaagatgcgaatgggccctggaagaaagcgggacttttcccctgttccttggagtcagtattttgagtccatggaagatgtagaagtagagaatgaaactggcaaggatacttttcgagtctacaagagtggttcagagggtccagtcctgctccttctgcatggaggaggtcattctgccctttcttgggctgtgttcacggcagcgattattagtagagttcagtgtaggattgtagctttggatctgcgaagtcatggtgaaacaaaggtcaagaatcctgaagatctgtctgcagaaacaatggcaaaagacgttggcaatgtggttgaagccatgtatggggaccttcctcctccaattatgctgattggacatagcatgggtggtgctattgcagtccacacagcatcatccaacctggtaccaagcctcttgggtctgtgcatgattgatgttgtagaaggtacagctatggatgcacttaatagcatgcagaatttcttacggggtcgtcctaaaaccttcaagtctctggagaatgctattgaatggagtgtgaagagtggccagattcgaaatctggagtctgcccgtgtctcaatggttggccaagtcaaacagtgtgaaggaattacaagtccagaaggctcaaaatctatagtggaaggaatcatagaggaagaagaagaagatgaggaaggaagtgagtctataagcaagaggaaaaaggaagatgacatggagaccaagaaagaccatccatacacctggagaattgaactggcaaaaacagaaaaatactgggacggctggttccgaggcttatccaatctctttcttagttgtcccattcctaaattgctgctcttggctggtgttgatagattggataaagatctgaccattggccagatgcaagggaagttccagatgcaggtcctaccccagtgtggccatgcagtccatgaggatgcccctgacaaggtagctgaagctgttgccactttcctgatccggcacaggtttgcagaacccatcggtggattccagtgtgtgtttcctggctgttagtgacctgctgtccacccctcctcaacatcgagctctgttgtaaatacgtcgcaccagaggccactgtgatgccactgtctcctctccatcccgcccagccatgtgacactggctcccggtagacgggcaccccgagatgtaccaaccttttcatgtattctgccaaaagcattgttttccagggcccttgaccaacatcggcttccccagtccagggctcccctgctcctttcccttccctgtactggggtagctcctgcctgctctccctgcgttgcctagggtaaagcctccagatttgccatactgagcccctcttcctagcatcaggcgatacatctgagttcaaatgtcttcccaggctcagggacctccattccttgagattgtcttggcatggcccagccctgcctcatgggatggacaatgcatggggtggtctttatttttccctttcaaataaaacactagtcaggtaccgttttatcccagtcgtactcttccaggtttggaagacccagagaggccaagatcccatccttagccatagcgagcggtggtggtggatagcatcacaagaaacgagcctgaaaatcaggtccagccggtccaagcacatggcctcccatctgggagagcccactgtcccactcccacatgtctgggcacctgccctgggctgaggccaggctgctccaggggcctcctgcgccctcacctgccacagagcaacccaggttaaatacagcccatgcacaaagccacaggccaaagcctatggaattgtttttaatcatcaaatttaaccattttcataactggttcctggaggtgtgcagtgcccccttgcctcttcaaacctacagcttctctttgccatttgtggatttcacatcactccacacagaaacattacagcctggcatccccagtctttgccttcttccagctgcctcgacacagcactgtggcctgtccctattgcccaggcacgccatttccaagggcaggaaggggcagtgtcctgaagcccatcttttctgtgactgtcttaggtgatgtgtagccccctccacctttccactcaacaacctcccacccctgtcctgctgcatggtccggagtctgggacctactttgttttttgttatttatgaccttgtttaaagaaaataaatatctcccaaccttta

SEQ ID NO: 24559 - DNA, 1928 bp, Homo sapiens
  source 1..1928: mol_type = unassigned DNA
ctttatttctctgcgagcatcactaaattctgctgtcatcaagagcagatatatagtagttgactcagtaagtgtaaatgctcagaataagttaaatatgtggttacagtttttgtttaacatccaggtacagctatggatgcacttaatagcatgcagaatttcttacggggtcgtcctaaaaccttcaagtctctggagaatgctattgaatggagtgtgaagagtggccagattcgaaatctggagtctgcccgtgtctcaatggttggccaagtcaaacagtgtgaaggaattacaagtccagaaggctcaaaatctatagtggaaggaatcatagaggaagaagaagaagatgaggaaggaagtgagtctataagcaagaggaaaaaggaagatgacatggagaccaagaaagaccatccatacacctggagaattgaactggcaaaaacagaaaaatactgggacggctggttccgaggcttatccaatctctttcttagttgtcccattcctaaattgctgctcttggctggtgttgatagattggataaagatctgaccattggccagatgcaagggaagttccagatgcaggtcctaccccagtgtggccatgcagtccatgaggatgcccctgacaaggtagctgaagctgttgccactttcctgatccggcacaggtttgcagaacccatcggtggattccagtgtgtgtttcctggctgttagtgacctgctgtccacccctcctcaacatcgagctctgttgtaaatacgtcgcaccagaggccactgtgatgccactgtctcctctccatcccgcccagccatgtgacactggctcccggtagacgggcaccccgagatgtaccaaccttttcatgtattctgccaaaagcattgttttccagggcccttgaccaacatcggcttccccagtccagggctcccctgctcctttcccttccctgtactggggtagctcctgcctgctctccctgcgttgcctagggtaaagcctccagatttgccatactgagcccctcttcctagcatcaggcgatacatctgagttcaaatgtcttcccaggctcagggacctccattccttgagattgtcttggcatggcccagccctgcctcatgggatggacaatgcatggggtggtctttatttttccctttcaaataaaacactagtcaggtaccgttttatcccagtcgtactcttccaggtttggaagacccagagaggccaagatcccatccttagccatagcgagcggtggtggtggatagcatcacaagaaacgagcctgaaaatcaggtccagccggtccaagcacatggcctcccatctgggagagcccactgtcccactcccacatgtctgggcacctgccctgggctgaggccaggctgctccaggggcctcctgcgccctcacctgccacagagcaacccaggttaaatacagcccatgcacaaagccacaggccaaagcctatggaattgtttttaatcatcaaatttaaccattttcataactggttcctggaggtgtgcagtgcccccttgcctcttcaaacctacagcttctctttgccatttgtggatttcacatcactccacacagaaacattacagcctggcatccccagtctttgccttcttccagctgcctcgacacagcactgtggcctgtccctattgcccaggcacgccatttccaagggcaggaaggggcagtgtcctgaagcccatcttttctgtgactgtcttaggtgatgtgtagccccctccacctttccactcaacaacctcccacccctgtcctgctgcatggtccggagtctgggacctactttgttttttgttatttatgaccttgtttaaagaaaataaatatctcccaaccttta

SEQ ID NO: 24560 - DNA, 2496 bp, Homo sapiens
  source 1..2496: mol_type = unassigned DNA
agggcgtcgttaggggagcgagtcgtgaccggttgggccacactcaacgtgggacgaagcttcgcctactgtttgactacgtgcgtgcagcctcccctcgatgtcggccctcgaaaagagcatgcacctcggccgccttccctctcgcccacctctacccggcagcgggggcagtcagagcggagccaagatgcgaatgggccctggaagaaagcgggacttttcccctgttccttggagtcagtattttgagtccatggaagatgtagaagtagagaatgaaactggcaaggatacttttcgagtctacaagagtggttcagagggtccagtcctgctccttctgcatggaggaggtcattctgccctttcttgggctgtgttcacggcagcgattattagtagagttcagtgtaggattgtagctttggatctgcgaagtcatggtgaaacaaaggtcaagaatcctgaagatctgtctgcagaaacaatggcaaaagacgttggcaatgtggttgaagccatgtatggggaccttcctcctccaattatgctgattggacatagcatgggtggtgctattgcagtccacacagcatcatccaacctggtaccaagcctcttgggtctgtgcatgattgatgttgtagaaggtacagctatggatgcacttaatagcatgcagaatttcttacggggtcgtcctaaaaccttcaagtctctggagaatgctattgaatggagtgtgaagagtggccagattcgaaatctggagtctgcccgtgtctcaatggttggccaagtcaaacagtgtgaaggaattacaagtccagaaggctcaaaatctatagtggaaggaatcatagaggaagaagaagaagatgaggaaggaagtgagtctataagcaagaggaaaaaggaagatgacatggaggggttgccctcggagactcagaacttgctcttattcctccagaccaagaaagaccatccatacacctggagaattgaactggcaaaaacagaaaaatactgggacggctggttccgaggcttatccaatctctttcttagttgtcccattcctaaattgctgctcttggctggtgttgatagattggataaagatctgaccattggccagatgcaagggaagttccagatgcaggtcctaccccagtgtggccatgcagtccatgaggatgcccctgacaaggtagctgaagctgttgccactttcctgatccggcacaggtttgcagaacccatcggtggattccagtgtgtgtttcctggctgttagtgacctgctgtccacccctcctcaacatcgagctctgttgtaaatacgtcgcaccagaggccactgtgatgccactgtctcctctccatcccgcccagccatgtgacactggctcccggtagacgggcaccccgagatgtaccaaccttttcatgtattctgccaaaagcattgttttccagggcccttgaccaacatcggcttccccagtccagggctcccctgctcctttcccttccctgtactggggtagctcctgcctgctctccctgcgttgcctagggtaaagcctccagatttgccatactgagcccctcttcctagcatcaggcgatacatctgagttcaaatgtcttcccaggctcagggacctccattccttgagattgtcttggcatggcccagccctgcctcatgggatggacaatgcatggggtggtctttatttttccctttcaaataaaacactagtcaggtaccgttttatcccagtcgtactcttccaggtttggaagacccagagaggccaagatcccatccttagccatagcgagcggtggtggtggatagcatcacaagaaacgagcctgaaaatcaggtccagccggtccaagcacatggcctcccatctgggagagcccactgtcccactcccacatgtctgggcacctgccctgggctgaggccaggctgctccaggggcctcctgcgccctcacctgccacagagcaacccaggttaaatacagcccatgcacaaagccacaggccaaagcctatggaattgtttttaatcatcaaatttaaccattttcataactggttcctggaggtgtgcagtgcccccttgcctcttcaaacctacagcttctctttgccatttgtggatttcacatcactccacacagaaacattacagcctggcatccccagtctttgccttcttccagctgcctcgacacagcactgtggcctgtccctattgcccaggcacgccatttccaagggcaggaaggggcagtgtcctgaagcccatcttttctgtgactgtcttaggtgatgtgtagccccctccacctttccactcaacaacctcccacccctgtcctgctgcatggtccggagtctgggacctactttgttttttgttatttatgaccttgtttaaagaaaataaatatctcccaaccttta

SEQ ID NO: 24561 - DNA, 2690 bp, Homo sapiens
  source 1..2690: mol_type = unassigned DNA
gaagattacaaatgagactgggaaaccctcttcaataagacctgtgtgatgatagattgtgtcctgagcccgcaggtcaggctgaaagagtcaacaaccagcaaagtgaagatctaggagtctgttccccttgaacctgtgtggacctgatcaaacctcgagggaaaggctgggagaacacatccctggtcagctgtaggaaagccagagagcatttgagaagaggctgaagcttgaattttgcaaacacacaagccctctgcatttccccagagagaaggtttttttctcgtcttcatttcctttgaaacacctggggtgaggaaaaacctctacattggccaagcagaagaaacagaatctatgactgaagaggatcggctaagagtggttcctcgcagcttaaagggaggcacttttcacactctgtcttaaaatcagaagttgaattcatgaacacatatgatttagatagaagtcatgggatgcagcagttcttcaacgaaaaccaggagatctgacacatcactgagagctgcgttgatcatccagaactggtaccgaggttacaaagctcgactgaaggccagacaacactatgccctcaccatcttccagtccatcgaatatgctgatgaacaaggccaaatgcagttatccaccttcttttccttcatgttggaaaactacacacatatacataaggaagagctagaattaagaaatcagtctcttgaaagcgaacaggacatgagggatagatgggattatgtggactcgatagatgtcccagactcctataatggtcctcggctacaatttcctctcacttgtacggatattgatttacttcttgaggccttcaaggaacaacagatacttcatgcccattatgtcttagaggtgctatttgaaaccaagaaagtcctgaagcaaatgccgaatttcactcacatacaaacttctccctccaaagaggtaacaatctgtggtgatttgcatgggaaactggatgatctttttttgatcttctacaagaatggtctcccctcagagaggaacccgtatgtttttaatggtgactttgtagatcgaggaaagaattccatagagatcctaatgatcctgtgtgtgagttttcttgtctaccccaatgacctgcacttgaacagagggaaccacgaagattttatgatgaatctgaggtatggcttcacgaaagaaattttgcataaatataagctacatggaaaaagaatcttacaaatcttggaagaattctatgcctggctcccaatcggtacaatcgttgacaatgaaatcctggtcatccatggtgggatatcagagaccacagacttgaatttactccaccgtgtagagaggaacaagatgaaatctgtgctgataccaccaacggaaacaaacagagaccatgacactgactcgaagcacaataaagtaggtgtgacttttaatgcacatggaagaatcaaaacaaatggatctcctactgaacacttaacagagcatgaatgggaacaggtggtgactatattttctgcttctaattattatgaagaaggcagcaatcgaggagcttacatcaaactatgttctggtacaactcctcgatttttccagtaccaagtaactaaagcaacgtgctttcagcctcttcgccaaagagtggatactatggaaaacagcgccatcaagatattaagagagagagtgatttcacgaaaaagtgaccttactcgtgctttccaacttcaagaccacagaaaatcaggaaaactttctgtgagccagtgggctttttgcatggagaacattttggggctgaacttaccatggagatccctcagttcgaatctggtaaacatagaccaaaatggaaacgttgaatacatgtccagcttccagaatatccgcattgaaaaacctgtacaagaggctcattctactctagttgaaactctgtacagatacagatctgacctggaaatcatatttaatgccattgacactgatcactcaggcctgatctccgtggaagaatttcgtgccatgtggaaactttttagttctcactacaatgttcacattgatgattcccaagtcaataagcttgccaacataatggacttgaacaaagatggaagcattgactttaatgagtttttaaaggctttctatgtagtgcatagatatgaagacttgatgaaacctgatgtcaccaaccttggctaaacacaaatgagagcttccctcaggctccctgaaacagctaggcccaaatcacaagtacagtcctttccaacacccctgaaattcatagtcagtagcagagaaaagcagatcccaattcatcccacaaacagatgcatagtatgggttttggaagtccctagcaagctgttattggtaagattaggttaaatgtcagtaataggatttggtttcagcattagtacctacatattgccagtgagaaactgggttggacctagtggtgttgtcgtgagtgccacctaaccaggaggccagagcggtttgaaaacatcctgaaaggaactcatacagcacaagagaaaactactaagcttgacatctgtgagtgactgagggagacaggaggaataccaggttattcatggaataaagtctttccatctttaaactgt

SEQ ID NO: 24562 - DNA, 2717 bp, Homo sapiens
  source 1..2717: mol_type = unassigned DNA
gaagattacaaatgagactgggaaaccctcttcaataagacctgtgtgatgatagattgtgtcctgagcccgcaggtcaggctgaaagagtcaacaaccagcaaagtgaagatctaggagtctgttccccttgaacctgtgtggacctgatcaaacctcgagggaaaggctgggagaacacatccctggtcagctgtaggaaagccagagagcatttgagaagaggctgaagcttgaattttgcaaacacacaagccctctgcatttccccagagagaaggtttttttctcgtcttcatttcctttgaaacacctggggtgaggaaaaacctctacattggccaagcagaagaaacagaatctatgactgaagaggatcggctaagagtggttcctcgcagcttaaagggaggcacttttcacactctgtcttaaaatcagaagttgaattcatgaacacatatgatttagatagaagtcatgggatgcagcagttcttcaacgaaaaccaggagatctgacacatcactgagagctgcgttgatcatccagaactggtaccgaggttacaaagctcgactgaaggccagacaacactatgccctcaccatcttccagtccatcgaatatgctgatgaacaaggccaaatgcagttatccaccttcttttccttcatgttggaaaactacacacatatacataaggaagagctagagatacttcatgcccattatgtcttagaggtgctatttgaaaccaagaaagtcctgaagcaaatgccgaatttcactcacatacaaacttctccctccaaagaggtaacaatctgtggtgatttgcatgggaaactggatgatctttttttgatcttctacaagaatggtctcccctcagagaggaacccgtatgtttttaatggtgactttgtagatcgaggaaagaattccatagagatcctaatgatcctgtgtgtgagttttcttgtctaccccaatgacctgcacttgaacagagggaaccacgaagattttatgatgaatctgaggtatggcttcacgaaagaaattttgcataaatataagctacatggaaaaagaatcttacaaatcttggaagaattctatgcctggctcccaatcggtacaatcgttgacaatgaaatcctggtcatccatggtgggatatcagagaccacagacttgaatttactccaccgtgtagagaggaacaagatgaaatctgtgctgataccaccaacggaaacaaacagagaccatgacactgactcgaagcacaataaagtaggtgtgacttttaatgcacatggaagaatcaaaacaaatggatctcctactgaacacttaacagagcatgaatgggaacagattattgatattctgtggagtgatcccagaggcaaaaatggctgttttccaaatacgtgccgaggagggggctgctattttggaccagatgttacttccaagattcttaataaataccagttgaagatgctcatcaggtctcatgaatgtaagcccgaagggtatgaaatctgtcatgatgggaaggtggtgactatattttctgcttctaattattatgaagaaggcagcaatcgaggagcttacatcaaactatgttctggtacaactcctcgatttttccagtaccaagtaactaaagcaacgtgctttcagcctcttcgccaaagagtggatactatggaaaacagcgccatcaagatattaagagagagagtgatttcacgaaaaagtgaccttactcgtgctttccaacttcaagaccacagaaaatcaggaaaactttctgtgagccagtgggctttttgcatggagaacattttggggctgaacttaccatggagatccctcagttcgaatctggtaaacatagaccaaaatggaaacgttgaatacatgtccagcttccagaatatccgcattgaaaaacctgtacaagaggctcattctactctagttgaaactctgtacagatacagatctgacctggaaatcatatttaatgccattgacactgatcactcaggcctgatctccgtggaagaatttcgtgccatgtggaaactttttagttctcactacaatgttcacattgatgattcccaagtcaataagcttgccaacataatggacttgaacaaagatggaagcattgactttaatgagtttttaaaggctttctatgtagtgcatagatatgaagacttgatgaaacctgatgtcaccaaccttggctaaacacaaatgagagcttccctcaggctccctgaaacagctaggcccaaatcacaagtacagtcctttccaacacccctgaaattcatagtcagtagcagagaaaagcagatcccaattcatcccacaaacagatgcatagtatgggttttggaagtccctagcaagctgttattggtaagattaggttaaatgtcagtaataggatttggtttcagcattagtacctacatattgccagtgagaaactgggttggacctagtggtgttgtcgtgagtgccacctaaccaggaggccagagcggtttgaaaacatcctgaaaggaactcatacagcacaagagaaaactactaagcttgacatctgtgagtgactgagggagacaggaggaataccaggttattcatggaataaagtctttccatctttaaactgt

SEQ ID NO: 24563 - DNA, 2886 bp, Homo sapiens
  source 1..2886: mol_type = unassigned DNA
agaatctacctcttgaagattacaaatgagactgggaaaccctcttcaataagacctgtgtgatgatagattgtgtcctgagcccgcaggtcaggctgaaagagtcaacaaccagcaaagtgaagatctaggagtctgttccccttgaacctgtgtggacctgatcaaacctcgagggaaaggctgggagaacacatccctggtcagctgtaggaaagccagagagcatttgagaagaggctgaagcttgaattttgcaaacacacaagccctctgcatttccccagagagaaggtttttttctcgtcttcatttcctttgaaacacctggggtgaggaaaaacctctacattggccaagcagaagaaacagaatctatgactgaagaggatcggctaagagtggttcctcgcagcttaaagggaggcacttttcacactctgtcttaaaatcagaagttgaattcatgaacacatatgatttagatagaagtcatgggatgcagcagttcttcaacgaaaaccaggagatctgacacatcactgagagctgcgttgatcatccagaactggtaccgaggttacaaagctcgactgaaggccagacaacactatgccctcaccatcttccagtccatcgaatatgctgatgaacaaggccaaatgcagttatccaccttcttttccttcatgttggaaaactacacacatatacataaggaagagctagaattaagaaatcagtctcttgaaagcgaacaggacatgagggatagatgggattatgtggactcgatagatgtcccagactcctataatggtcctcggctacaatttcctctcacttgtacggatattgatttacttcttgaggccttcaaggaacaacagatacttcatgcccattatgtcttagaggtgctatttgaaaccaagaaagtcctgaagcaaatgccgaatttcactcacatacaaacttctccctccaaagaggtaacaatctgtggtgatttgcatgggaaactggatgatctttttttgatcttctacaagaatggtctcccctcagagaggaacccgtatgtttttaatggtgactttgtagatcgaggaaagaattccatagagatcctaatgatcctgtgtgtgagttttcttgtctaccccaatgacctgcacttgaacagagggaaccacgaagattttatgatgaatctgaggtatggcttcacgaaagaaattttgcataaatataagctacatggaaaaagaatcttacaaatcttggaagaattctatgcctggctcccaatcggtacaatcgttgacaatgaaatcctggtcatccatggtgggatatcagagaccacagacttgaatttactccaccgtgtagagaggaacaagatgaaatctgtgctgataccaccaacggaaacaaacagagaccatgacactgactcgaagcacaataaagtaggtgtgacttttaatgcacatggaagaatcaaaacaaatggatctcctactgaacacttaacagagcatgaatgggaacagattattgatattctgtggagtgatcccagaggcaaaaatggctgttttccaaatacgtgccgaggagggggctgctattttggaccagatgttacttccaagattcttaataaataccagttgaagatgctcatcaggtctcatgaatgtaagcccgaagggtatgaaatctgtcatgatgggaaggtggtgactatattttctgcttctaattattatgaagaaggcagcaatcgaggagcttacatcaaactatgttctggtacaactcctcgatttttccagtaccaagtaactaaagcaacgtgctttcagcctcttcgccaaagagtggatactatggaaaacagcgccatcaagatattaagagagagagtgatttcacgaaaaagtgaccttactcgtgctttccaacttcaagaccacagaaaatcaggaaaactttctgtgagccagtgggctttttgcatggagaacattttggggctgaacttaccatggagatccctcagttcgaatctggtaaacatagaccaaaatggaaacgttgaatacatgtccagcttccagaatatccgcattgaaaaacctgtacaagaggctcattctactctagttgaaactctgtacagatacagatctgacctggaaatcatatttaatgccattgacactgatcactcaggcctgatctccgtggaagaatttcgtgccatgtggaaactttttagttctcactacaatgttcacattgatgattcccaagtcaataagcttgccaacataatggacttgaacaaagatggaagcattgactttaatgagtttttaaaggctttctatgtagtgcatagatatgaagacttgatgaaacctgatgtcaccaaccttggctaaacacaaatgagagcttccctcaggctccctgaaacagctaggcccaaatcacaagtacagtcctttccaacacccctgaaattcatagtcagtagcagagaaaagcagatcccaattcatcccacaaacagatgcatagtatgggttttggaagtccctagcaagctgttattggtaagattaggttaaatgtcagtaataggatttggtttcagcattagtacctacatattgccagtgagaaactgggttggacctagtggtgttgtcgtgagtgccacctaaccaggaggccagagcggtttgaaaacatcctgaaaggaactcatacagcacaagagaaaactactaagcttgacatctgtgagtgactgagggagacaggaggaataccaggttattcatggaataaagtctttccatctttaaa

SEQ ID NO: 24564 - DNA, 2547 bp, Homo sapiens
  source 1..2547: mol_type = unassigned DNA
gaagattacaaatgagactgggaaaccctcttcaataagacctgtgtgatgatagattgtgtcctgagcccgcaggtcaggctgaaagagtcaacaaccagcaaagtgaagatctaggagtctgttccccttgaacctgtgtggacctgatcaaacctcgagggaaaggctgggagaacacatccctggtcagctgtaggaaagccagagagcatttgagaagaggctgaagcttgaattttgcaaacacacaagccctctgcatttccccagagagaaggtttttttctcgtcttcatttcctttgaaacacctggggtgaggaaaaacctctacattggccaagcagaagaaacagaatctatgactgaagaggatcggctaagagtggttcctcgcagcttaaagggaggcacttttcacactctgtcttaaaatcagaagttgaattcatgaacacatatgatttagatagaagtcatgggatgcagcagttcttcaacgaaaaccaggagatctgacacatcactgagagctgcgttgatcatccagaactggtaccgaggttacaaagctcgactgaaggccagacaacactatgccctcaccatcttccagtccatcgaatatgctgatgaacaaggccaaatgcagttatccaccttcttttccttcatgttggaaaactacacacatatacataaggaagagctagaattaagaaatcagtctcttgaaagcgaacaggacatgagggatagatgggattatgtggactcgatagatgtcccagactcctataatggtcctcggctacaatttcctctcacttgtacggatattgatttacttcttgaggccttcaaggaacaacagatacttcatgcccattatgtcttagaggtgctatttgaaaccaagaaagtcctgaagcaaatgccgaatttcactcacatacaaacttctccctccaaagaggtaacaatctgtggtgatttgcatgggaaactggatgatctttttttgatcttctacaagaatggtctcccctcagagaggaacccgtatgtttttaatggtgactttgtagatcgaggaaagaattccatagagatcctaatgatcctgtgtgtgagttttcttgtctaccccaatgacctgcacttgaacagagggaaccacgaagattttatgatgaatctgaggtatggcttcacgaaagaaattttgcataaatataagctacatggaaaaagaatcttacaaatcttggaagaattctatgcctggctcccaatcggtacaatcgttgacaatgaaatcctggtcatccatggtgggatatcagagaccacagacttgaatttactccaccgtgtagagaggaacaagatgaaatctgtgctgataccaccaacggaaacaaacagagaccatgacactgactcgaagcacaataaagtaggtgtgacttttaatgcacatggaagaatcaaaacaaatggatctcctactgaacacttaacagagcatgaatgggaacagagtggatactatggaaaacagcgccatcaagatattaagagagagagtgatttcacgaaaaagtgaccttactcgtgctttccaacttcaagaccacagaaaatcaggaaaactttctgtgagccagtgggctttttgcatggagaacattttggggctgaacttaccatggagatccctcagttcgaatctggtaaacatagaccaaaatggaaacgttgaatacatgtccagcttccagaatatccgcattgaaaaacctgtacaagaggctcattctactctagttgaaactctgtacagatacagatctgacctggaaatcatatttaatgccattgacactgatcactcaggcctgatctccgtggaagaatttcgtgccatgtggaaactttttagttctcactacaatgttcacattgatgattcccaagtcaataagcttgccaacataatggacttgaacaaagatggaagcattgactttaatgagtttttaaaggctttctatgtagtgcatagatatgaagacttgatgaaacctgatgtcaccaaccttggctaaacacaaatgagagcttccctcaggctccctgaaacagctaggcccaaatcacaagtacagtcctttccaacacccctgaaattcatagtcagtagcagagaaaagcagatcccaattcatcccacaaacagatgcatagtatgggttttggaagtccctagcaagctgttattggtaagattaggttaaatgtcagtaataggatttggtttcagcattagtacctacatattgccagtgagaaactgggttggacctagtggtgttgtcgtgagtgccacctaaccaggaggccagagcggtttgaaaacatcctgaaaggaactcatacagcacaagagaaaactactaagcttgacatctgtgagtgactgagggagacaggaggaataccaggttattcatggaataaagtctttccatctttaaactgt

SEQ ID NO: 24565 - DNA, 2162 bp, Homo sapiens
  source 1..2162: mol_type = unassigned DNA
attagaatctatgactgaagaggatcggctaagagtggttcctcgcagcttaaagggaggcacttttcacactctgtcttaaaatcagaagttgaattcatgaacacatatgatttagatagaagtcatgggatgcagcagttcttcaacgaaaaccaggagatctgacacatttatccaccttcttttccttcatgttggaaaactacacacatatacataaggaagagctagaattaagaaatcagtctcttgaaagcgaacaggacatgagggatagatgggattatgtggactcgatagatgtcccagactcctataatggtcctcggctacaatttcctctcacttgtacggatattgatttacttcttgaggccttcaaggaacaacagatacttcatgcccattatgtcttagaggtgctatttgaaaccaagaaagtcctgaagcaaatgccgaatttcactcacatacaaacttctccctccaaagaggtaacaatctgtggtgatttgcatgggaaactggatgatctttttttgatcttctacaagaatggtctcccctcagagaggaacccgtatgtttttaatggtgactttgtagatcgaggaaagaattccatagagatcctaatgatcctgtgtgtgagttttcttgtctaccccaatgacctgcacttgaacagagggaaccacgaagattttatgatgaatctgaggtatggcttcacgaaagaaattttgcataaatataagctacatggaaaaagaatcttacaaatcttggaagaattctatgcctggctcccaatcggtacaatcgttgacaatgaaatcctggtcatccatggtgggatatcagagaccacagacttgaatttactccaccgtgtagagaggaacaagatgaaatctgtgctgataccaccaacggaaacaaacagagaccatgacactgactcgaagcacaataaagtaggtgtgacttttaatgcacatggaagaatcaaaacaaatggatctcctactgaacacttaacagagcatgaatgggaacagattattgatattctgtggagtgatcccagaggcaaaaatggctgttttccaaatacgtgccgaggagggggctgctattttggaccagatgttacttccaagattcttaataaataccagttgaagatgctcatcaggtctcatgaatgtaagcccgaagggtatgaaatctgtcatgatgggaaggtggtgactatattttctgcttctaattattatgaagaaggcagcaatcgaggagcttacatcaaactatgttctggtacaactcctcgatttttccagtaccaagtaactaaagcaacgtgctttcagcctcttcgccaaagagtggatactatggaaaacagcgccatcaagatattaagagagagagtgatttcacgaaaaagtgaccttactcgtgctttccaacttcaagaccacagaaaatcaggaaaactttctgtgagccagtgggctttttgcatggagaacattttggggctgaacttaccatggagatccctcagttcgaatctggtaaacatagaccaaaatggaaacgttgaatacatgtccagcttccagaatatccgcattgaaaaacctgtacaagaggctcattctactctagttgaaactctgtacagatacagatctgacctggaaatcatatttaatgccattgacactgatcactcaggcctgatctccgtggaagaatttcgtgccatgtggaaactttttagttctcactacaatgttcacattgatgattcccaagtcaataagcttgccaacataatggacttgaacaaagatggaagcattgactttaatgagtttttaaaggctttctatgtagtgcatagatatgaagacttgatgaaacctgatgtcaccaaccttggctaaacacaaatgagagcttccctcaggctccctgaaacagctaggcccaaatcacaagtacagtcctttccaacacccctgaaattcatagtcagtagcagagaaaagcagatcccaattcatcccacaaacagatgcatagtatgggttttggaagtccctagcaagctgttattggtaagattaggttaaatgtcagtaata

SEQ ID NO: 24566 - DNA, 3414 bp, Homo sapiens
  source 1..3414: mol_type = unassigned DNA
gggggcctgatctgactgacgtcagggggtgcctactccttcgaggcaagaagcctgaactttccttcctgtcactgtgaatacttggccagggctgtgaatgtcaccattgcttttcaggaagaagacatggcagactagggctgcaccttctttatgggctctgtaggtctgaaagaaatcagatcagcctgggatccctcagccaactctgaagacaggatggggatcacgcctgcatgttaaagagatttctgccttgttgtgtctcatggtaaataaaaaacccagcaaagaagcaaacagctcactgtcctctggatctgctgcgtcctgcaggagcattgcgcttaaactatgggaagcggcacctccacccaacatcattttgctttccagaatgcagagagagccttcaaggcagcagccctgatccagagatggtaccggcgctacgtggcccgcctggagatgaggcggcgttgcacctggagcatcttccagtctatagaatatgctgggcagcaagaccaagtcaagctccatgacttcttcagctatctcatggatcacttcatccccagcagccacaacgacagggacttcctgacccgcatattcactgaggacagattcgcccaggactccgagatgaagaaatgcagtgactatgaatccatagaggtacccgacagttacacggggccacgcctctccttcccactcctgcctgaccatgcaactgccctggtagaagcattcagactgaaacaacagctccatgctcgctacgtcttgaaccttttgtatgaaaccaagaaacatctggtacagctgccaaacatcaaccgggtctcaacctgttacagtgaggagatcacagtgtgtggagacttacatggccaattggatgacttaatctttatattttataagaatggcctcccgtcgccagaacggtcatatgtgttcaacggtgactttgtggatcgaggcaaggattcagtagagatcctgatgattctttttgccttcatgctggtttaccccaaagagttccatcttaacagaggaaaccatgaggaccatatggtgaacttacgatatggcttcaccaaggaagtgatgaataaatacaaggtacacgggaaggaaatactaagaaccctgcaagatgttttctgttggcttccactggccactctgatagatgagaaagttctaattcttcatggtggggtgtcagacataactgatctggagcttttggacaaaatagagaggagcaagatagtttccaccatgaggtgcaaaacgagacagaagagtgagaagcagatggaggagaagagaagagccaaccagaagagctctgcacagggacccatcccatggtttctccccgaaagccgctctcttccctcttcgccccttcggcttggctcctacaaggcccagaaaaccagcaggtcctccagcatcccctgcagcggttccctggacgggcgggagctctcccggcaggtgcggagctccgtggaactggagctagagcggtgccggcagcaagcaggcctcctggtgaccggagagaaagaggagccctcccgctcagcctcagaagcagactctgaagccggagagctgcggaagcccactcaggaggagtggaggcaggttgtagatatcctgtggagtgatcccatggctcaagagggctgcaaggccaacactattcgaggaggaggctgttattttgggcctgatgtgacacaacagttgctacaaaaatacaacatgcaattcctgatccgttcacatgaatgcaaacctgaaggctatgaattctgtcacaaccgcaaggtattaacaatcttttctgcctccaactactatgaagttggcagcaacagaggggcctatgtcaaactggggccagccctgaccccacatattgtgcagtatcaagctaacaaggtgacccacacactcaccatgaggcaaaggattagcagagtggaggagtcggctctgagagctctgagggagaagctgtttgctcattcttcagatcttctcagtgaatttaagaagcatgatgcagataaagtcggtttaatcaccttgagtgactgggcagcagcggtggagtctgtgttgcacctaggactgccatggcggatgctgaggccacagctggtgaacagctcagcagacaacatgctggagtacaagtcttggctgaagaacttggccaaggaacaactgagtcgcgagaacatacaatcaagtttgctggaaacattgtatcgaaaccgatccaacctagagaccatttttaggatcatagacagtgatcattcagggttcatctcactggacgagttcaggcagacctggaagctgttcagctctcacatgaatatcgacattacagatgactgcatctgtgaccttgctcggagcattgatttcaacaaagatggccacattgatatcaatgagttcctggaggccttccgccttgtggagaaatcctgcccagagggcgatgcctcagaatgcccacaagctacaaatgctaaagacagtggctgcagcagtccaggtgcacactaagaacagcctggtcttcatcacccaaagtgcctcataggcaatgctcagcttctcactagactatctcccttattctccatgtgaaactttatgctgaaaatttacctatccatatgcatcagaatcacctgtgtatttcagtgtggaggggtgggttggggtgttgtgtatgtatgtgttttaagtatatgagtgccccaaccccacctcacaatcttcacaaagtagaacttaggtatagtgttttcaaattctaaagtccacttcagttaagaaccactgacaatgtaactctctcattgttttcattttatacgtttttttgagatggagtttctctcttgttgcccaggctggagtgcattggcgcgatctcggctcaccgcaaagtccgcctcccaggcgattctcctgcctcagcctcctgagtagctgggattacaggcatgcaccaccacaccaggctaattttgtatttttagtagacacagggtttctccatgttggtcaggctggtcttgaactcccaacctcaggtgatccaccctcctcagcctcccaaagtgctgggattacaggcatgagccaccgcacccagcctattttatactttttatttattgtctttaacaatgtctattggtaaaggaaagttatttttaaaaattgtattgtaattccatgacccaagcatatggattttcttcattatttactttttcttacttgttactgtagtgtttatataattttatgttctacttttaaaaaaataaattaatatctaattgtaaa

SEQ ID NO: 24567 - DNA, 2154 bp, Homo sapiens
  source 1..2154: mol_type = unassigned DNA
gggggcctgatctgactgacgtcagggggtgcctactccttcgaggcaagaagcctgaactttccttcctgtcactgtgaatacttggccagggctgtgaatgtcaccattgcttttcaggaagaagacatggcagactagggctgcaccttctttatgggctctgtaggtctgaaagaaatcagatcagcctgggatccctcagccaactctgaagacaggatggggatcacgcctgcatgttaaagagatttctgccttgttgtgtctcatggtaaataaaaaacccagcaaagaagcaaacagctcactgtcctctggatctgctgcgtcctgcaggagcattgcgcttaaactatgggaagcggcacctccacccaacatcattttgctttccagaatgcagagagagccttcaaggcagcagccctgatccagagatggtaccggcgctacgtggcccgcctggagatgaggcggcgttgcacctggagcatcttccagtctatagaatatgctgggcagcaagaccaagtcaagctccatgacttcttcagctatctcatggatcacttcatccccagcagccacaacgacagggacttcctgacccgcatattcactgaggacagattcgcccaggactccgagatgaagaaatgcagtgactatgaatccatagaggtacccgacagttacacggggccacgcctctccttcccactcctgcctgaccatgcaactgccctggtagaagcattcagactgaaacaacagctccatgctcgctacgtcttgaaccttttgtatgaaaccaagaaacatctggtacagctgccaaacatcaaccgggtctcaacctgttacagtgaggagatcacagtgtgtggagacttacatggccaattggatgacttaatctttatattttataagaatggcctcccgtcgccagaacggtcatatgtgttcaacggtgactttgtggatcgaggcaaggattcagtagagatcctgatgattctttttgccttcatgctggtttaccccaaagagttccatcttaacagaggaaaccatgaggaccatatggtgaacttacgatatggcttcaccaaggaagtgatgaataaatacaaggtacacgggaaggaaatactaagaaccctgcaagatgttttctgttggcttccactggccactctgatagatgagaaagttctaattcttcatggtggggtgtcagacataactgatctggagcttttggacaaaatagagaggagcaagatagtttccaccatgaggtgcaaaacgagacagaagagtgagaagcagatggaggagaagagaagagccaaccagaagagctctgcacagggacccatcccatggtttctccccgaaagccgctctcttccctcttcgccccttcggcttggctcctacaaggcccagaaaaccagcaggtcctccagcatcccctgcagcggttccctggacgggcgggagctctcccggcaggtgcggagctccgtggaactggagctagagcggtgccggcagcaagcaggcctcctggtgaccggagagaaagaggagccctcccgctcagcctcagaagcagactctgaagccggagagctgcggaagcccactcaggaggagtggaggcaggttgtagatatcctgtggagtgatcccatggctcaagagggctgcaaggccaacactattcgaggaggaggctgttattttgggcctgatgtgacacaacagttgctacaaaaatacaacatgcaattcctgatccgttcacatgaatgcaaacctgaaggctatgaattctgtcacaaccgcaaggtattaacaatcttttctgcctccaactactatgaagttggcagcaacagaggggcctatgtcaaactggggccagccctgaccccacatattgtgcagtatcaagctaacaaggtgacccacacactcaccatgaggcaaaggattagcagagtggaggagtcggctctgagagctctgagggagaagctgtttgctcattcttcagatcttctcagtgaatttaagaagcatgatgcagataaagtcggcctagcttccagccaactctgctactatcaacaaaaatag

SEQ ID NO: 24568 - DNA, 2606 bp, Homo sapiens
  source 1..2606: mol_type = unassigned DNA
aaaaggagccgagcggcttctgctcaatggcggaaaagccgccggtgctctgacggcctcgttcccctagcagttgcgggggagtttcctgccggcgcggctggagtctctgattctcagggttcggtggttggaagatgctccagagagacgaggctgcggcggaggaggtggcggcggccgaatcggcaacggcgctagggtggagagaaggcggcatcggcggcggcggcggcgtgaggggccgggcggtgtaaacagccccggaggcggcggtcgagaccccgagggggaagcggcggctgagtcagggtcgcgcctccgttggaaacttgggctgagtaccgcggcgggcgcgagcgaggcgccctagacatcttctccctcccttgcctcagatttattgctaaacatgggtgcatttttggataaacccaaaactgaaaaacataatgctcatggtgctgggaatggtttacgttatggcctgagcagcatgcaaggatggagagtggaaatggaagatgcacacacagctgttgtaggtattcctcacggcttggaagactggtcattttttgcagtttatgatggtcatgctggatcccgagtggcaaattactgctcaacacatttattagaacacatcactactaacgaagactttagggcagctggaaaatcaggatctgctcttgagctttcagtggaaaatgttaagaatggtatcagaactggatttttgaaaattgatgaatacatgcgtaacttttcagacctcagaaacgggatggacaggagtggttcaactgcagtgggagttatgatttcacctaagcatatctactttatcaactgtggtgattcacgtgctgttctgtataggaatggacaagtctgcttttctacccaggatcacaaaccttgcaatccaagggaaaaggagcgaatccaaaatgcaggaggcagcgtgatgatacaacgtgttaatggttcattagcagtatctcgtgctctgggggactatgattacaagtgtgttgatggcaagggcccaacagaacaacttgtttctccagagcctgaggtttatgaaattttaagagcagaagaggatgaatttatcatcttggcttgtgatgggatctgggatgttatgagtaatgaggagctctgtgaatatgttaaatctaggcttgaggtatctgatgacctggaaaatgtgtgcaattgggtagtggacacttgtttacacaagggaagtcgagataacatgagtattgtactagtttgcttttcaaatgctcccaaggtctcagatgaagcggtgaaaaaagattcagagttggataagcacttggaatcacgggttgaagagattatggagaagtctggcgaggaaggaatgcctgatcttgcccatgtcatgcgcatcttgtctgcagaaaatatcccaaatttgcctcctgggggaggtcttgctggcaagcgtaatgttattgaagctgtttatagtagactgaatccacatagagaaagtgatggggcctccgatgaagcagaggaaagtggatcacagggaaaattggtggaagctctcaggcaaatgagaattaatcataggggaaactaccgacaacttctggaggagatgctgactagttacaggctagctaaagtagagggagaagaaagccctgctgaaccagctgccacagctacttcttcgaacagtgatgctggaaacccagtgacaatgcaggaaagccatactgaatcagaaagtggtcttgctgaattagacagctctaatgaagatgcagggacaaagatgagtggtgaaaaaatatgactttcctttttggtaatatttttgtgatctttgatggtttttaacctaggaagtgtaatgtatgcatttatataactgttttgttatttgaatcttggaaaactagttttattatattcagatagccttgttttttaaaaaggcctttgcatacacctttatgagatagtgtaaaattgactatttatagtactatggatttaatgaaattatatgtcatttcacattgtatgccagaaattaggctaccaattatgaattaaagtcagtagttaaattaatactagatagaattagaaattttgattagagagattatgctatattatggaaaaacttgttaatgtagaattatactgcttcatattattttacctattagtacactcatagttagctttgtaataaatttatgttttctttaataattttagttcttcaaagaatggctgatgctggcctgtaatttttctttcaaggatgataatttgtgtgttgtttgatttgtttatattttacatctctgtagttttatttttagaagttgtgagatattggatgtgtggctatttttcctttctctgtattctttatgaaacataacttttgaaaaacctatgtattattcatacagctttggtttgtatattctgtatagcctaactacacacatcaaaatgtatgtcaaccaagtgtttagaatgaaattataagtgtttaagtccaaataaagcatgtgatgtggaataatcta

SEQ ID NO: 24569 - DNA, 1713 bp, Homo sapiens
  source 1..1713: mol_type = unassigned DNA
aaaagccgccggtgctctgacggcctcgttcccctagcagttgcgggggagtttcctgccggcgcggctggagtctctgattctcagggttcggtggttggaagatgctccagagagacgaggctgcggcggaggaggtggcggcggccgaatcggcaacggcgctagggtggagagaaggcggcatcggcggcggcggcggcgtgaggggccgggcggtgtaaacagccccggaggcggcggtcgagaccccgagggggaagcggcggctgagtcagggtcgcgcctccgttggaaacttgggctgagtaccgcggcgggcgcgagcgaggcgccctagacatcttctccctcccttgcctcagggaagtcgagataacatgagtattgtactagtttgcttttcaaatgctcccaaggtctcagatgaagcggtgaaaaaagattcagagttggataagcacttggaatcacgggttgaagagattatggagaagtctggcgaggaaggaatgcctgatcttgcccatgtcatgcgcatcttgtctgcagaaaatatcccaaatttgcctcctgggggaggtcttgctggcaagcgtaatgttattgaagctgtttatagtagactgaatccacatagagaaagtgatggggcctccgatgaagcagaggaaagtggatcacagggaaaattggtggaagctctcaggcaaatgagaattaatcataggggaaactaccgacaacttctggaggagatgctgactagttacaggctagctaaagtagagggagaagaaagccctgctgaaccagctgccacagctacttcttcgaacagtgatgctggaaacccagtgacaatgcaggaaagccatactgaatcagaaagtggtcttgctgaattagacagctctaatgaagatgcagggacaaagatgagtggtgaaaaaatatgactttcctttttggtaatatttttgtgatctttgatggtttttaacctaggaagtgtaatgtatgcatttatataactgttttgttatttgaatcttggaaaactagttttattatattcagatagccttgttttttaaaaaggcctttgcatacacctttatgagatagtgtaaaattgactatttatagtactatggatttaatgaaattatatgtcatttcacattgtatgccagaaattaggctaccaattatgaattaaagtcagtagttaaattaatactagatagaattagaaattttgattagagagattatgctatattatggaaaaacttgttaatgtagaattatactgcttcatattattttacctattagtacactcatagttagctttgtaataaatttatgttttctttaataattttagttcttcaaagaatggctgatgctggcctgtaatttttctttcaaggatgataatttgtgtgttgtttgatttgtttatattttacatctctgtagttttatttttagaagttgtgagatattggatgtgtggctatttttcctttctctgtattctttatgaaacataacttttgaaaaacctatgtattattcatacagctttggtttgtatattctgtatagcctaactacacacatcaaaatgtatgtcaaccaagtgtttagaatgaaattataagtgtttaagtccaaataaagcatgtgatgtggaataatcta

SEQ ID NO: 24570 - DNA, 3877 bp, Homo sapiens
  source 1..3877: mol_type = unassigned DNA
aaaaggagccgagcggcttctgctcaatggcggaaaagccgccggtgctctgacggcctcgttcccctagcagttgcgggggagtttcctgccggcgcggctggagtctctgattctcagggttcggtggttggaagatgctccagagagacgaggctgcggcggaggaggtggcggcggccgaatcggcaacggcgctagggtggagagaaggcggcatcggcggcggcggcggcgtgaggggccgggcggtgtaaacagccccggaggcggcggtcgagaccccgagggggaagcggcggctgagtcagggtcgcgcctccgttggaaacttgggctgagtaccgcggcgggcgcgagcgaggcgccctagacatcttctccctcccttgcctcagatttattgctaaacatgggtgcatttttggataaacccaaaactgaaaaacataatgctcatggtgctgggaatggtttacgttatggcctgagcagcatgcaaggatggagagtggaaatggaagatgcacacacagctgttgtaggtattcctcacggcttggaagactggtcattttttgcagtttatgatggtcatgctggatcccgagtggcaaattactgctcaacacatttattagaacacatcactactaacgaagactttagggcagctggaaaatcaggatctgctcttgagctttcagtggaaaatgttaagaatggtatcagaactggatttttgaaaattgatgaatacatgcgtaacttttcagacctcagaaacgggatggacaggagtggttcaactgcagtgggagttatgatttcacctaagcatatctactttatcaactgtggtgattcacgtgctgttctgtataggaatggacaagtctgcttttctacccaggatcacaaaccttgcaatccaagggaaaaggagcgaatccaaaatgcaggaggcagcgtgatgatacaacgtgttaatggttcattagcagtatctcgtgctctgggggactatgattacaagtgtgttgatggcaagggcccaacagaacaacttgtttctccagagcctgaggtttatgaaattttaagagcagaagaggatgaatttatcatcttggcttgtgatgggatctgggatgttatgagtaatgaggagctctgtgaatatgttaaatctaggcttgaggtatctgatgacctggaaaatgtgtgcaattgggtagtggacacttgtttacacaagggaagtcgagataacatgagtattgtactagtttgcttttcaaatgctcccaaggtctcagatgaagcggtgaaaaaagattcagagttggataagcacttggaatcacgggttgaagagattatggagaagtctggcgaggaaggaatgcctgatcttgcccatgtcatgcgcatcttgtctgcagaaaatatcccaaatttgcctcctgggggaggtcttgctggcaagcgtaatgttattgaagctgtttatagtagactgaatccacatagagaaagtgatgggggtgctggagatctagaagacccatggtagccttaaaaaccttctaaaatgcttttgattctgaaaattgggggaaaaaacttttaatcacaattttcttcaatacaaggggaaaatattcttgcggattcccaacgttttgtgatatgagcagaaaatcattagcatttcccatcatttgttcatatttgtgttttctgacagttgccacttgtagcattgcctgtactacagtattttttgccaacctcaggcatactcgttacatctgtattgaactttcggccctagaaaccagtggagttatttcaccacaaatcaacaatgtgcctgaggtgcatgggaaatatagttagctatactctgaaaatacattatgttttttttctttaaacaaaacacacaacatgtaagcatgtaagagtaaagaattgtatgatatgttccttttttcagttcaccaagttggaagccttttgcagctctgtggcttggaatttcatttgagcaatttctataggatatgtatttattattgattgttatttaatttttttccaattttacctgtattaccaaactgggttctccaataatgtccaaattgtaatgttgccttgcttcaagataaagtgtatttgggaataatattataaacccttacaaattttatgcatgtatctactgcatccttcaactctcactagaaaatcttttgaaaccaaatggattaatttatggctatttataatttgctttgacatctcactgttggaaattttttaaagatgagatttgcctttataatgtaaattgtgatttttgttttacatgtgggtttctatagttttaattttttcagcttttaagatacgagttttgtgtaatttggtatttttaatcatttatgttattttaaaagctcagaatatcacattgaaattactataaatacatttaaaattatctattttagatctaaggaaatactacagagatattttcatgggttcagtaacttttcattttataacattgggcacggtacagagtgattgtcacataaggtacttgaagatttattagtttaattctatttttacagtaaccttgaattcttctgagttttgcatgtattaaattcaattaatgctgaacatgaagagtaaagtatttatctgaaagaagtttctgggttaggagaagtaatgaatgtatccatttgtacatggtttacatgttgtggatgctttgtaaacattttcctgtatgtttaaattgtgtttcagcaggatgtaattgcccttgtgtgtagttaaaatgagtcatcatctggtcctttgtgaaatggaattcatggtattttctgtaacgttttcctgaagctgtttctggagagccacacatttaaatacagacagctttcctgatcatttgatttattgtgcacctgatttttggtctaaaaggaattattgccacaatatattttatttattctttagattttagccttgtaagttaaagtgctttacatgatgatgtgaaaagctgtttgtccctttactgggtttggggggttgttaaaagatagggaatgaagaatgcaaaatggtttatcgttcaaactgtccactctgatccaaccctgtactgatagtacttcccagtatgatattgtgatgtttcatacaatgcagtgaacataaccaacttgttacctaaataaagaattgataaaaacagtgtgacatattactatttggtatgattcagtttttaatgttattttaaacttcttatatggttggcatatttctgaaaatttaattccaaagaggaattaaccaaactgtacaggacaatattaaccccttctgtactctagaaatatttatactccttttaaaaaaacctgcctttggccgggtgcattggctcacacctgtaatcccagcactttgggaggccaaggcgggtggatcacgaggtcaagagatcgtgaccatcctggccaacacggtgaaaccctgcctctactaaaaatacaaagattagctgggcatggtggtgcttgcctgtaatcccagctgcttgggaggctgaggcagaagaattgcttgaacccaggaggcggaggttgcagtgagctaagatcgcgccactgcactccagcctggcgacagagcgagactccgtctcaaaaaaaaaaaaaaagaaaaaaaaaaacttttccggcagggggcagggtgggggttactggtgcttgaaacagaaataatgtatgagttagtaaaagaaaaacccatattcagtgttgactcatctgaa

SEQ ID NO: 24571 - DNA, 3025 bp, Homo sapiens
  source 1..3025: mol_type = unassigned DNA
aaaaggagccgagcggcttctgctcaatggcggaaaagccgccggtgctctgacggcctcgttcccctagcagttgcgggggagtttcctgccggcgcggctggagtctctgattctcagggttcggtggttggaagatgctccagagagacgaggctgcggcggaggaggtggcggcggccgaatcggcaacggcgctagggtggagagaaggcggcatcggcggcggcggcggcgtgaggggccgggcggtgtaaacagccccggaggcggcggtcgagaccccgagggggaagcggcggctgagtcagggtcgcgcctccgttggaaacttgggctgagtaccgcggcgggcgcgagcgaggcgccctagacatcttctccctcccttgcctcagatttattgctaaacatgggtgcatttttggataaacccaaaactgaaaaacataatgctcatggtgctgggaatggtttacgttatggcctgagcagcatgcaaggatggagagtggaaatggaagatgcacacacagctgttgtaggtattcctcacggcttggaagactggtcattttttgcagtttatgatggtcatgctggatcccgagtggcaaattactgctcaacacatttattagaacacatcactactaacgaagactttagggcagctggaaaatcaggatctgctcttgagctttcagtggaaaatgttaagaatggtatcagaactggatttttgaaaattgatgaatacatgcgtaacttttcagacctcagaaacgggatggacaggagtggttcaactgcagtgggagttatgatttcacctaagcatatctactttatcaactgtggtgattcacgtgctgttctgtataggaatggacaagtctgcttttctacccaggatcacaaaccttgcaatccaagggaaaaggagcgaatccaaaatgcaggaggcagcgtgatgatacaacgtgttaatggttcattagcagtatctcgtgctctgggggactatgattacaagtgtgttgatggcaagggcccaacagaacaacttgtttctccagagcctgaggtttatgaaattttaagagcagaagaggatgaatttatcatcttggcttgtgatgggatctgggatgttatgagtaatgaggagctctgtgaatatgttaaatctaggcttgaggtatctgatgacctggaaaatgtgtgcaattgggtagtggacacttgtttacacaagggaagtcgagataacatgagtattgtactagtttgcttttcaaatgctcccaaggtctcagatgaagcggtgaaaaaagattcagagttggataagcacttggaatcacgggttgaagagattatggagaagtctggcgaggaaggaatgcctgatcttgcccatgtcatgcgcatcttgtctgcagaaaatatcccaaatttgcctcctgggggaggtcttgctggcaagcgtaatgttattgaagctgtttatagtagactgaatccacatagagaaagtgatgggcagaaatgatgaagaaactgttctgatggcctgcttttctgtccttttcctactgctttaaacattgattttcttttgtactaaatcatatagccaaatattgtttaagtaagtcagttttaggaaatgcttgtgttgctgttgaattataaaagctgagtaaatttcagattaaactttaaatgactgtgaaataagacataaactagttaatggtaatttgcttaaaatgacttgagattattattggaagtttttattaattgatacaggtaagaattgatatttaataaaatgttctcatgcttagactatattacttttcggtagagaaattagtattttgctgtaatgtgttatgaaatacatgtgatatcctagtttgtctactgacactggggtcttgaatcttaaaaaaaggcctccgatgaagcagaggaaagtggatcacagggaaaattggtggaagctctcaggcaaatgagaattaatcataggggaaactaccgacaacttctggaggagatgctgactagttacaggctagctaaagtagagggagaagaaagccctgctgaaccagctgccacagctacttcttcgaacagtgatgctggaaacccagtgacaatgcaggaaagccatactgaatcagaaagtggtcttgctgaattagacagctctaatgaagatgcagggacaaagatgagtggtgaaaaaatatgactttcctttttggtaatatttttgtgatctttgatggtttttaacctaggaagtgtaatgtatgcatttatataactgttttgttatttgaatcttggaaaactagttttattatattcagatagccttgttttttaaaaaggcctttgcatacacctttatgagatagtgtaaaattgactatttatagtactatggatttaatgaaattatatgtcatttcacattgtatgccagaaattaggctaccaattatgaattaaagtcagtagttaaattaatactagatagaattagaaattttgattagagagattatgctatattatggaaaaacttgttaatgtagaattatactgcttcatattattttacctattagtacactcatagttagctttgtaataaatttatgttttctttaataattttagttcttcaaagaatggctgatgctggcctgtaatttttctttcaaggatgataatttgtgtgttgtttgatttgtttatattttacatctctgtagttttatttttagaagttgtgagatattggatgtgtggctatttttcctttctctgtattctttatgaaacataacttttgaaaaacctatgtattattcatacagctttggtttgtatattctgtatagcctaactacacacatcaaaatgtatgtcaaccaagtgtttagaatgaaattataagtgtttaagtccaaataaagcatgtgatgtggaataatct

SEQ ID NO: 24572 - DNA, 1497 bp, Homo sapiens
  source 1..1497: mol_type = unassigned DNA
gcggggagggggttgcaaaaggagccgagcggcttctgctcaatggcggaaaagccgccggtgctctgacggcctcgttcccctagcagttgcgggggagtttcctgccggcgcggctggagtctctgattctcagggttcggtggttggaagatgctccagagagacgaggctgcggcggaggaggtggcggcggccgaatcggcaacggcgctagggtggagagaaggcggcatcggcggcggcggcggcgtgaggggccgggcggtgtaaacagccccggaggcggcggtcgagaccccgagggggaagcggcggctgagtcagggtcgcgcctccgttggaaacttgggctgagtaccgcggcgggcgcgagcgaggcgccctagacatcttctccctcccttgcctcagatttattgctaaacatgggtgcatttttggataaacccaaaactgaaaaacataatgctcatggtgctgggaatggtttacgttatggcctgagcagcatgcaaggatggagagtggaaatggaagatgcacacacagctgttgtaggtattcctcacggcttggaagactggtcattttttgcagtttatgatggtcatgctggatcccgagtggcaaattactgctcaacacatttattagaacacatcactactaacgaagactttagggcagctggaaaatcaggatctgctcttgagctttcagtggaaaatgttaagaatggtatcagaactggatttttgaaaattgatgaatacatgcgtaacttttcagacctcagaaacgggatggacaggagtggttcaactgcagtgggagttatgatttcacctaagcatatctactttatcaactgtggtgattcacgtgctgttctgtataggaatggacaagtctgcttttctacccaggatcacaaaccttgcaatccaagggaaaaggagcgaatccaaaatgcaggaggcagcgtgatgatacaacgtgttaatggttcattagcagtatctcgtgctctgggggactatgattacaagtgtgttgatggcaagggcccaacagaacaacttgtttctccagagcctgaggtttatgaaattttaagagcagaagaggatgaatttatcatcttggcttgtgatgggatctgggatgttatgagtaatgaggagctctgtgaatatgttaaatctaggcttgaggtatctgatgacctggaaaatgtgtgcaattgggtagtggacacttgtttacacaagggaagtcgagataacatgagtattgtactagtttgcttttcaaatgctcccaaggtctcagatgaagcggtgaaaaaagattcagagttggataagcacttggaatcacgggttgaaggtaagacaaatgctttttaaaaatatagacaggccaggcacggtagctcatgcctgtaatcctagcacttttgtcgcctgggcgacacaccaaggctctgtctca

SEQ ID NO: 24573 - DNA, 2084 bp, Homo sapiens
  source 1..2084: mol_type = unassigned DNA
ggctgaagcaaaacaaccgcctctcccctgcccacttcttgtcctcgtctgagtcgtcccttcccgtctccacgccgaagagaggcgtttagatcctccaatgagggcctaggaggactttcttagccaatcagtagccaagcccctgcaattccgggtgggaccaggcgtccacacctatagctggactgctcgttggtcccttatggcgcttcttttacgcgaggcttagaggtcaaatacaagggggcacggtcctcacagaacggaaaggatccgtacagactctccgggtttgaccgttttctaggacgaaccaatcgctttccagatacttccccgccttttgcgcgttcatttgaaaaaagccggtgtgacggacttggaaattggctcagtgactgacccgcaagaaagccagtgactgggggttcggatcacgagttggaccaataagaaaagacaatcgctggggccggggctttgctaggaggagcgcaggtgggcgttatttgattgacggagggctctacttatggctggtagcgggggctggtccctgacgttcgggaggtaggacctagcggaggcggggccgaataaagtaaatgttgcgggggagtttcctgccggcgcggctggagtctctgattctcagggttcggtggttggaagatgctccagagagacgaggctgcggcggaggaggtggcggcggccgaatcggcaacggcgctagggtggagagaaggcggcatcggcggcggcggcggcgtgaggggccgggcggtgtaaacagccccggaggcggcggtcgagaccccgagggggaagcggcggctgagtcagggtcgcgcctccgttggaaacttgggctgagtaccgcggcgggcgcgagcgaggcgccctagacatcttctccctcccttgcctcagatttattgctaaacatgggtgcatttttggataaacccaaaactgaaaaacataatgctcatggtgctgggaatggtttacgttatggcctgagcagcatgcaaggatggagagtggaaatggaagatgcacacacagctgttgtaggtattcctcacggcttggaagactggtcattttttgcagtttatgatggtcatgctggatcccgagtggcaaattactgctcaacacatttattagaacacatcactactaacgaagactttagggcagctggaaaatcaggatctgctcttgagctttcagtggaaaatgttaagaatggtatcagaactggatttttgaaaattgatgaatacatgcgtaacttttcagacctcagaaacgggatggacaggagtggttcaactgcagtgggagttatgatttcacctaagcatatctactttatcaactgtggtgattcacgtgctgttctgtataggaatggacaagtctgcttttctacccaggatcacaaaccttgcaatccaagggaaaaggagcgaatccaaaatgcaggaggcagcgtgatgatacaacgtgttaatggttcattagcagtatctcgtgctctgggggactatgattacaagtgtgttgatggcaagggcccaacagaacaacttgtttctccagagcctgaggtttatgaaattttaagagcagaagaggatgaatttatcatcttggcttgtgatgggatctgggatgttatgagtaatgaggagctctgtgaatatgttaaatctaggcttgaggtatctgatgacctggaaaatgtgtgcaattgggtagtggacacttgtttacacaagggaagtcgagataacatgagtattgtactagtttgcttttcaaatgctcccaaggtctcagatgaagcggtgaaaaaagattcagagttggataagcacttggaatcacgggttgaagagattatggagaagtctggcgaggaaggaatgcctgatcttgcccatgtcatgcgcatcttgtctgcagaaaatatcccaaatttgcctcctgggggaggtcttgctggcaagcgtaatgttattgaagctgtttatagtagactgaatccacatagagaaagtgatggg

SEQ ID NO: 24574 - DNA, 1863 bp, Homo sapiens
  source 1..1863: mol_type = unassigned DNA
gggccggttcctggggtggcccagagcaagggcaagtttcgcccgggacccgcccagctggccgggagccagtagcagggaagggccggctggcgcgagcaccgcccacgcggagccatgggggcggggcctgggcgggggcggggccgcggccgagggcggggcagggaggcagcatgctaaaccgggtgcgctcggccgtggcgcacctggtgagctccgggggcgctccgcctccgcgccccaaatccccggacctgcccaacgccgcctcggcgccgcccgccgccgctccagaagcgcccaggagccctcccgcgaaggctgggagcgggagcgcgacgcccgcgaaggctgttgaggctcgagcgagcttctccagaccgacctttctgcagctgagccccggggggctgcgacgcgccgatgaccacgcgggccgggctgtgcaaagccccccggacacgggccgccgcctgccctggagcacaggctacgccgaggtcatcaatgctggcaagagtcggcacaatgaggaccaggcttgctgtgaagtggtgtatgtggaaggtcggaggagtgttacaggagtacctagggagcctagccgaggccagggactctgcttctactactggggcctatttgatgggcatgcagggggcggagctgctgaaatggcctcacggctcctgcatcgccatatccgagagcagctaaaggacctggtagagatacttcaggacccttcgccaccacccctctgcctcccaaccactccggggaccccagattcctccgatccctctcacttgcttggccctcagtcctgctggtcttcacagaaggaagtgagccacgagagcctggtagtgggggccgttgagaatgccttccagctcatggatgagcagatggcccgggagcggcgtggccaccaagtggaggggggctgctgtgcactggttgtgatctacctgctaggcaaggtgtacgtggccaatgcaggcgatagcagggccatcattgtccggaatggtgaaatcattccaatgtcccgggagtttaccccggagactgagcgccagcgtcttcagctgcttggcttcctgaaaccagagctgctaggcagtgaattcacccaccttgagttcccccgcagagttctgcccaaggagctggggcagaggatgttgtaccgggaccagaacatgaccggctgggcctacaaaaagatcgagctggaggatctcaggtttcctctggtctgtggggagggcaaaaaggctcgggtgatggccaccattggggtgacccgaggcttgggagaccacagccttaaggtctgcagttccaccctgcccatcaagccctttctctcctgcttccctgaggtacgagtgtatgacctgacacaatatgagcactgcccagatgatgtgctagtcctgggaacagatggcctgtgggatgtcactactgactgtgaggtagctgccactgtggacagggtgctgtcggcctatgagcctaatgaccacagcaggtatacagctctggcccaagctctggtcctgggggcccggggtaccccccgagaccgtggctggcgtctccccaacaacaagctgggttccggggatgacatctctgtcttcgtcatccccctgggagggccaggcagttactcctgaggggctgaacaccatccctcccactagcctctccatacttactcctctcacagcccaaattctgaagttgtctccctgacccttctttagtggcaacttaactgaagaagggatgtccgctatatccaaaattacagctattggcaaataaacgagatggataaaggtg

SEQ ID NO: 24575 - DNA, 1060 bp, Homo sapiens
  source 1..1060: mol_type = unassigned DNA
atggcctcacggctcctgcatcgccatatccgagagcagctaaaggacctgaaggaagtgagccacgagagcctggtagtgggggccgttgagaatgccttccagctcatggatgagcagatggcccgggagcggcgtggccaccaagtggaggggggctgctgtgcactggttgtgatctacctgctaggcaaggtgtacgtggccaatgcaggcgatagcagggccatcattgtccggaatggtgaaatcattccaatgtcccgggagtttaccccggagactgagcgccagcgtcttcagctgcttggcttcctgaaaccagagctgctaggcagtgaattcacccaccttgagttcccccgcagagttctgcccaaggagctggggcagaggatgttgtaccgggaccagaacatgaccggctgggcctacaaaaagatcgagctggaggatctcaggtttcctctggtctgtggggagggcaaaaaggctcgggtgatggccaccattggggtgacccgaggcttgggagaccacagccttaaggtctgcagttccaccctgcccatcaagccctttctctcctgcttccctgaggtacgagtgtatgacctgacacaatatgagcactgcccagatgatgtgctagtcctgggaacagatggcctgtgggatgtcactactgactgtgaggtagctgccactgtggacagggtgctgtcggcctatgagcctaatgaccacagcaggtatacagctctggcccaagctctggtcctgggggcccggggtaccccccgagaccgtggctggcgtctccccaacaacaagctgggttccggggatgacatctctgtcttcgtcatccccctgggagggccaggcagttactcctgaggggctgaacaccatccctcccactagcctctccatacttactcctctcacagcccaaattctgaagttgtctccctgacccttctttagtggcaacttaactgaagaagggatgtccgctatatccaaaattacagctattggcaaataaacgagatgg

SEQ ID NO: 24576 - DNA, 1941 bp, Homo sapiens
  source 1..1941: mol_type = unassigned DNA
gtcaaatagcagccgcggggaggctcgttcccatcggcatctgtgactggctgcgatcgagggcccgggcggccggccagccgtctcgccgagtgcggactggccggatctgctgtcagtcagcgggaacagacttctccctctccatctggtcaactgcgggagaaaaattttcgagaatttccagcaggcaaggcagtggccgctttgactgcttgcttcggagatccgagacgacggagaaggcactcttatttaccgaccaagaaagctcctcccccgtcctccgttagctaattaaaacatttttcagggacgtagccatccagagacattccattattgttccattgacctttccctcatcactgagtcctttggagctgagttatgtcaacagctgccttaattactttggtcagaagtggtgggaaccaggtgagaaggagagtgctgctaagctcccgcctgctgcaggacgacaggcgggtgacacccacgtgccacagctccacttcagagcctaggtgttctcggtttgacccagatggtagtgggagtccagctacctgggacaattttgggatctgggataaccgcattgatgagccaattctgctgccacccagcattaagtatggcaagccaattcccaaaatcagcttggaaaatgtggggtgcgcctcacagattggcaaacggaaagagaatgaagatcggtttgacttcgctcagctgacagatgaggtcctgtactttgcagtgtatgatggacacggtggacctgcagcagctgatttctgtcatacccacatggagaaatgtattatggatttgcttcctaaggagaagaacttggaaactctgttgaccttggcttttctagaaatagataaagccttttcgagtcatgcccgcctgtctgctgatgcaactcttctgacctctgggactactgcaacagtagccctattgcgagatggtattgaactggttgtagccagtgttggggacagccgggctattttgtgtagaaaaggaaaacccatgaagctgaccattgaccatactccagaaagaaaagatgaaaaagaaaggatcaagaaatgtggtggttttgtagcttggaatagtttggggcagcctcacgtaaatggcaggcttgcaatgacaagaagtattggagatttggaccttaagaccagtggtgtcatagcagaacctgaaactaagaggattaagttacatcatgctgatgacagcttcctggtcctcaccacagatggaattaacttcatggtgaatagtcaagagatttgtgactttgtcaatcagtgccatgatcccaacgaagcagcccatgcggtgactgaacaggcaatacagtacggtactgaggataacagtactgcagtagtagtgccttttggtgcctggggaaaatataagaactctgaaatcaacttctcattcagcagaagctttgcctccagtggacgatgggcctgattaccagctgggacttagagtttctgtgcaacagtttttcactgagcatgtcaagaaactgataagatcaaaaaggtctcctaactcactagatcagcgcacaagtcagtgtaaaccacttagatagtagttttttcataaatgctcatcatatttatgttccgctgtacatgttcagtataaatatatgtgtagtgaagctactgtgagtctttaaatggaaagagcaaatgagaagtggtttggatacacttgatgagagatgagagtgtcacattaataatttttaagactcttaggcagctatgggtttcttttgatcatttttgttctttattcatttgaacacgtttttgaagttcttcaaaactagtcagtttgaattttgacagctattcaatatgtgatctccaagtttaaaaaaattttttt

SEQ ID NO: 24577 - DNA, 1092 bp, Homo sapiens
  source 1..1092: mol_type = unassigned DNA
gtcaaatagcagccgcggggaggctcgttcccatcggcatctgtgactggctgcgatcgagggcccgggcggccggccagccgtctcgccgagtgcggactggccggatctgctgtcagtcagcgggaacagacttctccctctccatctggtcaactgcgggagaaaaattttcgagaatttccagcaggcaaggcagtggccgctttgactgcttgcttcggagatccgagacgacggagaaggcactcttatttaccgaccaagaaagctcctcccccgtcctccgttagctaattaaaacatttttcagggacgtagccatccagagacattccattattgttccattgacctttccctcatcactgagtcctttggagctgagttatgtcaacagctgccttaattactttggtcagaagtggtgggaaccaggtgagaaggagagtgctgctaagctcccgcctgctgcaggacgacaggcgggtgacacccacgtgccacagctccacttcagagcctaggtgttctcggtttgacccagatggtagtgggagtccagctacctgggacaattttgggatctgggataaccgcattgatgagccaattctgctgccacccagcattaagtatggcaagccaattcccaaaatcagcttggaaaatgtggggtgcgcctcacagattggcaaacggaaagagaatgaagatcggtttgacttcgctcagctgacagatgaggtcctgtactttgcagtgtatgatggacacggtggacctgcagcagctgatttctgtcatacccacatggagaaatgtattatggatttgcttcctaaggagaagaacttggaaactctgttgaccttggcttttctagaaatagataaagccttttcgagtcatgcccgcctgtctgctgatgagaactgtgcctggtcagcagctctagacctggagcccgtggacactatatgcggggcttcagtggaaagagagatctgcttaattttgtcccaggtgaaggagtccagcggttcctatcctggactacgggaaggttcccacatctctttgtcccattag

SEQ ID NO: 24578 - DNA, 1091 bp, Homo sapiens
  source 1..1091: mol_type = unassigned DNA
gagaatttccagcaggcaaggcagtggccgctttgactgcttgcttcggagatccgagacgacggagaaggcactcttatttaccgaccaagaaagctcctcccccgtcctccgttagctaattaaaacatttttcagggacgtagccatccagagacattccattattgttccattgacctttccctcatcactgagtcctttggagctgagttatgtcaacagctgccttaattactttggtcagaagtggtgggaaccaggtgagaaggagagtgctgctaagctcccgcctgctgcaggacgacaggcgggtgacacccacgtgccacagctccacttcagagcctaggtgttctcggtttgacccagatggtagtgggagtccagctacctgggacaattttgggatctgggataaccgcattgatgagccaattctgctgccacccagcattaagtatggcaagccaattcccaaaatcagcttggaaaatgtggggtgcgcctcacagattggcaaacggaaagagaatgaagatcggtttgacttcgctcagctgacagatgaggtcctgtactttgcagtgtatgatggacacggtggacctgcagcagctgatttctgtcatacccacatggagaaatgtattatggatttgcttcctaaggagaagaacttggaaactctgttgaccttggcttttctagaaatagataaagccttttcgagtcatgcccgcctgtctgctgatgagaactgtgcctggtcagcagctctagacctggagcccgtggacactatatgcggggcttcagtggaaagagagatctgcttaattttgtcccaggtgaaggagtccagcggttcctatcctggactacgggaaggttcccacatctctttgtcccattagttgagatgacttgcagtagaaattgtccacaactcttctgacctctgggactactgcaacagtagccctattgcgagatggtattgaactggttgtagccagtgttggggacagccgggctattttgtgtagaaaaggaaaacccatgaagctgaccattgaccatactccaga

SEQ ID NO: 24579 - DNA, 1589 bp, Homo sapiens
  source 1..1589: mol_type = unassigned DNA
ccgggaggtgcctgggagaggcaggcagagcccagccggccgcctgcggctcagtaccgaccgtgccgcgtcgccgggctctgcgtacccctgtctctgcccaggctcccgcaaaacttttattctctggggcccccggggtgtgtgaaggaattggaaccttccgccatctccgcgctccccttcggcggcgaccgaggggacctgcgtccctcgtccgccgggctctggagccctgcgcctcacctgctgatcgctctccggagtctcgagggggcacccccggagggaccgcgcgggcgccggcgcccctgaactctcccgctcaccgcggcagacccgcccagcgcaactttaacttgattcttcttgcccaaccggggcaccagcggctgctgctgcggcggctgctgctaccgccgccgccgcggtctcacaaaggggctcagggaagggaggcggcgcgggcggcagggacgggcctccgggccgccgaggcggggagacaaaagggaagctgcctctgctcgcgctgcctgctcggagccgcttgctcggctgcctctggctgggctccgcgatcctctcccccaccctcgggcactgctccgcctccctcccggcgggctgtccccgcagtgctcccggacccggcgagccttcggggcgcgcgtcgctggtggtggttgaggctctagcgataataaatgatagaggatacaatgactttgctgtctctgctgggtcgcatcatgcgctacttcttgctgagacccgagacgcttttcctgctgtgcatcagcttggctctatggagttacttcttccacaccgacgaggtgaagaccatcgtgaagtccagccgggacgccgtgaagatggtgaagggcaaggtagccgagatcatgcagaacgatcgactcggggggcttgatgtgctcgaggccgagttttccaagacctgggagttcaagaaccacaacgtggcggtgtactccatccagggccggagagaccacatggaggaccgcttcgaagttctcacggatctggccaacaagacgcacccgtccatcttcgggatcttcgacgggcacgggggagagactgcagctgaatatgtaaaatctcgactcccagaggcccttaaacagcatcttcaggactacgagaaagacaaagaaaatagtgtattatcttaccagaccatccttgaacagcagattttgtcaattgaccgagaaatgctagaaaaattgactgtatcctatgatgaagcagttactttttgaatgactgcttggagactgcaagtaacaccttagcttcaaaatatctagttcatattaattctaaactaatttcgattttaaacaaagactttgctttaatataccactattccctccccattctctgtgctgttgtcaaccaaattatatgcttatacattataatgtcatcaataatttcataattatttctttatgcatttattttttaaattagaagaaaaaagttaacaaataagatcaaattagaacaaaatataattctttttaaattaaaatcctgcttctgtaaaaaaa

SEQ ID NO: 24580 - DNA, 10934 bp, Homo sapiens
  source 1..10934: mol_type = unassigned DNA
ctccgcctccctcccggcgggctgtccccgcagtgctcccggacccggcgagccttcggggcgcgcgtcgctggtggtggttgaggctctagcgataataaatgatagaggatacaatgactttgctgtctctgctgggtcgcatcatgcgctacttcttgctgagacccgagacgcttttcctgctgtgcatcagcttggctctatggagttacttcttccacaccgacgaggtgaagaccatcgtgaagtccagccgggacgccgtgaagatggtgaagggcaaggtagccgagatcatgcagaacgatcgactcggggggcttgatgtgctcgaggccgagttttccaagacctgggagttcaagaaccacaacgtggcggtgtactccatccagggccggagagaccacatggaggaccgcttcgaagttctcacggatctggccaacaagacgcacccgtccatcttcgggatcttcgacgggcacgggggagagactgcagctgaatatgtaaaatctcgactcccagaggcccttaaacagcatcttcaggactacgagaaagacaaagaaaatagtgtattatcttaccagaccatccttgaacagcagattttgtcaattgaccgagaaatgctagaaaaattgactgtatcctatgatgaagcaggcacaacgtgtttgattgctctgctatcagataaagacctcactgtggccaacgtgggtgactcgcgcggggtcctgtgtgacaaagatgggaacgctattcctttgtctcatgatcacaagccttaccagttgaaggaaagaaagaggataaagagagcaggtggtttcatcagtttcaatggctcctggagggtccagggaatcctggccatgtctcggtccctgggggattatccgctgaaaaatctcaacgtggtcatcccagacccagacatcctgacctttgacctggacaagcttcagcctgagttcatgatcttggcatcagatggtctctgggatgctttcagcaatgaagaagcagttcgattcatcaaggagcgcttggatgaacctcactttggggccaagagcatagttttacagtcattttacagaggctgccctgacaatataacagtcatggtggtgaagttcagaaatagcagcaaaacagaagagcagtgaacccttcaggggtctcagctgccttagactaaaggactttcaacacactggtctcttttaatttagtgaaaagtgtgggagttgtaattaggatcatccaccccagacatggaatcccccctccctggtggtcttaggtctataatcagtgacgaacagagggtgcccttggccaatgtagttaagaaactggaaaatggtttcttcatgttttcccaactctttcatccagtgtccaaaatatataagtaaatagctgtagagtcacatatatgaagtgaatagcatatgtgtcatttagtctccctgaagattcttttcaagatcctgttcagggtcctccaggcatcagctgttgtgtcctctctttgtaacagtggacaggacagaccacccagtgctgcaggagacaggccactgcgtcacctgtgagtggtcaggggctgatgtggcaacaccctctgccaagagacagagctgtcctgagaatgctttgtccttctgagcccatgttttctgctcagtagcagcttggaagcagatttggaatggtttactattttggctgctcttggggactgcgagaagcagagagaatgagagaccagtggcaactgcctgcacagcagagataaccctcttcccttgcttcctttaatagttaaatagactttgtataccacctgaccagcctttgtgcatttatcctaatcatgcatgaccgttaaccttttgcttagtccttaccatatgtaataggcagctgttaaattcaccaacagataccctgatttttcatcttacgtgaccaagaaaccacgttaggggaaatgaaaaaagcaagccacaataccatgattccttccattttcaacagtagatgaaggaaatgatactgaatgagtcacagtgttccctggcaagtaagctgtttgcattgagaaaggagtgagctggtgaggttaccaccctgaattgagctccagctgccagtttttgtgtttttccttgcccctttccaagtggttttcaagtgtcaggcagtgttctgagaagcagcagcctataactgtatgtgtgttccttgaagccaggtgcagagttcccagctactgcagcttgggatttggtgggaaactactgggataagcttctccttgacaatggaaaggcagcagtcttcaacatttggttgcaaatctccatccacatcagggagctttccccaggcaaatacaaaccgccccgtggcctgcaggcctgcaggggaggcagcaaagggacctggcagttgcaacacagtaagtcaggaattcaagcgtgaacccatattgataagtgggccagaattatttaggggcctggcttgctgctctccatttcctgtatcgctaatttatcatttttccaaccttggtattttatattatttagagaaaatgctgggtcactctctttgcctaaggtgactcaaacagccaaacgaaacttccgttgcctcccagccctctgtatccacctggttttgttctttccctgtgagcatttgtggttatagcttcccatatgccacattcaccggccacctcctcgccgtggaaccctgccctctcccctcctgctgctgtagagttttcccaaagcagtgtccaggagagaatttgagagagtgaagaaattgccttgtagatgtggagggctgcaatctgtcttgatttctccaagcacttaactttctttgactgcactgagaattgctaatgatttcccatgagatttgcttacttttgtatactgtattttccagcattacagaaccttggttattgttttttagccatagaatcttctagtaaaaaatatctgccaccattttagatttaagcatttgcctatggggagacactgaatatgtggatgtgtgtattaatatttggggtggggacagggaagggaatgtggaaaacaaatgctggctgtgagcagtgctgagatggccaggccaggcggctgagtttgcttggaaattcaggacattctgactcctaagagttgcccccacccaccatcaaactgaaatcagcaccaatggtgtcagcactttacagcccatagccaactttctttatttttaacgtagcacaaaaatgtataatagcaaggaaaagacatttttaaattccggttatttttattgtctaaaatgaaagcaacagtgttttgataaagatgaaaaagaaaagctactaaattagtaaatcagtggttacgtgccctgcagaatttcttaacagatggtgctgagtgcacgagttacataactttctctctaattgaggttcacaaggcgtcttctaaattttgctttgtacaattaattcatttctgatgttaaccaaatagagtgtatatatcctactcccattactgcctctttcccccctactatggcttgtagattttcaaaagatagaagttctaggcaaaactgtagcagtttcattaatagttgttaggatagttatatctaaaatcagagtattttgttcccttccttctggagctctctctccctagcccttttccagctgttggggatgtgcagacatcactcctgggggtgccctatggtacactggctgctccccagggacctgggaatgctgaatctagccattagggaaattgatttgagatgtttgcatgtgaagcttccctaagcagcactgccaaagctttggaattgtcacccaaggcttcctagactccctagctagctcgagttcgaattgccaatagtccccatggtgccaaattttgggatggttttacagtcttttagaaatgaagacaggaatggccatgtgcttctgagaccccagcacgatgccaggcccaggtctccattaatgcagtgctctgctgctgctccactggcaatttgtactcttaacataggttgggggagggacagctagggaaattttttttaattaattgtatctaaaattctttcatcataggaataaacaacacatatagaaagctccaaagctgttcccaagacctgtattatttattttatatgaccaacttgccccaaggcaattaactctgaattgctgttctaatgtgacatatctgtgtacatatgtacatagtactggtaaccagtggctgcattttattccttgctgtggactgaggtattggcttcttgaatcttgtatatgtcataagaatattatacagagagtgttatagtgaaggatgtaagctggataatttaaaacagaccttatttcatacaagtgtaattattacatcattttgggtaaatggcaaacaggattgcatgagagtgatggcatcatcatttcaattgaatctgaagtgattctaggaaattgattccactgttggattctaggaaattgagtccactgttttcctttgcgtttaatttcctttgtgtttaatttgaccacagaaacttttttgagtagcacctagtaacattgcaaggaacttgtgtatcaaggtgtatcttgattatcctgattttttttgttctctaagttgttgccagatctctcttgcaactgtgtcaatgaaaggtctgtgtttagaaaaggcagcatatcattgtatatttgaaactataggaatatatactttgtataaaacttttccaatgatttcagaaattcttttttcctccttttgacccacaactagactgttcataccctaatagttccccaaaattgccttagcatgtcacaccagcatttgtcatccagctctggagaaatgacatgactgttagatactatgcctgtttaattgcctctggattaagtcattgatagctagacttttgagctagttagctgtagaaataatagaatccagtgtttcccaaagtgtgttccaaagaacacaagttccaaagatgctcttctaaatataggattctaggatgaaataagtttggaaaacacataccatcttagaaagttagtgaacatgagcacatcaaaggctctaatttaaatgtcctgtgaggagagaaaaacacaacaaatatctactgtcagttagcccagtgttttccagattaatttgaccacagaaacttttttgagtggcacctagtaacactgcaaggaacttgtgttctaaagaacaccctttgggaaattctggtatattgaaatattgctgtgttttcattcacgatgactcttagtagcagtacaatttgcaacttagaagcatgagcctttcatatatgaagctgacttgttaataaaagcagtgttaagaagtagtatgacttaatatgaccaacagcagcctcatattgatagcagaacaatcctacttaaagctctaaacatcatccccccctttttttttttaacggaatctcgctctgtcacccaggctggaatgccgtggcgcaatgtcaggtcactgcaagctccgcctcccaggttcacaccattctcctgcctcagcctcctgagcagctgggactacaggcggcctccaccacacctggctaattttttgtatttttagtagagacggggtttcaccatgttagccaggatggtcttgatatcctgaccttgtaatccaccagccttggcctcccaaagtgctgggattacaggtgtgagccactgcacccggccatccctttcttttatatgaataatgagcaagagccctgccatagctaaatatgtctcaaattcattccaagatctttccattgcttttttgcagttacctttgctttttgggttgaatcaaaatgaatatttttatatttcattactatatgatatttaaaaatatacagaaaatcacagaaaaggaaaaacagaaatttgattttaattcacttttgaaattttaacgatttttaaaactaatgatctgttatataataactgaaatgtaaactattaacagttatttactttctttcctttattgtcctctctggattcagtgaaataatttgaaatcaattagagctcataccttctaaaactcctgtcccatatcatcccacctttcatgttttatgtacatagttaagtttggcatgttatctcttgcctaaaatgtgaggccttcctgtagttccacagtagttactcttggctgcagaaataggtttgggaagctatgagagattaccccaaagtcatggatgaaacaaatctagtcgaaaacatggtacagagtgaattaaggcaaaagtcattaacttaaaattacatccaatatttaggaatagctcatcctctgcacattatccaaaatattttaaaaaactaaaagtaagatctcttaggctaggtggcggattgcaaagggcagggggcagttgataccatgaagcttccaatagatgcatttctaaacattttttctaatatgtaaatttgctgatccttagtaatgttaatgctttgtctatttgttatttttaccactgttgaacagcaaactgttgaggctagggttgattattgataatttttatgtgtttagtaataaccacagcatcatacgtacaactgctttaataaatccaagttaaggactttgaggagagcatgtagcaagtattcattttaacaaatcatcacagacagtttccctgttcaaagctccaccaaaaagcaagcatgcagcaaaggcatagactgtatttagagatgtggtttcatttattcttgaagtcctataaccttgcattatttaaacacaaaatcccacctaacatttgccaaatccaagttaatctcaaaaacctccgaggacattgagcacaagcagattactgtaagggcactggtggcagattgtggtggagagagggctgagtgacccagagcaaagcctgcccgggttactcgctgccacttcaggagagggattgtatcagctctcattaccttttgtcatgaggcagttcataaattaaatatgatatcatgcattatctcaaaatatttctatattaattagataattcacgatgtaaaacgtgttcatgcagaagcaaaggcggatgtaatagtcaagtatcagggaaaaacccctttaggatacccagacattaaaaatgtaaaaagtagcttataagaaatgtggattatcagatttttactatatataggttgtgtttaatagtaatttctgacacctgcacatagatgaagaaaaggcagttgttaccacttttcaccattcaaaaaatgggcttgtctcttagagtattggttaatgctttgcttatttgttaatgaagacagcattttaattttaaagcttccttttgtaggactgatggcacgggcagaatcacatttaagaaaaatggtttggaacactttttaataaaaaattgtaaaatcagtttccagtgtggtcaaaattagaatgtaaaggaaagcatttttaagaaaatacagaagcccaaatcaagggagagtaatataaaaggaaatattttaaattaagaaaaggaggtgttatagtttattacatcatgaattatgctttctgtacttacgctcttagtgaaggagataacattgaagtgagaaaatgaacattctcagttatttgcgaagttagtaaaattgcagtccctattccatttttttctgatgaaaatggatacatgagatctcatttattgctctcctcaacacctttactgtcccagattccattcacgttccaaatcgtggacagtaaaactgaagtcagataaacacagtcacaggtacaactgggagcgagttttaacatagtggtaattttgcaaatgccaacatgaatactagtgagtactcaatttacgacagacaatttcacaaaaaccaaccacagagtgatttgatattcttgcttcttagagagttttctaatccatataatgcaatgggtcaggttgctcatatgattaaaaaaattaatcctgtagaaatgatgtattagacatctctaacccaagaaaaagatgtcttttgtataacttttaaattcccatttgtctatcttaggacaaatgatgacttcttcgtgtagtaatgaaaacgtctaaatcctgctctgtggagaaaagctagaaccatgggacattaagcaagaatactcctctgatttaggctcccagactacaactaacagtctttatgtatttatcatcttggttattgttttatctcaagcatatacagtgtgcagaaagtagaataatgaataaaatatgaccatggagaaaacccataacttttgcttctattatagaaagcagtgtttgttctttttaatttattacatgttcacattgaaacattaacatctacaatattgtctttcagtttactcttcaattactaaagcaaatgattttgatttatagcacttacacaactgcagttcaggtcacagaattgaaatctatttgataatgtctcagcattctcatgggcagccaggaaaaaaaaaaagagagagaaagacaaatagaaattttagtgggttcagataaatgattattctgacaaacctggaaaatagtaattaaacagttcattccaaaagaccccaatgtaaactctgctcacatacataatttgtataaggaaaatgtatgagtttttttcttaaaaataaatagaagcatcattgcatttataacagattgatcaatcttatgaacagattacattgggaaagtcactattattgctgtgtgtttgtatattttattctttccttttttgtgtgagcatctactatgtgccaggcagtgactgtgtctgagtgaatgtatccatggtgagcactcaggcgccatcactgccttcttggggcttacaccctattggggtgtcagagatattataacactcaatattgacccaatgggatgaaaattgttatcttcatgatttcttccaatgggcttagatttgttgggacagggcagaattagaataattatttctcacatataagagtaagtgatatgagattgggaatttcttgccaacactcaagcaaactgcagaagataattactccattttactagctcacctagtttctgaaggatggggtggggagtgagacatggagcctctggggacaaggataggggggtgggactgtcccagtggagggtgccactggaagcctccacccaagtgggccagcagctgtgcaagggtgcagcagtaggctggtgaaagccaggttgtccagatctttctaggggaagagaaggattatagaaaaggagaaaagggaggagcaagaacatctctccatggcctatttttatttttgttcccaagagactagtgtaataaccttatgcccccaaagacagcccagaactgagtatcttcagtgttcctgagtgtaaatcagtgaatctgttatatagaaagttaacatttcaggagcacaattatttcctgatttcaaatatgaacagaagactaaatgtcatttttttaaatcataaatttggtatccatagttactttacacattccagagtctaagcatggaatttaagttttgtattttgaacaaaaatagcaacatctgttttctgtatggcaaagaaaaactaaatcccagacttttatttttaaccacagaaaccatcacttctttctaaattatttgcttgcctgctcatttcccctaaacatctctgtttatgccaatggctttttaaatccaaataatactagttattgccaaattgcattagaatcctattgaattagaataattcatatacttcatatactaggcagtaaatggttagagacggtaaagatctgattgtgatcaaaagtagggtttttgttttgtttttaatcatgagcacatataaaaggaaattcaaatgaaaccaagccaatttctgatttagtaagattaaaaccatagatggagctcagttattaaggatggaaaggaggaaagcacagagtgaggagagaaaaaggggaaggaaaaaaagtagtgtttttttggggaacagtataatgtctcagaagttcttctctcttatcctgctgatgttgagacagtggctttgtataagcttttatttatacctatttcaacatcatgaaaatttttccatcagcattttcttgcaactttaaaaatcacaagggattatttgtttataaagagatacaggatctataatttattggcaatactttattttaggaatcttcaaattgtacttaataaataaatcacaggtcaaaatgactgtaaaatcaatcaggctttctcgtaagttatttcctgaaaaccatccatgataaatacaacaaggcttggcgaaacctcattactcttggaagtcttcagaggttattatacctactgatctgtatttgtctctaagagacatttgaaacacagttacaatgtcaatttggtgtaacattacctgtagtagagctcagagtatatggcagtgcacggtcactcaagatgcatggcgtgtcatttgggtcgctttgatgggtgctcgggtagaattagccttgtagagactaatgtgttcatgctatctctgatcctgtggtgttgtataaaaatgaacagctaaaaatttacccatgacaagattaaagcaaaaataaacacaaagttgttagactttaaacatga

SEQ ID NO: 24581 - DNA, 2429 bp, Homo sapiens
  source 1..2429: mol_type = unassigned DNA
cttgccctcacctccgaatcctgacaacttcccggtcatcccgacccagcgttttccttgggattccgacctccccctcagagaagacaggaggtcgggaaggacctgcagcccaggggcttccaagatgaggcccagagactcggattatcaatgcagagaaatctgaattcaatgaggatcaagccgcctgtgggaagctgtgcatccggagatgtgagtttggggctgaagaagagtggctgaccctgtgcccagaggagttcctgacaggccattactgggcactgttcgatgggcacggcggtcctgcagcagccatcttggctgccaacaccctgcactcctgcttgcgccggcagctggaggccgtggtggaaggcttggtggccactcagccccccatgcacctcaatggccgctgcatctgccccagtgaccctcagtttgtggaggaaaagggcatcagggcagaagacttggtgatcggggcattggagagtgcctttcaggaatgtgatgaggtgatcgggcgggagctggaggcctcaggccagatgggcggctgcacagccctggtggctgtgtccctgcagggaaagctgtacatggccaatgctggggatagcagggccatcttggtgcggagagatgagatacggccactgagcttcgagttcaccccagagactgagcggcagcggatccagcagctggcctttgtctatcctgagcttctggctggtgagttcacccgactggagttccctcggcggctgaagggggatgacttgggacagaaggttttgttcagggatcaccacatgagtggctggagctacaaacgtgtggagaaatcggatctcaagtacccactgatccatggacagggtaggcaggctcggttactaggaacactggctgtctcccggggcctgggagaccatcagctcagagtcctggacacaaacatccagctcaagcccttcttgctctctgtgccacaggtgactgtgctggatgtggaccagctggagctacaggaggatgatgtggttgtcatggcaactgatggactctgggatgtactgtccaacgagcaggtggcatggctggtgcggagcttcctccctgggaaccaagaggacccacacaggtactgtagctgctggggacctgcctgggcctgggttggtgccagcagcaagcccaagtagttatggctgagaagacagagcactgacaatgagctggcagctggccaggatcagggctgtctcaagcttcttggaggaggcagggagaccgtgggttccgaaaatccctggatttagactctcatggtccagcccgtggccctcccagacttgctgcttgcttggtccacagtcggactgcattgcttgggtccccatgtccagccttgtgcagtgagttctcctaaggtctggccttgcccctttgctctgcccctgaagtctatctgcaggatggtcttcacaggttctcaaagctggcccagatgctgatacacagcacacagggaaaggaagacagtctcacagaggaagggcaggtgtcctacgatgacgtctctgtgttcgtgattcccttgcacagtcagggccaagagagcagtgaccactgaggattcagacactgtatcccagaactgctctagtgcccgggtgtggtctgggcatccctccagtgtgaccaagagcaaatcctgcctgccctatccctagccaccgcccagtgctctcactatccacctcaacacacatccatctcaagaggaacatttataccaggcagtcagagctggaagtgtatggagagcccagcccaccaggtcctgccttttgcggtgataaccttctctggcagagtgactttacaacttaactaggaaacccatgtgaggctcctcagacaggatcttgaacagcccaaagtatcattctcagataggggcacccaagctaagggtattagccaaagatgccaggatgggtagctagcccatgtttagatccaggtctccaattcatggttatcagggcatgtgttcaacaacccccaaagtccacgcaggtggcttgtagaaacctttgggcagcctcatgtctgctaaaacagccatcttcaagacagcccctgaaaagagaccagttcaggtcctgccctgctgttctttgctggagatgaggaacaggtgctggggctaaagtttggggtagagcacaagggacaagaggaactcttggagttggctgggtgagagggctctccatttgctacctgtagtagcctgcctcttaactggttgcttctccctagttccagccctgccctggtctgatgccccaacactgcccttgctttgttttccctgtcacctccctattattaaatgttttctacag

SEQ ID NO: 24582 - DNA, 2041 bp, Homo sapiens
  source 1..2041: mol_type = unassigned DNA
cccgacccagcgttttccttgggattccgacctccccctcagagaagacaggaggtcgggaaggacctgcagcccaggggcttccaagatgaggcccagagactcggattatcaatgcagagaaatctgaattcaatgaggatcaagccgcctgtgggaagctgtgcatccggagatgtgagtttggggctgaagaagagtggctgaccctgtgcccagaggagttcctgacaggccattactgggcactgttcgatgggcacggcggtcctgcagcagccatcttggctgccaacaccctgcactcctgcttgcgccggcagctggaggccgtggtggaaggcttggtggccactcagccccccatgcacctcaatggccgctgcatctgccccagtgaccctcagtttgtggaggaaaagggcatcagggcagaagacttggtgatcggggcattggagagtgcctttcaggaatgtgatgaggtgatcgggcgggagctggaggcctcaggccagatgggcggctgcacagccctggtggctgtgtccctgcagggaaagctgtacatggccaatgctggggatagcagggccatcttggtgcggagagatgagatacggccactgagcttcgagttcaccccagagactgagcggcagcggatccagcagctggcctttgtctatcctgagcttctggctggtgagttcacccgactggagttccctcggcggctgaagggggatgacttgggacagaaggttttgttcagggatcaccacatgagtggctggagctacaaacgtgtggagaaatcggatctcaagtacccactgatccatggacagggtaggcaggctcggttactaggaacactggctgtctcccggggcctgggagaccatcagctcagagtcctggacacaaacatccagctcaagcccttcttgctctctgtgccacaggtgactgtgctggatgtggaccagctggagctacaggaggatgatgtggttgtcatggcaactgatggactctgggatgtactgtccaacgagcaggtggcatggctggtgcggagcttcctccctgggaaccaagaggacccacacaggttctcaaagctggcccagatgctgatacacagcacacagggaaaggaagacagtctcacagaggaagggcaggtgtcctacgatgacgtctctgtgttcgtgattcccttgcacagtcagggccaagagagcagtgaccactgaggattcagacactgtatcccagaactgctctagtgcccgggtgtggtctgggcatccctccagtgtgaccaagagcaaatcctgcctgccctatccctagccaccgcccagtgctctcactatccacctcaacacacatccatctcaagaggaacatttataccaggcagtcagagctggaagtgtatggagagcccagcccaccaggtcctgccttttgcggtgataaccttctctggcagagtgactttacaacttaactaggaaacccatgtgaggctcctcagacaggatcttgaacagcccaaagtatcattctcagataggggcacccaagctaagggtattagccaaagatgccaggatgggtagctagcccatgtttagatccaggtctccaattcatggttatcagggcatgtgttcaacaacccccaaagtccacgcaggtggcttgtagaaacctttgggcagcctcatgtctgctaaaacagccatcttcaagacagcccctgaaaagagaccagttcaggtcctgccctgctgttctttgctggagatgaggaacaggtgctggggctaaagtttggggtagagcacaagggacaagaggaactcttggagttggctgggtgagagggctctccatttgctacctgtagtagcctgcctcttaactggttgcttctccctagttccagccctgccctggtctgatgccccaacactgcccttgctttgttttccctgtcacctccctattattaaatgttttctac

SEQ ID NO: 24583 - DNA, 1790 bp, Homo sapiens
  source 1..1790: mol_type = unassigned DNA
cccgacccagcgttttccttgggattccgacctccccctcagagaagacaggaggtcgggaaggacctgcagcccaggggcttccaagatgaggcccagagactcggattatcaatgcagagaaatctgaattcaatgaggatcaagccgcctgtgggaagctgtgcatccggagatgtgagtttggggctgaagaagagtggctgaccctgtgcccagaggaggatgaggtgatcgggcgggagctggaggcctcaggccagatgggcggctgcacagccctggtggctgtgtccctgcagggaaagctgtacatggccaatgctggggatagcagggccatcttggtgcggagagatgagatacggccactgagcttcgagttcaccccagagactgagcggcagcggatccagcagctggcctttgtctatcctgagcttctggctggtgagttcacccgactggagttccctcggcggctgaagggggatgacttgggacagaaggttttgttcagggatcaccacatgagtggctggagctacaaacgtgtggagaaatcggatctcaagtacccactgatccatggacagggtaggcaggctcggttactaggaacactggctgtctcccggggcctgggagaccatcagctcagagtcctggacacaaacatccagctcaagcccttcttgctctctgtgccacaggtgactgtgctggatgtggaccagctggagctacaggaggatgatgtggttgtcatggcaactgatggactctgggatgtactgtccaacgagcaggtggcatggctggtgcggagcttcctccctgggaaccaagaggacccacacaggttctcaaagctggcccagatgctgatacacagcacacagggaaaggaagacagtctcacagaggaagggcaggtgtcctacgatgacgtctctgtgttcgtgattcccttgcacagtcagggccaagagagcagtgaccactgaggattcagacactgtatcccagaactgctctagtgcccgggtgtggtctgggcatccctccagtgtgaccaagagcaaatcctgcctgccctatccctagccaccgcccagtgctctcactatccacctcaacacacatccatctcaagaggaacatttataccaggcagtcagagctggaagtgtatggagagcccagcccaccaggtcctgccttttgcggtgataaccttctctggcagagtgactttacaacttaactaggaaacccatgtgaggctcctcagacaggatcttgaacagcccaaagtatcattctcagataggggcacccaagctaagggtattagccaaagatgccaggatgggtagctagcccatgtttagatccaggtctccaattcatggttatcagggcatgtgttcaacaacccccaaagtccacgcaggtggcttgtagaaacctttgggcagcctcatgtctgctaaaacagccatcttcaagacagcccctgaaaagagaccagttcaggtcctgccctgctgttctttgctggagatgaggaacaggtgctggggctaaagtttggggtagagcacaagggacaagaggaactcttggagttggctgggtgagagggctctccatttgctacctgtagtagcctgcctcttaactggttgcttctccctagttccagccctgccctggtctgatgccccaacactgcccttgctttgttttccctgtcacctccctattattaaatgttttctacagaa

SEQ ID NO: 24584 - DNA, 1380 bp, Homo sapiens
  source 1..1380: mol_type = unassigned DNA
atgtccgccggctggttccggcgccgcttcctgcctggggagccgctccccgcgccgcggccgcctgggccgcatgccagccccgtgccctaccgacggccccgcttccttcgcggctccagctccagccccggggcggccgacgcctcgcgccgcccagactcccggcccgtgcgcagccccgcacgaggacgcacgctaccctggaatgcaggctacgccgagattatcaatgcagagaaatctgaattcaatgaggatcaagccgcctgtgggaagctgtgcatccggagatgtgagtttggggctgaagaagagtggctgaccctgtgcccagaggagttcctgacaggccattactgggcactgttcgatgggcacggcggtcctgcagcagccatcttggctgccaacaccctgcactcctgcttgcgccggcagctggaggccgtggtggaaggcttggtggccactcagccccccatgcacctcaatggccgctgcatctgccccagtgaccctcagtttgtggaggaaaagggcatcagggcagaagacttggtgatcggggcattggagagtgcctttcaggaatgtgatgaggtgatcgggcgggagctggaggcctcaggccagatgggcggctgcacagccctggtggctgtgtccctgcagggaaagctgtacatggccaatgctggggatagcagggccatcttggtgcggagagatgagatacggccactgagcttcgagttcaccccagagactgagcggcagcggatccagcagctggcctttgtctatcctgagcttctggctggtgagttcacccgactggagttccctcggcggctgaagggggatgacttgggacagaaggttttgttcagggatcaccacatgagtggctggagctacaaacgtgtggagaaatcggatctcaagtacccactgatccatggacagggtaggcaggctcggttactaggaacactggctgtctcccggggcctgggagaccatcagctcagagtcctggacacaaacatccagctcaagcccttcttgctctctgtgccacaggtgactgtgctggatgtggaccagctggagctacaggaggatgatgtggttgtcatggcaactgatggactctgggatgtactgtccaacgagcaggtggcatggctggtgcggagcttcctccctgggaaccaagaggacccacacaggttctcaaagctggcccagatgctgatacacagcacacagggaaaggaagacagtctcacagaggaagggcaggtgtcctacgatgacgtctctgtgttcgtgattcccttgcacagtcagggccaagagagcagtgaccactga

SEQ ID NO: 24585 - DNA, 4087 bp, Homo sapiens
  source 1..4087: mol_type = unassigned DNA
tgccagtattattattttacctacaaaatgagcaaagatgtttagaagtacaatagaattcagccctgctgagggtaacaaaaggagggtacttttccggtgaggctttgtgcagaaggcaaattaataaagggagcattcagtaattacacctctaggaatcagccgtacgaaaatgcaggatgcatttataaatacatacatacacaaagatttatgtatgaagatattcagcccagccttatcttttaaattatcatctaaatatcaatagcagaatgggcgagatatctacacaccaggattcatgccaccatgccaccatgaatcactgggaaaaaacggtgatatataagcatttagggatgtaacatgttcatcgaggaaaggaggctacaaaagtaatgtctattttgagttttaaatttttcatgtaacgatttagaaactcatctaatttgataacgtgacttaggcaaatcattcaaatctttttgcgtttcctctgcaatggcgattgtggaggttaaatgggataactggcgttgaaacgttccaggcccatgagcaggactcaatgttccttcccttcccctttagtgtatggcttcttacatctggggaagagtcccaccaaagatcgattccaagcttcgcttcttggatgagcgagggaaactaggcgctaacttacctattcacccccgcgcccgttcccggcagccgggactcagggaagccaggtagccgcggtgctctcaactccctccccgcccgcgcacttcgaatccaaactgcgcggggcgaggcggggcggcgctccgatgaggtagctggcttgggagaggagtcccttgaggctgccgccaagccagggaagcgggaggcgcaggccacgcccggccactcacagacagtgacgtcatcccccgccgccactccggcgcttcccaggccctgctcgcgagtccccaccccgattgcgcacccgcgacttcagcccgaggggcggggattttcttggagcgacgggacgcgacgccaatcgcgacgaggcttcgccccgtggcgcggtttgaaattttgcggggctcaacggctcgcggagcggctacgcggagtgacatcgccggtgtttgcgggtggttgttgctctcggggccgtgtggagtaggtctggacctggactcacggctgcttggagcgtccgccatgaggagaagtgaggtgctggcggaggagtccatagtatgtctgcagaaagccctaaatcaccttcgggaaatatgggagctaattgggattccagaggaccagcggttacaaagaactgaggtggtaaagaagcatatcaaggaactcctggatatgatgattgctgaagaggaaagcctgaaggaaagactcatcaaaagcatatccgtctgtcagaaagagctgaacactctgtgcagcgagttacatgttgagccatttcaggaagaaggagagacgaccatcttgcaactagaaaaagatttgcgcacccaagtggaattgatgcgaaaacagaaaaaggagagaaaacaggaactgaagctacttcaagagcaagatcaagaactgtgcgaaattctttgtatgccccactatgatattgacagtgcctcagtgcccagcttagaagagctgaaccagttcaggcaacatgtgacaactttgagggaaacaaaggcttctaggcgtgaggagtttgtcagtataaagagacagatcatactgtgtatggaagcattagaccacaccccagacacaagctttgaaagagatgtggtgtgtgaagacgaagatgccttttgtttgtctttggagaatattgcaacactacaaaagttgctacggcagctggaaatgcagaaatcacaaaatgaagcagtgtgtgaggggctgcgtactcaaatccgagagctctgggacaggttgcaaatacctgaagaagaaagagaagctgtggccaccattatgtctgggtcaaaggccaaggtccggaaagcgctgcaattagaagtggatcggttggaagaactgaaaatgcaaaacatgaagaaagtgattgaggcaattcgagtggagctggttcagtactgggaccagtgcttttatagccaggagcagagacaagcttttgcccctttctgtgctgaggactacacagaaagtctgctccagctccacgatgctgagattgtgcggttaaaaaactactatgaagttcacaaggaactctttgaaggtgtccagaagtgggaagaaacctggaggcttttcttagagtttgagagaaaagcttcagatccaaatcgatttacaaaccgaggaggaaatcttctaaaagaagaaaaacaacgagccaagctccagaaaatgctgcccaagctggaagaagagttgaaggcacgaattgaattgtgggaacaggaacattcaaaggcatttatggtgaatgggcagaaattcatggagtatgtggcagaacaatgggagatgcatcgattggagaaagagagagccaagcaggaaagacaactgaagaacaaaaaacagacagagacagagatgctgtatggcagcgctcctcgaacacctagcaagcggcgaggactggctcccaatacaccgggcaaagcacgtaagctgaacactaccaccatgtccaatgctacggccaatagtagcattcggcctatctttggagggacagtctaccactcccccgtgtctcgacttcctccttctggcagcaagccagtcgctgcttccacctgttcagggaagaaaacaccccgtactggcaggcatggagccaacaaggagaacctggagctcaacggcagcatcctgagtggtgggtaccctggctcggcccccctccagcgcaacttcagcattaattctgttgccagcacctattctgagtttgcgcgagaactttcaaaggcttccaaatctgatgctacttctggaatcctcaattcaaccaacatccagtcctgagaagccctgatcagtcaaccagctgtggcttcctgtgcctagactggacctaattatatgggggtgactttagtttttcttcagcttaggcgtgcttgaaaccttggccaggttccatgaccatgggcctaacttaaagatgtgaatgagtgttacagttgaaagcccatcataggtttagtggtcctaggagacttggttttgacttatatacatgaaaagtttatggcaagaagtgcaaattttagcatatggggcctgacttctctaccacataattctacttgctgaagcatgatcaaagcttgttttatttcaccactgtaggaaaatgattgactatgcccatccctgggggtaattttggcatgtatacctgtaactagtaattaacatcttttttgtttaggcatgttcaattaatgctgtagctatcatagctttgctcttacctgaagccttgtccccaccacacaggacagccttcctcctgaagagaatgtctttgtgtgtccgaagttgagatggcctgccctactgccaaagaggtgacaggaaggctgggagcagctttgttaaattgtgttcagttctgttacacagtgcattgccctttgttgggggtatgcatgtatgaacacacatgcttgtcggaacgctttctcggcgtttgtcccttggctctcatctcccccattcctgtgcctactttgcctgagttcttctacccccgcagttgccagccacattgggagtctgtttgttccaatgggttgagctgtctttgtcgtggagatctggaactttgcacatgtcactactggggaggtgttcctgctctagcttccacgatgaggcgccctctttacctatcctctcaatcactactcttcttgaagcactattatttattcttccgctgtctgcctgcagcagtactactgtcaacatagtgtaaatggttctcaaaagcttaccagtgtggacttggtgttagccacgctgtttactcatacagtacgtgtcctgtttttaaaatatacaattattctta

SEQ ID NO: 24586 - DNA, 2987 bp, Homo sapiens
  source 1..2987: mol_type = unassigned DNA
gcttcgccccgtggcgcggtttgaaattttgcggggctcaacggctcgcggagcggctacgcggagtgacatcgccggtgtttgcgggtggttgttgctctcggggccgtgtggagtaggtctggacctggactcacggctgcttggagcgtccgccatgaggagaagtgaggtgctggcggaggagtccatagtatgtctgcagaaagccctaaatcaccttcgggaaatatgggagctaattgggattccagaggaccagcggttacaaagaactgaggtggtaaagaagcatatcaaggaactcctggatatgatgattgctgaagaggaaagcctgaaggaaagactcatcaaaagcatatccgtctgtcagaaagagctgaacactctgtgcagcgagttacatgttgagccatttcaggaagaaggagagacgaccatcttgcaactagaaaaagatttgcgcacccaagtggaattgatgcgaaaacagaaaaaggagagaaaacaggaactgaagctacttcaagagcaagatcaagaactgtgcgaaattctttgtatgccccactatgatattgacagtgcctcagtgcccagcttagaagagctgaaccagttcaggcaacatgtgacaactttgagggaaacaaaggcttctaggcgtgaggagtttgtcagtataaagagacagatcatactgtgtatggaagcattagaccacaccccagacacaagctttgaaagagatgtggtgtgtgaagacgaagatgccttttgtttgtctttggagaatattgcaacactacaaaagttgctacggcagctggaaatgcagaaatcacaaaatgaagcagtgtgtgaggggctgcgtactcaaatccgagagctctgggacaggttgcaaatacctgaagaagaaagagaagctgtggccaccattatgtctgggtcaaaggccaaggtccggaaagcgctgcaattagaagtggatcggttggaagaactgaaaatgcaaaacatgaagaaagtgattgaggcaattcgagtggagctggttcagtactgggaccagtgcttttatagccaggagcagagacaagcttttgcccctttctgtgctgaggactacacagaaagtctgctccagctccacgatgctgagattgtgcggttaaaaaactactatgaagttcacaaggaactctttgaaggtgtccagaagtgggaagaaacctggaggcttttcttagagtttgagagaaaagcttcagatccaaatcgatttacaaaccgaggaggaaatcttctaaaagaagaaaaacaacgagccaagctccagaaaatgctgcccaagctggaagaagagttgaaggcacgaattgaattgtgggaacaggaacattcaaaggcatttatggtgaatgggcagaaattcatggagtatgtggcagaacaatgggagatgcatcgattggagaaagagagagccaagcaggaaagacaactgaagaacaaaaaacagacagagacagagatgctgtatggcagcgctcctcgaacacctagcaagcggcgaggactggctcccaatacaccgggcaaagcacgtaagctgaacactaccaccatgtccaatgctacggccaatagtagcattcggcctatctttggagggacagtctaccactcccccgtgtctcgacttcctccttctggcagcaagccagtcgctgcttccacctgttcagggaagaaaacaccccgtactggcaggcatggagccaacaaggagaacctggagctcaacggcagcatcctgagtgcgagaactttcaaaggcttccaaatctgatgctacttctggaatcctcaattcaaccaacatccagtcctgagaagccctgatcagtcaaccagctgtggcttcctgtgcctagactggacctaattatatgggggtgactttagtttttcttcagcttaggcgtgcttgaaaccttggccaggttccatgaccatgggcctaacttaaagatgtgaatgagtgttacagttgaaagcccatcataggtttagtggtcctaggagacttggttttgacttatatacatgaaaagtttatggcaagaagtgcaaattttagcatatggggcctgacttctctaccacataattctacttgctgaagcatgatcaaagcttgttttatttcaccactgtaggaaaatgattgactatgcccatccctgggggtaattttggcatgtatacctgtaactagtaattaacatcttttttgtttaggcatgttcaattaatgctgtagctatcatagctttgctcttacctgaagccttgtccccaccacacaggacagccttcctcctgaagagaatgtctttgtgtgtccgaagttgagatggcctgccctactgccaaagaggtgacaggaaggctgggagcagctttgttaaattgtgttcagttctgttacacagtgcattgccctttgttgggggtatgcatgtatgaacacacatgcttgtcggaacgctttctcggcgtttgtcccttggctctcatctcccccattcctgtgcctactttgcctgagttcttctacccccgcagttgccagccacattgggagtctgtttgttccaatgggttgagctgtctttgtcgtggagatctggaactttgcacatgtcactactggggaggtgttcctgctctagcttccacgatgaggcgccctctttacctatcctctcaatcactactcttcttgaagcactattatttattcttccgctgtctgcctgcagcagtactactgtcaacatagtgtaaatggttctcaaaagcttaccagtgtggacttggtgttagccacgctgtttactcatacagtacgtgtcctgtttttaaaatatacaattattcttaaaaataaattaaaatctgtatacttacatttc

SEQ ID NO: 24587 - DNA, 3032 bp, Homo sapiens
  source 1..3032: mol_type = unassigned DNA
gtttgcgggtggttgttgctctcggggccgtgtggagtaggtctggacctggactcacggctgcttggagcgtccgccatgaggagaagtgaggtgctggcggaggagtccatagtatgtctgcagaaagccctaaatcaccttcgggaaatatgggagctaattgggattccagaggaccagcggttacaaagaactgaggtggtaaagaagcatatcaaggaactcctggatatgatgattgctgaagaggaaagcctgaaggaaagactcatcaaaagcatatccgtctgtcagaaagagctgaacactctgtgcagcgagttacatgttgagccatttcaggaagaaggagagacgaccatcttgcaactagaaaaagatttgcgcacccaagtggaattgatgcgaaaacagaaaaaggagagaaaacaggaactgaagctacttcaagagcaagatcaagaactgtgcgaaattctttgtatgccccactatgatattgacagtgcctcagtgcccagcttagaagagctgaaccagttcaggcaacatgtgacaactttgagggaaacaaaggcttctaggcgtgaggagtttgtcagtataaagagacagatcatactgtgtatggaagcattagaccacaccccagacacaagctttgaaagagatgtggtgtgtgaagacgaagatgccttttgtttgtctttggagaatattgcaacactacaaaagttgctacggcagctggaaatgcagaaatcacaaaatgaagcagtgtgtgaggggctgcgtactcaaatccgagagctctgggacaggttgcaaatacctgaagaagaaagagaagctgtggccaccattatgtctgggtcaaaggccaaggtccggaaagcgctgcaattagaagtggatcggttggaagaactgaaaatgcaaaacatgaagaaagtgattgaggcaattcgagtggagctggttcagtactgggaccagtgcttttatagccaggagcagagacaagcttttgcccctttctgtgctgaggactacacagaaagtctgctccagctccacgatgctgagattgtgcggttaaaaaactactatgaagttcacaaggaactctttgaaggtgtccagaagtgggaagaaacctggaggcttttcttagagtttgagagaaaagcttcagatccaaatcgatttacaaaccgaggaggaaatcttctaaaagaagaaaaacaacgagccaagctccagaaaatgctgcccaagctggaagaagagttgaaggcacgaattgaattgtgggaacaggaacattcaaaggcatttatggtgaatgggcagaaattcatggagtatgtggcagaacaatgggagatgcatcgattggagaaagagagagccaagcaggaaagacaactgaagaacaaaaaacagacagagacagagatgctgtatggcagcgctcctcgaacacctagcaagcggcgaggactggctcccaatacaccgggcaaagcacgtaagctgaacactaccaccatgtccaatgctacggccaatagtagcattcggcctatctttggagggacagtctaccactcccccgtgtctcgacttcctccttctggcagcaagccagtcgctgcttccacctgttcagggaagaaaacaccccgtactggcaggcatggagccaacaaggagaacctggagctcaacggcagcatcctgagtggtgggtaccctggctcggcccccctccagcgcaacttcagcattaattctgttgccagcacctattctgagtttgcgaaggatccgtccctctctgacagttccactgttgggcttcagcgagaactttcaaaggcttccaaatctgatgctacttctggaatcctcaattcaaccaacatccagtcctgagaagccctgatcagtcaaccagctgtggcttcctgtgcctagactggacctaattatatgggggtgactttagtttttcttcagcttaggcgtgcttgaaaccttggccaggttccatgaccatgggcctaacttaaagatgtgaatgagtgttacagttgaaagcccatcataggtttagtggtcctaggagacttggttttgacttatatacatgaaaagtttatggcaagaagtgcaaattttagcatatggggcctgacttctctaccacataattctacttgctgaagcatgatcaaagcttgttttatttcaccactgtaggaaaatgattgactatgcccatccctgggggtaattttggcatgtatacctgtaactagtaattaacatcttttttgtttaggcatgttcaattaatgctgtagctatcatagctttgctcttacctgaagccttgtccccaccacacaggacagccttcctcctgaagagaatgtctttgtgtgtccgaagttgagatggcctgccctactgccaaagaggtgacaggaaggctgggagcagctttgttaaattgtgttcagttctgttacacagtgcattgccctttgttgggggtatgcatgtatgaacacacatgcttgtcggaacgctttctcggcgtttgtcccttggctctcatctcccccattcctgtgcctactttgcctgagttcttctacccccgcagttgccagccacattgggagtctgtttgttccaatgggttgagctgtctttgtcgtggagatctggaactttgcacatgtcactactggggaggtgttcctgctctagcttccacgatgaggcgccctctttacctatcctctcaatcactactcttcttgaagcactattatttattcttccgctgtctgcctgcagcagtactactgtcaacatagtgtaaatggttctcaaaagcttaccagtgtggacttggtgttagccacgctgtttactcatacagtacgtgtcctgtttttaaaatatacaattattcttaaaaataaattaaaatctgtatacttacatttcaaaaa

SEQ ID NO: 24588 - DNA, 2060 bp, Homo sapiens
  source 1..2060: mol_type = unassigned DNA
ggagcggctacgcggagtgacatcgccggtgtttgcgggtggttgttgctctcggggccgtgtggagtaggtctggacctggactcacggctgcttggagcgtccgccatgaggagaagtgaggtgctggcggaggagtccatagtatgtctgcagaaagccctaaatcaccttcgggaaatatgggagctaattgggattccagaggaccagcggttacaaagaactgaggtggtaaagaagcatatcaaggaagaaggagagacgaccatcttgcaactagaaaaagatttgcgcacccaagtggaattgatgcgaaaacagaaaaaggagagaaaacaggaactgaagctacttcaagagcaagatcaagaactgtgcgaaattctttgtatgccccactatgatattgacagtgcctcagtgcccagcttagaagagctgaaccagttcaggcaacatgtgacaactttgagggaaacaaaggcttctaggcgtgaggagtttgtcagtataaagagacagatcatactgtgtatggaagcattagaccacaccccagacacaagctttgaaagagatgtggtgtgtgaagacgaagatgccttttgtttgtctttggagaatattgcaacactacaaaagttgctacggcagctggaaatgcagaaatcacaaaatgaagcagtgtgtgaggggctgcgtactcaaatccgagagctctgggacaggttgcaaatacctgaagaagaaagagaagctgtggccaccattatgtctgggtcaaaggccaaggtccggaaagcgctgcaattagaagtggatcggttggaagaactgaaaatgcaaaacatgaagaaagtgattgaggcaattcgagtggagctggttcagtactgggaccagtgcttttatagccaggagcagagacaagcttttgcccctttctgtgctgaggactacacagaaagtctgctccagctccacgatgctgagattgtgcggttaaaaaactactatgaagttcacaaggaactctttgaaggtgtccagaagtgggaagaaacctggaggcttttcttagagtttgagagaaaagcttcagatccaaatcgatttacaaaccgaggaggaaatcttctaaaagaagaaaaacaacgagccaagctccagaaaatgctgcccaagctggaagaagagttgaaggcacgaattgaattgtgggaacaggaacattcaaaggcatttatggtgaatgggcagaaattcatggagtatgtggcagaacaatgggagatgcatcgattggagaaagagagagccaagcaggaaagacaactgaagaacaaaaaacagacagagacagagatgctgtatggcagcgctcctcgaacacctagcaagcggcgaggactggctcccaatacaccgggcaaagcacgtaagctgaacactaccaccatgtccaatgctacggccaatagtagcattcggcctatctttggagggacagtctaccactcccccgtgtctcgacttcctccttctggcagcaagccagtcgctgcttccacctgttcagggaagaaaacaccccgtactggcaggcatggagccaacaaggagaacctggagctcaacggcagcatcctgagtgcgagaactttcaaaggcttccaaatctgatgctacttctggaatcctcaattcaaccaacatccagtcctgagaagccctgatcagtcaaccagctgtggcttcctgtgcctagactggacctaattatatgggggtgactttagtttttcttcagcttaggcgtgcttgaaaccttggccaggttccatgaccatgggcctaacttaaagatgtgaatgagtgttacagttgaaagcccatcataggtttagtggtcctaggagacttggttttgacttatatacatgaaaagtttatggcaagaagtgcaaattttagcatatggggcctgacttctctaccacataattctacttgctgaagcatgatcaaagcttgttttatttcaccactgtaggaaa

SEQ ID NO: 24589 - DNA, 806 bp, Homo sapiens
  source 1..806: mol_type = unassigned DNA
cgcgcagcacggctcagaccgaggcgcacaggctcgcagctccgcggcgcctagcgctccggtccccgccgcgacgcgccaccgtccctgccggcgcctccgcgcgcttcgaaatgagggtcctgggtgggcgctgcggggcgctgctggcgtgtctcctcctagtgcttcccgtctcagaggcaaacttttgtttatattttagaaatgattttatatacaaccgtgcatgcatttctgtattggtcggcttatctggatgcaattttttctattctatatgctttttgtcaaagcaacaggcttcacaagtcctggttaggaagcgtcgtgcaaattctttacttgaagaaaccaaacagggtaatcttgaaagagaatgcatcgaagaactgtgcaataaagaagaagccagggaggtctttgaaaatgacccggaaacggattatttttatccaaaatacttagtttgtcttcgctcttttcaaactgggttattcactgctgcacgtcagtcaactaatgcttatcctgacctaagaagctgtgtcaatgccattccagaccagtgtagtcctctgccatgcaatgaagatggatatatgagctgcaaagatggaaaagcttcttttacttgcacttgtaaaccaggttggcaaggagaaaagtgtgaatttgacataaatgaatgcaaagatccctcaaatataaatggaggttgcagtcaaatttgtgataatacacctggaagttaccactgttcctgtaaaaatggttttgttatgctttcaaataagaaagattgt

SEQ ID NO: 24590 - DNA, 3556 bp, Homo sapiens
  source 1..3556: mol_type = unassigned DNA
aaaagcagcaactagggagctggtgaagaaggatgtctcagcagtgtttactaggcctccaacactagagcccatcccccagctccgaaaagcttcctggaaatgtccttgttatcacttcccctctcgggctgggcgctgggagcgggcggtctcctccgcccccggctgttccgccgaggctcgctgggtcgctggcgccgccgcgcagcacggctcagaccgaggcgcacaggctcgcagctccgcggcgcctagcgctccggtccccgccgcgacgcgccaccgtccctgccggcgcctccgcgcgcttcgaaatgagggtcctgggtgggcgctgcggggcgctgctggcgtgtctcctcctagtgcttcccgtctcagaggcaaactttttgtcaaagcaacaggcttcacaagtcctggttaggaagcgtcgtgcaaattctttacttgaagaaaccaaacagggtaatcttgaaagagaatgcatcgaagaactgtgcaataaagaagaagccagggaggtctttgaaaatgacccggaaacggattatttttatccaaaatacttagtttgtcttcgctcttttcaaactgggttattcactgctgcacgtcagtcaactaatgcttatcctgacctaagaagctgtgtcaatgccattccagaccagtgtagtcctctgccatgcaatgaagatggatatatgagctgcaaagatggaaaagcttcttttacttgcacttgtaaaccaggttggcaaggagaaaagtgtgaatttgacataaatgaatgcaaagatccctcaaatataaatggaggttgcagtcaaatttgtgataatacacctggaagttaccactgttcctgtaaaaatggttttgttatgctttcaaataagaaagattgtaaagatgtggatgaatgctctttgaagccaagcatttgtggcacagctgtgtgcaagaacatcccaggagattttgaatgtgaatgccccgaaggctacagatataatctcaaatcaaagtcttgtgaagatatagatgaatgctctgagaacatgtgtgctcagctttgtgtcaattaccctggaggttacacttgctattgtgatgggaagaaaggattcaaacttgcccaagatcagaagagttgtgaggttgtttcagtgtgccttcccttgaaccttgacacaaagtatgaattactttacttggcggagcagtttgcaggggttgttttatatttaaaatttcgtttgccagaaatcagcagattttcagcagaatttgatttccggacatatgattcagaaggcgtgatactgtacgcagaatctatcgatcactcagcgtggctcctgattgcacttcgtggtggaaagattgaagttcagcttaagaatgaacatacatccaaaatcacaactggaggtgatgttattaataatggtctatggaatatggtgtctgtggaagaattagaacatagtattagcattaaaatagctaaagaagctgtgatggatataaataaacctggacccctttttaagccggaaaatggattgctggaaaccaaagtatactttgcaggattccctcggaaagtggaaagtgaactcattaaaccgattaaccctcgtctagatggatgtatacgaagctggaatttgatgaagcaaggagcttctggaataaaggaaattattcaagaaaaacaaaataagcattgcctggttactgtggagaagggctcctactatcctggttctggaattgctcaatttcacatagattataataatgtatccagtgctgagggttggcatgtaaatgtgaccttgaatattcgtccatccacgggcactggtgttatgcttgccttggtttctggtaacaacacagtgccctttgctgtgtccttggtggactccacctctgaaaaatcacaggatattctgttatctgttgaaaatactgtaatatatcggatacaggccctaagtctatgttccgatcaacaatctcatctggaatttagagtcaacagaaacaatctggagttgtcgacaccacttaaaatagaaaccatctcccatgaagaccttcaaagacaacttgccgtcttggacaaagcaatgaaagcaaaagtggccacatacctgggtggccttccagatgttccattcagtgccacaccagtgaatgccttttataatggctgcatggaagtgaatattaatggtgtacagttggatctggatgaagccatttctaaacataatgatattagagctcactcatgtccatcagtttggaaaaagacaaagaattcttaaggcatcttttctctgcttataataccttttccttgtgtgtaattatacttatgtttcaataacagctgaagggttttatttacaatgtgcagtctttgattattttgtggtcctttcctgggatttttaaaaggtcctttgtcaaggaaaaaaattctgttgtgatataaatcacagtaaagaaattcttacttctcttgctatctaagaatagtgaaaaataacaattttaaatttgaatttttttcctacaaatgacagtttcaatttttgtttgtaaaactaaattttaattttatcatcatgaactagtgtctaaatacctatgtttttttcagaaagcaaggaagtaaactcaaacaaaagtgcgtgtaattaaatactattaatcataggcagatactattttgtttatgtttttgtttttttcctgatgaaggcagaagagatggtggtctattaaatatgaattgaatggagggtcctaatgccttatttcaaaacaattcctcagggggaacagctttggcttcatctttctcttgtgtggcttcacatttaaaccagtatctttattgaattagaaaacaagtgggacatattttcctgagagcagcacaggaatcttcttcttggcagctgcagtctgtcaggatgagatatcagattaggttggataggtggggaaatctgaagtgggtacattttttaaattttgctgtgtgggtcacacaaggtctacattacaaaagacagaattcagggatggaaaggagaatgaacaaatgtgggagttcatagttttccttgaatccaacttttaattaccagagtaagttgccaaaatgtgattgttgaagtacaaaaggaactatgaaaaccagaacaaattttaacaaaaggacaaccacagagggatatagtgaatatcgtatcattgtaatcaaagaagtaaggaggtaagattgccacgtgcctgctggtactgtgatgcatttcaagtggcagttttatcacgtttgaatctaccattcatagccagatgtgtatcagatgtttcactgacagtttttaacaataaattcttttcactgtattttatatcacttataataaatcggtgtataattttaaaatgcatgtgaatatctttattatatcaactgtttgaataaaacaaaattacataatagacatttaactcttca

SEQ ID NO: 24591 - DNA, 3481 bp, Homo sapiens
  source 1..3481: mol_type = unassigned DNA
gagaatggcggcggcggcggcggcggcggcggccgctgccattgcccggagatggccggcagagccgccgagacgccgaagagcccgccgcccgcgcgaggtgtagacggggcactgccttcagagcaggtcctgccagcctcgctggagaggatgccctcgtgtccgtgatgggctgtgggacaagcaaggtccttcccgagccacccaaggatgtccagctggatctggtcaagaaggtggagcccttcagtggcactaagagtgacgtgtacaagcacttcatcacagaggtggacagtgttggccctgtcaaagccgggttcccagcagcaagtcagtatgcacacccctgccccggtcccccgactgctggccacacggagcctccctcagaaccaccacgcagggccagggtagctaagtacagggccaagtttgacccacgtgttacagctaagtatgacatcaaggccctaattggccgaggcagcttcagccgagtggtacgtgtagagcaccgggcaacccggcagccgtatgccatcaagatgattgagaccaagtaccgggaggggcgggaggtgtgtgagtcggagctgcgtgtgctgcgtcgggtgcgtcatgccaacatcatccagctggtggaggtgttcgagacacaggagcgggtgtacatggtgatggagctggccactggtggagagctctttgaccgcatcattgccaagggctccttcaccgagcgtgacgccacgcgggtgctgcagatggtgctggatggcgtccggtatctgcatgcactgggcatcacacaccgagacctcaaacctgagaatctgctctactaccatccgggcactgactccaagatcatcatcaccgacttcggcctggccagtgctcgcaagaagggtgatgactgcttgatgaagaccacctgtggcacgcctgagtacattgccccagaagtcctggtccgcaagccatacaccaactcagtggacatgtgggcgctgggcgtcattgcctacatcctactcagtggcaccatgccgtttgaggatgacaaccgtacccggctgtaccggcagatcctcaggggcaagtacagttactctggggagccctggcctagtgtgtccaacctggccaaggacttcattgaccgcctgctgacagtggaccctggagcccgtatgactgcactgcaggccctgaggcacccgtgggtggtgagcatggctgcctcttcatccatgaagaacctgcaccgctccatatcccagaacctccttaaacgtgcctcctcgcgctgccagagcaccaaatctgcccagtccacgcgttccagccgctccacacgctccaataagtcacgccgtgtgcgggaacgggagctgcgggagctcaacctgcgctaccagcagcaatacaatggctgagccgcctggctgtgcacacatgcagcacgacccagcctggccacacactgtggtgccatctgggtccgatgccctctctggagataggcctatgtggcccacagtaggtgaagaatgtctggctccagccctttctctgtgccttcagcagcccctgtcctcaccatgggcctgggccaggtgtgacagagtagaggtagcacagggggctgtgactccccctgaactgggagcctggcctggcactgatacccctcttggtgggcagctgctctggtggagttgggaagggataggacctggccttcactgtctcccttgccctttgacttttccccaatcaaagggaactgcagtgctgggtggagtgtcctgtggcctcaggaccctttgggacagttacttctgggaccccctttcctccacagagcccttctccctggtttcacacattcccatgcatcctgatccttaagattatgctccagtgggagaccctggtaggcacaaagcttgtgccttgactggacccgtagcccctggctaggtcgaaacagccctccacctcccagccaagatctgtcttccttcatggtgcctccagggagccttcctggtcccaggacctctggtggagggccatggcgtggaccttcacccttctggactgtgtggccatgctggtcatcggcttgcccaggctccagcctctccagattctgaggggtctcagcccaccgcccttggtgccttctttgtagagcccaccgctacctccctctccccgttggatgtccattccattccccaggtgcctccttcccaactgggggtggttaaagggagccccactgctgctacctggggaatggggcacctgggggccaaggcagagggaagggggtcctcccgattagggtcgagtgtcagcctgggttctatcctttggtgcagccccattgccttttcccttcaggctctgttgctccctcctctgcagctgcacgaaggcgccatctggtgtctgcatgggtgttggcagcctgggagtgatcactgcacgcccatcgtgcacacctgcccatcgtgcacacccacccatggtgcacacctgtagtcctccatgaggacatgggaaggtaggagttgccgccctgggggagggtcccgggctgctcacctctccccttctgctgagcttctgcgcacccctccctggaacttagccatactgtgtgacctgcctctgaaaccagggtgccaggggcactgccttctcacagctggccttgccccgtccaccctgtgctgcttcccttcacagcattaaccttccagtctgggtcccactgagcctcaagctggaaggagcccctgcgggaggtgggtggggttgggtggctgctttcccagaggcctgagccagaaccatccccatttcttttgtggtatctccccctaccacaaaccaggctggaacccaagccccttcctccacagctgccttcagtgggtagaatggggccagggcccagctttggccttagcttgacggcagggcccctgccattgcaggagggtttggttcccactcagcttctgccggtcggcagcctgggccaggcccttttcctgcatgtgccacctccagtgggaaacaaaactaaagagaccactctgtgccaagtcgactatgccttagacacatcctcctaccgtccccaatgccccctgggcaggaggcagtggagaaccaagccccatggcctcagaatttccccccagttccccaagtgtctctggggacctgaagccctggggcttacgttctctcttgcccagggtgggcctggtcctgagggcaggacagggggtttggagatgtgggcctttgatagacccacttgggccttcatgccatggcctgtggatggagaatgtgcagttatttattatgcgtattcagtttgtaaacgtatcctctgtattcagtaaacaggctgcctctccagggagggctgccattcattccaaca

SEQ ID NO: 24592 - DNA, 2526 bp, Homo sapiens
  source 1..2526: mol_type = unassigned DNA
gtgcagatcgtggctgacagaggaacgggggtattgagcggttaagaagattgtctaccaaatatagaacagaaaagatatatcccacagccactggagaaaaagaagaaaatgttaaaaagaacagatacaaggacatactgccatttgatcacagccgagttaaattgacattaaagactccttcacaagattcagactatatcaatgcaaattttataaagatcattgtaatggcctgccgagaatttgagatgggaaggaaaaaatgtgagcgctattggcctttgtatggagaagaccccataacgtttgcaccatttaaaatttcttgtgaggatgaacaagcaagaacagactacttcatcaggacactcttacttgaatttcaaaatgaatctcgtaggctgtatcagtttcattatgtgaactggccagaccatgatgttccttcatcatttgattctattctggacatgataagcttaatgaggaaatatcaagaacatgaagatgttcctatttgtattcattgcagtgcaggctgtggaagaacaggtgccatttgtgccatagattatacgtggaatttactaaaagctgggaaaataccagaggaatttaatgtatttaatttaatacaagaaatgagaacacaaaggcattctgcagtacaaacaaaggagcaatatgaacttgttcatagagctattgcccaactgtttgaaaaacagctacaactatatgaaattcatggagctcagaaaattgctgatggagtgaatgaaattaacactgaaaacatggtcagctccatagagcctgaaaaacaagattctcctcctccaaaaccaccaaggacccgcagttgccttgttgaaggggatgctaaagaagaaatactgcagccaccggaacctcatccagtgccacccatcttgacaccttctcccccttcagcttttccaacagtcactactgtgtggcaggacaatgatagataccatccaaagccagtgttgcatatggtttcatcagaacaacattcagcagacctcaacagaaactatagtaaatcaacagaacttccagggaaaaatgaatcaacaattgaacagatagataaaaaattggaacgaaatttaagttttgagattaagaaggtccctctccaagagggaccaaaaagttttgatgggaacacacttttgaataggggacatgcaattaaaattaaatctgcttcaccttgtatagctgataaaatctctaagccacaggaattaagttcagatctaaatgtcggtgatacttcccagaattcttgtgtggactgcagtgtaacacaatcaaacaaagtttcagttactccaccagaagaatcccagaattcagacacacctccaaggccagaccgcttgcctcttgatgagaaaggacatgtaacgtggtcatttcatggacctgaaaatgccatacccatacctgatttatctgaaggcaattcctcagatatcaactatcaaactaggaaaactgtgagtttaacaccaagtcctacaacacaagttgaaacacctgatcttgtggatcatgataacacttcaccactcttcagaacacccctcagttttactaatccacttcactctgatgactcagactcagatgaaagaaactctgatggtgctgtgacccagaataaaactaatatttcaacagcaagtgccacagtttctgctgccactagtactgaaagcatttctactaggaaagtattgccaatgtccattgctagacataatatagcaggaacaacacattcaggtgctgaaaaagatgttgatgttagtgaagattcacctcctcccctacctgaaagaactcctgaatcgtttgtgttagcaagtgaacataatacacctgtaagatcggaatggagtgaacttcaaagtcaggaacgatctgaacaaaaaaagtctgaaggcttgataacctctgaaaatgagaaatgtgatcatccagcgggaggtattcactatgaaatgtgcatagaatgtccacctactttcagtgacaagagagaacaaatatcagaaaatccaacagaagccacagatattggttttggtaatcgatgtggaaaacccaaaggaccaagagatccaccttcagaatggacatgattcagggagctagaagacactttaagttatactggaaaattcaggtgccactgaaagccagatttatagtattccatctttaatatgtgggactaacagcagtgtagattgttaccttaatattttttgctgggaccatctacctgccttatactacacttaggaaaaagtattacatatggtttattttgaaacttcaagtattattgccttaatgtctcttaaccctgttacacgctgcttgtagacatgttaatatagtaatacctttatgatatattgagtttaaggactactctttttctgttttatcatgtatgcattattttgtatatgtaca

SEQ ID NO: 24593 - DNA, 2472 bp, Homo sapiens
  source 1..2472: mol_type = unassigned DNA
ccgcggcgtccacactcgccgcgcgcgcggcggccgggctggaccttgctggcccgcggcgccatgagccgcagcctggactcggcgcggagcttcctggagcggctggaagcgcggggcggccgggagggggcagtcctcgccggcgagttcagcaaaaggtgtgagcggtactgggcccaggagcaggagccactgcagactgggcttttctgcatcactctgataaaggagaagtggctgaatgaggacatcatgctcaggaccctcaaggtcacattccagaaggagtcccgttctgtgtaccagctacagtatatgtcctggccagaccgtggggtccccagcagtcctgaccacatgctcgccatggtggaggaagcccgtcgcctccagggatctggccctgaacccctctgtgtccactgcagtgcgggttgtgggcgaacaggcgtcctgtgcaccgtggattatgtgaggcagctgctcctgacccagatgatcccacctgacttcagtctctttgatgtggtccttaagatgaggaagcagcggcctgcggccgtgcagacagaggagcagtacaggttcctgtaccacacggtggctcagatgttctgctccacactccagaatgccagcccccactaccagaacatcaaagagaattgtgccccactctacgacgatgccctcttcctccggactccccaggcacttctcgccataccccgcccaccaggaggggtcctcaggagcatctctgtgcccgggtccccgggccacgccatggctgacacctacgcggtggtgcagaagcgcggggctccagcgggcgccgggagtgggacgcagacggggacggggacggggacgggggcgcgcagcgcggaggaggcgccgctctacagcaaggtgacgccgcgcgcccagcgacccggggcgcacgcggaggacgcgagggggacgctgcctggccgcgttcctgctgaccaaagtcctgccggatctggcgcctacgaggacgtggcgggtggagctcagaccggtgggctaggtttcaacctgcgcattgggaggccgaagggtccccgggacccgcctgctgagtggacccgggtgtaagtctaacgccagttcctgcctgttgcctcttgtgagctcggactgctgatgccccggtgctgctgagcgccgtgcgcagaatggaaacagtgggcctggatcaaagttaaagtttctcagggtgggaaatgtgggggctttgccccaatgactgtagcattcaaggcttgaggctggaggaggtagctagggtatagtggctggtgaggctgcacagagcagattcaagaaagaagatcaggaaggggcatgacccctgagttatgaaggggagaagggacagatgagcttccggagactgctctcctcaccacacagcactagtccatcctcagcacctgagcctccctcacttggacactcaggggaccacacagagaagtggatggacacttcgccatccaggcagaactaagccaggcataaccacagccaagcagattaaccccaggcagaccgataaaaagacctccagataggcagacagacagatggaccaccaacctggacagacagccaaagcttcagagatacagtccacaggtggacaaagggatccccagccagagagagagagaccagccaacagcttgatagaccagtgcagccagagagaccaccaaacagagcccccaaaagacagacatctctgctagctggacagccaggtggaccccctaagttagattactagacagatataaacagatcccctgctgaacagatacacagagttctcagaccccacccccaccctcaggtgggctggctggctgacagaccttctggccagacagactcctaaccaaccagatggactgccagacaggcagacatcagccacatggaatcctgacatcccagccagccggccagactctcatcttgatgtcttgatggatggaccccagctagtcagacatgatcctccagattgacagacaagtcccccaaatgagtacacatctccagctattcagacagatggacccccagcaaatcaggacctatctaggcagaccccagccagacccccgccagacagactcccaaccagactgaccccttactattcacacagcctgccgagtagctgggactacaggtctaattttttttttttttaagaaatgagtttttgccatgttgcccagactggtcttgaactcccaacctcaagcaatcctcctgcctcagcctcccaaagtgctgagattacaggtgtgagccaccaggctcagccccctaagatttgaaacactttaaatggcccatggtagggttcctgctaggataaaacattaagcggctgttaaaagaaataaaaggaggacacgtctctgtgca

SEQ ID NO: 24594 - DNA, 1648 bp, Homo sapiens
  source 1..1648: mol_type = unassigned DNA
ctccccggatcgtgcggggcctgagcctctccgccggcgcaggctctgctcgcgccagctcgctcccgcagccatgcccaccaccatcgagcgggagttcgaagagttggatactcagcgtcgctggcagccgctgtacttggaaattcgaaatgagtcccatgactatcctcatagagtggccaagtttccagaaaacagaaatcgaaacagatacagagatgtaagcccatatgatcacagtcgtgttaaactgcaaaatgctgagaatgattatattaatgccagtttagttgacatagaagaggcacaaaggagttacatcttaacacagggtccacttcctaacacatgctgccatttctggcttatggtttggcagcagaagaccaaagcagttgtcatgctgaaccgcattgtggagaaagaatcggttaaatgtgcacagtactggccaacagatgaccaagagatgctgtttaaagaaacaggattcagtgtgaagctcttgtcagaagatgtgaagtcgtattatacagtacatctactacaattagaaaatatcaattatattgagaacttgtggatcacactgtatttgaaattattaatgctggatgttaaaaggtcactaaaaagtggtgaaaccagaacaatatctcactttcattatactacctggccagattttggagtccctgaatcaccagcttcatttctcaatttcttgtttaaagtgagagaatctggctccttgaaccctgaccatgggcctgcggtgatccactgtagtgcaggcattgggcgctctggcaccttctctctggtagacacttgtcttgttttgatggaaaaaggagatgatattaacataaaacaagtgttactgaacatgagaaaataccgaatgggtcttattcagaccccagatcaactgagattctcatacatggctataatagaaggagcaaaatgtataaagggagattctagtatacagaaacgatggaaagaactttctaaggaagacttatctcctgcctttgatcattcaccaaacaaaataatgactgaaaaatacaatgggaacagaataggtctagaagaagaaaaactgacaggtgaccgatgtacaggactttcctctaaaatgcaagatacaatggaggagaacagtgagagtgctctacggaaacgtattcgagaggacagaaaggccaccacagctcagaaggtgcagcagatgaaacagaggctaaatgagaatgaacgaaaaagaaaaaggccaagattgacagacacctaatattcatgacttgagaatattctgcagctataaattttgaaccattgatgtgcaaagcaagacctgaagcccactccggaaactaaagtgaggctcgctaaccctctagattgcctcacagttgtttgtttacaaagtaaactttacatccaggggatgaagagcacccaccagcagaagactttgcagaacctttaattggatgtgttaagtgtttttaatgagtgtatgaaatgtagaaagatgtacaagaaataaattaggggagattactttgtattgtactgccattcctactgtatttttatactttttggcagcattaaatatttttgttaaata

SEQ ID NO: 24595 - DNA, 3424 bp, Homo sapiens
  source 1..3424: mol_type = unassigned DNA
ggtgtctcggccatgacacacatttgacatgccctccctcaacctacttatagactatttttcttgctctgcagcatggaccaaagagaaattctgcagaagttcctggatgaggcccaaagcaagaaaattactaaagaggagtttgccaatgaatttctgaagctgaaaaggcaatctaccaagtacaaggcagacaaaacctatcctacaactgtggctgagaagcccaagaatatcaagaaaaacagatataaggatattttgccctatgattatagccgggtagaactatccctgataacctctgatgaggattccagctacatcaatgccaacttcattaagggagtttatggacccaaggcttatattgccacccagggtcctttatctacaaccctcctggacttctggaggatgatttgggaatatagtgtccttatcattgttatggcatgcatggagtatgaaatgggaaagaaaaagtgtgagcgctactgggctgagccaggagagatgcagctggaatttggccctttctctgtatcctgtgaagctgaaaaaaggaaatctgattatataatcaggactctaaaagttaagttcaatagtgaaactcgaactatctaccagtttcattacaagaattggccagaccatgatgtaccttcatctatagaccctattcttgagctcatctgggatgtacgttgttaccaagaggatgacagtgttcccatatgcattcactgcagtgctggctgtggaaggactggtgttatttgtgctattgattatacatggatgttgctaaaagatgggagtcaagcaaagcattgtattcctgagaaaaatcacactctccaagcagactcttattctcctaatttaccaaaaagtaccacaaaagcagcaaaaatgatgaaccaacaaaggacaaaaatggaaatcaaagaatcttcttcctttgactttaggacttctgaaataagtgcaaaagaagagctagttttgcaccctgctaaatcaagcacttcttttgactttctggagctaaattacagttttgacaaaaatgctgacacaaccatgaaatggcagacaaaggcatttccaatagttggggagcctcttcagaagcatcaaagtttggatttgggctctcttttgtttgagggatgttctaattctaaacctgtaaatgcagcaggaagatattttaattcaaaggtgccaataacacggaccaaatcaactccttttgaattgatacagcagagagaaaccaaggaggtggacagcaaggaaaacttttcttatttggaatctcaaccacatgattcttgttttgtagagatgcaggctcaaaaagtaatgcatgtttcttcagcagaactgaattattcactgccatatgactctaaacaccaaatacgtaatgcctctaatgtaaagcaccatgactctagtgctcttggtgtatattcttacatacctttagtggaaaatccttatttttcatcatggcctccaagtggtaccagttctaagatgtctcttgatttacctgagaagcaagatggaactgtttttccttcttctctgttgccaacatcctctacatccctcttctcttattacaattcacatgattctttatcactgaattctccaaccaatatttcctcactattgaaccaggagtcagctgtactagcaactgctccaaggatagatgatgaaatcccccctccacttcctgtatggacacctgaatcatttattgtggttgaggaagctggagaattctcaccaaatgttcccaaatccttatcctcagctgtgaaggtaaaaattggaacatcactggaatggggtggaacatctgaaccaaagaaatttgatgactctgtgatacttagaccaagcaagagtgtaaaactccgaagtcctaaatcagaactacatcaagatcgttcttctcccccacctcctctcccagaaagaactctagagtccttctttcttgccgatgaagattgtatgcaggcccaatctatagaaacatattctactagctatcctgacaccatggaaaattcaacatcttcaaaacagacactgaagactcctggaaaaagtttcacaaggagtaagagtttgaaaattttgcgaaacatgaaaaagagtatctgtaattcttgcccaccaaacaagcctgcagaatctgttcagtcaaataactccagctcatttctgaattttggttttgcaaaccgtttttcaaaacccaaaggaccaaggaatccaccaccaacttggaatatttaataaaactccagatttataataatatgggctgcaagtacacctgcaaataaaactactagaatactgctagttaaaataagtgctctatatgcataatatcaaatatgaagatatgctaatgtgttaatagcttttaaaagaaaagcaaaatgccaataagtgccagttttgcattttcatatcatttgcattgagttgaaaactgcaaataaaagtttgtcacttgagcttatgtacagaatgctatatgagaaacacttttagaatggatttatttttcatttttgccagttatttttattttcttttacttttctacataaacataaacttcaaaaggtttgtaagatttggatctcaactaatttctacattgccagaatatactataaaaagttaaaaaaaaaacttactttgtgggttgcaatacaaactgctcttgacaatgactattccctgacagttatttttgcctaaatggagtataccttgtaaatcttcccaaatgttgtggaaaactggaatattaagaaaatgagaaattatatttattagaataaaatgtgcaaataatgacaattatttgaatgtaacaaggaattcaactgaaatcctgataagttttaaccaaagtcattaaattaccaattctagaaaagtaatcaatgaaatataatagctatcttttggtagcaaaagatataaattgtatatgtttatacaggatctttcagatcatgtgcaatttttatctaaccaatcagaaatactagtttaaaatgaatttctatatgaatatggatctgccataagaaaatctagttcaactctaattttatgtagtaaataaattggcaggtaattgtttttacaaagaatccacctgacttcccctaatgcattaaaaatatttttatttaaataactttatttataacttttagaaacatgtagtattgtttaaacatcatttgttcttcagtatttttcatttggaagtccaatagggcaaattgaatgaagtattattatctgtctcttgtagtacaatgtatccaacagacactcaataaactttttggttgttaaa

SEQ ID NO: 24596 - DNA, 5839 bp, Homo sapiens
  source 1..5839: mol_type = unassigned DNA
tctcctctggatcttaactactgagcgcaatgctgagccatggagccgggttggccttgtggatcacactgagcctgctgcagactggactggcggagccagagagatgtaacttcaccctggcggagtccaaggcctccagccattctgtgtctatccagtggagaattttgggctcaccctgtaactttagcctcatctatagcagtgacaccctgggggccgcgttgtgccctacctttcggatagacaacaccacatacggatgtaaccttcaagatttacaagcaggaaccatctataacttcaggattatttctctggatgaagagagaacagtggtcttgcaaacagatcctttacctcctgctaggtttggagtcagtaaagagaagacgacttcaaccagcttgcatgtttggtggactccttcttccggaaaagtcacctcatatgaggtgcaattatttgatgaaaataaccaaaagatacagggggttcaaattcaagaaagtacttcatggaatgaatacacttttttcaatctcactgctggtagtaaatacaatattgccatcacagctgtttctggaggaaaacgttctttttcagtttataccaatggatcaacagtgccatctccagtgaaagatattggtatttccacaaaagccaattctctcctgatttcctggtcccatggttctgggaatgtggaacgataccggctgatgctaatggataaagggatcctagttcatggcggtgttgtggacaaacatgctacttcctatgcttttcacgggctgacccctggctacctctacaacctcactgttatgactgaggctgcagggctgcaaaactacaggtggaaactagtcaggacagcccccatggaagtctcaaatctgaaggtgacaaatgatggcagtttgacctctctaaaagtcaaatggcaaagacctcctggaaatgtggattcttacaatatcaccctgtctcacaaagggaccatcaaggaatccagagtattagcaccttggattactgaaactcactttaaagagttagtccccggtcgactttatcaagttactgtcagctgtgtctctggtgaactgtctgctcagaagatggcagtgggcagaacatttccagacaaagttgcaaacctggaggcaaacaataatggcaggatgaggtctcttgtagtgagctggtcgccccctgctggagactgggagcagtatcggatcctactcttcaatgattctgtggtgctgctcaacatcactgtgggaaaggaagaaacacagtatgtcatggatgacacggggctcgtaccgggaagacagtatgaggtggaagtcattgttgagagtggaaatttgaagaattctgagcgttgccaaggcaggacagtccccctggctgtcctccagcttcgtgtcaaacatgccaatgaaacctcactgagtatcatgtggcagacccctgtagcagaatgggagaaatacatcatttccctagctgacagagacctcttactgatccacaagtcactctccaaagatgccaaagaattcacttttactgacctggtgcctggacgaaaatacatggctacagtcaccagtattagtggagacttaaaaaattcctcttcagtaaaaggaagaacagtgcctgcccaagtgactgacttgcatgtggccaaccaaggaatgaccagtagtctgtttactaactggacccaggcacaaggagacgtagaattttaccaagtcttactgatccatgaaaatgtggtcattaaaaatgaaagcatctccagtgagaccagcagatacagcttccactctctcaagtccggcagcctgtactccgtggtggtaacaacagtgagtggagggatctcttcccgacaagtggttgtggagggaagaacagtcccttccagtgtgagtggagtaacggtgaacaattccggtcgtaatgactacctcagcgtttcctggctgctggcgcccggagatgtggataactatgaggtaacattgtctcatgacggcaaggtggttcagtcccttgtcattgccaagtctgtcagagaatgttccttcagctccctcaccccaggccgcctctacaccgtgaccataactacaaggagtggcaagtatgaaaatcactccttcagccaagagcggacagtgcctgacaaagtccagggagtcagtgttagcaactcagccaggagtgactatttaagggtatcctgggtgcatgccactggagactttgatcactatgaagtcaccattaaaaacaaaaacaacttcattcaaactaaaagcattcccaagtcagaaaacgaatgtgtatttgttcagctagtccctggacggttgtacagtgtcactgttactacaaaaagtggacaatatgaagccaatgaacaagggaatgggagaacaattccagagcctgttaaggatctaacattgcgcaacaggagcactgaggacttgcatgtgacttggtcaggagctaatggggatgtcgaccaatatgagatccagctgctcttcaatgacatgaaagtatttcctccttttcaccttgtaaataccgcaaccgagtatcgatttacttccctaacaccaggccgccaatacaaaattcttgtcttgacgattagcggggatgtacagcagtcagccttcattgagggcttcacagttcctagtgctgtcaaaaatattcacatttctcccaatggagcaacagatagcctgacggtgaactggactcctggtgggggagacgttgattcctacacggtgtcggcattcaggcacagtcaaaaggttgactctcagactattcccaagcacgtctttgagcacacgttccacagactggaggccggggagcagtaccagatcatgattgcctcagtcagcgggtccctgaagaatcagataaatgtggttgggcggacagtcccagcagctgtcaccgacctgaggatcacagagaactccaccaggcacctgtccttccgctggaccgcctcagagggggagctcagctggtacaacatctttttgtacaacccagatgggaatctccaggagagagctcaagttgacccactagtccagagcttctctttccagaacttgctacaaggcagaatgtacaagatggtgattgtaactcacagtggggagctgtctaatgagtctttcatatttggtagaacagtcccagcctctgtgagtcatctcagggggtccaatcggaacacgacagacagcctttggttcaactggagtccagcctctggggactttgacttttatgagctgattctctataatcccaatggcacaaagaaggaaaactggaaagacaaggacctgacggagtggcggtttcaaggccttgttcctggaaggaagtacgtgctgtgggtggtaactcacagtggagatctcagcaataaagtcacagcggagagcagaacagctccaagtcctcccagtcttatgtcatttgctgacattgcaaacacatccttggccatcacgtggaaagggcccccagactggacagactacaacgactttgagctgcagtggttgcccagagatgcacttactgtcttcaacccctacaacaacagaaaatcagaaggacgcattgtgtatggtcttcgtccagggagatcctatcaattcaacgtcaagactgtcagtggtgattcctggaaaacttacagcaaaccaatttttggatctgtgaggacaaagcctgacaagatacaaaacctgcattgccggcctcagaactccacggccattgcctgttcttggatccctcctgattctgactttgatggttatagtattgaatgccggaaaatggacacccaagaagttgagttttccagaaagctggagaaagaaaaatctctgctcaacatcatgatgctagtgccccataagaggtacctggtgtccatcaaagtgcagtcggccggcatgaccagcgaggtggttgaagacagcactatcacaatgatagaccgcccccctcctccacccccacacattcgtgtgaatgaaaaggatgtgctaattagcaagtcttccatcaactttactgtcaactgcagctggttcagcgacaccaatggagctgtgaaatacttcacagtggtggtgagagaggctgatggcagtgatgagctgaagccagaacagcagcaccctctcccttcctacctggagtacaggcacaatgcctccattcgggtgtatcagactaattattttgccagcaaatgtgccgaaaatcctaacagcaactccaagagttttaacattaagcttggagcagagatggagagcctaggtggaaaatgcgatcccactcagcaaaaattctgtgatggaccactgaagccacacactgcctacagaatcagcattcgagcttttacacagctctttgatgaggacctgaaggaattcacaaagccactctattcagacacatttttttctttacccatcactactgaatcagagcccttgtttggagctattgaaggtgtgagtgctggtctgtttttaattggcatgctagtggctgttgttgccttattgatctgcagacagaaagtgagccatggtcgagaaagaccctctgcccgtctgagcattcgtagggatcgaccattatctgtccacttaaacctgggccagaaaggtaaccggaaaacttcttgtccaataaaaataaatcagtttgaagggcatttcatgaagctacaggctgactccaactaccttctatccaaggaatacgaggagttaaaagacgtgggccgaaaccagtcatgtgacattgcactcttgccggagaatagagggaaaaatcgatacaacaatatattgccctatgatgccacgcgagtgaagctctccaatgtagatgatgatccttgctctgactacatcaatgccagctacatccctggcaacaacttcagaagagaatacattgtcactcagggaccgcttcctggcaccaaggatgacttctggaaaatggtgtgggaacaaaacgttcacaacatcgtcatggtgacccagtgtgttgagaagggccgagtaaagtgtgatcattactggccagcggaccaggattccctctactatggggacctcatcctgcagatgctctcagagtccgtcctgcctgagtggaccatccgggagtttaagatatgcggtgaggaacagcttgatgcacacagactcatccgccactttcactatacggtgtggccagaccatggagtcccagaaaccacccagtctctgatccagtttgtgagaactgtcagggactacatcaacagaagcccgggtgctgggcccactgtggtgcactgcagtgctggtgtgggtaggactggaacctttattgcattggaccgaatcctccagcagttagactccaaagactctgtggacatttatggagcagtgcacgacctaagacttcacagggttcacatggtccagactgagtgtcagtatgtctacctacatcagtgtgtaagagatgtcctcagagcaagaaagctacggagtgaacaagaaaaccccttgtttccaatctatgaaaatgtgaatccagagtatcacagagatccagtctattcaaggcattgagaatgtacctgaagagctcctggataaaaattattcactgtgtgatttgtttttaaaaacttgcttcatgccctacagaggtgcca

SEQ ID NO: 24597 - DNA, 5038 bp, Homo sapiens
  source 1..5038: mol_type = unassigned DNA
ccggaggcagtgattccaagctgctcgcgcacgctgctgccaagctgcaggatggtgcacgtagccaggctgctgctgctgctcctcactttcttcctccgcacggatgctgagacacctccaaggtttacacgaacacccgttgatcagacaggggtctctggcggagttgcctctttcatctgccaagctacgggagacccaagacctaaaattgtctggaacaaaaaaggaaagaaagtcagcaatcagagatttgaggtaatagagtttgacgatgggtctggatcagttctcagaatacaacccttacggactccgagggatgaggccatttatgaatgtgtggcctcaaataatgtgggagaaataagtgtatccaccagactcacagttttgcgggaagatcaaattcccaggggcttccctaccattgacatgggcccacagttgaaggtggttgagcgtactcgcacggccaccatgctttgtgcagccagtggtaatccggatccagaaatcacttggtttaaagatttcttacctgtggacacaagcaacaacaatggtcgtattaagcagttacgatcagaatctattggagcccttcagattgagcagagtgaagagtctgaccaaggaaaatatgagtgtgttgccaccaacagcgcgggcactcgctattccgctcctgccaatttatatgtcagagttcgccgtgtcccaccaagattctctatcccacccactaatcatgaaatcatgccaggcggaagcgttaatatcacctgtgtggccgtggggtcaccaatgccttatgtaaagtggatgttgggggcagaagatctgacacctgaagatgatatgccaataggaagaaatgtgctagaactgaatgatgtaagacagtcagcaaattacacctgtgttgctatgtcaacactgggtgtcattgaagcaatagcacagatcactgtcaaagccttacccaaacctccaggaactcctgtagtgaccgagagcacagctacaagcatcacactgacgtgggactctgggaaccctgagcctgtttcttattacataattcagcataaacctaaaaactctgaggaactttacaaagaaattgatggggtggcgaccacacgctacagtgtcgctggactaagtccctactcggattatgaattcagggttgttgctgtcaataacattgggcgggggcctcccagcgaacctgtgctaacacaaacctcagagcaagcaccatccagtgccccgagggatgtccaggcacgaatgttgagttcgaccaccattttggtacagtggaaggaacctgaagagccaaatggacagatccaaggatatagagtttattatacaatggatcccactcaacatgtcaacaactggatgaaacacaatgtagctgacagccaaatcactactattggcaacttagtgccccagaaaacatattctgtcaaagtcctggcttttacctcaattggagatggtcccctttcaagtgacatacaagtcatcactcagacaggagtaccagggcagccactaaacttcaaagcagaacctgagtctgaaacaagtattttgctctcttggacacctccacgttcagataccattgccaactatgaactggtctacaaagatggggagcatggagaggagcaacgaattaccattgagccagggacatcatataggctgcaaggactgaaaccaaacagcttatactatttccgtctggctgcacgctcccctcaaggcctgggtgcttctactgcagaaatatcagctagaaccatgcagtcaatgtttgcaaaaaattttcatgtcaaagcagtaatgaagacttccgtgttgctgtcttgggagattccagagaattataactccgccatgcctttcaaaattctttatgatgatgggaaaatggtagaagaagtggatggccgagccacacagaagttaattgtcaacctgaagcctgagaaatcatattcatttgtgctgacaaatcgtggaaacagtgctggtgggctgcagcacagggtcacggcaaagactgcaccagatgtattacgtaccaagcctgccttcattgggaagaccaacttggatggcatgattactgtgcaactgcctgaagtacctgcaaatgagaatataaaaggttactacataataattgtgcctttgaagaaatctcgcgggaaatttatcaagccatgggagagtccagatgaaatggaattagatgagctgcttaaggagatatctaggaagcgcagaagcatccgttatgggagagaagttgaattaaagccatatattgccgctcactttgatgtccttcccactgagttcaccctgggggatgacaagcattatggtggatttacaaacaagcaactccaaagtggtcaagaatatgtcttctttgtgttagcagtaatggaacatgcagagtctaagatgtatgcaaccagcccttactccgaccccgtggtgtcaatggatctggatccgcagccaatcacggatgaagaagaaggcttgatctgggttgtaggtcctgtccttgcagtggtctttatcatctgcattgtcattgctattcttctttataaaaggaagagggcagagtccgactctagaaaaagcagcataccgaacaataaggagatcccttcacaccacccaacagaccctgtagaactgaggcgccttaactttcaaacaccgggttcagatgattccggttaccctggtaaccttcattcttcaagtatggctagccatcctccaatacccatcttggaacttgcagaccacattgaaagattgaaagcaaatgacaacttgaagttttcccaggaatatgagtcaattgaccctggccagcagttcacttgggaacattcaaacttggaagtaaacaaaccaaagaatagatacgcgaatgtaatcgcatatgatcattcccgggttctcctatcagctatagaagggatcccaggaagtgactatgtgaatgccaactacatagatgggtataggaagcaaaatgcctatattgcaacacagggatctctccccgaaacatttggggacttttggagaatgatatgggaacaacggagtgccacagttgtcatgatgacaaaactagaagaaagatcaagggtgaagtgtgaccagtattggcctagcagaggcacagaaacccacggactcgttcaagtaacgctgcttgatactgtggagctggccacatattgtgttcgaacatttgcactttacaagaatggttcaagtgagaagagagaagtgagacaattccagttcaccgcctggcctgatcatggtgttccagaacaccctacaccttttctagctttcttacgtagagtcaaaacctgtaaccctcccgatgctggtccgatggttgtgcactgcagtgcgggagttggccggactggttgcttcatcgtcatagatgccatgttagaaagaataaagcatgaaaaaactgtagatatttatggccatgtaactttaatgagagcccagaggaactatatggttcaaacagaagaccaatacatctttatccatgatgcactgttagaagcagtgacttgtggaaataccgaagtgccagctagaaacttgtatgcctacattcagaagctgacacaaatagaaacgggagagaatgtcacaggaatggagctcgaatttaagcgtctagccagctcaaaagctcacacctcaaggtttatcagtgccaatcttccatgtaataaattcaaaaatcgccttgttaatattatgccatatgaatccacaagggtatgcctgcagcctatccgtggagtagaaggatctgattacatcaatgccagttttattgatggatacagacaacagaaagcctacatcgctacccaggggcccttggcagagaccactgaagacttctggcggatgctctgggaacacaattccaccatagttgtgatgctcaccaagctgcgtgaaatgggcagagagaaatgtcaccaatactggccagcagaacggtctgcaagataccagtactttgttgtagatcccatggctgagtacaacatgccacagtatatcctaagggaattcaaggtcacagatgccagggacggccagtcccgaacagtaaggcagttccagttcactgactggccagagcaaggagtgccaaagtccggagaaggatttattgacttcatcggccaagtccataaaacaaaagaacagtttggccaagatggacccatttcagtccattgcagcgcgggcgttggaagaactggagtcttcataacgctaagcattgttttggaaagaatgagatatgaaggagttgtagatatcttccagactgtcaaaatgttaagaacacaacgaccagctatggtacagacagaggatcaatatcagttttcctatcgtgccgcactagagtacctgggcagctttgaccactatgcaacgtagaaacccctgacccattctggatttttactacaggcccttcaatatccatggagtctcttctgagccatacagggcacttgagaagtccttcttaacttctagctaacaactacttagtgggactattacacacaaaacaaattaaaaacaaattattccaggtggaccaagaattcacagtttaataatctaacctgaaaaataatgaagagaatcctgactgatgaggcatctgaaggattttatttacagatacctcaaggattcaaaatcaagggaagaagaaatcacagcaaagaaccaccatcttattcaggattgcttgaaaggtgcaaggagaaattgccagaatgctgcagttcagcacaagatatgtgctggtgtggcttctcacaatgaaacggactctgctttgacatcgccccttcccaccatactgctcataataacattttagggggaaagggga

SEQ ID NO: 24598 - DNA, 5941 bp, Homo sapiens
  source 1..5941: mol_type = unassigned DNA
gcggcgtagagaagctcgcagccctccggagcctcagcgatctcctggctcgcttttcccgcagccgccgagcagcgcaggcccggcgactccgggtgcagctggccctgtgcggtgacatcgccgtccggcgccaggctcgaagccgcctggccgcgcccgcggggtcgcaggccgctggtcccgcccggccgcgctcacaaactactcgcggctcgtgacccgggacaaacttctggcggcggcgcagcctcttccacagtcaccctccccagagccagctaccaaaatagaagacgcggccggggcgaggaggtgggcggggggagcccggtggccgctcctccccgcgcggctgacgcccgcttcggcggcggtagtggctgtggccgcggggccgcccccagccgagctcccggaggcgctcgggcgcgggccggcggggcacgggcgctcacgccctctagcgggccgcggcggcgccgggcggccgtgacgtgagcgctcccttcagccggcctgcggggcaccgccagtcagtcggggagcaagagccccgcgcgcagccggcgcgggctcggtcatcggcgcgccgccgcccggggctgggcttggggctgcctgtggagaggcggcgggcggaacgcgcgcggccacggccacggccaccgccacggccacggccggcagctcgggtcccgggtcccgggcaggggaaggggagaggcggcgagctcagcaaccggaaccgagggaagattttggctccgcgggctcgccctccgctccctctgccagcggcgccagacgccgagtggggccagggacaggggaggaggacccaggaccctgtgcccgcgcccctggagccgctggagttcggacttctgcaactgttggcactttgggggcttggcttagcgctctgctgtttacccgtctctcctcgctgcctcggaaccaaagctcccggccccctccgccctcgcgcgcccacccaccgccgccggggagcggcccggcccgcactcagcaccatgaggggacttgggacttgcctggcgactttggccggacttttgctaactgcggcgggcgagacgttctcaggtggctgcctctttgatgagccgtatagcacatgtggatatagtcaatctgaaggtgatgacttcaattgggagcaagtgaacaccttgactaaaccgacttctgatccatggatgccatcaggttctttcatgctggtgaatgcctctgggagacctgaggggcagagagcccacctgctcttaccccaacttaaagaaaatgacacccactgcatcgattttcactattttgtgtccagcaagagtaattctcctccggggttactcaatgtctacgtgaaggtcaataacgggccactggggaatcctatctggaatatatctggagacccaacacgtacatggaacagggcagaactggccattagtactttctggcctaacttttatcaggtgatttttgaagtgataacttctggacatcaaggctatctcgctatcgatgaggtgaaggtgttaggacatccatgtaccaggactcctcacttcctgcggattcagaatgtggaagttaatgctggccagtttgctaccttccagtgcagtgccatcggcaggaccgtggcaggagacaggctctggttacagggcattgatgtgcgagatgctcctctgaaggaaatcaaggtgaccagctcccgacgcttcattgcttcatttaatgttgtgaataccaccaaacgagatgctggaaagtaccgctgcatgattcgcactgaaggaggtgttggaatatcaaactatgcagagttggtagttaaagaaccacccgttcctattgccccacctcagctcgcctctgtaggagccacctacctgtggatacagctcaacgccaactccatcaatggggatgggcccattgtggcccgagaggtggagtactgcacggccagtgggagctggaatgaccggcagccagtcgattccacgagctataaaattggacaccttgacccagatacagaatatgagattagtgtgctcctgaccaggccaggggagggtggcactggctctcctggtccagctctcaggacaagaacaaagtgtgctgatcccatgcgaggcccaagaaaactagaagtagtggaggtcaaatctcggcaaatcactatccgctgggagccatttggatataatgtaactcgttgccacagttataatctcactgtccactactgttaccaagttggaggacaagaacaagtgcgagaagaagtaagctgggatacagaaaactcacaccctcaacacacgatcactaacctgtcaccatacaccaatgtcagtgtgaaactgatcctcatgaacccagagggccggaaggaaagccaagaactcatagtgcagacagatgaagacctcccaggtgctgttcccactgaatccatacaaggaagtacctttgaagagaagatatttcttcagtggagagaaccaactcaaacatatggtgtaatcactttatatgagatcacctacaaagcagtcagttcctttgacccagaaatagatttatccaatcagagtggaagagtttcaaagctgggaaatgaaacccattttctgttttttggactgtatccggggaccacatactcctttaccatccgagctagcacagctaagggttttgggcctccagcaacaaaccagttcaccaccaaaatatcagcaccctctatgccagcttatgaacttgagacacctttgaatcaaactgacaataccgtgacagtcatgctgaaacctgcccacagcagaggagcacctgtcagtgtctatcaaatagttgttgaggaagaacgtcctcgaagaactaaaaagacgacagaaatcttaaagtgctacccagtgccaattcacttccagaatgcttctctgctgaactcacagtactactttgctgcagaatttcctgcagacagcctccaagctgcgcagccttttacaattggtgataataagacatataatggatactggaacactccccttctcccctataaaagctacagaatttatttccaagctgctagtagagccaatggggaaaccaaaatagactgtgtccaagtggccacaaaaggagctgccactccgaaaccagtcccagaacccgagaaacagacagaccatacagttaaaattgctggagtcatcgcgggcatcttgctgttcgtgattatatttcttggagttgtgttggtaatgaagaaaaggaaactggccaagaagcggaaagagaccatgagcagcacccgacaggagatgactgtgatggtgaactcaatggacaagagctatgctgagcagggcacaaactgcgacgaggctttctcattcatggacacgcacaatctgaatgggagatctgtgtcttcaccatcgtccttcacaatgaaaacaaatacactgagcacatcggtgcctaattcctattacccagacccatttgtgccaactgcaattttagtgccaataaatgatgaaacccacacaatggccagcgataccagcagcctggtgcagtcccatacttacaagaagcgagagccggccgacgtgccctatcagactgggcagctccaccccgccatccgggtggcagacctccttcagcacatcacacagatgaagtgtgcggagggctacggcttcaaggaggaatacgagagcttctttgaagggcagtctgcaccatgggactcggctaagaaagatgagaacagaatgaagaacagatacgggaatatcattgcatacgatcattcccgagtgaggctgcagacaatagaaggagacacaaactcagactatatcaatggcaattatatcgatggttatcatcgacccaatcattacattgctacccaagggccaatgcaggaaaccatctatgacttctggaggatggtgtggcacgaaaacactgcaagtatcatcatggtgaccaatcttgtggaagtgggaagggtcaaatgctgcaaatactggccagatgacacagagatatataaagacattaaagttaccctaatagaaacagaactactggcagaatatgtgataagaacatttgctgttgaaaagagaggtgtgcatgaaatccgagagatcagacagtttcacttcactggctggccggatcatggggtcccctaccatgccaccggcctgctgggattcgtgcggcaagtcaagtccaagagcccgcccagtgcaggcccactggtggtgcactgcagtgctggtgcagggaggactggctgtttcatcgtcattgatatcatgttggacatggccgaaagggaaggggtcgtagacatctacaactgcgtcagggagctgcggtcacggagggtgaacatggtgcaaacagaggagcagtatgtgtttatccacgatgcgatcctggaagcctgtctttgtggggacacctctgtgcctgcttcccaagttaggtctctgtattatgacatgaacaaactggatccacagacaaactcaagccagattaaagaggaattccggacgctaaacatggtgacaccaacgctgcgagtagaggactgcagcatcgcactgttgccccggaaccatgagaaaaaccggtgcatggacatcctgcccccagaccgctgcctgcccttcctcatcaccatcgatggggagagcagcaactacatcaatgctgccctcatggacagctataaacagccttcagcttttatagtcacccagcatcctttgccaaacacagtgaaagacttttggagactggtcctggattatcactgcacatccgtagttatgctaaatgatgtggatcctgcccagttgtgtccacagtactggccagaaaacggagtacacagacacggccccatccaggtggaatttgtctctgctgacctggaagaggacatcatcagcaggatattccgcatttacaatgccgccagaccccaagatggatatcggatggtgcagcaattccagttcctgggctggccgatgtacagggacacaccagtgtctaagcgctccttcttgaagctcattcgccaggtggacaagtggcaagaggagtacaatggcggggaaggccgcacggttgtgcactgcttgaacgggggaggccgcagtgggacgttctgcgccatcagcatcgtatgtgagatgctccggcaccagagaaccgtggatgtctttcacgctgtgaagacactgaggaacaacaagcccaacatggtcgacctcctggatcagtacaagttctgctacgaggtggccctggaatacttgaattctggctgatggtgtaaacagctctgcaaacaatccctttcataccacaaagccaagacgttccatggtatttgtgcaaaagagatgaagacttctcaatatgcttattttgctttgcataattggctctttttaagagcccaagaaagtgtttctaaaattgcttgcactgcccaatcccagtaatgctgctgcctgacagaaacacacacacagccacagttgccaaatcccgtactccttgccaccggcttcctagagcagcgtagacagctggtaaactgaagagcacaactatattcttatgaaggaatttgtacctttggggtattattttgtggcccgtgaccctcgttattgttacagctgagtgtatgtttttgttctgtggagaatgctatctggcattatggtaatatattattttaggtaatatttgtactttaacatgttgcataatatatgcttatgtagctttccaggactaacagataaatgtgtaatgaacaaagata

SEQ ID NO: 24599 - DNA, 5337 bp, Homo sapiens
  source 1..5337: mol_type = unassigned DNA
ccaaccatggcccgtgcccaggcgctcgtgctggcactcaccttccagctctgcgcgccggagaccgagactccggcagctggctgcaccttcgaggaggcaagtgacccagcagtgccctgcgagtacagccaggcccagtacgatgacttccagtgggagcaagtgcgaatccaccctggcacccgggcacctgcggacctgccccacggctcctacttgatggtcaacacttcccagcatgccccaggccagcgagcccatgtcatcttccagagcctgagcgagaatgatacccactgtgtgcagttcagctacttcctgtacagccgggacgggcacagcccgggcaccctgggcgtctacgtgcgcgttaatgggggccccctgggcagtgctgtgtggaatatgactggatcccacggccgtcagtggcaccaggctgagctggctgtcagcactttctggcccaatgaatatcaggtgctgtttgaggccctcatctccccagaccgcaggggctacatgggcctagatgacatcctgcttctcagctacccctgcgcaaaggccccacacttctcccgcctgggcgacgtggaggtcaacgcgggccagaacgcgtcgttccagtgcatggccgcgggcagagcggccgaggccgaacgcttcctcttgcaacggcagagcggggcgctggtgccggcggcgggcgtgcggcacatcagccaccggcgcttcctggccactttcccgctggctgccgtgagccgcgccgagcaggacctgtaccgctgtgtgtcccaggccccgcgcggcgcgggcgtctctaacttcgcggagctcatcgtcaaggagcccccaactcccatcgcgcccccacagctgctgcgtgctggccccacctacctcatcatccagctcaacaccaactccatcattggcgacgggccgatcgtgcgcaaggagattgagtaccgcatggcgcgcgggccctgggctgaggtgcacgccgtcagcctgcagacctacaagctgtggcacctcgaccccgacacagagtatgagatcagcgtgctgctcacgcgtcccggagacggcggcactggccgccctgggccacccctcatcagccgcaccaaatgcgcagagcccatgagggcccccaaaggcctggcttttgctgagatccaggcccgtcagctgaccctgcagtgggaaccactgggctacaacgtgacgcgttgccacacctatactgtgtcgctgtgctatcactacaccctgggcagcagccacaaccagaccatccgagagtgtgtgaagacagagcaaggtgtcagccgctacaccatcaagaacctgctgccctatcggaacgttcacgtgaggcttgtcctcactaaccctgaggggcgcaaagagggcaaggaggtcactttccagacggatgaggatgtgcccagtgggattgcagccgagtccctgaccttcactccactggaggacatgatcttcctcaagtgggaggagccccaggagcccaatggtctcatcacccagtatgagatcagctaccagagcatcgagtcatcagacccggcagtgaacgtgccaggcccacgacgtaccatctccaagctccgcaatgagacctaccatgtcttctccaacctgcacccaggcaccacctacctgttctccgtgcgggcccgcacaggcaaaggcttcggccaggcggcactcactgagataaccactaacatctctgctcccagctttgattatgccgacatgccgtcacccctgggcgagtctgagaacaccatcaccgtgctgctgaggccggcacagggccgcggtgcgcccatcagtgtgtaccaggtgattgtggaggaggagcgggcgcggaggctgcggcgggagccaggtggacaggactgcttcccagtgccattgaccttcgaggcggcgctggcccgaggcctggtgcactacttcggggccgaactggcggccagcagtctacctgaggccatgccctttaccgtgggtgacaaccagacctaccgaggcttctggaacccaccacttgagcctaggaaggcctatctcatctacttccaggcagcaagccacctgaagggggagacccggctgaattgcatccgcattgccaggaaagctgcctgcaaggaaagcaagcggcccctggaggtgtcccagagatcggaggagatggggcttatcctgggcatctgtgcaggggggcttgctgtcctcatccttctcctgggtgccatcattgtcatcatccgcaaagggaagccggtgaacatgaccaaggccaccgtcaactaccgccaggagaagacacacatgatgagcgccgtggaccgcagcttcacagaccagagcaccctgcaggaggacgagcggctgggcctgtccttcatggacacccatggctacagcacccggggagaccagcgcagcggtggggtcactgaggccagcagcctcctggggggctccccgaggcgtccctgtggccggaagggctccccataccacacggggcagctgcaccctgcggtgcgtgtcgcagaccttctgcagcacatcaaccagatgaagacggccgagggttacggcttcaagcaggagtatgagagcttctttgaaggctgggacgccacaaagaagaaagacaaggtcaagggcagccggcaggagccaatgcctgcctatgatcggcaccgagtgaaactgcacccgatgctgggagaccccaatgccgactacattaatgccaactacatagatattcggataaaccgagaaggttaccacaggtcaaaccacttcatagccactcaagggccgaagcctgagatggtctatgacttctggcgtatggtgtggcaggagcactgttccagcatcgtcatgatcaccaagctggtcgaggtgggcagggtgaaatgctcacggtactggccggaggactcagacacctacggggacatcaagattatgctggtgaagacagagaccctggctgagtatgtcgtgcgcacttttgccctggagcggagaggctactctgcccggcacgaggtccgccagttccacttcacagcgtggccagagcatggcgtcccctaccatgccacggggctgctggctttcatccggcgcgtgaaggcctccaccccacctgatgccgggcccattgtcatccactgcagcgcgggcaccggccgcacaggttgctatatcgtcctggatgtgatgctggacatggcagagtgtgagggcgtcgtggacatttacaactgtgtgaagactctctgctcccggcgtgtcaacatgatccagactgaggagcagtacatcttcattcatgatgcaatcctggaggcctgcctgtgtggggagaccaccatccctgtcagtgagttcaaggccacctacaaggagatgatccgcattgatcctcagagtaattcctcccagctgcgggaagagttccagacgctgaactcggtcaccccgccgctggacgtggaggagtgcagcatcgccctgttgccccggaaccgcgacaagaaccgcagcatggacgtcctgccgcccgaccgctgcctgcccttcctcatctccactgatggggactccaacaactacattaatgcagccctgactgacagctacacacggagtgcggccttcatcgtgaccctgcacccgctgcagagcaccacgcccgacttctggcggctggtctacgattacgggtgcacctccatcgtcatgctcaaccagctgaaccagtccaactccgcctggccctgcctgcagtactggccagagccaggccggcagcaatatggcctcatggaggtggagtttatgtcgggcacagctgatgaagacttagtggctcgagtcttccgggtgcagaacatctctcgggaggggcacctgctggtgcggcacttccagttcctgcgctggtctgcataccgggacacacctgactccaagaaggccttcttgcacctgctggctgaggtggacaagtggcaggccgagagtggggatgggcgcaccatcgtgcactgcctaaacgggggaggacgcagcggcaccttctgcgcctgcgccacggtcctggagatgatccgctgccacaacttggtggacgttttctttgctgccaaaaccctccggaactacaaacccaacatggtggagaccatggatcagtaccacttttgctacgatgtggccctggagtacttggaggggctggagtcaagatagcggggccctggcctggggcacccactgcacactcagggccagacccaccatcctggactggcgaggaagatcagtgcctcctgctctgcccaaacacactcccatggggcaagcactggagtggatgctgggctatcttgctcccccttccactgtgggcagggcctttcgcttgtcccatgggcgggtggtgggccaaggaggagcttagcaagtctgcagcccagccccacctccatagggtcctgcaggcctgtgctgagaggcctggtgctgcctggcagagtgacaaaggctcaggacggctggctctgggggactcaggccaagccccttggcaccatcctggcttttggcagggatgagtgaggccctgcagagagcatcccaggccaaggttcccactcagcctgccccctctgcatgtgggtagaggatgtactgggacttggcatttaggattccatctggcccagcccctgaaggtcctggggaagcaggtctcaattctgaatagccagtggggcacactgactgtcctccccaggggaactgcagcgccctcctccccactgccccctgcagcccctgagatattttgctcactatccctccccacttgcttccctgatatgtgctctgagcttccctgaaccaggatctgcctattactgctgtgccccatggggggctccttccctgcctgacccactgttgcagaatgaagtcacctcgcccccctcttcctttaatcttcaggcctcactggcctgtcctgctcagcttgggccagtgacaatctgcaaggctgaacaacagcccctggggttgaggcccctgtggctcctggtcaggctgcccgttgtggggaggggcagtgttagagcagggctggtcataccctctggagttcagaggaagaggtaggaccagtgcttttttgtttcttttgttatttttggttgggtgggtgggaaggtctctttaaaatggggcaggccacacccc

SEQ ID NO: 24600 - DNA, 4627 bp, Homo sapiens
  source 1..4627: mol_type = unassigned DNA
cgcacgcacgatctcacttcgatctatacactggaggattaaaacaaacaaacaaaaaaaacatttccttcgctccccctccctctccactctgagaagcagaggagccgcacggcgaggggccgcagaccgtctggaaatgcgaatcctaaagcgtttcctcgcttgcattcagctcctctgtgtttgccgcctggattgggctaatggatactacagacaacagagaaaacttgttgaagagattggctggtcctatacaggagcactgaatcaaaaaaattggggaaagaaatatccaacatgtaatagcccaaaacaatctcctatcaatattgatgaagatcttacacaagtaaatgtgaatcttaagaaacttaaatttcagggttgggataaaacatcattggaaaacacattcattcataacactgggaaaacagtggaaattaatctcactaatgactaccgtgtcagcggaggagtttcagaaatggtgtttaaagcaagcaagataacttttcactggggaaaatgcaatatgtcatctgatggatcagagcatagtttagaaggacaaaaatttccacttgagatgcaaatctactgctttgatgcggaccgattttcaagttttgaggaagcagtcaaaggaaaagggaagttaagagctttatccattttgtttgaggttgggacagaagaaaatttggatttcaaagcgattattgatggagtcgaaagtgttagtcgttttgggaagcaggctgctttagatccattcatactgttgaaccttctgccaaactcaactgacaagtattacatttacaatggctcattgacatctcctccctgcacagacacagttgactggattgtttttaaagatacagttagcatctctgaaagccagttggctgttttttgtgaagttcttacaatgcaacaatctggttatgtcatgctgatggactacttacaaaacaattttcgagagcaacagtacaagttctctagacaggtgttttcctcatacactggaaaggaagagattcatgaagcagtttgtagttcagaaccagaaaatgttcaggctgacccagagaattataccagccttcttgttacatgggaaagacctcgagtcgtttatgataccatgattgagaagtttgcagttttgtaccagcagttggatggagaggaccaaaccaagcatgaatttttgacagatggctatcaagacttgggtgctattctcaataatttgctacccaatatgagttatgttcttcagatagtagccatatgcactaatggcttatatggaaaatacagcgaccaactgattgtcgacatgcctactgataatcctgaacttgatcttttccctgaattaattggaactgaagaaataatcaaggaggaggaagagggaaaagacattgaagaaggcgctattgtgaatcctggtagagacagtgctacaaaccaaatcaggaaaaaggaaccccagatttctaccacaacacactacaatcgcatagggacgaaatacaatgaagccaagactaaccgatccccaacaagaggaagtgaattctctggaaagggtgatgttcccaatacatctttaaattccacttcccaaccagtcactaaattagccacagaaaaagatatttccttgacttctcagactgtgactgaactgccacctcacactgtggaaggtacttcagcctctttaaatgatggctctaaaactgttcttagatctccacatatgaacttgtcggggactgcagaatccttaaatacagtttctataacagaatatgaggaggagagtttattgaccagtttcaagcttgatactggagctgaagattcttcaggctccagtcccgcaacttctgctatcccattcatctctgagaacatatcccaagggtatatattttcctccgaaaacccagagacaataacatatgatgtccttataccagaatctgctagaaatgcttccgaagattcaacttcatcaggttcagaagaatcactaaaggatccttctatggagggaaatgtgtggtttcctagctctacagacataacagcacagcccgatgttggatcaggcagagagagctttctccagactaattacactgagatacgtgttgatgaatctgagaagacaaccaagtccttttctgcaggcccagtgatgtcacagggtccctcagttacagatctggaaatgccacattattctacctttgcctacttcccaactgaggtaacacctcatgcttttaccccatcctccagacaacaggatttggtctccacggtcaacgtggtatactcgcagacaacccaaccggtatacaatgaggccagtaatagtagccatgagtctcgtattggtctagctgaggggttggaatccgagaagaaggcagttataccccttgtgatcgtgtcagccctgacttttatctgtctagtggttcttgtgggtattctcatctactggaggaaatgcttccagactgcacacttttacttagaggacagtacatcccctagagttatatccacacctccaacacctatctttccaatttcagatgatgtcggagcaattccaataaagcactttccaaagcatgttgcagatttacatgcaagtagtgggtttactgaagaatttgaggaagtgcagagctgtactgttgacttaggtattacagcagacagctccaaccacccagacaacaagcacaagaatcgatacataaatatcgttgcctatgatcatagcagggttaagctagcacagcttgctgaaaaggatggcaaactgactgattatatcaatgccaattatgttgatggctacaacagaccaaaagcttatattgctgcccaaggcccactgaaatccacagctgaagatttctggagaatgatatgggaacataatgtggaagttattgtcatgataacaaacctcgtggagaaaggaaggagaaaatgtgatcagtactggcctgccgatgggagtgaggagtacgggaactttctggtcactcagaagagtgtgcaagtgcttgcctattatactgtgaggaattttactctaagaaacacaaaaataaaaaagggctcccagaaaggaagacccagtggacgtgtggtcacacagtatcactacacgcagtggcctgacatgggagtaccagagtactccctgccagtgctgacctttgtgagaaaggcagcctatgccaagcgccatgcagtggggcctgttgtcgtccactgcagtgctggagttggaagaacaggcacatatattgtgctagacagtatgttgcagcagattcaacacgaaggaactgtcaacatatttggcttcttaaaacacatccgttcacaaagaaattatttggtacaaactgaggagcaatatgtcttcattcatgatacactggttgaggccatacttagtaaagaaactgaggtgctggacagtcatattcatgcctatgttaatgcactcctcattcctggaccagcaggcaaaacaaagctagagaaacaattccagctcctgagccagtcaaatatacagcagagtgactattctgcagccctaaagcaatgcaacagggaaaagaatcgaacttcttctatcatccctgtggaaagatcaagggttggcatttcatccctgagtggagaaggcacagactacatcaatgcctcctatatcatgggctattaccagagcaatgaattcatcattacccagcaccctctccttcataccatcaaggatttctggaggatgatatgggaccataatgcccaactggtggttatgattcctgatggccaaaacatggcagaagatgaatttgtttactggccaaataaagatgagcctataaattgtgagagctttaaggtcactcttatggctgaagaacacaaatgtctatctaatgaggaaaaacttataattcaggactttatcttagaagctacacaggatgattatgtacttgaagtgaggcactttcagtgtcctaaatggccaaatccagatagccccattagtaaaacttttgaacttataagtgttataaaagaagaagctgccaatagggatgggcctatgattgttcatgatgagcatggaggagtgacggcaggaactttctgtgctctgacaacccttatgcaccaactagaaaaagaaaattccgtggatgtttaccaggtagccaagatgatcaatctgatgaggccaggagtctttgctgacattgagcagtatcagtttctctacaaagtgatcctcagccttgtgagcacaaggcaggaagagaatccatccacctctctggacagtaatggtgcagcattgcctgatggaaatatagctgagagcttagagtctttagtttaacacagaaaggggtgggggaactcacatctgagcattgttttcctcttcctaaaattaggcaggaaaatcagtctagttctgttatctgttgatttcccatcacctgacagtaactttcatgacataggattctgccgccaa

SEQ ID NO: 24601 - DNA, 3932 bp, Homo sapiens
  source 1..3932: mol_type = unassigned DNA
ggggcggcggcgggagctggttccggctgcgcgcgcagcggtggtggtggcggcgcgatcggccgggctgtaaccgtcgtctgtccgggagcggctggagcggcagcggcggccgggcacggcgcgaggtgacgccacagggcagcggcggcagcggaggcagcggcggcagcaggagacgcagcggcggccgcagcagcagcagcaagacggactcgtggagacgcgccgccgccgccgccgccgggccgggccgggtgtcgcgcgccgaggctgggggggagtcgtcgccgccgccgccaccgctaccgccgccgccgccgccgccgaggtgactgaggagagaggcgcctcctcgctcccgccaccgccggacttcaatgcccagtccccagctcgccagcgtttttcgttggaatatacgttgcacatttatggcgattctgagtgtgagggcagacttctgccaggctcagcacagcattttcgctgacaagtgagcttggaggttctatgtgccataattaacattgccttgaagactcctggacaccgagactggcctcagaaatagttggctttttttttttttaattgcaagcatatttcttttaatgactccagtaaaattaagcatcaagtaaacaagtggaaagtgacctacacttttaacttgtctcactagtgcctaaatgtagtaaaggctgcttaagttttgtatgtagttggattttttggagtccgaaggtatccatctgcagaaattgaggcccaaattgaatttggattcaagtggattctaaatactttgcttatcttgaagagagaagcttcataaggaataaacaagttgaatagagaaaacactgattgataataggcattttagtggtctttttaatgttttctgctgtgaaacatttcaagatttattgatttttttttttcactttccccatcacactcacacgcacgctcacactttttatttgccataatgaaccgtccagcccctgtggagatctcctatgagaacatgcgttttctgataactcacaaccctaccaatgctactctcaacaagttcacagaggaacttaagaagtatggagtgacgactttggttcgagtttgtgatgctacatatgataaagctccagttgaaaaagaaggaatccacgttctagattggccatttgatgatggagctccaccccctaatcagatagtagatgattggttaaacctgttaaaaaccaaatttcgtgaagagccaggttgctgtgttgcagtgcattgtgttgcaggattgggaagggcacctgtgctggttgcacttgctttgattgaatgtggaatgaagtacgaagatgcagttcagtttataagacaaaaaagaaggggagcgttcaattccaaacagctgctttatttggagaaataccgacctaagatgcgattacgcttcagagataccaatgggcattgctgtgttcagtagaaggaaatgtaaacgaaggctgacttgattgtgccatttagagggaactcttggtacctggaaatgtgaatctggaatattacctgtgtcatcaaagtagtgatggattcagtactcctcaaccactctcctaatgattggaacaaaagcaaacaaaaaagaaatctctctataaaatgaataaaatgtttaagaaaagagaaagagaaaaggaattaattcagtgaaggatgattttgctcctagttttggagtttgaatttctgccaggattgaattattttgaaatctcctgtctttttaaactttttcaaaataggtctctaaggaaaaccagcagaacattagcctgtgcaaaaccatctgtttggggagcacactcttccattatgcttggcacatagatctccctgtggtgggattttttttttccctttttttgtgggggagggttggtggtatatttttcccctcttttttccttcctctcctacatctcccttttcccccgatccaagttgtagatggaatagaagcccttgttgctgtagatgtgcgtgcagtctggcagccttaagcccacctgggcacttttagataaaaaaaaaaaaaaaacaaaaaacaacaccaaaaaaacagcagtgatatatatatatatatatatatatatatatatatatatatatatatatatatatatatatatatataatataatatatatatatatatatatattttccaggtggtttttagtctttactgatgaaagggtgttcatgttagtttcttcaaaaccctatctaatactaggcaaagtagccaagagccttttgttttgtttttattttgataaattagtggagaaatggcattttaagaggagtctcttctcaacttacctgagagtcgaattcttctcttccctaaccaatgaagctaagtggttatcccagaaacttgtcttctaaaagggaggactccaggccatcaataaagatgtccaggcagtgagcgtactttttacaccctgtagaattgtgggctgtagcgttactctgattttctgtctagtatcagagaatgctggtagcttaaaatttttattttaggacttgtactctgaattttcaggaaccgtcaaaggagcagcagcaaattcacatattttcgacttgagaaatgcttgtggtatgtgttttccaaactgccccctatatgtaaagttcagtttaaccactgattgccttgttattactaggttttttgagattaaaaaaaaaaaatccctggtttaaaaccaacaatgatgcctagtgagtatgtgtccacaggccataacagggtagaagagagacatcgtgcaacccaatgagtagtgaagggactgtgttgcttgtgaagcggtgtagtagcatttttgcagattcttggctgggtttagtgtactgatctagaaaagctgtttttctgctcctttgtggaaggcagttatgatcaggctgcatggacaaagcaggtagaggggcaccatcaggggctcttgcactattttcacctctaaatattacgtactcagtagtgccctgcttctagggctctgaatacgggcttaaagtcatcttgtcctgctggaatttgctgtgcagagccataagcctcccattttgttagcgtcagctaggccaataggaacagaccgggaccttgtctcacactgatgatacctcacatgttgaccggctatgtgaactgcctatttcctatgctggagttttgatttttaactaaacgcaaatctgtagattctctcctctcccatcccagaaaacaaaacaaaataatgcttttcgaaattgtttctaggactttaaaacataatggtatatccaaaattctttatttcagaatgcaacaatagattccattaatatagactcaagatcaaaacagcatacctgctaagctaagatagatggtgttgattccactgggttttgatcaatacaataacaaacctttttcctttgacatactctgaattttgttgtttggggggagggggtgtgtgtgtgtgtgtgtgtgtgtgtgtgtgtatgtgtgtgtgtgtgtgtgcacgcgcagtgtccatcagtatcagtgcctgcctgagttaggaaaattacattcctggttctgtattgaggagaaggatgtataaagcaacatgaaacattagccctccttttattttaaagactaatgttaattgttcttaaaactggattttttttccttaaagcaatttttttcttttcgatttaatgaagtattgctagctgaagccagtttgacatagagagatgtcagattgatttgaaaggtgtgcagcctgatttaaaaccaaaccctgaacccttttaaagaacaataaaacatattttacacgctc

SEQ ID NO: 24602 - DNA, 1952 bp, Homo sapiens
  source 1..1952: mol_type = unassigned DNA
gcggcggcgggagctggttccggctgcgcgcgcagcggtggtggtggcggcgcgatcggccgggctgtaaccgtcgtctgtccgggagcggctggagcggcagcggcggccgggcacggcgcgaggtgacgccacagggcagcggcggcagcggaggcagcggcggcagcaggagacgcagcggcggccgcagcagcagcagcaagacggactcgtggagacgcgccgccgccgccgccgccgggccgggccgggtgtcgcgcgccgaggctgggggggagtcgtcgccgccgccgccaccgctaccgccgccgccgccgccgccgaggtgactgaggagagaggcgcctcctcgctcccgccaccgccggacttcaatgcccagtccccagctcgccagcgtttttcgttggaatatacgttgcacatttatggcgattctgagtgtgagggcagacttctgccaggctcagcacagcattttcgctgacaagtgagcttggaggttctatgtgccataattaacattgccttgaagactcctggacaccgagactggcctcagaaatagttggctttttttttttttaattgcaagcatatttcttttaatgactccagtaaaattaagcatcaagtaaacaagtggaaagtgacctacacttttaacttgtctcactagtgcctaaatgtagtaaaggctgcttaagttttgtatgtagttggattttttggagtccgaaggtatccatctgcagaaattgaggcccaaattgaatttggattcaagtggattctaaatactttgcttatcttgaagagagaagcttcataaggaataaacaagttgaatagagaaaacactgattgataataggcattttagtggtctttttaatgttttctgctgtgaaacatttcaagatttattgatttttttttttcactttccccatcacactcacacgcacgctcacactttttatttgccataatgaaccgtccagcccctgtggagatctcctatgagaacatgcgttttctgataactcacaaccctaccaatgctactctcaacaagttcacagaggaacttaagaagtatggagtgacgactttggttcgagtttgtgatgctacatatgataaagctccagttgaaaaagaaggaatccacgttctaaaaaagaaggggagcgttcaattccaaacagctgctttatttggagaaataccgacctaagatgcgattacgcttcagagataccaatgggcattgctgtgttcagtagaaggaaatgtaaacgaaggctgacttgattgtgccatttagagggaactcttggtacctggaaatgtgaatctggaatattacctgtgtcatcaaagtagtgatggattcagtactcctcaaccactctcctaatgattggaacaaaagcaaacaaaaaagaaatctctctataaaatgaataaaatgtttaagaaaagagaaagagaaaaggaattaattcagtgaaggatgattttgctcctagttttggagtttgaatttctgccaggattgaattattttgaaatctcctgtctttttaaactttttcaaaataggtctctaaggaaaaccagcagaacattagcctgtgcaaaaccatctgtttggggagcacactcttccattatgcttggcacatagatctccctgtggtgggattttttttttccctttttttgtgggggagggttggtggtatatttttcccctcttttttccttcctctcctacatctcccttttcccccgatccaagttgtagatggaatagaagcccttgttgctgtagatgtgcgtgcagtctggcagccttaagcccacctgggcacttttagataaaaaaaaaaaaaaaacaaaaaacaacaccaaaaaaacagcagtgatatatatatatatat

SEQ ID NO: 24603 - DNA, 1032 bp, Homo sapiens
  source 1..1032: mol_type = unassigned DNA
gtagtaaaggctgcttaagttttgtatgtagttggattttttggagtccgaaggtatccatctgcagaaattgaggcccaaattgaatttggattcaagtggattctaaatactttgcttatcttgaagagagaagcttcataaggaataaacaagttgaatagagaaaacactgattgataataggcattttagtggtctttttaatgttttctgctgtgaaacatttcaagatttattgatttttttttttcactttccccatcacactcacacgcacgctcacactttttatttgccataatgaaccgtccagcccctgtggagatctcctatgagaacatgcgttttctgataactcacaaccctaccaatgctactctcaacaagttcacagaggattggccatttgatgatggagctccaccccctaatcagatagtagatgattggttaaacctgttaaaaaccaaatttcgtgaagagccaggttgctgtgttgcagtgcattgtgttgcaggattgggaagggcacctgtgctggttgcacttgctttgattgaatgtggaatgaagtacgaagatgcagttcagtttataagacaaaaaagaaggggagcgttcaattccaaacagctgctttatttggagaaataccgacctaagatgcgattacgcttcagagataccaatgggcattgctgtgttcagtagaaggaaatgtaaacgaaggctgacttgattgtgccatttagagggaactcttggtacctggaaatgtgaatctggaatattacctgtgtcatcaaagtagtgatggattcagtactcctcaaccactctcctaatgattggaacaaaagcaaacaaaaaagaaatctctctataaaatgaataaaatgtttaagaaaagagaaagagaaaaggaattaattcagtgaaggatgattttgctcctagttttggagtttgaatttctgccaggattgaattattttgaaatctcctgtctttttaaactttttcaaaata

SEQ ID NO: 24604 - DNA, 830 bp, Homo sapiens
  source 1..830: mol_type = unassigned DNA
agtaaaaccatgttacagccttctgtgggaagccatttggatgtcggggtttttcgttggaatatacgttgcacatttatggcgattctgagtgtgagggcagacttctgccaggctcagcacagcattttcgctgacaagtgagcttggaggttctatgtgccataattaacattgccttgaagactcctggacaccgagactggcctcagaaatagttggctttttttttttttaattgcaagcatatttcttttaatgactccagtaaaattaagcatcaagtaaacaagtggaaagtgacctacacttttaacttgtctcactagtgcctaaatgtagtaaaggctgcttaagttttgtatgtagttggattttttggagtccgaaggtatccatctgcagaaattgaggcccaaattgaatttggattcaagtggattctaaatactttgcttatcttgaagagagaagcttcataaggaataaacaagttgaatagagaaaacactgattgataataggcattttagtggtctttttaatgttttctgctgtgaaacatttcaagatttattgatttttttttttcactttccccatcacactcacacgcacgctcacactttttatttgccataatgaaccgtccagcccctgtggagatctcctatgagaacatgcgttttctgataactcacaaccctaccaatgctactctcaacaagttcacagaggaacttaagaagtatggagtgacgactttggttcgagtttgtgatgctacatatgataaagctccagttgaaaaagaaggaatccacgttcta

SEQ ID NO: 24605 - DNA, 900 bp, Homo sapiens
  source 1..900: mol_type = unassigned DNA
gggggagagtgagttggtgaagggagggcgtgagcttgatcctggatagtgtttgtatgatgtgcacacgtctctgcaaatgcttgtttgaagattggctgtgctgcattttggtataattgggaggtgacatattgtcccttatctcagtaaacatttggaggaagaggacgagaaagattgaattttgcattctttaattgggaagaaaaggaaggtgaatccatgttgagctgagctagtttttcgttggaatatacgttgcacatttatggcgattctgagtgtgagggcagacttctgccaggctcagcacagcattttcgctgacaagtgagcttggaggttctatgtgccataattaacattgccttgaagactcctggacaccgagactggcctcagaaatagttggctttttttttttttaattgcaagcatatttcttttaatgactccagtaaaattaagcatcaagtaaacaagtggaaagtgacctacacttttaacttgtctcactagtgcctaaatgtagtaaaggctgcttaagttttgtatgtagttggattttttggagtccgaaggtatccatctgcagaaattgaggcccaaattgaatttggattcaagtggattctaaatactttgcttatcttgaagagagaagcttcataaggaataaacaagttgaatagagaaaacactgattgataataggcattttagtggtctttttaatgttttctgctgtgaaacatttcaagatttattgatttttttttttcactttccccatcacactcacacgcacgctcacactttttatttgccataatgaaccgtccagcccctgtggagatctcctatgagaacatgcgttttctgataactcacaaccct

SEQ ID NO: 24606 - DNA, 1332 bp, Homo sapiens
  source 1..1332: mol_type = unassigned DNA
tgactatccagctctgagagacgggagtttggagttgcccgctttactttggttgggttggggggggcggcgggctgttttgttccttttcttttttaagagttgggttttcttttttaattatccaaacagtgggcagcttcctcccccacacccaagtatttgcacaatatttgtgcggggtatgggggtgggtttttaaatctcgtttctcttggacaagcacagggatctcgttctcctcattttttgggggtgtgtggggacttctcaggtcgtgtccccagccttctctgcagtcccttctgccctgccgggcccgtcgggaggcgccatggctcggatgaaccgcccggccccggtggaggtgagctacaaacacatgcgcttcctcatcacccacaaccccaccaacgccacgctcagcaccttcattgaggacctgaagaagtacggggctaccactgtggtgcgtgtgtgtgaagtgacctatgacaaaacgccgctggagaaggatggcatcaccgttgtggactggccgtttgacgatggggcgcccccgcccggcaaggtagtggaagactggctgagcctggtgaaggccaagttctgtgaggcccccggcagctgcgtggctgtgcactgcgtggcgggcctgggccgggctccagtccttgtggcgctggcccttattgagagcgggatgaagtacgaggacgccatccagttcatccgccagaagcgccgcggagccatcaacagcaagcagctcacctacctggagaaataccggcccaaacagaggctgcggttcaaagacccacacacgcacaagacccggtgctgcgttatgtagctcaggaccttggctgggcctggtcgtcatgtaggtcaggaccttggctggacctggaggccctgcccagccctgctctgcccagcccagcaggggctccaggccttggctggccccacatcgccttttcctccccgacacctccgtgcacttgtgtccgaggagcgaggagcccctcgggccctgggtggcctctgggccctttctcctgtctccgccactccctctggcggcgctggccgtggctctgtctctctgaggtgggtcgggcgccctctgcccgccccctcccacaccagccaggctggtctcctctagcctgtttgttgtggggtgggggtatattttgtaaccactgggcccccagcccctcttttgcgaccccttgtcctgacctgttctcggcaccttaaattattagaccccggggcagtcaggtgctccggacacccgaaggcaataaaacaggagccgtg

SEQ ID NO: 24607 - DNA, 1257 bp, Homo sapiens
  source 1..1257: mol_type = unassigned DNA
tgactatccagctctgagagacgggagtttggagttgcccgctttactttggttgggttggggggggcggcgggctgttttgttccttttcttttttaagagttgggttttcttttttaattatccaaacagtgggcagcttcctcccccacacccaagtatttgcacaatatttgtgcggggtatgggggtgggtttttaaatctcgtttctcttggacaagcacagggatctcgttctcctcattttttgggggtgtgtggggacttctcaggtcgtgtccccagccttctctgcagtcccttctgccctgccgggcccgtcgggaggcgccatggctcggatgaaccgcccggccccggtggaggtgagctacaaacacatgcgcttcctcatcacccacaaccccaccaacgccacgctcagcaccttcattgaggacctgaagaagtacggggctaccactgtggtgcgtgtgtgtgaagtgacctatgacaaaacgccgctggagaaggatggcatcaccgttgtggactggccgtttgacgatggggcgcccccgcccggcaaggtagtggaagactggctgagcctggtgaaggccaagttctgtgaggcccccggcagctgcgtggctgtgcactgcgtggcgggcctgggccggaagcgccgcggagccatcaacagcaagcagctcacctacctggagaaataccggcccaaacagaggctgcggttcaaagacccacacacgcacaagacccggtgctgcgttatgtagctcaggaccttggctgggcctggtcgtcatgtaggtcaggaccttggctggacctggaggccctgcccagccctgctctgcccagcccagcaggggctccaggccttggctggccccacatcgccttttcctccccgacacctccgtgcacttgtgtccgaggagcgaggagcccctcgggccctgggtggcctctgggccctttctcctgtctccgccactccctctggcggcgctggccgtggctctgtctctctgaggtgggtcgggcgccctctgcccgccccctcccacaccagccaggctggtctcctctagcctgtttgttgtggggtgggggtatattttgtaaccactgggcccccagcccctcttttgcgaccccttgtcctgacctgttctcggcaccttaaattattagaccccggggcagtcaggtgctccggacacccgaaggcaataaaacaggagccgtg

SEQ ID NO: 24608 - DNA, 1866 bp, Homo sapiens
  source 1..1866: mol_type = unassigned DNA
aagccggtggagccgcggccgcgcctgtgcgcgagggcgcgcgcgtcccgagccctccacccgtcgtgccggcgccgcccggaccgccagatgctgtgtgctgtggacccacctggggttcatggagtgggccacggggcccagccctaagcactgctgcgcccagggtcgccgcgcctcctgctgaggggtccccgtgccactggctctcaccattgccctcgcctgccgatggcctctgctgcccagcctggggccagctctaccgcctgagccccctgccccactccaggactcaccgtaccccgatggggtaacgtgacacaggccccacacgtcagaggccgctgtccccacggccactgcccgtgacccctggcccaaggcagctggagttggttcagttcaagttcattcttcctctggcccttgggggcttggggcccacctctgagtgaagggggctgtctgcccatccaccaatgtggagagggcgcccccggtgtggggtccagctctggacactgcttggcggccgggttcactttgagtttttaagttttctttgctgagcttttttggttgttctttttattttttgcctctttatgactatccagctctgagagacgggagtttggagttgcccgctttactttggttgggttggggggggcggcgggctgttttgttccttttcttttttaagagttgggttttcttttttaattatccaaacagtgggcagcttcctcccccacacccaagtatttgcacaatatttgtgcggggtatgggggtgggtttttaaatctcgtttctcttggacaagcacagggatctcgttctcctcattttttgggggtgtgtggggacttctcaggtcgtgtccccagccttctctgcagtcccttctgccctgccgggcccgtcgggaggcgccatggctcggatgaaccgcccggccccggtggaggtgagctacaaacacatgcgcttcctcatcacccacaaccccaccaacgccacgctcagcaccttcattgaggacctgaagaagtacggggctaccactgtggtgcgtgtgtgtgaagtgacctatgacaaaacgccgctggagaaggatggcatcaccgttgtggactggccgtttgacgatggggcgcccccgcccggcaaggtagtggaagactggctgagcctggtgaaggccaagttctgtgaggcccccggcagctgcgtggctgtgcactgcgtggcgggcctgggccggaagcgccgcggagccatcaacagcaagcagctcacctacctggagaaataccggcccaaacagaggctgcggttcaaagacccacacacgcacaagacccggtgctgcgttatgtagctcaggaccttggctgggcctggtcgtcatgtaggtcaggaccttggctggacctggaggccctgcccagccctgctctgcccagcccagcaggggctccaggccttggctggccccacatcgccttttcctccccgacacctccgtgcacttgtgtccgaggagcgaggagcccctcgggccctgggtggcctctgggccctttctcctgtctccgccactccctctggcggcgctggccgtggctctgtctctctgaggtgggtcgggcgccctctgcccgccccctcccacaccagccaggctggtctcctctagcctgtttgttgtggggtgggggtatattttgtaaccactgggcccccagcccctcttttgcgaccccttgtcctgacctgttctcggcaccttaaattattagaccccggggcagtcaggtgctccggacacccgaaggcaataaaacaggagccgtg

SEQ ID NO: 24609 - DNA, 1717 bp, Homo sapiens
  source 1..1717: mol_type = unassigned DNA
ctaagccggtggagccgcggccgcgcctgtgcgcgagggcgcgcgcgtcccgagccctccacccgtcgtgccggcgccgcccggaccgccagatgctgtgtgctgtggacccacctggggttcatggagtgggccacggggcccagccctaagcactgctgcgcccagggtcgccgcgcctcctgctgaggggtccccgtgccactggctctcaccattgccctcgcctgccgatggcctctgctgcccagcctggggccagctctaccgcctgagccccctgccccactccaggactcaccgtaccccgatggggtaacgtgacacaggccccacacgtcagaggccgctgtccccacggccactgcccgtgacccctggcccaaggcagctggagttggttcagttcaagttcattcttcctctggcccttgggggcttggggcccacctctgagtgaagggggctgtctgcccatccaccaatgtggagagggcgcccccggtgtggggtccagctctggacactgcttggcggccgggttcactttgagtttttaagttttctttgctgagcttttttggttgttctttttattttttgcctctttatgactatccagctctgagagacgggagtttggagttgcccgctttactttggttgggttggggggggcggcgggctgttttgttccttttcttttttaagagttgggttttcttttttaattatccaaacagtgggcagcttcctcccccacacccaagtatttgcacaatatttgtgcggggtatgggggtgggtttttaaatctcgtttctcttggacaagcacagggatctcgttctcctcattttttgggggtgtgtggggacttctcaggtcgtgtccccagccttctctgcagtcccttctgccctgccgggcccgtcgggaggcgccatggctcggatgaaccgcccggccccggtggaggtgagctacaaacacatgcgcttcctcatcacccacaaccccaccaacgccacgctcagcaccttcattgaggacctgaagaagtacggggctaccactgtggtgcgtgtgtgtgaagtgacctatgacaaaacgccgctggagaaggatggcatcaccgttgtggactggccgtttgacgatggggcgcccccgcccggcaaggtagtggaagactggctgagcctggtgaaggccaagttctgtgaggcccccggcagctgcgtggctgtgcactgcgtggcgggcctgggccgggctccagtccttgtggcgctggcccttattgagagcgggatgaagtacgaggacgccatccagttcatccgccagaagcgccgcggagccatcaacagcaagcagctcacctacctggagaaataccggcccaaacagaggctgcggttcaaagacccacacacgcacaagacccggtgctgcgttatgtagctcaggaccttggctgggcctggtcgtcatgtaggtcaggaccttggctggacctggaggccctgcccagccctgctctgcccagcccagcaggggctccaggccttggctggccccacatcgccttttcctccccgacacctccgtgcacttgtgtccgaggagcgaggagcccctcgggccctgggtggcctctgggccctttctcctgtctccgccactccctctggcggcgctggccgtggctctg
